United States Patent Application Publication US 2004/0234960 A1 - sequence listing, part 5

SEQ ID NO: 13514 - DNA, 528 bp, Artificial Sequence
  chemically treated genomic DNA (Homo sapiens) CpG-island No: 13514
  unsure (59, 93, 137)
aaatacctactttacgctactacgcgataataataaataactataattaaacttcgatntacaaacgtaactacaaaatactaacttcgactntactaacgaataaaccaaactaaatccgccaaaccgcgccattntaaattacgcgaccgaaaacgccgaacttctatcccaattactattaatactattacgcacgaacctaatcgcttacgaccccgacttacaccataaaattaccgctaacgctttacgaaacgacttacgatatcaccattacaaacgaaattacaaacgttatcgacgaaactataacaacgaactataacgcaaacgtcgattcgctaccttccaatacaccaaacgctaaaatcgttaatacgccgaaaaaaccgctactaattaccgacgcgccgatcgaatcttcgctttttaacgtcgaattactaaccgaaaaaatatcaccctacgaaccaaacactaaacttattcccgcgccaccgcttaaatcgaaaaatacaaacaaaa

SEQ ID NO: 13515 - DNA, 528 bp, Artificial Sequence
  chemically treated genomic DNA (Homo sapiens) CpG-island No: 13515
  unsure (59, 93, 137)
agatgtttgttttacgttattgcgcggtagtaataaatgattgtaattgggtttcggtntgtaaacgtggttgtaaggtattggtttcggttntgttggcgaatgggttaagttggattcgttagatcgcgttattntgagttacgcgatcggggacgtcgaatttttgttttagttgttgttggtattgttgcgtacgagtttgatcgtttacggtttcgatttgtattataaagttgtcgttggcgttttgcgagacggtttgcggtgttattattgtaggcgaggttgtaggcgttgtcgacggagttgtaataacgggttgtggcgtaggcgtcggttcgttgttttttagtatattaggcgttaaggtcgttggtgcgtcgaggaaatcgttattggttatcggcgcgtcggtcggattttcgttttttagcgtcgaattattgatcggaagaatgttattttgcgggttagatattgaatttgttttcgcgttatcgtttaaatcgggaggtgtaggtaggg

SEQ ID NO: 13516 - DNA, 528 bp, Artificial Sequence
  chemically treated genomic DNA (Homo sapiens) CpG-island No: 13516
  unsure (392, 436, 470)
ccctacctacacctcccgatttaaacgataacgcgaaaacaaattcaatatctaacccgcaaaataacattcttccgatcaataattcgacgctaaaaaacgaaaatccgaccgacgcgccgataaccaataacgatttcctcgacgcaccaacgaccttaacgcctaatatactaaaaaacaacgaaccgacgcctacgccacaacccgttattacaactccgtcgacaacgcctacaacctcgcctacaataataacaccgcaaaccgtctcgcaaaacgccaacgacaactttataatacaaatcgaaaccgtaaacgatcaaactcgtacgcaacaataccaacaacaactaaaacaaaaattcgacgtccccgatcgcgtaactcanaataacgcgatctaacgaatccaacttaacccattcgccaacanaaccgaaaccaataccttacaaccacgtttacanaccgaaacccaattacaatcatttattactaccgcgcaataacgtaaaacaaacatct

SEQ ID NO: 13517 - DNA, 563 bp, Artificial Sequence
  chemically treated genomic DNA (Homo sapiens) CpG-island No: 13517
  unsure (513)
cgatcgttacgatcgtagatgatttttttattattatcgcgttagggttagtttttgttattcgtagtgtttcggtaatcgcgtcgtcggagttgacgttatagaatattttttttcgtatcgttagttcgcgtatggtgtttttcgtatcgcgttgatgaatatttagtattttatttattagagaagcgttgaaaattttcggtagatatttcgtaggttagcggcgaatgtcgggaatgttgttgttttttttcggttgtaggtcgataatggttatcggtttggattgttcgcgtataaagcgtgagacgtcggtgatagtgtcggtcgtttttatgttggagataaaatgagtgatgcgttcgtcggtttgttgttagattttcggtttagtggtggtgtaatgcgtataagggttatcgggattattgaattgatcgagtagttttttttcgttacgattcgttatttttagcgttagatcgcgcgtattttttatgttttgttttntggtgataagaattagtttcgtattataagtacgtatcgtcgtacggggt

SEQ ID NO: 13518 - DNA, 563 bp, Artificial Sequence
  chemically treated genomic DNA (Homo sapiens) CpG-island No: 13518
  unsure (51)
accccgtacgacgatacgtacttataatacgaaactaattcttatcaccanaaaacaaaacataaaaaatacgcgcgatctaacgctaaaaataacgaatcgtaacgaaaaaaaactactcgatcaattcaataatcccgataacccttatacgcattacaccaccactaaaccgaaaatctaacaacaaaccgacgaacgcatcactcattttatctccaacataaaaacgaccgacactatcaccgacgtctcacgctttatacgcgaacaatccaaaccgataaccattatcgacctacaaccgaaaaaaaacaacaacattcccgacattcgccgctaacctacgaaatatctaccgaaaattttcaacgcttctctaataaataaaatactaaatattcatcaacgcgatacgaaaaacaccatacgcgaactaacgatacgaaaaaaaatattctataacgtcaactccgacgacgcgattaccgaaacactacgaataacaaaaactaaccctaacgcgataataataaaaaaatcatctacgatcgtaacgatcg

SEQ ID NO: 13519 - DNA, 563 bp, Artificial Sequence
  chemically treated genomic DNA (Homo sapiens) CpG-island No: 13519
  unsure (51)
atttcgtgcggcgatgcgtgtttatggtgcggaattgatttttgttattanagagtagggtatgaaaggtgcgcgcgatttggcgttggagatggcgaatcgtggcgaaggaaagttgttcgattagtttaataatttcgataatttttatgcgtattatattattattgggtcggaaatttggtagtaaatcggcgggcgtattatttattttgtttttagtatggggacgatcggtattattatcggcgttttacgttttatgcgcgaataatttaaatcggtgattattgtcggtttgtaatcggaagagggtagtagtattttcggtattcgtcgttggtttacggaatatttgtcggggatttttaacgtttttttggtggatgaggtgttggatatttattagcgcgatgcggaaaatattatgcgcgaattggcggtgcgggaaggaatattttgtggcgttagtttcggcggcgcggttgtcggagtattgcgggtggtaaaagttaattttgacgcggtggtggtagaaagattatttgcgatcgtggcgatcg

SEQ ID NO: 13520 - DNA, 563 bp, Artificial Sequence
  chemically treated genomic DNA (Homo sapiens) CpG-island No: 13520
  unsure (513)
cgatcgccacgatcgcaaataatctttctaccaccaccgcgtcaaaattaacttttaccacccgcaatactccgacaaccgcgccgccgaaactaacgccacaaaatattccttcccgcaccgccaattcgcgcataatattttccgcatcgcgctaataaatatccaacacctcatccaccaaaaaaacgttaaaaatccccgacaaatattccgtaaaccaacgacgaataccgaaaatactactaccctcttccgattacaaaccgacaataatcaccgatttaaattattcgcgcataaaacgtaaaacgccgataataataccgatcgtccccatactaaaaacaaaataaataatacgcccgccgatttactaccaaatttccgacccaataataatataatacgcataaaaattatcgaaattattaaactaatcgaacaactttccttcgccacgattcgccatctccaacgccaaatcgcgcgcacctttcataccctactctntaataacaaaaatcaattccgcaccataaacacgcatcgccgcacgaaat

SEQ ID NO: 13521 - DNA, 751 bp, Artificial Sequence
  chemically treated genomic DNA (Homo sapiens) CpG-island No: 13521
gaaacgtatagaaacgagataaagtacgatagataagcgtataaacgattagcgagcgaagatttagaaaacgggacggaagcgatagattcgagtatagggcgagtcgacgaggaataagcgtcgagggaggacggaggagaaagcgtcggttttggtaggacgaggcgtaagcgcgagttagagacggagtatcgagtatcggacgaaaggaggagataggagtaggcgaggtcggagaatgcgaatagaagagcgatcgcgtgagtatacgatatagagagaataagcgggtaagtagcgtcgataggagtagtagatatgcgaaacgatcgacgtaggcgagagagagggggaggagatagagggagagtacggaagcgcgatttagtagatagtaagaatcgagatcgttagatataaagtacgcggagacggatagtatagtaggcggtaacggtacggagaaagcgtagtatagtaagtaacgagagagaagttggcgaagattgcgaagggggagagtcggaggtcgatagtaagaaatagcgagcgatattagcgtcgttgataggataggcgagagagcgagaggaaggatcgattagagggagagcgagagcgcgttagagagttaggcgagagttatgtttagacgagacgagagcggatcgcgcgttaagtcgaacgttagcgagagcggacggcgaaagttagttagcggaagtgtagttttagttatttgggaggt

SEQ ID NO: 13522 - DNA, 751 bp, Artificial Sequence
  chemically treated genomic DNA (Homo sapiens) CpG-island No: 13522
acctcccaaataactaaaactacacttccgctaactaactttcgccgtccgctctcgctaacgttcgacttaacgcgcgatccgctctcgtctcgtctaaacataactctcgcctaactctctaacgcgctctcgctctccctctaatcgatccttcctctcgctctctcgcctatcctatcaacgacgctaatatcgctcgctatttcttactatcgacctccgactctcccccttcgcaatcttcgccaacttctctctcgttacttactatactacgctttctccgtaccgttaccgcctactatactatccgtctccgcgtactttatatctaacgatctcgattcttactatctactaaatcgcgcttccgtactctccctctatctcctccccctctctctcgcctacgtcgatcgtttcgcatatctactactcctatcgacgctacttacccgcttattctctctatatcgtatactcacgcgatcgctcttctattcgcattctccgacctcgcctactcctatctcctcctttcgtccgatactcgatactccgtctctaactcgcgcttacgcctcgtcctaccaaaaccgacgctttctcctccgtcctccctcgacgcttattcctcgtcgactcgccctatactcgaatctatcgcttccgtcccgttttctaaatcttcgctcgctaatcgtttatacgcttatctatcgtactttatctcgtttctatacgtttc

SEQ ID NO: 13523 - DNA, 751 bp, Artificial Sequence
  chemically treated genomic DNA (Homo sapiens) CpG-island No: 13523
gttttttaagtagttgaaattgtattttcgttggttggttttcgtcgttcgttttcgttgacgttcggtttggcgcgcggttcgttttcgtttcgtttgggtatggttttcgtttggttttttggcgcgttttcgttttttttttgatcggttttttttttcgttttttcgtttgttttgttagcggcgttggtatcgttcgttgttttttgttgtcggttttcggtttttttttttcgtagttttcgttagtttttttttcgttgtttgttgtgttgcgtttttttcgtgtcgttatcgtttgttgtgttgttcgttttcgcgtgttttgtgtttggcggtttcggtttttgttgtttgttgggtcgcgttttcgtattttttttttgttttttttttttttttttcgtttgcgtcggtcgtttcgtatgtttgttgtttttgtcggcgttgtttgttcgtttgttttttttatgtcgtgtgtttacgcggtcgtttttttgttcgtatttttcggtttcgtttgtttttgtttttttttttcgttcgatgttcggtgtttcgtttttgattcgcgtttgcgtttcgttttgttagggtcggcgttttttttttcgttttttttcggcgtttgtttttcgtcggttcgttttatgttcgagtttatcgttttcgtttcgttttttgggttttcgttcgttagtcgtttgtgcgtttgtttgtcgtattttgtttcgtttttgtacgtttt

SEQ ID NO: 13524 - DNA, 751 bp, Artificial Sequence
  chemically treated genomic DNA (Homo sapiens) CpG-island No: 13524
aaaacgtacaaaaacgaaacaaaatacgacaaacaaacgcacaaacgactaacgaacgaaaacccaaaaaacgaaacgaaaacgataaactcgaacataaaacgaaccgacgaaaaacaaacgccgaaaaaaaacgaaaaaaaaaacgccgaccctaacaaaacgaaacgcaaacgcgaatcaaaaacgaaacaccgaacatcgaacgaaaaaaaaaaacaaaaacaaacgaaaccgaaaaatacgaacaaaaaaacgaccgcgtaaacacacgacataaaaaaaacaaacgaacaaacaacgccgacaaaaacaacaaacatacgaaacgaccgacgcaaacgaaaaaaaaaaaaaaaaaacaaaaaaaaaatacgaaaacgcgacccaacaaacaacaaaaaccgaaaccgccaaacacaaaacacgcgaaaacgaacaacacaacaaacgataacgacacgaaaaaaacgcaacacaacaaacaacgaaaaaaaaactaacgaaaactacgaaaaaaaaaaaccgaaaaccgacaacaaaaaacaacgaacgataccaacgccgctaacaaaacaaacgaaaaaacgaaaaaaaaaaccgatcaaaaaaaaaacgaaaacgcgccaaaaaaccaaacgaaaaccatacccaaacgaaacgaaaacgaaccgcgcgccaaaccgaacgtcaacgaaaacgaacgacgaaaaccaaccaacgaaaatacaatttcaactacttaaaaaac

SEQ ID NO: 13525 - DNA, 1090 bp, Artificial Sequence
  chemically treated genomic DNA (Homo sapiens) CpG-island No: 13525
  unsure (104, 137..)
agttcgcgtagcggattgtagatgggttggtcgatgcgtagtcggttgtttattttaaggtagaaggtcgtttttaatatgttggtttagtcgaggggattatncgaagggttcgtagtcgtatacgtttaaggttnnncgttattaaataaagatataatatatagttattttatatatattacgattatattatatcgcgatatataataattagtattataatatattaacgcgacgggtaggggatcgtagcgtacgcgagagcgggcggcgacgcgggaggatagcgagagagcgtagaagggtaagaacgcgggtgtaaattcgtcgatagggggcgaagcgtcgagtacggagtaagagtagggcgtcgaacgggtagatataggagcgggggaatagagtacgcgaggtagtagaacggcggggtagtagcggcggtacgtagagagtagagtcgttagggtagtacgcgatagtaagatcggacgacgaacggcggacgcgcggacgcggatagtaagtaggcgcgagagagacggggcgagggcgtcgtcgcgttaacggggacgcgcggcggatcgagcgcgttagtcgtcgcggggcgattacgcgattaagacgtattatcgcgatagcggtttaatcggtcggtacggacgcggcgaagcgtcggttagtacgggacggcgtaggtacgcgtacgatatagttaacgagagacgtatatagacgtaggacgacgaacggcgaataggttatatataattaaacgcgtagtagtattaacgaatagtacgttattaagttcgagacgggatacgggtaggagagtaagtcgcgaagtagtaggatacgataaacgtaggtattgggtagaaggcgtagtcgataataaagcgacgagtaacgatatatagcgttatataggtattagacgatacgtaatagaggggtcgtaggtcgtttacggaatttatatcgaggcgatcgggagagatagtgaagagagggcgggatcgcgggattacggaaattaaagaataaaaagtaatcgtaagaagtaattttttatagataaggatgt

SEQ ID NO: 13526 - DNA, 1090 bp, Artificial Sequence
  chemically treated genomic DNA (Homo sapiens) CpG-island No: 13526
  unsure (952..953, 987)
acatccttatctataaaaaattacttcttacgattactttttattctttaatttccgtaatcccgcgatcccgccctctcttcactatctctcccgatcgcctcgatataaattccgtaaacgacctacgacccctctattacgtatcgtctaatacctatataacgctatatatcgttactcgtcgctttattatcgactacgccttctacccaatacctacgtttatcgtatcctactacttcgcgacttactctcctacccgtatcccgtctcgaacttaataacgtactattcgttaatactactacgcgtttaattatatataacctattcgccgttcgtcgtcctacgtctatatacgtctctcgttaactatatcgtacgcgtacctacgccgtcccgtactaaccgacgcttcgccgcgtccgtaccgaccgattaaaccgctatcgcgataatacgtcttaatcgcgtaatcgccccgcgacgactaacgcgctcgatccgccgcgcgtccccgttaacgcgacgacgccctcgccccgtctctctcgcgcctacttactatccgcgtccgcgcgtccgccgttcgtcgtccgatcttactatcgcgtactaccctaacgactctactctctacgtaccgccgctactaccccgccgttctactacctcgcgtactctattcccccgctcctatatctacccgttcgacgccctactcttactccgtactcgacgcttcgccccctatcgacgaatttacacccgcgttcttacccttctacgctctctcgctatcctcccgcgtcgccgcccgctctcgcgtacgctacgatcccctacccgtcgcgttaatatattataatactaattattatatatcgcgatataatataatcgtaatatatataaaataactatatattatatctttatttaataacgnnnaaccttaaacgtatacgactacgaacccttcgnataatcccctcgactaaaccaacatattaaaaacgaccttctaccttaaaataaacaaccgactacgcatcgaccaacccatctacaatccgctacgcgaact

SEQ ID NO: 13527 - DNA, 1090 bp, Artificial Sequence
  chemically treated genomic DNA (Homo sapiens) CpG-island No: 13527
  unsure (952..953, 987)
gtatttttatttataaggagttgttttttacggttattttttgttttttggttttcgtggtttcgcggtttcgttttttttttattgtttttttcgatcgtttcggtgtaggtttcgtgggcggtttgcgatttttttgttgcgtgtcgtttggtgtttgtgtgacgttgtgtgtcgttgttcgtcgttttgttgtcggttgcgttttttgtttagtgtttgcgtttgtcgtgttttgttgtttcgcggtttgtttttttgttcgtgtttcgtttcgggtttggtggcgtgttgttcgttggtgttgttgcgcgtttggttatgtgtggtttgttcgtcgttcgtcgttttgcgtttgtgtgcgtttttcgttggttgtgtcgtgcgcgtgtttgcgtcgtttcgtgttggtcggcgtttcgtcgcgttcgtgtcggtcggttgggtcgttgtcgcggtggtgcgttttggtcgcgtgatcgtttcgcggcggttggcgcgttcggttcgtcgcgcgttttcgttgacgcggcggcgttttcgtttcgtttttttcgcgtttgtttgttgttcgcgttcgcgcgttcgtcgttcgtcgttcggttttgttgtcgcgtgttgttttggcgattttgttttttgcgtgtcgtcgttgttgtttcgtcgttttgttgtttcgcgtgttttgttttttcgtttttgtatttgttcgttcggcgttttgtttttgtttcgtgttcggcgtttcgttttttgtcggcgggtttgtattcgcgtttttgtttttttgcgttttttcgttgttttttcgcgtcgtcgttcgttttcgcgtacgttgcggttttttgttcgtcgcgttggtgtgttgtggtgttggttgttgtgtgtcgcggtgtggtgtggtcgtggtgtgtgtggggtggttgtgtgttgtgtttttgtttggtggcgnnnggttttaggcgtatgcggttgcggatttttcgngtgattttttcggttgggttagtatgttggagacgattttttgttttgggataggtagtcgattgcgtatcggttagtttatttgtagttcgttgcgcgagtt

SEQ ID NO: 13528 - DNA, 1090 bp, Artificial Sequence
  chemically treated genomic DNA (Homo sapiens) CpG-island No: 13528
  unsure (104, 137..)
aactcgcgcaacgaactacaaataaactaaccgatacgcaatcgactacctatcccaaaacaaaaaatcgtctccaacatactaacccaaccgaaaaaatcacncgaaaaatccgcaaccgcatacgcctaaaaccnnncgccaccaaacaaaaacacaacacacaaccaccccacacacaccacgaccacaccacaccgcgacacacaacaaccaacaccacaacacaccaacgcgacgaacaaaaaaccgcaacgtacgcgaaaacgaacgacgacgcgaaaaaacaacgaaaaaacgcaaaaaaacaaaaacgcgaatacaaacccgccgacaaaaaacgaaacgccgaacacgaaacaaaaacaaaacgccgaacgaacaaatacaaaaacgaaaaaacaaaacacgcgaaacaacaaaacgacgaaacaacaacgacgacacgcaaaaaacaaaatcgccaaaacaacacgcgacaacaaaaccgaacgacgaacgacgaacgcgcgaacgcgaacaacaaacaaacgcgaaaaaaacgaaacgaaaacgccgccgcgtcaacgaaaacgcgcgacgaaccgaacgcgccaaccgccgcgaaacgatcacgcgaccaaaacgcaccaccgcgacaacgacccaaccgaccgacacgaacgcgacgaaacgccgaccaacacgaaacgacgcaaacacgcgcacgacacaaccaacgaaaaacgcacacaaacgcaaaacgacgaacgacgaacaaaccacacataaccaaacgcgcaacaacaccaacgaacaacacgccaccaaacccgaaacgaaacacgaacaaaaaaacaaaccgcgaaacaacaaaacacgacaaacgcaaacactaaacaaaaaacgcaaccgacaacaaaacgacgaacaacgacacacaacgtcacacaaacaccaaacgacacgcaacaaaaaaatcgcaaaccgcccacgaaacctacaccgaaacgatcgaaaaaaacaataaaaaaaaaacgaaaccgcgaaaccacgaaaaccaaaaaacaaaaaataaccgtaaaaaacaactccttataaataaaaatac

SEQ ID NO: 13529 - DNA, 698 bp, Artificial Sequence
  chemically treated genomic DNA (Homo sapiens) CpG-island No: 13529
gttttcgatgtaggttatcggtgcggattgatttttttttttcgtcgtgggtggttacgcgcggttttcggttgcgttcgttttttggggagagtacgttttcggtagcggtagaatcgatcgtttattaatatacgaacgagaagacgaatattcgagagacgttttaatagcgattaaatataagatacgaatcgattaataatatttataacgaaattaagtatatatatagataattttcgattagttttaattttatattatcgtatagatatatattatatttaataaataatacggcgatattttacgattatattacgtttatatttataagtacgcgtcgtttaatcggatatagtattcggtattttaagtttagtacgaagtttaatacgagtatatagataatatataggatagttatcgcgtttcgatttttaatatagttatttcgcgcgatttcgtaattagtagattttaaacgattaaaaattataagcggataaatcgaatacgttattagtacgacgtttattttcgatcggacgacgtaacgtatcgaattttgatcggtttgtattttgtttgtgcgttggagcggtattaaaacgaacgttagtcgattatttgttttcggattagaacgcgattgttattattaattagttcgttattgagcgcgatgttttaaa

SEQ ID NO: 13530 - DNA, 698 bp, Artificial Sequence
  chemically treated genomic DNA (Homo sapiens) CpG-island No: 13530
tttaaaacatcgcgctcaataacgaactaattaataataacaatcgcgttctaatccgaaaacaaataatcgactaacgttcgttttaataccgctccaacgcacaaacaaaatacaaaccgatcaaaattcgatacgttacgtcgtccgatcgaaaataaacgtcgtactaataacgtattcgatttatccgcttataatttttaatcgtttaaaatctactaattacgaaatcgcgcgaaataactatattaaaaatcgaaacgcgataactatcctatatattatctatatactcgtattaaacttcgtactaaacttaaaataccgaatactatatccgattaaacgacgcgtacttataaatataaacgtaatataatcgtaaaatatcgccgtattatttattaaatataatatatatctatacgataatataaaattaaaactaatcgaaaattatctatatatatacttaatttcgttataaatattattaatcgattcgtatcttatatttaatcgctattaaaacgtctctcgaatattcgtcttctcgttcgtatattaataaacgatcgattctaccgctaccgaaaacgtactctccccaaaaaacgaacgcaaccgaaaaccgcgcgtaaccacccacgacgaaaaaaaaaaatcaatccgcaccgataacctacatcgaaaac

SEQ ID NO: 13531 - DNA, 698 bp, Artificial Sequence
  chemically treated genomic DNA (Homo sapiens) CpG-island No: 13531
tttaaaatatcgcgtttaatggcgagttgattaatagtggtaatcgcgttttggttcgagagtaaatgatcggttggcgttcgttttgatgtcgttttagcgtataggtaaaatataaatcgattagggttcggtgcgttgcgtcgttcggtcgggggtgggcgtcgtgttggtggcgtgttcggtttgttcgtttgtggtttttggtcgtttggagtttgttggttgcggagtcgcgcggggtgattgtgttggaggtcgggacgcggtgattgttttgtgtgttgtttgtgtgttcgtgttgggtttcgtgttgggtttggggtgtcgggtgttgtgttcggttgggcggcgcgtgtttgtgagtatgggcgtgatgtggtcgtggggtgtcgtcgtgttgtttgttgagtgtggtgtgtgtttgtgcggtggtgtggagttggggttggtcgggggttgtttgtgtgtgtgtttggtttcgttgtgagtgttgttggtcggttcgtgttttgtgtttggtcgttgttggggcgtttttcgggtgttcgttttttcgttcgtgtattagtgagcggtcggttttgtcgttgtcgagagcgtgttttttttagggggcggacgtagtcggaaatcgcgcgtggttatttacgacgggaaggagggattagttcgtatcggtagtttgtatcggagat

SEQ ID NO: 13532 - DNA, 698 bp, Artificial Sequence
  chemically treated genomic DNA (Homo sapiens) CpG-island No: 13532
atctccgatacaaactaccgatacgaactaatccctccttcccgtcgtaaataaccacgcgcgatttccgactacgtccgccccctaaaaaaaacacgctctcgacaacgacaaaaccgaccgctcactaatacacgaacgaaaaaacgaacacccgaaaaacgccccaacaacgaccaaacacaaaacacgaaccgaccaacaacactcacaacgaaaccaaacacacacacaaacaacccccgaccaaccccaactccacaccaccgcacaaacacacaccacactcaacaaacaacacgacgacaccccacgaccacatcacgcccatactcacaaacacgcgccgcccaaccgaacacaacacccgacaccccaaacccaacacgaaacccaacacgaacacacaaacaacacacaaaacaatcaccgcgtcccgacctccaacacaatcaccccgcgcgactccgcaaccaacaaactccaaacgaccaaaaaccacaaacgaacaaaccgaacacgccaccaacacgacgcccacccccgaccgaacgacgcaacgcaccgaaccctaatcgatttatattttacctatacgctaaaacgacatcaaaacgaacgccaaccgatcatttactctcgaaccaaaacgcgattaccactattaatcaactcgccattaaacgcgatattttaaa

SEQ ID NO: 13533 - DNA, 768 bp, Artificial Sequence
  chemically treated genomic DNA (Homo sapiens) CpG-island No: 13533
  unsure (189)
ttttttagggcggttattttttaagcgtttggtacgcgttattttttaaagttgagtttcgttaagggggcgttattaaaagggttattcgtaatattttttaggtcgtgagtttattatgaatttagataaatacgcgattataagggggtatattttttatttcgtgcgttgtttaatttttttttntatcgcgtattaatataatagaagaataagagataatatagcgagaagatatagataatatattacgataatcgtatacgtagattagaatagttatacgtagatagtaacgtataaataacgagaggaggggggagtagacgggtcggagaggagagaagcgaagggaggcggacggcgggagggcgtcggacgcgtagagggagcgggagatagggcggggatagggcgagaggagggggcgacggtataggcgacgggagtcgagggaggaggcgaagggaaataggggacgagggttagaaaacgggagcggggggagcggatatagcggcggagtaggggcgcgtagaagaggaagcgaaaggacgttagcgtagaggagagggcgggaggataagataaaaacggaataggagcgcgatatcgaacgtcgagaggggttcgtacggaggtacgaggagtagagcgaaaagggcggcggataggaagagagattcgggacgattagaggttaggagagagacgagaagaggacgaatagggagtataataggaggggaagaggagattagttat

SEQ ID NO: 13534 - DNA, 768 bp, Artificial Sequence
  chemically treated genomic DNA (Homo sapiens) CpG-island No: 13534
  unsure (580)
ataactaatctcctcttcccctcctattatactccctattcgtcctcttctcgtctctctcctaacctctaatcgtcccgaatctctcttcctatccgccgcccttttcgctctactcctcgtacctccgtacgaacccctctcgacgttcgatatcgcgctcctattccgtttttatcttatcctcccgccctctcctctacgctaacgtcctttcgcttcctcttctacgcgcccctactccgccgctatatccgctccccccgctcccgttttctaaccctcgtcccctatttcccttcgcctcctccctcgactcccgtcgcctataccgtcgccccctcctctcgccctatccccgccctatctcccgctccctctacgcgtccgacgccctcccgccgtccgcctcccttcgcttctctcctctccgacccgtctactcccccctcctctcgttatttatacgttactatctacgtataactattctaatctacgtatacgattatcgtaatatattatctatatcttctcgctatattatctcttattcttctattatattaatacgcgatanaaaaaaaaattaaacaacgcacgaaataaaaaatatacccccttataatcgcgtatttatctaaattcataataaactcacgacctaaaaaatattacgaataacccttttaataacgcccccttaacgaaactcaactttaaaaaataacgcgtaccaaacgcttaaaaaataaccgccctaaaaaa

SEQ ID NO: 13535 - DNA, 768 bp, Artificial Sequence
  chemically treated genomic DNA (Homo sapiens) CpG-island No: 13535
  unsure (580)
gtggttggtttttttttttttttttgttgtgttttttgttcgtttttttttcgttttttttttggtttttggtcgtttcgagtttttttttttgttcgtcgtttttttcgttttgtttttcgtgttttcgtgcgggtttttttcggcgttcggtgtcgcgtttttgtttcgtttttattttgttttttcgtttttttttttgcgttgacgttttttcgtttttttttttgcgcgtttttgtttcgtcgttgtgttcgtttttttcgttttcgttttttggttttcgttttttgttttttttcgttttttttttcggttttcgtcgtttgtgtcgtcgtttttttttttcgttttgttttcgttttgtttttcgttttttttgcgcgttcggcgttttttcgtcgttcgttttttttcgtttttttttttttcggttcgtttgttttttttttttttcgttgtttgtgcgttgttgtttgcgtgtgattgttttggtttgcgtgtgcggttgtcgtggtgtgttgtttgtgttttttcgttgtgttgttttttgtttttttgttgtgttggtgcgcggtgnagaaagagattaggtagcgtacgagatggggagtatgtttttttgtggtcgcgtgtttgtttgggtttatggtagatttacgatttggaaggtgttacggatggtttttttggtaacgtttttttggcggaatttagttttaaagagtggcgcgtgttaaacgtttagaaggtggtcgttttaaggag

SEQ ID NO: 13536 - DNA, 768 bp, Artificial Sequence
  chemically treated genomic DNA (Homo sapiens) CpG-island No: 13536
  unsure (189)
ctccttaaaacgaccaccttctaaacgtttaacacgcgccactctttaaaactaaattccgccaaaaaaacgttaccaaaaaaaccatccgtaacaccttccaaatcgtaaatctaccataaacccaaacaaacacgcgaccacaaaaaaacatactccccatctcgtacgctacctaatctctttctncaccgcgcaccaacacaacaaaaaaacaaaaaacaacacaacgaaaaaacacaaacaacacaccacgacaaccgcacacgcaaaccaaaacaatcacacgcaaacaacaacgcacaaacaacgaaaaaaaaaaaaaacaaacgaaccgaaaaaaaaaaaaacgaaaaaaaacgaacgacgaaaaaacgccgaacgcgcaaaaaaaacgaaaaacaaaacgaaaacaaaacgaaaaaaaaaaacgacgacacaaacgacgaaaaccgaaaaaaaaaacgaaaaaaaacaaaaaacgaaaaccaaaaaacgaaaacgaaaaaaacgaacacaacgacgaaacaaaaacgcgcaaaaaaaaaaacgaaaaaacgtcaacgcaaaaaaaaaaacgaaaaaacaaaataaaaacgaaacaaaaacgcgacaccgaacgccgaaaaaaacccgcacgaaaacacgaaaaacaaaacgaaaaaaacgacgaacaaaaaaaaaaactcgaaacgaccaaaaaccaaaaaaaaaacgaaaaaaaaacgaacaaaaaacacaacaaaaaaaaaaaaaaaaaccaaccac

SEQ ID NO: 13537 - DNA, 648 bp, Artificial Sequence
  chemically treated genomic DNA (Homo sapiens) CpG-island No: 13537
gagaggaatacggaggggagagagcgaaaggatagacgcggagatagcgaggcgagaaataaagcgagagacgattcgagcgattcgagtagagtagagaacgagagaagggggatagacgggagagggcgagagaggataggagagggaatagagaagaaagcgagagcgacgacggttatcgacgaacgggataaatatatcgcgatatattcgaagagcgtataagatcgaaacgggtttacgacgacgtaagaggcgatagagtagagaggcgaggaggacgttagtagaaagcgagacgcggcgttgaggaggaggaaagatacgaaaaggcgataaaaaacgaataagcgataggagtacgagataagagtacggatttttaaagaacgatgagaagagtcgataagagagagagcggcgaagaagattaggagcgacgtggtcggcgacgcgagggcgtggagaggaggaggtaaaggagagaaaagggtgcgagcgtcgcgagaataagacgggcgggaaggaaacgaagggataatgcgacgaatagaagcgaggagggcgataggagtagggagtaggaagaggtataaggaggtgttaggagcggtattagatagcgattaaagtagagaggtaacg

SEQ ID NO: 13538 - DNA, 648 bp, Artificial Sequence
  chemically treated genomic DNA (Homo sapiens) CpG-island No: 13538
cgttacctctctactttaatcgctatctaataccgctcctaacacctccttatacctcttcctactccctactcctatcgccctcctcgcttctattcgtcgcattatcccttcgtttccttcccgcccgtcttattctcgcgacgctcgcacccttttctctcctttacctcctcctctccacgccctcgcgtcgccgaccacgtcgctcctaatcttcttcgccgctctctctcttatcgactcttctcatcgttctttaaaaatccgtactcttatctcgtactcctatcgcttattcgttttttatcgccttttcgtatctttcctcctcctcaacgccgcgtctcgctttctactaacgtcctcctcgcctctctactctatcgcctcttacgtcgtcgtaaacccgtttcgatcttatacgctcttcgaatatatcgcgatatatttatcccgttcgtcgataaccgtcgtcgctctcgctttcttctctattccctctcctatcctctctcgccctctcccgtctatcccccttctctcgttctctactctactcgaatcgctcgaatcgtctctcgctttatttctcgcctcgctatctccgcgtctatcctttcgctctctcccctccgtattcctctc

SEQ ID NO: 13539 - DNA, 648 bp, Artificial Sequence
  chemically treated genomic DNA (Homo sapiens) CpG-island No: 13539
cgttgtttttttgttttggtcgttgtttagtgtcgtttttggtatttttttgtgtttttttttgttttttgtttttgtcgtttttttcgtttttgttcgtcgtattgttttttcgtttttttttcgttcgttttgttttcgcggcgttcgtattttttttttttttttgtttttttttttttacgttttcgcgtcgtcggttacgtcgtttttggtttttttcgtcgtttttttttttgtcggttttttttatcgttttttgggggttcgtgtttttgtttcgtgtttttgtcgtttattcgttttttgtcgttttttcgtgtttttttttttttttagcgtcgcgtttcgttttttgttggcgtttttttcgtttttttgttttgtcgttttttgcgtcgtcgtgggttcgtttcggttttgtgcgtttttcgggtgtgtcgcggtgtgtttgtttcgttcgtcggtggtcgtcgtcgttttcgtttttttttttgtttttttttttgttttttttcgttttttttcgtttgttttttttttttcgttttttgttttgttcgggtcgttcgggtcgtttttcgttttgtttttcgtttcgttgttttcgcgtttgttttttcgttttttttttttcgtgtttttttt

SEQ ID NO: 13540 - DNA, 648 bp, Artificial Sequence
  chemically treated genomic DNA (Homo sapiens) CpG-island No: 13540
aaaaaaaacacgaaaaaaaaaaaacgaaaaaacaaacgcgaaaacaacgaaacgaaaaacaaaacgaaaaacgacccgaacgacccgaacaaaacaaaaaacgaaaaaaaaaaaacaaacgaaaaaaaacgaaaaaaaacaaaaaaaaaaacaaaaaaaaaaacgaaaacgacgacgaccaccgacgaacgaaacaaacacaccgcgacacacccgaaaaacgcacaaaaccgaaacgaacccacgacgacgcaaaaaacgacaaaacaaaaaaacgaaaaaaacgccaacaaaaaacgaaacgcgacgctaaaaaaaaaaaaaaacacgaaaaaacgacaaaaaacgaataaacgacaaaaacacgaaacaaaaacacgaacccccaaaaaacgataaaaaaaaccgacaaaaaaaaaaacgacgaaaaaaaccaaaaacgacgtaaccgacgacgcgaaaacgtaaaaaaaaaaaaacaaaaaaaaaaaaaaaatacgaacgccgcgaaaacaaaacgaacgaaaaaaaaacgaaaaaacaatacgacgaacaaaaacgaaaaaaacgacaaaaacaaaaaacaaaaaaaaacacaaaaaaataccaaaaacgacactaaacaacgaccaaaacaaaaaaacaacg

SEQ ID NO: 13541 - DNA, 746 bp, Artificial Sequence
  chemically treated genomic DNA (Homo sapiens) CpG-island No: 13541
tcgtacgggttcggttgcgtttgcgttggttggttgttcgtttgcgggttgtgttttgtggggttttgttttcgtgttgcgcgtgttcgagtttttcgtttggtttttgtcgcgcgtggttgtggtggggcgcgttttcgttacggggtcgtggggcgtgttgttttttcgttttgcggttttgtggcgcggtgttggttttttttcgtttttttttcggttcgttcggtcgttcgtgttggttgttttttcgtttttggtgtttcgtcgttttcggtcgttgtcgcgtacgtttcgttttttttgtttttttcgttagcgttttcgtcggtttttcgttttcgttgttcgtattttttcgtgttgttttgcgttgtcgtttgttttttttttggtcgtttttcgcgttttgcgttgttttttcgttgttcgtgtcgtagtcgcgttttgttcgttttcgtgttgtgtgttgtggtgtttgtgtgcgtttttcgtttggtttgttttgttcgtttttcgttttttttttttttcgggttcgttgttgcgcggttttgttttgtttgttttggttcgttttcggttcgcgtttgcgcgtattcgttttgcgtggttttgttgtttttcgttttttttcgttgtcgtcgattaggggaaagaaaatataataaggataatagagggtttttcgtgtgagatggagtatcgttcgtttgttgtggtatttcgttttattttttttttcg

SEQ ID NO: 13542 - DNA, 746 bp, Artificial Sequence
  chemically treated genomic DNA (Homo sapiens) CpG-island No: 13542
cgaaaaaaaaaataaaacgaaataccacaacaaacgaacgatactccatctcacacgaaaaaccctctattatccttattatattttctttcccctaatcgacgacaacgaaaaaaaacgaaaaacaacaaaaccacgcaaaacgaatacgcgcaaacgcgaaccgaaaacgaaccaaaacaaacaaaacaaaaccgcgcaacaacgaacccgaaaaaaaaaaaaaacgaaaaacgaacaaaacaaaccaaacgaaaaacgcacacaaacaccacaacacacaacacgaaaacgaacaaaacgcgactacgacacgaacaacgaaaaaacaacgcaaaacgcgaaaaacgaccaaaaaaaaaacaaacgacaacgcaaaacaacacgaaaaaatacgaacaacgaaaacgaaaaaccgacgaaaacgctaacgaaaaaaacaaaaaaaacgaaacgtacgcgacaacgaccgaaaacgacgaaacaccaaaaacgaaaaaacaaccaacacgaacgaccgaacgaaccgaaaaaaaaacgaaaaaaaaccaacaccgcgccacaaaaccgcaaaacgaaaaaacaacacgccccacgaccccgtaacgaaaacgcgccccaccacaaccacgcgcgacaaaaaccaaacgaaaaactcgaacacgcgcaacacgaaaacaaaaccccacaaaacacaacccgcaaacgaacaaccaaccaacgcaaacgcaaccgaacccgtacga

SEQ ID NO: 13543 - DNA, 746 bp, Artificial Sequence
  chemically treated genomic DNA (Homo sapiens) CpG-island No: 13543
cgagaggggaaatggggcggggtgttataataaacggacggtgttttattttatacgggggattttttgttgtttttgttgtgtttttttttttttgatcgacgatagcggaaaagggcgagagatagtaggattacgtaaagcgaatgcgcgtagacgcgaatcgagagcggattagagtaagtagaataagatcgcgtaataacgaattcgaagagaggaagaagcgaaagacggatagagtagattaggcgaaagacgtatatagatattataatatatagtacgagggcggataagacgcgattgcgatacgaatagcgagaggataacgtagagcgcgagaagcggttaagagaggggtaagcgatagcgtaggatagtacgagggggtgcgagtagcggaggcggagagtcgacgagagcgttggcgaggagggtagagagagcggaacgtgcgcggtagcgatcggaggcggcggagtattaaaggcgaggaagtagttagtacggacggtcgagcgagtcgaggagagagcggaggagagttagtatcgcgttataaggtcgtaaaacgaagagataatacgttttacgatttcgtagcgagggcgcgttttattataattacgcgcgataggggttaaacgaggaattcggatacgcgtaatacggaggtaaggttttataagatataattcgtaagcgaataattagttagcgtagacgtaatcgagttcgtacga

SEQ ID NO: 13544 - DNA, 746 bp, Artificial Sequence
  chemically treated genomic DNA (Homo sapiens) CpG-island No: 13544
tcgtacgaactcgattacgtctacgctaactaattattcgcttacgaattatatcttataaaaccttacctccgtattacgcgtatccgaattcctcgtttaacccctatcgcgcgtaattataataaaacgcgccctcgctacgaaatcgtaaaacgtattatctcttcgttttacgaccttataacgcgatactaactctcctccgctctctcctcgactcgctcgaccgtccgtactaactacttcctcgcctttaatactccgccgcctccgatcgctaccgcgcacgttccgctctctctaccctcctcgccaacgctctcgtcgactctccgcctccgctactcgcaccccctcgtactatcctacgctatcgcttacccctctcttaaccgcttctcgcgctctacgttatcctctcgctattcgtatcgcaatcgcgtcttatccgccctcgtactatatattataatatctatatacgtctttcgcctaatctactctatccgtctttcgcttcttcctctcttcgaattcgttattacgcgatcttattctacttactctaatccgctctcgattcgcgtctacgcgcattcgctttacgtaatcctactatctctcgcccttttccgctatcgtcgatcaaaaaaaaaaaaacacaacaaaaacaacaaaaaatcccccgtataaaataaaacaccgtccgtttattataacaccccgccccatttcccctctcg

SEQ ID NO: 13545 - DNA, 543 bp, Artificial Sequence
  chemically treated genomic DNA (Homo sapiens) CpG-island No: 13545
atcgcgatagatacgatcgagatagtaaaacgtagagcgcgggatatagagcgagattagcgacggtagagaatatcgagaattacgagcgatattatacgcgtaagtttattagtatttatataatattagagattacgtcgcgagttataatagattagacgatagtaattatcgaggtaaaagagattagtagatcgaatatacgaagaggaagacgattacggtttagagagtataagtagttatgagataatacgtaatttcgaataggcgaggtcgtatttaggtatatattatcgtatagttgtaacgtattatatagtgatacgattatatcgttagcgaagtatagaaggacggtatacgaattagtttgagatcggacgtttgtaaatgagaggagggtaagtgaagattagtaatatcgttatcgtacgcgtcgcgcgagtaatacgaagcgcgaatttagaatgttattgttatatagaacgattatgagagaaagaggacgaacgataatataaggtataaatggataat

SEQ ID NO: 13546 - DNA, 543 bp, Artificial Sequence
  chemically treated genomic DNA (Homo sapiens) CpG-island No: 13546
attatccatttataccttatattatcgttcgtcctctttctctcataatcgttctatataacaataacattctaaattcgcgcttcgtattactcgcgcgacgcgtacgataacgatattactaatcttcacttaccctcctctcatttacaaacgtccgatctcaaactaattcgtataccgtccttctatacttcgctaacgatataatcgtatcactatataatacgttacaactatacgataatatatacctaaatacgacctcgcctattcgaaattacgtattatctcataactacttatactctctaaaccgtaatcgtcttcctcttcgtatattcgatctactaatctcttttacctcgataattactatcgtctaatctattataactcgcgacgtaatctctaatattatataaatactaataaacttacgcgtataatatcgctcgtaattctcgatattctctaccgtcgctaatctcgctctatatcccgcgctctacgttttactatctcgatcgtatctatcgcgat

SEQ ID NO: 13547 - DNA, 543 bp, Artificial Sequence
  chemically treated genomic DNA (Homo sapiens) CpG-island No: 13547
gttgtttatttgtgttttatattgtcgttcgtttttttttttttatggtcgttttgtgtagtagtggtattttgagttcgcgtttcgtgttgttcgcgcggcgcgtgcggtagcggtgttgttggtttttatttattttttttttatttatagacgttcggttttagattagttcgtgtgtcgtttttttgtgtttcgttgacggtgtgatcgtgttattgtataatgcgttgtagttgtgcggtggtgtgtgtttgggtgcggtttcgtttgttcgaggttgcgtgttattttatgattatttgtgttttttaggtcgtggtcgttttttttttcgtgtgttcggtttgttggttttttttgtttcggtggttgttgtcgtttggtttgttgtgattcgcggcgtggtttttggtgttgtgtgggtgttggtgggtttgcgcgtgtggtgtcgttcgtgattttcggtgttttttgtcgtcgttggtttcgttttgtgtttcgcgttttgcgttttgttgtttcggtcgtgtttgtcgcgat

SEQ ID NO: 13548 - DNA, 543 bp, Artificial Sequence
  chemically treated genomic DNA (Homo sapiens) CpG-island No: 13548
atcgcgacaaacacgaccgaaacaacaaaacgcaaaacgcgaaacacaaaacgaaaccaacgacgacaaaaaacaccgaaaatcacgaacgacaccacacgcgcaaacccaccaacacccacacaacaccaaaaaccacgccgcgaatcacaacaaaccaaacgacaacaaccaccgaaacaaaaaaaaccaacaaaccgaacacacgaaaaaaaaaacgaccacgacctaaaaaacacaaataatcataaaataacacgcaacctcgaacaaacgaaaccgcacccaaacacacaccaccgcacaactacaacgcattatacaataacacgatcacaccgtcaacgaaacacaaaaaaacgacacacgaactaatctaaaaccgaacgtctataaataaaaaaaaaataaataaaaaccaacaacaccgctaccgcacgcgccgcgcgaacaacacgaaacgcgaactcaaaataccactactacacaaaacgaccataaaaaaaaaaaaacgaacgacaatataaaacacaaataaacaac

SEQ ID NO: 13549 - DNA, 877 bp, Artificial Sequence
  chemically treated genomic DNA (Homo sapiens) CpG-island No: 13549
atatataaatttcgatatattatatatattaacggcgatagaggacgcgattgattttagtttgacgtttcgtcgatatcgtttagcgcggagaggtacgtcgtaacgcggggatagagagcgaacggcggagcggttatagaattaaggtagtcgacgtacgataaggagttcgattaagcgaggatattacgagtaagaacgtacgatatagtaattatatatagagacgtagcgggtatatagtagaagtcgtattttagaggattcgttcggcgaagcgggcgcggtagtagggtatcgatcgcgttaacgatcgttcgtagcgtaagtaggcggcggttaagtgacggcgggtcgaggcggagggcggagtgatttgagtgatagggaggcgcggtatagcgggtgaacggtagaggagcgcgagcgaagacggggagacgacggatagaagacgagaggtcgggcggttgcgagtatagtatcggggatgagcggagaggcgtgattattatatatatatatatatttcgcgtcggtacgtagtatatagttcgatattattacgttagcgtatacgttatttatcgaataagatataatatatatagtcgaaatcgtaaataagcgagcgtagagtatacgttacgtagttttattagggaaagtacgttaaaacgacgtattagatagtttaaataggcgacgtaaagcgtatcgacgcgcgagttttcgttgataggtagtattaggcgggacgcgtataataagaatatagtatatcgatattatagacgatcgtagatatacgtatatcgtttattaggtagattatagttaggatacgatttagaacgattaggaattagattta

SEQ ID NO: 13550 - DNA, 877 bp, Artificial Sequence
  chemically treated genomic DNA (Homo sapiens) CpG-island No: 13550
taaatctaattcctaatcgttctaaatcgtatcctaactataatctacctaataaacgatatacgtatatctacgatcgtctataatatcgatatactatattcttattatacgcgtcccgcctaatactacctatcaacgaaaactcgcgcgtcgatacgctttacgtcgcctatttaaactatctaatacgtcgttttaacgtactttccctaataaaactacgtaacgtatactctacgctcgcttatttacgatttcgactatatatattatatcttattcgataaataacgtatacgctaacgtaataatatcgaactatatactacgtaccgacgcgaaatatatatatatatataataatcacgcctctccgctcatccccgatactatactcgcaaccgcccgacctctcgtcttctatccgtcgtctccccgtcttcgctcgcgctcctctaccgttcacccgctataccgcgcctccctatcactcaaatcactccgccctccgcctcgacccgccgtcacttaaccgccgcctacttacgctacgaacgatcgttaacgcgatcgataccctactaccgcgcccgcttcgccgaacgaatcctctaaaatacgacttctactatatacccgctacgtctctatatataattactatatcgtacgttcttactcgtaatatcctcgcttaatcgaactccttatcgtacgtcgactaccttaattctataaccgctccgccgttcgctctctatccccgcgttacgacgtacctctccgcgctaaacgatatcgacgaaacgtcaaactaaaatcaatcgcgtcctctatcgccgttaatatatataatatatcgaaatttatatat

SEQ ID NO: 13551 - DNA, 877 bp, Artificial Sequence
  chemically treated genomic DNA (Homo sapiens) CpG-island No: 13551
tgaatttggtttttggtcgttttggatcgtgttttggttgtagtttgtttagtgagcggtgtgcgtgtgtttgcggtcgtttgtgatgtcggtgtgttatgtttttgttgtgcgcgtttcgtttagtgttgtttgttagcgaggattcgcgcgtcggtgcgttttgcgtcgtttgtttaggttgtttgatgcgtcgttttggcgtgttttttttggtggggttgcgtagcgtgtgttttgcgttcgtttgtttgcggtttcggttgtgtgtgttgtgttttgttcggtgggtggcgtatgcgttggcgtagtggtgtcgagttgtgtattgcgtgtcggcgcggggtgtgtgtgtgtgtgtggtggttacgttttttcgtttattttcggtgttgtattcgtagtcgttcggtttttcgttttttgttcgtcgttttttcgttttcgttcgcgtttttttatcgtttattcgttgtgtcgcgtttttttgttatttaggttatttcgtttttcgtttcggttcgtcgttatttggtcgtcgtttgtttgcgttgcgggcggtcgttggcgcggtcgatgttttgttgtcgcgttcgtttcgtcgggcgggttttttggggtgcggtttttgttgtgtgttcgttgcgtttttgtgtgtggttgttgtgtcgtgcgtttttgttcgtggtgttttcgtttggtcgggttttttgtcgtgcgtcggttgttttggttttgtggtcgtttcgtcgttcgttttttgttttcgcgttgcggcgtgttttttcgcgttgggcggtgtcggcggggcgttaggttggggttagtcgcgttttttgtcgtcgttgatgtgtgtggtgtgtcggggtttgtgtgt

SEQ ID NO: 13552 - DNA, 877 bp, Artificial Sequence
  chemically treated genomic DNA (Homo sapiens) CpG-island No: 13552
acacacaaaccccgacacaccacacacatcaacgacgacaaaaaacgcgactaaccccaacctaacgccccgccgacaccgcccaacgcgaaaaaacacgccgcaacgcgaaaacaaaaaacgaacgacgaaacgaccacaaaaccaaaacaaccgacgcacgacaaaaaacccgaccaaacgaaaacaccacgaacaaaaacgcacgacacaacaaccacacacaaaaacgcaacgaacacacaacaaaaaccgcaccccaaaaaacccgcccgacgaaacgaacgcgacaacaaaacatcgaccgcgccaacgaccgcccgcaacgcaaacaaacgacgaccaaataacgacgaaccgaaacgaaaaacgaaataacctaaataacaaaaaaacgcgacacaacgaataaacgataaaaaaacgcgaacgaaaacgaaaaaacgacgaacaaaaaacgaaaaaccgaacgactacgaatacaacaccgaaaataaacgaaaaaacgtaaccaccacacacacacacacaccccgcgccgacacgcaatacacaactcgacaccactacgccaacgcatacgccacccaccgaacaaaacacaacacacacaaccgaaaccgcaaacaaacgaacgcaaaacacacgctacgcaaccccaccaaaaaaaacacgccaaaacgacgcatcaaacaacctaaacaaacgacgcaaaacgcaccgacgcgcgaatcctcgctaacaaacaacactaaacgaaacgcgcacaacaaaaacataacacaccgacatcacaaacgaccgcaaacacacgcacaccgctcactaaacaaactacaaccaaaacacgatccaaaacgaccaaaaaccaaattca

SEQ ID NO: 13553 - DNA, 1035 bp, Artificial Sequence
  chemically treated genomic DNA (Homo sapiens) CpG-island No: 13553
  unsure (199..200, 202..)
ttcgttttagtagtcgattaggtcggtttattcgtattcgtttcgggaaggtttttttggtacgcgtttatttattatgtttcgttttcgaagtggtagttattcgcgcgattttcgttatttcgtttatatttcggcgcgagaggggggatttttttcggggatgtcggttttttgtttcgttggtttttattttttnngnntgttgtcgacgtagagagcgagagattaagggtcgcggaggggcgagtattaggggagaaggtagggagagaggaggatagcgtcgtagcgagcgcggcgcgagaatagtaggagagttagcggtataggtgaaggataggatgagtagcgcggtcggaaggcgagtaacggcgaggttagttagtgatagggcgcgacgaggttacgggcggattcgcgagaacgcgaggtcgcgttagtaggtgaagcgatcgaggtacgggcgggggcgcgagcgacgcgtcgggtacgggaggcgggcgcggtaagagcgcgagtgcgagtcgggttcgagagagaaagtaggcgagcgtaggttacgagcgttaaggaggtagagggagaaggaagcggcgcgacgttatagtacgatcgggcggggatcgagaaggagggcgagcgagcgaagaagacggtagcggacgtaggggaacggcgatcgtcgaggcgcggtagatagagttcggcgagacgcgacgaaggcgttagaaggacggattagtcgtgtacgtttagtagagatcgatagaacgcgtagtttagatcgtttatcggacgtttggtattaagtattaggttttggtgatgttgagttagtagaagtcgttgagttttgtatcgttgatagcgtagtacgattagagacggtacgaaagtagaatagagttgcgttttagttgacgagcgtacgattaaggttaaattataagggggatttgttagttttgaacgtatatgattgcgtaggaaacgtatttcgtttcggaggagaattagagtattatataagta

SEQ ID NO: 13554 - DNA, 1035 bp, Artificial Sequence
  chemically treated genomic DNA (Homo sapiens) CpG-island No: 13554
  unsure (833..834, 836..)
tacttatataatactctaattctcctccgaaacgaaatacgtttcctacgcaatcatatacgttcaaaactaacaaatcccccttataatttaaccttaatcgtacgctcgtcaactaaaacgcaactctattctactttcgtaccgtctctaatcgtactacgctatcaacgatacaaaactcaacgacttctactaactcaacatcaccaaaacctaatacttaataccaaacgtccgataaacgatctaaactacgcgttctatcgatctctactaaacgtacacgactaatccgtccttctaacgccttcgtcgcgtctcgccgaactctatctaccgcgcctcgacgatcgccgttcccctacgtccgctaccgtcttcttcgctcgctcgccctccttctcgatccccgcccgatcgtactataacgtcgcgccgcttccttctccctctacctccttaacgctcgtaacctacgctcgcctactttctctctcgaacccgactcgcactcgcgctcttaccgcgcccgcctcccgtacccgacgcgtcgctcgcgcccccgcccgtacctcgatcgcttcacctactaacgcgacctcgcgttctcgcgaatccgcccgtaacctcgtcgcgccctatcactaactaacctcgccgttactcgccttccgaccgcgctactcatcctatccttcacctataccgctaactctcctactattctcgcgccgcgctcgctacgacgctatcctcctctctccctaccttctcccctaatactcgcccctccgcgacccttaatctctcgctctctacgtcgacaacanncnnaaaaaataaaaaccaacgaaacaaaaaaccgacatccccgaaaaaaatcccccctctcgcgccgaaatataaacgaaataacgaaaatcgcgcgaataactaccacttcgaaaacgaaacataataaataaacgcgtaccaaaaaaaccttcccgaaacgaatacgaataaaccgacctaatcgactactaaaacgaa

SEQ ID NO: 13555 - DNA, 1035 bp, Artificial Sequence
  chemically treated genomic DNA (Homo sapiens) CpG-island No: 13555
  unsure (833..834, 836..)
tatttgtatgatgttttgattttttttcgaggcgagatgcgttttttgcgtagttatgtgcgtttaagattgataggttttttttatggtttagttttagtcgtgcgttcgttagttgagacgtagttttgttttgttttcgtgtcgtttttggtcgtattgcgttgttaacggtgtagaatttagcgatttttattagtttaatattattagagtttggtgtttggtgttaggcgttcggtgagcggtttggattgcgcgttttgtcggtttttgttgagcgtatacgattgattcgtttttttggcgttttcgtcgcgtttcgtcgggttttgtttgtcgcgtttcggcggtcgtcgtttttttgcgttcgttgtcgtttttttcgttcgttcgttttttttttcggttttcgttcggtcgtgttgtggcgtcgcgtcgtttttttttttttttgtttttttggcgttcgtggtttgcgttcgtttgttttttttttcgggttcggttcgtattcgcgtttttgtcgcgttcgtttttcgtgttcggcgcgtcgttcgcgttttcgttcgtgtttcggtcgttttatttgttagcgcgatttcgcgttttcgcgggttcgttcgtggtttcgtcgcgttttattattggttggtttcgtcgttgttcgtttttcggtcgcgttgtttattttgttttttatttgtgtcgttggtttttttgttgttttcgcgtcgcgttcgttgcggcgttatttttttttttttttatttttttttttggtattcgttttttcgcggtttttagtttttcgttttttgcgtcgatagtanntnnagaagatagagattagcgaaataaggggtcggtattttcgaagagggttttttttttcgcgtcgaggtgtaagcgggatggcgaaggtcgcgcgggtagttattatttcgggagcgggatatgataggtgaacgcgtgttaggggaattttttcggaacgaatacgggtgggtcggtttaatcgattattggagcgag

SEQ ID NO: 13556 - DNA, 1035 bp, Artificial Sequence
  chemically treated genomic DNA (Homo sapiens) CpG-island No: 13556
  unsure (199..200, 202..)
ctcgctccaataatcgattaaaccgacccacccgtattcgttccgaaaaaattcccctaacacgcgttcacctatcatatcccgctcccgaaataataactacccgcgcgaccttcgccatcccgcttacacctcgacgcgaaaaaaaaaaccctcttcgaaaataccgaccccttatttcgctaatctctatcttctnnanntactatcgacgcaaaaaacgaaaaactaaaaaccgcgaaaaaacgaataccaaaaaaaaaaataaaaaaaaaaaaaaataacgccgcaacgaacgcgacgcgaaaacaacaaaaaaaccaacgacacaaataaaaaacaaaataaacaacgcgaccgaaaaacgaacaacgacgaaaccaaccaataataaaacgcgacgaaaccacgaacgaacccgcgaaaacgcgaaatcgcgctaacaaataaaacgaccgaaacacgaacgaaaacgcgaacgacgcgccgaacacgaaaaacgaacgcgacaaaaacgcgaatacgaaccgaacccgaaaaaaaaaacaaacgaacgcaaaccacgaacgccaaaaaaacaaaaaaaaaaaaaaacgacgcgacgccacaacacgaccgaacgaaaaccgaaaaaaaaaacgaacgaacgaaaaaaacgacaacgaacgcaaaaaaacgacgaccgccgaaacgcgacaaacaaaacccgacgaaacgcgacgaaaacgccaaaaaaacgaatcaatcgtatacgctcaacaaaaaccgacaaaacgcgcaatccaaaccgctcaccgaacgcctaacaccaaacaccaaactctaataatattaaactaataaaaatcgctaaattctacaccgttaacaacgcaatacgaccaaaaacgacacgaaaacaaaacaaaactacgtctcaactaacgaacgcacgactaaaactaaaccataaaaaaaacctatcaatcttaaacgcacataactacgcaaaaaacgcatctcgcctcgaaaaaaaatcaaaacatcatacaaata

SEQ ID NO: 13557 - DNA, 569 bp, Artificial Sequence
  chemically treated genomic DNA (Homo sapiens) CpG-island No: 13557
gggttcgtcggggtttttggtgcggtgttttggcgttgtgtttcgtatttttcggtttatgtgttgggttcggttcgttgtgggtcgtttttgttagttgtagggttgttcgggtttggtcgcgttttttgggcgttgtttcgcgggggtttgttcggtgtggtgttatttagttgtttacgttattcgtcgagtaacgttttgtcgtaatcgcgttgtttagtttggtgagtacgcgattagatatagttggggagggggagaagtttgcgatacgattatattgttatagtatttgttagtatggcgtttacgtttttcgtcgaattaacgttttgtcgtaatcgtttagattacgttagaggatgagttgtattgtattgttaatatacgtgcgcgggcgattattcggcgggtcggggcggggcggggcggcggggcggggaggggtttcggatatgcgattagtatggcgtttgtacgtatgaaaaggtggggattgtgtttcgaattatgttgtgaagggtaaacggggttttttgtttgattatttatgtgttataggattt

SEQ ID NO: 13558 - DNA, 569 bp, Artificial Sequence
  chemically treated genomic DNA (Homo sapiens) CpG-island No: 13558
aaatcctataacacataaataatcaaacaaaaaaccccgtttacccttcacaacataattcgaaacacaatccccaccttttcatacgtacaaacgccatactaatcgcatatccgaaacccctccccgccccgccgccccgccccgccccgacccgccgaataatcgcccgcgcacgtatattaacaatacaatacaactcatcctctaacgtaatctaaacgattacgacaaaacgttaattcgacgaaaaacgtaaacgccatactaacaaatactataacaatataatcgtatcgcaaacttctccccctccccaactatatctaatcgcgtactcaccaaactaaacaacgcgattacgacaaaacgttactcgacgaataacgtaaacaactaaataacaccacaccgaacaaacccccgcgaaacaacgcccaaaaaacgcgaccaaacccgaacaaccctacaactaacaaaaacgacccacaacgaaccgaacccaacacataaaccgaaaaatacgaaacacaacgccaaaacaccgcaccaaaaaccccgacgaaccc

SEQ ID NO: 13559 - DNA, 569 bp, Artificial Sequence
  chemically treated genomic DNA (Homo sapiens) CpG-island No: 13559
aaattttgtaatatataggtggttaggtaaggagtttcgtttgttttttatagtataattcgggatataatttttatttttttatgcgtataaacgttatattaatcgtatattcggggttttttttcgtttcgtcgtttcgtttcgtttcggttcgtcgggtaatcgttcgcgtacgtgtgttagtaatatagtataatttattttttagcgtggtttaggcggttacggtaaagcgttagttcggcgggaggcgtaggcgttatattagtaaatgttgtaatagtgtggtcgtgtcgtaagtttttttttttttttaattatatttaatcgcgtgtttattaggttaagtaacgcggttgcggtaaagcgttattcggcgggtggcgtaggtaattggatagtattatatcgagtaaattttcgcgggataacgtttaaaaggcgcggttaagttcgaatagttttgtaattaatagagacggtttataacgggtcgagtttaatatatgggtcggaagatgcgaaatataacgttaaagtatcgtattaagggtttcgacgagttt

SEQ ID NO: 13560 - DNA, 569 bp, Artificial Sequence
  chemically treated genomic DNA (Homo sapiens) CpG-island No: 13560
aaactcgtcgaaacccttaatacgatactttaacgttatatttcgcatcttccgacccatatattaaactcgacccgttataaaccgtctctattaattacaaaactattcgaacttaaccgcgccttttaaacgttatcccgcgaaaatttactcgatataatactatccaattacctacgccacccgccgaataacgctttaccgcaaccgcgttacttaacctaataaacacgcgattaaatataattaaaaaaaaaaaaaaacttacgacacgaccacactattacaacatttactaatataacgcctacgcctcccgccgaactaacgctttaccgtaaccgcctaaaccacgctaaaaaataaattatactatattactaacacacgtacgcgaacgattacccgacgaaccgaaacgaaacgaaacgacgaaacgaaaaaaaaccccgaatatacgattaatataacgtttatacgcataaaaaaataaaaattatatcccgaattatactataaaaaacaaacgaaactccttacctaaccacctatatattacaaaattt

SEQ ID NO: 13561 - DNA, 776 bp, Artificial Sequence
  chemically treated genomic DNA (Homo sapiens) CpG-island No: 13561
  unsure (632)
tatcgtcgtagcggtagcgtattttcggttttttcgcgtaacggtgcgttattattcggttcgggtgttgcgcgttatacgtgaaagcgcgtatttgcgtattgttgcggttatatatcgttagtagtttatcggttttcgtatacgtgtatcgtattagtggcgtagcgggtaggtttttcgggtatgtcgggtcgtgtattagttatatcgtcgaaaggcggatatttttgtcggggtcgtattcggtatcgggtagtgtgtcggggaacgttgaggttgagagagggcgggaattgttagaagaagatagcgaagaggtgcgggtttttttcgtacgttgcgtttgcgtggttagtattagacggaattttcgttcggtatcgttcgttacgtcggtgattttttcggttaggttatcggcggttttacgtcggtacgttagcgttcgttcgaagcggttcgttatttcggtaagtattcggtacggcggtagcggcgttggtagtacgtttttagtattcggtattcgtttagattattttagtatttattacggtttttgtgcgttgttggtcgttaggtaaagatgcgggtttaatcggatattcggcggtagcgttttttatagncgcgttagcgtatggtcgttcggttgtgtttgtttaatatcgcgtattaggtatattgatttattgcgggtgtatatcggtttttttatacgtcgggggtaagattgtagataaaaattatcgtttacgtaaaggtattagttt

SEQ ID NO: 13562 - DNA, 776 bp, Artificial Sequence
  chemically treated genomic DNA (Homo sapiens) CpG-island No: 13562
  unsure (145)
aaactaatacctttacgtaaacgataatttttatctacaatcttacccccgacgtataaaaaaaccgatatacacccgcaataaatcaatatacctaatacgcgatattaaacaaacacaaccgaacgaccatacgctaacgcgnctataaaaaacgctaccgccgaatatccgattaaacccgcatctttacctaacgaccaacaacgcacaaaaaccgtaataaatactaaaataatctaaacgaataccgaatactaaaaacgtactaccaacgccgctaccgccgtaccgaatacttaccgaaataacgaaccgcttcgaacgaacgctaacgtaccgacgtaaaaccgccgataacctaaccgaaaaaatcaccgacgtaacgaacgataccgaacgaaaattccgtctaatactaaccacgcaaacgcaacgtacgaaaaaaacccgcacctcttcgctatcttcttctaacaattcccgccctctctcaacctcaacgttccccgacacactacccgataccgaatacgaccccgacaaaaatatccgcctttcgacgatataactaatacacgacccgacatacccgaaaaacctacccgctacgccactaatacgatacacgtatacgaaaaccgataaactactaacgatatataaccgcaacaatacgcaaatacgcgctttcacgtataacgcgcaacacccgaaccgaataataacgcaccgttacgcgaaaaaaccgaaaatacgctaccgctacgacgata

SEQ ID NO: 13563 - DNA, 776 bp, Artificial Sequence
  chemically treated genomic DNA (Homo sapiens) CpG-island No: 13563
  unsure (145)
aaattaatgtttttacgtgggcggtgatttttgtttataattttattttcgacgtataagggagtcggtgtatattcgtagtgagttaatgtgtttggtgcgcggtgttaagtaagtatagtcggacggttatacgttggcgcgnttgtggggggcgttgtcgtcggatattcggttaagttcgtatttttatttggcgattaatagcgtataggggtcgtggtggatattggggtggtttgagcgggtgtcgggtgttgaggacgtattgttagcgtcgttgtcgtcgtatcgggtgtttatcgggatggcggatcgtttcgggcggacgttgacgtatcggcgtgaggtcgtcggtgatttggtcggggaaattatcggcgtgacggacggtgtcgggcgggagtttcgtttggtgttgattacgtaggcgtagcgtgcggaagaggttcgtattttttcgttatttttttttgatagttttcgtttttttttagttttagcgtttttcgatatattgttcggtatcgaatacggtttcgataggggtattcgtttttcggcggtgtggttgatgtacgattcggtatattcggagagtttgttcgttgcgttattggtgcggtatacgtatacggaagtcggtgaattgttggcggtatatgatcgtagtaatacgtaggtgcgcgtttttacgtatgacgcgtagtattcgggtcggatggtggcgtatcgttacgcgggaaggtcggagatgcgttatcgttacgacgata

SEQ ID NO: 13564 - DNA, 776 bp, Artificial Sequence
  chemically treated genomic DNA (Homo sapiens) CpG-island No: 13564
  unsure (632)
tatcgtcgtaacgataacgcatctccgaccttcccgcgtaacgatacgccaccatccgacccgaatactacgcgtcatacgtaaaaacgcgcacctacgtattactacgatcatataccgccaacaattcaccgacttccgtatacgtataccgcaccaataacgcaacgaacaaactctccgaatataccgaatcgtacatcaaccacaccgccgaaaaacgaatacccctatcgaaaccgtattcgataccgaacaatatatcgaaaaacgctaaaactaaaaaaaaacgaaaactatcaaaaaaaaataacgaaaaaatacgaacctcttccgcacgctacgcctacgtaatcaacaccaaacgaaactcccgcccgacaccgtccgtcacgccgataatttccccgaccaaatcaccgacgacctcacgccgatacgtcaacgtccgcccgaaacgatccgccatcccgataaacacccgatacgacgacaacgacgctaacaatacgtcctcaacacccgacacccgctcaaaccaccccaatatccaccacgacccctatacgctattaatcgccaaataaaaatacgaacttaaccgaatatccgacgacaacgccccccacaancgcgccaacgtataaccgtccgactatacttacttaacaccgcgcaccaaacacattaactcactacgaatatacaccgactcccttatacgtcgaaaataaaattataaacaaaaatcaccgcccacgtaaaaacattaattt

SEQ ID NO: 13565 - DNA, 616 bp, Artificial Sequence
  chemically treated genomic DNA (Homo sapiens) CpG-island No: 13565
ttttatgacgtggtttgtatattattttcgtttttattttttcggtttattttacgtttattacgtatttttatatttattattacgtttaatatattcgttttatcggtaaattcgtaatatattttttcgttcgatatttttcggaaaagtagtcggatcggatttcgcgtgaacgcgttttttcggtattttaatttttgcgtttgcgtttatgtattgttcggttaacgatttcggtatcgttataatcgtttttagcggattttttgcgattattttatcgtcgtgaatatttgcgttcgggttaatgtcgattatatggttagcggcgcgaattgcgttttcgtcgtgttttattataattacggtattatcgagatcgcgtagatggataagcgtatttaataggcgttcgttattacgttggtgtaggtcgatagacggttcgtttagtacgtatataacgttaattaggttcgtattaatttggttcgttagacggatacgttgtgttttatcgttagaaagcgtttttgtcgagcgggaaagcgttaggtaatttaggtcgacgttaacgaggaattttagacgatcgtcgatttttttaaggatt

SEQ ID NO: 13566 - DNA, 616 bp, Artificial Sequence
  chemically treated genomic DNA (Homo sapiens) CpG-island No: 13566
aatccttaaaaaaatcgacgatcgtctaaaattcctcgttaacgtcgacctaaattacctaacgctttcccgctcgacaaaaacgctttctaacgataaaacacaacgtatccgtctaacgaaccaaattaatacgaacctaattaacgttatatacgtactaaacgaaccgtctatcgacctacaccaacgtaataacgaacgcctattaaatacgcttatccatctacgcgatctcgataataccgtaattataataaaacacgacgaaaacgcaattcgcgccgctaaccatataatcgacattaacccgaacgcaaatattcacgacgataaaataatcgcaaaaaatccgctaaaaacgattataacgataccgaaatcgttaaccgaacaatacataaacgcaaacgcaaaaattaaaataccgaaaaaacgcgttcacgcgaaatccgatccgactacttttccgaaaaatatcgaacgaaaaaatatattacgaatttaccgataaaacgaatatattaaacgtaataataaatataaaaatacgtaataaacgtaaaataaaccgaaaaaataaaaacgaaaataatatacaaaccacgtcataaaa

SEQ ID NO: 13567 - DNA, 616 bp, Artificial Sequence
  chemically treated genomic DNA (Homo sapiens) CpG-island No: 13567
aatttttaaagagatcggcgatcgtttgaaatttttcgttaacgtcggtttgaattatttgacgttttttcgttcggtagaaacgttttttggcggtgaagtatagcgtattcgtttggcgagttagattggtgcgggtttggttggcgttatgtacgtgttggacgagtcgtttatcggtttgtattagcgtgataacgagcgtttgttgggtacgtttatttatttgcgcgatttcggtaatatcgtgattgtggtggagtacgacgaagacgtaattcgcgtcgttgattatgtgatcgatattggttcgggcgtaggtgtttacggcggtgaagtggtcgtagaaggttcgttggaagcgattatggcggtgtcggagtcgttgatcgggtagtatatgagcgtaaacgtaagagttgaagtgtcgaagaaacgcgtttacgcgaagttcggttcgattattttttcggggggtgtcgggcgggggggtgtgttgcgggtttgtcggtggggcgggtgtgttgagcgtggtggtgggtgtgggggtgcgtggtgggcgtggggtgggtcggggaggtgaaagcgagagtggtgtgtagattacgttatgggg

SEQ ID NO: 13568 - DNA, 616 bp, Artificial Sequence
  chemically treated genomic DNA (Homo sapiens) CpG-island No: 13568
ccccataacgtaatctacacaccactctcgctttcacctccccgacccaccccacgcccaccacgcacccccacacccaccaccacgctcaacacacccgccccaccgacaaacccgcaacacacccccccgcccgacaccccccgaaaaaataatcgaaccgaacttcgcgtaaacgcgtttcttcgacacttcaactcttacgtttacgctcatatactacccgatcaacgactccgacaccgccataatcgcttccaacgaaccttctacgaccacttcaccgccgtaaacacctacgcccgaaccaatatcgatcacataatcaacgacgcgaattacgtcttcgtcgtactccaccacaatcacgatattaccgaaatcgcgcaaataaataaacgtacccaacaaacgctcgttatcacgctaatacaaaccgataaacgactcgtccaacacgtacataacgccaaccaaacccgcaccaatctaactcgccaaacgaatacgctatacttcaccgccaaaaaacgtttctaccgaacgaaaaaacgtcaaataattcaaaccgacgttaacgaaaaatttcaaacgatcgccgatctctttaaaaatt

SEQ ID NO: 13569 - DNA, 870 bp, Artificial Sequence
  chemically treated genomic DNA (Homo sapiens) CpG-island No: 13569
cggttttgttgcgttggacggtttttgtaaataacgcgatagcgaaggtaattcgacgatgaagttatattgggaaattttttagtaagaggttgacgtttgtttcgtcgttatcgaatggtgttcggcgatttacgaatattttcgtggcggcggttatttttttcgtttttttatcgaaggcggcgtttcgtttattatgattcgtgttaatattattaaaggtttgggatcggtattgtaaatcgcggaaggttggagcgtggaattgtcgaaggatgtgtatgatatttttaataaacgtattaatttaatttggttaattatttggtttgtatcgcgttttatcggtaaagggtcgtttacggatgtgtattcggtaatggcgaattggggcgttaattatggggttttgattatcggttacgttggcgtagattttattattttcgtttttatgttgcgtatttcggtatgtatgtataacgttgaagagattaaagtgtatcgtttttttgtttgggttgcgtacggtatggatattgaaggttaggattatcgcgtttgttagaattacggttcgttgtataagcgttatatattatttttgatgtgatgtcggcgttcgggtacgggttgaataatagatggtagcggaaaataggatcggtaaaggagggcgttttaaataagatttggattacggggcgtttttgttggcggagttgtttttgtgtaatgcgtataaattaggcgcgaaatagttcggattgttcgatatttagtatttcgttatgggtaataatataatatagttagtaaattagcgttagtagttcgtgttttatagcggttgttaggttatgggta

SEQ ID NO: 13570 - DNA, 870 bp, Artificial Sequence
  chemically treated genomic DNA (Homo sapiens) CpG-island No: 13570
tacccataacctaacaaccgctataaaacacgaactactaacgctaatttactaactatattatattattacccataacgaaatactaaatatcgaacaatccgaactatttcgcgcctaatttatacgcattacacaaaaacaactccgccaacaaaaacgccccgtaatccaaatcttatttaaaacgccctcctttaccgatcctattttccgctaccatctattattcaacccgtacccgaacgccgacatcacatcaaaaataatatataacgcttatacaacgaaccgtaattctaacaaacgcgataatcctaaccttcaatatccataccgtacgcaacccaaacaaaaaaacgatacactttaatctcttcaacgttatacatacataccgaaatacgcaacataaaaacgaaaataataaaatctacgccaacgtaaccgataatcaaaaccccataattaacgccccaattcgccattaccgaatacacatccgtaaacgaccctttaccgataaaacgcgatacaaaccaaataattaaccaaattaaattaatacgtttattaaaaatatcatacacatccttcgacaattccacgctccaaccttccgcgatttacaataccgatcccaaacctttaataatattaacacgaatcataataaacgaaacgccgccttcgataaaaaaacgaaaaaaataaccgccgccacgaaaatattcgtaaatcgccgaacaccattcgataacgacgaaacaaacgtcaacctcttactaaaaaatttcccaatataacttcatcgtcgaattaccttcgctatcgcgttatttacaaaaaccgtccaacgcaacaaaaccg

SEQ ID NO: 13571 - DNA, 870 bp, Artificial Sequence
  chemically treated genomic DNA (Homo sapiens) CpG-island No: 13571
tatttataatttggtagtcgttatgaggtacgggttgttggcgttgatttgttggttgtgttgtgttgttgtttatagcgaaatgttgaatgtcgaataattcgggttgtttcgcgtttggtttgtacgtattgtataagaatagtttcgttaataggggcgtttcgtggtttagattttgtttgaggcgtttttttttgtcgattttgtttttcgttattatttgttgtttagttcgtattcgggcgtcggtattatattaggagtaatgtataacgtttgtataacggatcgtagttttggtaagcgcggtaattttggtttttaatatttatgtcgtgcgtagtttaggtagaaggacgatatattttggtttttttaacgttgtgtatatatatcgggatacgtagtatggaggcgagagtgataaagtttgcgttaacgtggtcgatggttagaattttatggttagcgttttagttcgttattatcgagtatatattcgtaaacggttttttatcggtgaggcgcggtgtaaattaggtggttggttaggttgagttggtgcgtttgttgaggatgttatgtatatttttcggtaattttacgttttagtttttcgcgatttgtagtatcggttttaggtttttgatgatgttgatacgagttatggtgaacgggacgtcgttttcggtaaggaagcgggaagagtaatcgtcgttacggaagtattcgtggatcgtcgggtattattcggtagcggcgaggtaagcgttagttttttgttgagagattttttagtgtggttttatcgtcgggttattttcgttgtcgcgttgtttataggaatcgtttagcgtagtagaatcg

SEQ ID NO: 13572 - DNA, 870 bp, Artificial Sequence
  chemically treated genomic DNA (Homo sapiens) CpG-island No: 13572
cgattctactacgctaaacgattcctataaacaacgcgacaacgaaaataacccgacgataaaaccacactaaaaaatctctcaacaaaaaactaacgcttacctcgccgctaccgaataatacccgacgatccacgaatacttccgtaacgacgattactcttcccgcttccttaccgaaaacgacgtcccgttcaccataactcgtatcaacatcatcaaaaacctaaaaccgatactacaaatcgcgaaaaactaaaacgtaaaattaccgaaaaatatacataacatcctcaacaaacgcaccaactcaacctaaccaaccacctaatttacaccgcgcctcaccgataaaaaaccgtttacgaatatatactcgataataacgaactaaaacgctaaccataaaattctaaccatcgaccacgttaacgcaaactttatcactctcgcctccatactacgtatcccgatatatatacacaacgttaaaaaaaccaaaatatatcgtccttctacctaaactacgcacgacataaatattaaaaaccaaaattaccgcgcttaccaaaactacgatccgttatacaaacgttatacattactcctaatataataccgacgcccgaatacgaactaaacaacaaataataacgaaaaacaaaatcgacaaaaaaaaacgcctcaaacaaaatctaaaccacgaaacgcccctattaacgaaactattcttatacaatacgtacaaaccaaacgcgaaacaacccgaattattcgacattcaacatttcgctataaacaacaacacaacacaaccaacaaatcaacgccaacaacccgtacctcataacgactaccaaattataaata

SEQ ID NO: 13573 - DNA, 508 bp, Artificial Sequence
  chemically treated genomic DNA (Homo sapiens) CpG-island No: 13573
aggcgattttttgaacggttttagtgatagttttaatcgtatgggtattatcgagtggatgtttattcgttacgaagaagtggcggtttttgtcgttggcgttgaagtataatttagcggagaattggcggtttgcgtcggatcgtgcggtttcggtaatttgtatttaattaacggtttgttcgattgttatcgtaattacgtttcggtattggcgattgtcgtttatattttttttagcgaaattggtagcggttatttttaggaaatttatttataagagttatttcgcgaatgtagttattattgcgagttggtttttagttcggagtagattttataagtattggcgattgttatgcgtaaagcggtgtttaatcgtggcgtttcggttgttagtgttattaggcgacgtggcgttaaaatttgcgttagaaggggtaattatgtataagtattaggtagggtattagttattttgtcggcgttaggtaaggggttatttaag

SEQ ID NO: 13574 - DNA, 508 bp, Artificial Sequence
  chemically treated genomic DNA (Homo sapiens) CpG-island No: 13574
cttaaataaccccttacctaacgccgacaaaataactaataccctacctaatacttatacataattaccccttctaacgcaaattttaacgccacgtcgcctaataacactaacaaccgaaacgccacgattaaacaccgctttacgcataacaatcgccaatacttataaaatctactccgaactaaaaaccaactcgcaataataactacattcgcgaaataactcttataaataaatttcctaaaaataaccgctaccaatttcgctaaaaaaaatataaacgacaatcgccaataccgaaacgtaattacgataacaatcgaacaaaccgttaattaaatacaaattaccgaaaccgcacgatccgacgcaaaccgccaattctccgctaaattatacttcaacgccaacgacaaaaaccgccacttcttcgtaacgaataaacatccactcgataatacccatacgattaaaactatcactaaaaccgttcaaaaaatcgcct

SEQ ID NO: 13575 - DNA, 508 bp, Artificial Sequence
  chemically treated genomic DNA (Homo sapiens) CpG-island No: 13575
tttgaatggttttttgtttagcgtcgataggatagttggtattttgtttgatatttgtgtatggttgttttttttggcgtaggttttaacgttacgtcgtttggtaatattgataatcgaaacgttacggttaagtatcgttttgcgtatggtaatcgttagtatttgtgggatttgtttcgggttggaaattagttcgtaatagtgattatattcgcggaatagtttttgtgggtgggttttttggaaatagtcgttgttaatttcgttggagggaatatgagcggtaatcgttagtatcggaacgtgattgcggtggtaatcgaataggtcgttgattaagtgtaggttgtcggggtcgtacgattcggcgtagatcgttagtttttcgttaagttgtgttttagcgttagcggtaaaggtcgttattttttcgtggcgggtggatatttattcgatggtgtttatgcgattaagattgttattaagatcgtttagagagtcgttt

SEQ ID NO: 13576 - DNA, 508 bp, Artificial Sequence
  chemically treated genomic DNA (Homo sapiens) CpG-island No: 13576
aaacgactctctaaacgatcttaataacaatcttaatcgcataaacaccatcgaataaatatccacccgccacgaaaaaataacgacctttaccgctaacgctaaaacacaacttaacgaaaaactaacgatctacgccgaatcgtacgaccccgacaacctacacttaatcaacgacctattcgattaccaccgcaatcacgttccgatactaacgattaccgctcatattccctccaacgaaattaacaacgactatttccaaaaaacccacccacaaaaactattccgcgaatataatcactattacgaactaatttccaacccgaaacaaatcccacaaatactaacgattaccatacgcaaaacgatacttaaccgtaacgtttcgattatcaatattaccaaacgacgtaacgttaaaacctacgccaaaaaaaacaaccatacacaaatatcaaacaaaataccaactatcctatcgacgctaaacaaaaaaccattcaaa

SEQ ID NO: 13577 - DNA, 1627 bp, Artificial Sequence
  chemically treated genomic DNA (Homo sapiens) CpG-island No: 13577
aggtcgttgcgtcgttgatgaatatttcgatcgtcgatttatcgacgattattcgtaggcgttgtatggcgtcgaacgatttcgcggcgtagtttttttttaggatttgggggttttcgttatcggcggataacgtcgaatgcgatttgtttacgattatttcgtcgcgcgttcgatcgaagattaatcgcgtgaattcgcggtcgtcgggcgagacgagtacgtcgagttggatgggcgtcgtagcggaaggtgtatcgtcgagttcgattagtagttcgtaggcgttatgttttgcgtcgagcgagatcggatttcgatcgatcgttacgtcggatcggtcgacgatcgcgtttgcgcgtagtagcgttagttcgggagcgggtcgttgttttagggtgcgtttgtcgtcgagtaggtattaggttcgcggtaggttgaaggtatgcgtttagttcgttcgtttttgcgcgagtggcgtgcggcgtttatcgatgatgtttatggttcgtaggtagtcgtcgtcggttcggtttacggtcggggcgagatggttcgggacgaggtttaagagtttgggtgtcggcgagaacggtttgaacgtgtcgtcggattagatgtcggtttagtagatcgtacgcgtgttcggttcgtcgtatttgttgagagagagcggtgttgtaggtcgattttagtttgtttttttcgtttgtgtatttttttggtggttattttcgtaggcgatttgcgtattaggttaagtcgaagttttcgtttcggcggtgggtttatttggtggttacggtggacgtcgtaatcggcgtcgtatcgttttattaaggcgacgagttgattggtatcgggtaaggcgtttttggtatgattttggagttggtatagacgtcgttgcggttggcggtagcgtttacggaaattaagattttggattttacgattaatcggttgaacggcgcgttcgattaggttgtcgtgtatgtcgttgtatttagcgtcgagtagcgtcgattgttgtcgggttcgttatcggtgtcgagcgcggagtcgtcgttggtggtttcggtaacgcgtttcgttaaggatacgttgcgttttcgcgtgtattcgttgtcgtcggttaattggattaatgaattttacggtttgattcgtattggcgatatttggtacgttttttattaacgtatttttaacggttcgtttaagatattgatgtattgggggtatatgattagtcgcgatttggtggtttgggagaattagtttgacgcgttgatgttcgagttgtagagcgacgatttcggtttcgatatgaagggtatttggtcgggttatgttaggcgttagttgatatcggaagatttagtggattttcgggcgtattagaagggtatggaatgggaagaaaattagatcggttgaaagaggcgtgtgaaggggggcggatgaaatgtttggatcgaggtcgtttagagttgcgggtacgcggatgtataagatttgacgtagtatcggatttagtcggatttttgttttatattatttttgttgtcggttgttggcgtattttgtatgggattatggtgggtgcgtaataaaagagaaaaaa

SEQ ID NO: 13578 - DNA, 1627 bp, Artificial Sequence
  chemically treated genomic DNA (Homo sapiens) CpG-island No: 13578
ttttttctcttttattacgcacccaccataatcccatacaaaatacgccaacaaccgacaacaaaaataatataaaacaaaaatccgactaaatccgatactacgtcaaatcttatacatccgcgtacccgcaactctaaacgacctcgatccaaacatttcatccgccccccttcacacgcctctttcaaccgatctaattttcttcccattccatacccttctaatacgcccgaaaatccactaaatcttccgatatcaactaacgcctaacataacccgaccaaatacccttcatatcgaaaccgaaatcgtcgctctacaactcgaacatcaacgcgtcaaactaattctcccaaaccaccaaatcgcgactaatcatatacccccaatacatcaatatcttaaacgaaccgttaaaaatacgttaataaaaaacgtaccaaatatcgccaatacgaatcaaaccgtaaaattcattaatccaattaaccgacgacaacgaatacacgcgaaaacgcaacgtatccttaacgaaacgcgttaccgaaaccaccaacgacgactccgcgctcgacaccgataacgaacccgacaacaatcgacgctactcgacgctaaatacaacgacatacacgacaacctaatcgaacgcgccgttcaaccgattaatcgtaaaatccaaaatcttaatttccgtaaacgctaccgccaaccgcaacgacgtctataccaactccaaaatcataccaaaaacgccttacccgataccaatcaactcgtcgccttaataaaacgatacgacgccgattacgacgtccaccgtaaccaccaaataaacccaccgccgaaacgaaaacttcgacttaacctaatacgcaaatcgcctacgaaaataaccaccaaaaaaatacacaaacgaaaaaaacaaactaaaatcgacctacaacaccgctctctctcaacaaatacgacgaaccgaacacgcgtacgatctactaaaccgacatctaatccgacgacacgttcaaaccgttctcgccgacacccaaactcttaaacctcgtcccgaaccatctcgccccgaccgtaaaccgaaccgacgacgactacctacgaaccataaacatcatcgataaacgccgcacgccactcgcgcaaaaacgaacgaactaaacgcataccttcaacctaccgcgaacctaatacctactcgacgacaaacgcaccctaaaacaacgacccgctcccgaactaacgctactacgcgcaaacgcgatcgtcgaccgatccgacgtaacgatcgatcgaaatccgatctcgctcgacgcaaaacataacgcctacgaactactaatcgaactcgacgatacaccttccgctacgacgcccatccaactcgacgtactcgtctcgcccgacgaccgcgaattcacgcgattaatcttcgatcgaacgcgcgacgaaataatcgtaaacaaatcgcattcgacgttatccgccgataacgaaaacccccaaatcctaaaaaaaaactacgccgcgaaatcgttcgacgccatacaacgcctacgaataatcgtcgataaatcgacgatcgaaatattcatcaacgacgcaacgacct

SEQ ID NO: 13579 - DNA, 1627 bp, Artificial Sequence
  chemically treated genomic DNA (Homo sapiens) CpG-island No: 13579
tttttttttttttattacgtatttattatggttttatataaggtacgttaatagtcggtaataaagataatatagggtaggggttcggttgggttcggtattacgttaagttttatatattcgcgtgttcgtagttttaggcggtttcggtttaagtattttattcgtttttttttatacgttttttttagtcggtttagttttttttttattttatgtttttttaatgcgttcgaaaatttattgggtttttcggtattaattggcgtttgatatggttcgattagatgttttttatgtcgaagtcgaagtcgtcgttttgtagttcgggtattagcgcgttaggttggtttttttagattattaggtcgcggttggttatgtgtttttagtgtattagtgttttgaacgggtcgttgggggtgcgttggtagaagacgtgttaggtgtcgttaatgcggattaggtcgtgaggtttattggtttagttggtcggcggtagcggatgtacgcggggacgtagcgtgtttttggcgaagcgcgttgtcgggattattagcgacggtttcgcgttcggtatcggtgacgggttcgatagtaatcggcgttgttcggcgttgagtgtagcggtatatacggtaatttggtcgaacgcgtcgtttagtcgattgatcgtgaagtttagaattttggttttcgtgggcgttgtcgttagtcgtagcggcgtttgtgttaattttagggttatgttaggggcgttttgttcggtgttaattaattcgtcgttttggtagagcgatgcgacgtcggttgcggcgtttatcgtggttattaggtggatttatcgtcgaagcgggaatttcgatttggtttgatgcgtaggtcgtttgcggaggtggttattagggaagtatataagcgaggagaatagattagagtcgatttgtagtatcgtttttttttagtaagtacggcgaatcgagtacgcgtacggtttattggatcggtatttggttcgacggtacgtttaagtcgttttcgtcgatatttaagtttttggatttcgtttcgggttatttcgtttcgatcgtgggtcgggtcgacgacggttgtttgcgagttatgggtattatcgatgaacgtcgtacgttattcgcgtagagacgggcgggttgggcgtatatttttagtttgtcgcggatttggtatttgttcggcgataagcgtattttggggtaacgattcgttttcgagttggcgttattgcgcgtaagcgcggtcgtcgatcggttcggcgtggcgatcggtcggggttcggtttcgttcgacgtaggatatggcgtttacgaattgttgatcgaattcgacgatgtatttttcgttgcggcgtttatttagttcgacgtgttcgtttcgttcgacggtcgcgagtttacgcggttgattttcgatcgggcgcgcggcgaggtgatcgtggataagtcgtattcgacgttgttcgtcgatggcgaaggtttttagattttgaaggggagttacgtcgcggaatcgttcggcgttatgtagcgtttgcgggtgatcgtcgatggatcgacggtcgaggtgtttattaacgacgtagcggttt

SEQ ID NO: 13580 - DNA, 1627 bp, Artificial Sequence
  chemically treated genomic DNA (Homo sapiens) CpG-island No: 13580
aaaccgctacgtcgttaataaacacctcgaccgtcgatccatcgacgatcacccgcaaacgctacataacgccgaacgattccgcgacgtaactccccttcaaaatctaaaaaccttcgccatcgacgaacaacgtcgaatacgacttatccacgatcacctcgccgcgcgcccgatcgaaaatcaaccgcgtaaactcgcgaccgtcgaacgaaacgaacacgtcgaactaaataaacgccgcaacgaaaaatacatcgtcgaattcgatcaacaattcgtaaacgccatatcctacgtcgaacgaaaccgaaccccgaccgatcgccacgccgaaccgatcgacgaccgcgcttacgcgcaataacgccaactcgaaaacgaatcgttaccccaaaatacgcttatcgccgaacaaataccaaatccgcgacaaactaaaaatatacgcccaacccgcccgtctctacgcgaataacgtacgacgttcatcgataatacccataactcgcaaacaaccgtcgtcgacccgacccacgatcgaaacgaaataacccgaaacgaaatccaaaaacttaaatatcgacgaaaacgacttaaacgtaccgtcgaaccaaataccgatccaataaaccgtacgcgtactcgattcgccgtacttactaaaaaaaaacgatactacaaatcgactctaatctattctcctcgcttatatacttccctaataaccacctccgcaaacgacctacgcatcaaaccaaatcgaaattcccgcttcgacgataaatccacctaataaccacgataaacgccgcaaccgacgtcgcatcgctctaccaaaacgacgaattaattaacaccgaacaaaacgcccctaacataaccctaaaattaacacaaacgccgctacgactaacgacaacgcccacgaaaaccaaaattctaaacttcacgatcaatcgactaaacgacgcgttcgaccaaattaccgtatataccgctacactcaacgccgaacaacgccgattactatcgaacccgtcaccgataccgaacgcgaaaccgtcgctaataatcccgacaacgcgcttcgccaaaaacacgctacgtccccgcgtacatccgctaccgccgaccaactaaaccaataaacctcacgacctaatccgcattaacgacacctaacacgtcttctaccaacgcacccccaacgacccgttcaaaacactaatacactaaaaacacataaccaaccgcgacctaataatctaaaaaaaccaacctaacgcgctaatacccgaactacaaaacgacgacttcgacttcgacataaaaaacatctaatcgaaccatatcaaacgccaattaataccgaaaaacccaataaattttcgaacgcattaaaaaaacataaaataaaaaaaaaactaaaccgactaaaaaaaacgtataaaaaaaaacgaataaaatacttaaaccgaaaccgcctaaaactacgaacacgcgaatatataaaacttaacgtaataccgaacccaaccgaacccctaccctatattatctttattaccgactattaacgtaccttatataaaaccataataaatacgtaataaaaaaaaaaaaa

SEQ ID NO: 13581 - DNA, 640 bp, Artificial Sequence
  chemically treated genomic DNA (Homo sapiens) CpG-island No: 13581
tcgtcgtataggcgatagcgatagattgcggggagattattttatcggtgacgttatcggtggtattggcggtaattagtaatagattagagacgttaatttgttgtgttgcggtggtttgtagcgcggcgaatagggcgttagatgaggtattcgattcggttaggaatatttttagttagtcgaggaacggcgagaagaaggtgaatgtatgatcggtgtgcgttagtgttagcgttagtgttgatgatagttcggaatagttcgaaataaaggcgaatgttagtattatatcgatggagtagatgggtagagttagtttttttagcgtgttgtcgaaggtgttgatagcgttagacggttttatttttagttagataatcgagagtagtgtagtaaatagaatggcggtgtcggtggtagagaattagttaaatttaaatacggcggtataggttgtagtttcgttgattattggcggtatacgggtaattagtttatcgaggtacggtatcggaatattgatttattttatttatatagcgcgttattcgatgcgaatagggttttaaacggcgggatattttatagtgttacgggtagttgttaggatatgaataattttagtagttttttatta

SEQ ID NO: 13582 - DNA, 640 bp, Artificial Sequence
  chemically treated genomic DNA (Homo sapiens) CpG-island No: 13582
taataaaaaactactaaaattattcatatcctaacaactacccgtaacactataaaatatcccgccgtttaaaaccctattcgcatcgaataacgcgctatataaataaaataaatcaatattccgataccgtacctcgataaactaattacccgtataccgccaataatcaacgaaactacaacctataccgccgtatttaaatttaactaattctctaccaccgacaccgccattctatttactacactactctcgattatctaactaaaaataaaaccgtctaacgctatcaacaccttcgacaacacgctaaaaaaactaactctacccatctactccatcgatataatactaacattcgcctttatttcgaactattccgaactatcatcaacactaacgctaacactaacgcacaccgatcatacattcaccttcttctcgccgttcctcgactaactaaaaatattcctaaccgaatcgaatacctcatctaacgccctattcgccgcgctacaaaccaccgcaacacaacaaattaacgtctctaatctattactaattaccgccaataccaccgataacgtcaccgataaaataatctccccgcaatctatcgctatcgcctatacgacga

SEQ ID NO: 13583 - DNA, 640 bp, Artificial Sequence
  chemically treated genomic DNA (Homo sapiens) CpG-island No: 13583
taatagaggattgttggagttatttatgttttgatagttattcgtaatattatggagtatttcgtcgtttaaagttttgttcgtatcgggtggcgcgttgtatgagtagggtagattaatatttcggtgtcgtatttcgataaattggttgttcgtatgtcgttagtggttagcgaggttatagtttatgtcgtcgtgtttaagtttgattggttttttgttatcggtatcgttattttgtttgttgtattgttttcgattgtttggttgaagatgaaatcgtttgacgttattagtattttcggtagtacgttgaaagaattggttttgtttatttattttatcggtatggtgttggtattcgtttttatttcgaattatttcggattgttattaatattggcgttggtattggcgtatatcggttatgtatttatttttttttcgtcgtttttcggttggttgggggtatttttgatcgggtcggatattttatttaacgttttgttcgtcgcgttgtaagttatcgtagtataataaattggcgtttttgatttgttgttggttgtcgttaatattatcggtggcgttatcggtaagatgattttttcgtaatttatcgttatcgtttgtgcggcgg

SEQ ID NO: 13584 - DNA, 640 bp, Artificial Sequence
  chemically treated genomic DNA (Homo sapiens) CpG-island No: 13584
ccgccgcacaaacgataacgataaattacgaaaaaatcatcttaccgataacgccaccgataatattaacgacaaccaacaacaaatcaaaaacgccaatttattatactacgataacttacaacgcgacgaacaaaacgttaaataaaatatccgacccgatcaaaaatacccccaaccaaccgaaaaacgacgaaaaaaaaataaatacataaccgatatacgccaataccaacgccaatattaataacaatccgaaataattcgaaataaaaacgaataccaacaccataccgataaaataaataaacaaaaccaattctttcaacgtactaccgaaaatactaataacgtcaaacgatttcatcttcaaccaaacaatcgaaaacaatacaacaaacaaaataacgataccgataacaaaaaaccaatcaaacttaaacacgacgacataaactataacctcgctaaccactaacgacatacgaacaaccaatttatcgaaatacgacaccgaaatattaatctaccctactcatacaacgcgccacccgatacgaacaaaactttaaacgacgaaatactccataatattacgaataactatcaaaacataaataactccaacaatcctctatta

SEQ ID NO: 13585 - DNA, 1215 bp, Artificial Sequence
  chemically treated genomic DNA (Homo sapiens) CpG-island No: 13585
tagaagtcgttatttttttaattcgcgacgacgcgaagacgtgtatcggtttattaggtattcgaagtacgttaatacgggtacgttcggcgcgttatcgtgttgttaattgatatttttcgtgtttgtcgagacgtgtatattgggtattggcgtttatatggtgcggttcgatgattatcgtataaattgtttttgacggcgatattattcgttatcgttatgataatttatatagtgatttattttgcgtaacggaagatgttatcggtagtcggaaaattatgacgtggagtcgttacggttagttgttgagttttattgattgtttcggttatgtaattcgttatgattatgatcgttttggttaggtgacggcggtgtatcgcgaggaagggttgagttagtatcgcgtatacgatagtcgtggatagttaattgtcgtgaaagatacgtagggttatgaaacgcggtatgaatataacgtcgtcggtgatttgattatcgttattgtttcggacggtagtagaaacgggatatagtacgatgcgtggggaaaagttatttgtattacgtagggcggtttgacgcgtagtatggaatacgatgttgtcggacgggttattcgtttgattagtgaaaacggtagttatattatttttcgttacgatgtattcgatcggttgatataggaaatcggttttgacggtcgtatatagcgttattattacgatttgatcggtaaatttattcgtagcgaggatgagggtttggttatttattggtattatgacgaagtagatcgttttacgtatcgtatcgtgaagggtgaaatcgtagagcggtggtagtatgacgaacgtggttggttgatagatattagttatattagcgaagggtatcgggtggcggtgtataataggtatgatgagaaaggtcggttgatcggtgagcgttagacggtgtattattttgttgaaagagttggacggttttatcgttaaatagtagaagttggcgttgtcgaagttgttggagattgtcgaatcgtatttaggtaaggtattttattgtatcgaaaataattcgtcgttattaaacggcgggttgttttcggtgtagtagagtgttttatttggatgcggttcggtagtttttagtagtttcgagtagagttagtttttgttgtttggcggtgaaatcgtttagtttttt

SEQ ID NO: 13586 - DNA, 1215 bp, Artificial Sequence
  chemically treated genomic DNA (Homo sapiens) CpG-island No: 13586
aaaaaactaaacgatttcaccgccaaacaacaaaaactaactctactcgaaactactaaaaactaccgaaccgcatccaaataaaacactctactacaccgaaaacaacccgccgtttaataacgacgaattattttcgatacaataaaataccttacctaaatacgattcgacaatctccaacaacttcgacaacgccaacttctactatttaacgataaaaccgtccaactctttcaacaaaataatacaccgtctaacgctcaccgatcaaccgacctttctcatcatacctattatacaccgccacccgatacccttcgctaatataactaatatctatcaaccaaccacgttcgtcatactaccaccgctctacgatttcacccttcacgatacgatacgtaaaacgatctacttcgtcataataccaataaataaccaaaccctcatcctcgctacgaataaatttaccgatcaaatcgtaataataacgctatatacgaccgtcaaaaccgatttcctatatcaaccgatcgaatacatcgtaacgaaaaataatataactaccgttttcactaatcaaacgaataacccgtccgacaacatcgtattccatactacgcgtcaaaccgccctacgtaatacaaataacttttccccacgcatcgtactatatcccgtttctactaccgtccgaaacaataacgataatcaaatcaccgacgacgttatattcataccgcgtttcataaccctacgtatctttcacgacaattaactatccacgactatcgtatacgcgatactaactcaacccttcctcgcgatacaccgccgtcacctaaccaaaacgatcataatcataacgaattacataaccgaaacaatcaataaaactcaacaactaaccgtaacgactccacgtcataattttccgactaccgataacatcttccgttacgcaaaataaatcactatataaattatcataacgataacgaataatatcgccgtcaaaaacaatttatacgataatcatcgaaccgcaccatataaacgccaatacccaatatacacgtctcgacaaacacgaaaaatatcaattaacaacacgataacgcgccgaacgtacccgtattaacgtacttcgaatacctaataaaccgatacacgtcttcgcgtcgtcgcgaattaaaaaaataacgacttcta

SEQ ID NO: 13587 - DNA, 1215 bp, Artificial Sequence
  chemically treated genomic DNA (Homo sapiens) CpG-island No: 13587
aaagagttggacggttttatcgttaaatagtagaagttggttttgttcgaagttgttggagattgtcgaatcgtatttaggtaaggtattttattgtatcgaaaataattcgtcgtttgataacggcgggttgttttcggtgtagtagagtgttttatttggatgcggttcggtagtttttagtagtttcgatagcgttagtttttgttgtttggcggtgaaatcgtttagtttttttagtagggtgatgtatcgtttgacgtttatcggttagtcggttttttttattatatttgttatgtatcgttattcggtgtttttcgttgatatggttgatgtttgttagttagttacgttcgttatattgttatcgttttgcggttttattttttacggtgcggtgcgtgaggcggtttgtttcgttatagtgttagtgggtgattagatttttattttcgttgcggataagtttgtcggttaggtcgtggtgataacgttgtgtgcggtcgttaaagtcggttttttgtattagtcggtcgagtatatcgtaacggaaggtggtgtggttgtcgtttttattggttaggcggatgattcgttcggtagtatcgtattttatattgcgcgttagatcgttttgcgtggtatagatggtttttttttacgtatcgtattgtgtttcgtttttgttgtcgttcggggtaatgacggtggttaggttatcggcggcgttgtatttatatcgcgttttatggttttgcgtgttttttacggtaattaattgtttacggttgtcgtatgcgcggtattgatttagttttttttcgcggtgtatcgtcgttatttgattaaaacggttatggttatagcgggttatataatcggaatagttagtgaagtttagtaattgatcgtaacggttttacgttatggtttttcggttgtcggtggtatttttcgttgcgtagggtaagttattgtgtggattattataacggtagcgggtgatatcgtcgttaggggtagtttatacggtagttatcgaatcgtattatatgggcgttagtatttaatatgtacgtttcggtaggtacgaggggtgttaattaatagtacgatagcgcgtcggacgtgttcgtattaacgtgtttcgggtatttgataaatcggtgtacgttttcgcgtcgtcgcgggttaaaggggtggcggtttttg

SEQ ID NO: 13588 - DNA, 1215 bp, Artificial Sequence
  chemically treated genomic DNA (Homo sapiens) CpG-island No: 13588
caaaaaccgccacccctttaacccgcgacgacgcgaaaacgtacaccgatttatcaaatacccgaaacacgttaatacgaacacgtccgacgcgctatcgtactattaattaacacccctcgtacctaccgaaacgtacatattaaatactaacgcccatataatacgattcgataactaccgtataaactacccctaacgacgatatcacccgctaccgttataataatccacacaataacttaccctacgcaacgaaaaataccaccgacaaccgaaaaaccataacgtaaaaccgttacgatcaattactaaacttcactaactattccgattatataacccgctataaccataaccgttttaatcaaataacgacgatacaccgcgaaaaaaaactaaatcaataccgcgcatacgacaaccgtaaacaattaattaccgtaaaaaacacgcaaaaccataaaacgcgatataaatacaacgccgccgataacctaaccaccgtcattaccccgaacgacaacaaaaacgaaacacaatacgatacgtaaaaaaaaaccatctataccacgcaaaacgatctaacgcgcaatataaaatacgatactaccgaacgaatcatccgcctaaccaataaaaacgacaaccacaccaccttccgttacgatatactcgaccgactaatacaaaaaaccgactttaacgaccgcacacaacgttatcaccacgacctaaccgacaaacttatccgcaacgaaaataaaaatctaatcacccactaacactataacgaaacaaaccgcctcacgcaccgcaccgtaaaaaataaaaccgcaaaacgataacaatataacgaacgtaactaactaacaaacatcaaccatatcaacgaaaaacaccgaataacgatacataacaaatataataaaaaaaaccgactaaccgataaacgtcaaacgatacatcaccctactaaaaaaactaaacgatttcaccgccaaacaacaaaaactaacgctatcgaaactactaaaaactaccgaaccgcatccaaataaaacactctactacaccgaaaacaacccgccgttatcaaacgacgaattattttcgatacaataaaataccttacctaaatacgattcgacaatctccaacaacttcgaacaaaaccaacttctactatttaacgataaaaccgtccaactcttt

SEQ ID NO: 13589 - DNA, 513 bp, Artificial Sequence
  chemically treated genomic DNA (Homo sapiens) CpG-island No: 13589
atcgatatcgcgttaaaggtatcgttatgataattattgcggaaggttagaaaacgttggcgcgtttcgtttttggtttgttagtattgtaacgttatttttatcgttatttttatcgttacggaatcggagttcgcgagaaaaacgtattttagcggttgcggcgttatcgttattagtttgcggtatagtttaatggttggcgtatgggtgatatcgttaaatattatatgcgatatggtattaatttgcgattttatcgtcgtattaagttgcgggtgattgtagtcgtggatcgtcgtttattaggacgatatatcgttaattaggcgtttgtcgttagataaaattatttattggcgattttaatgtcgttgtagatgatttttattcgcgtatcggttaggtatttcgttagttcgaggtaggttgagtcggagtcgagaaaaaagtagtcgttatttttgattattgttcgggtaagggtagttattttttttttcgttatagatt

SEQ ID NO: 13590 - DNA, 513 bp, Artificial Sequence
  chemically treated genomic DNA (Homo sapiens) CpG-island No: 13590
aatctataacgaaaaaaaaaataactacccttacccgaacaataatcaaaaataacgactacttttttctcgactccgactcaacctacctcgaactaacgaaatacctaaccgatacgcgaataaaaatcatctacaacgacattaaaatcgccaataaataattttatctaacgacaaacgcctaattaacgatatatcgtcctaataaacgacgatccacgactacaatcacccgcaacttaatacgacgataaaatcgcaaattaataccatatcgcatataatatttaacgatatcacccatacgccaaccattaaactataccgcaaactaataacgataacgccgcaaccgctaaaatacgtttttctcgcgaactccgattccgtaacgataaaaataacgataaaaataacgttacaatactaacaaaccaaaaacgaaacgcgccaacgttttctaaccttccgcaataattatcataacgatacctttaacgcgatatcgat

SEQ ID NO: 13591 - DNA, 513 bp, Artificial Sequence
  chemically treated genomic DNA (Homo sapiens) CpG-island No: 13591
aatttgtggcgaaaagagaaatagttgtttttgttcgaataatgattaaagatggcgattgtttttttttcgatttcggtttaatttgtttcgaattggcgaaatgtttggtcgatgcgcgggtaaaggttatttgtaacgatattaaaatcgttaatgaatgattttgtttgacggtagacgtttggttgacggtatgtcgttttggtgggcggcgatttacggttataattattcgtagtttaatgcggcgatgaagtcgtaaattgatgttatgtcgtatgtgatgtttggcggtattatttatgcgttagttattgagttgtgtcgtaaattggtggcgatgacgtcgtaatcgttggagtgcgtttttttcgcggatttcggtttcgtagcggtggaagtggcgatgaaaatggcgttgtagtattggtaagttaaaggcgaagcgcgttagcgttttttgatttttcgtaatggttattatggcgatatttttggcgcgatgtcggt

SEQ ID NO: 13592 - DNA, 513 bp, Artificial Sequence
  chemically treated genomic DNA (Homo sapiens) CpG-island No: 13592
accgacatcgcgccaaaaatatcgccataataaccattacgaaaaatcaaaaaacgctaacgcgcttcgcctttaacttaccaatactacaacgccattttcatcgccacttccaccgctacgaaaccgaaatccgcgaaaaaaacgcactccaacgattacgacgtcatcgccaccaatttacgacacaactcaataactaacgcataaataataccgccaaacatcacatacgacataacatcaatttacgacttcatcgccgcattaaactacgaataattataaccgtaaatcgccgcccaccaaaacgacataccgtcaaccaaacgtctaccgtcaaacaaaatcattcattaacgattttaatatcgttacaaataacctttacccgcgcatcgaccaaacatttcgccaattcgaaacaaattaaaccgaaatcgaaaaaaaaacaatcgccatctttaatcattattcgaacaaaaacaactatttctcttttcgccacaaatt

SEQ ID NO: 13593 - DNA, 516 bp, Artificial Sequence
  chemically treated genomic DNA (Homo sapiens) CpG-island No: 13593
tacgtacgtatttatgttggggtatttacgtttttatatattgagatacgtacgtatgttcgttggggtatttatgtttttatatattgagatatgtacgtatatatgttggggtatttacgtttttatatattgagatacgtacgtatattcgttggggtattgatgtttttatatattgagatatgtacgtatttatgttgggtatttacgtttttatatattgagatacgtacgtatattcgttgggatattgacgtttttatatattgagatacgtacgtatttatgttggggtatttacgtttttatatattgagatacgtatgtattttcgttggggtacgtacgtttttataaattgagatacgtatatattttcgttggggtattgacgtttttatatattgagatacgtacgcgtttatgttggggtatttacgtttttatatattgagatatgtatgtatttatgttggggtatttacgtttttatatattgagatacgtttatat

SEQ ID NO: 13594 - DNA, 516 bp, Artificial Sequence
  chemically treated genomic DNA (Homo sapiens) CpG-island No: 13594
atataaacgtatctcaatatataaaaacgtaaataccccaacataaatacatacatatctcaatatataaaaacgtaaataccccaacataaacgcgtacgtatctcaatatataaaaacgtcaataccccaacgaaaatatatacgtatctcaatttataaaaacgtacgtaccccaacgaaaatacatacgtatctcaatatataaaaacgtaaataccccaacataaatacgtacgtatctcaatatataaaaacgtcaatatcccaacgaatatacgtacgtatctcaatatataaaaacgtaaatacccaacataaatacgtacatatctcaatatataaaaacatcaataccccaacgaatatacgtacgtatctcaatatataaaaacgtaaataccccaacatatatacgtacatatctcaatatataaaaacataaataccccaacgaacatacgtacgtatctcaatatataaaaacgtaaataccccaacataaatacgtacgta

SEQ ID NO: 13595 - DNA, 516 bp, Artificial Sequence
  chemically treated genomic DNA (Homo sapiens) CpG-island No: 13595
atgtgggcgtattttagtgtgtgagagcgtgggtattttagtatgaatgtatgtatattttagtgtgtgagagcgtgggtattttagtatgaacgcgtgcgtattttagtgtgtgagagcgttagtattttagcgggaatgtgtgcgtattttagtttgtgagagcgtgcgtattttagcgggaatgtatgcgtattttagtgtgtgagagcgtgggtattttagtatgaatgcgtgcgtattttagtgtgtgagagcgttagtattttagcggatatgcgtgcgtattttagtgtgtgagagcgtgggtatttagtatgaatgcgtgtatattttagtgtgtgagagtattagtattttagcggatatgcgtgcgtattttagtgtgtgagagcgtgagtattttagtatgtatgcgtgtatattttagtgtgtgagagtatgagtattttagcggatatgcgtgcgtattttagtgtgtgagagcgtgggtattttagtatgaatgcgtgcgta

SEQ ID NO: 13596 - DNA, 516 bp, Artificial Sequence
  chemically treated genomic DNA (Homo sapiens) CpG-island No: 13596
tacgcacgcattcatactaaaatacccacgctctcacacactaaaatacgcacgcatatccgctaaaatactcatactctcacacactaaaatatacacgcatacatactaaaatactcacgctctcacacactaaaatacgcacgcatatccgctaaaatactaatactctcacacactaaaatatacacgcattcatactaaatacccacgctctcacacactaaaatacgcacgcatatccgctaaaatactaacgctctcacacactaaaatacgcacgcattcatactaaaatacccacgctctcacacactaaaatacgcatacattcccgctaaaatacgcacgctctcacaaactaaaatacgcacacattcccgctaaaatactaacgctctcacacactaaaatacgcacgcgttcatactaaaatacccacgctctcacacactaaaatatacatacattcatactaaaatacccacgctctcacacactaaaatacgcccacat

SEQ ID NO: 13597 - DNA, 566 bp, Artificial Sequence
  chemically treated genomic DNA (Homo sapiens) CpG-island No: 13597
cgaattcgcgaaagaatatatcggttaaggggtaagaacgacgatacgagaattcgcgaaatgtcgacgaacgattaaaatacgatttatagtttacgttttagtaagacgtaatatatgtacgaatatagagtaataatattattgatgtcgtggatgttgtttattttgtaattcgtttggtagcgtattgattgtaatgattcgcgttgttcgttaggtagtttttgcggatcgagaatagaaggatcgttttagatagcgggatttgttttacgtagttgcgtatcgggtgagagtaggaaattggtaattattttcgtcgtagtattggtattcgcgttggtaggaatggtgacgaaatgtacgttgttaattattttttcgcgaaagttaaaattgtaattgtttgtaggtaaatcgtcgttggcgattttttgttgcgtatgcgcggggttaaaggttagcgataggcgtaatgtgtcggtttttagtagagtatttattcgcgcgggtgaaggcgggaaattttttttttcgcgttataaatattttaaatttttggt

SEQ ID NO: 13598 - DNA, 566 bp, Artificial Sequence
  chemically treated genomic DNA (Homo sapiens) CpG-island No: 13598
accaaaaatttaaaatatttataacgcgaaaaaaaaaatttcccgccttcacccgcgcgaataaatactctactaaaaaccgacacattacgcctatcgctaacctttaaccccgcgcatacgcaacaaaaaatcgccaacgacgatttacctacaaacaattacaattttaactttcgcgaaaaaataattaacaacgtacatttcgtcaccattcctaccaacgcgaataccaatactacgacgaaaataattaccaatttcctactctcacccgatacgcaactacgtaaaacaaatcccgctatctaaaacgatccttctattctcgatccgcaaaaactacctaacgaacaacgcgaatcattacaatcaatacgctaccaaacgaattacaaaataaacaacatccacgacatcaataatattattactctatattcgtacatatattacgtcttactaaaacgtaaactataaatcgtattttaatcgttcgtcgacatttcgcgaattctcgtatcgtcgttcttaccccttaaccgatatattctttcgcgaattcg

SEQ ID NO: 13599 - DNA, 566 bp, Artificial Sequence
  chemically treated genomic DNA (Homo sapiens) CpG-island No: 13599
gttaagagtttaagatatttgtggcgcgaaggaaaggatttttcgtttttattcgcgcggatggatgttttgttgaaagtcggtatattgcgtttgtcgttgatttttaatttcgcgtatgcgtagtaaaaaatcgttagcggcgatttgtttgtaagtagttatagttttggttttcgcgaggggatgattggtaacgtgtatttcgttattatttttgttaacgcgaatgttagtgttgcggcgaaggtagttgttaattttttgtttttattcgatgcgtaattgcgtaaagtagatttcgttgtttggggcgatttttttgttttcgattcgtaaaaattgtttgacgggtagcgcgaattattgtaattaatgcgttgttaggcgggttgtaggataaatagtatttacggtattagtggtattgttgttttgtgttcgtgtatgtgttgcgttttgttgaggcgtgggttatgggtcgtgttttggtcgttcgtcggtatttcgcgggttttcgtgtcgtcgtttttgttttttagtcggtgtgttttttcgcgggttcg

SEQ ID NO: 13600 - DNA, 566 bp, Artificial Sequence
  chemically treated genomic DNA (Homo sapiens) CpG-island No: 13600
cgaacccgcgaaaaaacacaccgactaaaaaacaaaaacgacgacacgaaaacccgcgaaataccgacgaacgaccaaaacacgacccataacccacgcctcaacaaaacgcaacacatacacgaacacaaaacaacaataccactaataccgtaaatactatttatcctacaacccgcctaacaacgcattaattacaataattcgcgctacccgtcaaacaatttttacgaatcgaaaacaaaaaaatcgccccaaacaacgaaatctactttacgcaattacgcatcgaataaaaacaaaaaattaacaactaccttcgccgcaacactaacattcgcgttaacaaaaataataacgaaatacacgttaccaatcatcccctcgcgaaaaccaaaactataactacttacaaacaaatcgccgctaacgattttttactacgcatacgcgaaattaaaaatcaacgacaaacgcaatataccgactttcaacaaaacatccatccgcgcgaataaaaacgaaaaatcctttccttcgcgccacaaatatcttaaactcttaac

SEQ ID NO: 13601 - DNA, 789 bp, Artificial Sequence
  chemically treated genomic DNA (Homo sapiens) CpG-island No: 13601
gcgcgcgtgacgtagcggtcgaagattggttgtggtagtataaggcggggtttttttcgggcggcgttagcgcggtcggggcggtttagtgcgagtcggggagagtcgaattcggagtagggttttattcgagcgtggattggcggtaggatgtttagttggatggggcggtaggcgggcgggcgcgaagtttggcggtcggacgcggtgtagacggtgacgggcgggttgtttcgttttatttgcgtaaggtgttgtcgttggaggaggcgtatcgtttttacgagttttattcgtttgcgttggaggacgtcgatttcgagaataagtttatgattttgttggtgggttagtatagtatcggtaagattatttttattaggtatcgttatcgtttttcgttcggttttcgtttcgtttcgttttttttacgtgtgcgtcgtagtcggtcgtttttcgtcgttgtttttttcggtcggcgcgatttcggggatttttttcggagttcggcgttcggtgttttcggtttcgtttcggttggttagtttcgcgcgttggagggtttcgcgaattcgcgttttgcgatttcgagttttttttttttgcggttcggaaggcgttgttttcgttggtttcgttcggtcgttttggcgggagggtttaagggagagagggggcgcgagttataattagtatatttttgacgagggagtgatgtttagggatggaaatggggggagaggcgtagggtattcgaatgggatagagttttagttggagagtttgttt

SEQ ID NO: 13602 - DNA, 789 bp, Artificial Sequence
  chemically treated genomic DNA (Homo sapiens) CpG-island No: 13602
aaacaaactctccaactaaaactctatcccattcgaataccctacgcctctccccccatttccatccctaaacatcactccctcgtcaaaaatatactaattataactcgcgccccctctctcccttaaaccctcccgccaaaacgaccgaacgaaaccaacgaaaacaacgccttccgaaccgcaaaaaaaaaaaactcgaaatcgcaaaacgcgaattcgcgaaaccctccaacgcgcgaaactaaccaaccgaaacgaaaccgaaaacaccgaacgccgaactccgaaaaaaatccccgaaatcgcgccgaccgaaaaaaacaacgacgaaaaacgaccgactacgacgcacacgtaaaaaaaacgaaacgaaacgaaaaccgaacgaaaaacgataacgatacctaataaaaataatcttaccgatactatactaacccaccaacaaaatcataaacttattctcgaaatcgacgtcctccaacgcaaacgaataaaactcgtaaaaacgatacgcctcctccaacgacaacaccttacgcaaataaaacgaaacaacccgcccgtcaccgtctacaccgcgtccgaccgccaaacttcgcgcccgcccgcctaccgccccatccaactaaacatcctaccgccaatccacgctcgaataaaaccctactccgaattcgactctccccgactcgcactaaaccgccccgaccgcgctaacgccgcccgaaaaaaaccccgccttatactaccacaaccaatcttcgaccgctacgtcacgcgcgc

SEQ ID NO: 13603 - DNA, 789 bp, Artificial Sequence
  chemically treated genomic DNA (Homo sapiens) CpG-island No: 13603
aaataaattttttaattaggattttgttttattcggatattttacgtttttttttttatttttatttttaggtattattttttcgttaagaatatgttgattatggttcgcgtttttttttttttttggattttttcgttagggcgatcggacgaggttagcgggagtaacgtttttcgaatcgtaaggaaggagggttcggagtcgtagggcgcgggttcgcgggattttttagcgcgcggggttggttagtcggggcggggtcgagggtatcgggcgtcgagtttcgggaggggttttcgaggtcgcgtcggtcgggaggggtagcggcgggaggcggtcgattgcggcgtatacgtggggagggcggagcggggcgggggtcgggcgaggggcggtgacggtatttgatgaaggtggttttgtcggtgttgtattggtttattagtaggattatgggtttgttttcgaagtcggcgttttttagcgtaggcgagtggaattcgtggaagcggtacgttttttttagcggtagtattttgcgtaggtagagcgaggtagttcgttcgttatcgtttgtatcgcgttcggtcgttaggtttcgcgttcgttcgtttgtcgttttatttagttgaatattttgtcgttagtttacgttcggatgggattttgtttcgggttcgatttttttcggttcgtattgagtcgtttcggtcgcgttggcgtcgttcgaggagggtttcgttttgtgttgttatagttagttttcggtcgttacgttacgcgcgt

SEQ ID NO: 13604 - DNA, 789 bp, Artificial Sequence
  chemically treated genomic DNA (Homo sapiens) CpG-island No: 13604
acgcgcgtaacgtaacgaccgaaaactaactataacaacacaaaacgaaaccctcctcgaacgacgccaacgcgaccgaaacgactcaatacgaaccgaaaaaaatcgaacccgaaacaaaatcccatccgaacgtaaactaacgacaaaatattcaactaaataaaacgacaaacgaacgaacgcgaaacctaacgaccgaacgcgatacaaacgataacgaacgaactacctcgctctacctacgcaaaatactaccgctaaaaaaaacgtaccgcttccacgaattccactcgcctacgctaaaaaacgccgacttcgaaaacaaacccataatcctactaataaaccaatacaacaccgacaaaaccaccttcatcaaataccgtcaccgcccctcgcccgacccccgccccgctccgccctccccacgtatacgccgcaatcgaccgcctcccgccgctacccctcccgaccgacgcgacctcgaaaacccctcccgaaactcgacgcccgataccctcgaccccgccccgactaaccaaccccgcgcgctaaaaaatcccgcgaacccgcgccctacgactccgaaccctccttccttacgattcgaaaaacgttactcccgctaacctcgtccgatcgccctaacgaaaaaatccaaaaaaaaaaaaaaacgcgaaccataatcaacatattcttaacgaaaaaataatacctaaaaataaaaataaaaaaaaaaacgtaaaatatccgaataaaacaaaatcctaattaaaaaatttattt

SEQ ID NO: 13605 - DNA, 864 bp, Artificial Sequence
  chemically treated genomic DNA (Homo sapiens) CpG-island No: 13605
tcgttttcggttgaggcggaattttgtgaggagtttgtaatttcgcgtaatattattcgtgaggtgtttcgttcgttgatggcgaagcggttgattgaaatgaaacgttatcgcggggcgtttgtggtatcgcgtattagtggaattatttcgatattgacgtattgtaatgggtgttggaaaatgattacgatttacggtttattagtgttatgagcgaagtgcgaaatttggtggaatcggcgattgttcgttgggtagtagagcgcgcgatttttagcgatttggcgtagattgaatcggcgttgaacgagatgattgttaataattaggatcgcgaagcgtttaacgaagcggatattcgttattacgaggcggtgttgtagtcggtgtataattcggtgttatagtaatttagtattgcgattagttcgttgtagcggcgggtttttgaacgaatttggatgggcgatgaggttaattatgtcgtaaacgttttaggaatataaggcgttgttcgatgcgatacgatattaggacggcgatgcggtagagtaggcggcgtttattatgatcgttagttcgatacgaaggttaaaggaaattatatgatagttcgttatatcgtaattgattggggatcgattaatttgcgcgtttggttttattagggcgattattgtttggagagtaggtaattagaagtaggcgttacgcgtttgaacggaaaattttcggttgcggtgttagtagaagttacgatcgattggcgtgaagagaaaacgttagtggtaatggtaggaatggttggtagtaacgtcggttggaaagttgtatcgtattatttgtttttgtttgtttttt

SEQ ID NO: 13606 - DNA, 864 bp, Artificial Sequence
  chemically treated genomic DNA (Homo sapiens) CpG-island No: 13606
aaaaaacaaacaaaaacaaataatacgatacaactttccaaccgacgttactaccaaccattcctaccattaccactaacgttttctcttcacgccaatcgatcgtaacttctactaacaccgcaaccgaaaattttccgttcaaacgcgtaacgcctacttctaattacctactctccaaacaataatcgccctaataaaaccaaacgcgcaaattaatcgatccccaatcaattacgatataacgaactatcatataatttcctttaaccttcgtatcgaactaacgatcataataaacgccgcctactctaccgcatcgccgtcctaatatcgtatcgcatcgaacaacgccttatattcctaaaacgtttacgacataattaacctcatcgcccatccaaattcgttcaaaaacccgccgctacaacgaactaatcgcaatactaaattactataacaccgaattatacaccgactacaacaccgcctcgtaataacgaatatccgcttcgttaaacgcttcgcgatcctaattattaacaatcatctcgttcaacgccgattcaatctacgccaaatcgctaaaaatcgcgcgctctactacccaacgaacaatcgccgattccaccaaatttcgcacttcgctcataacactaataaaccgtaaatcgtaatcattttccaacacccattacaatacgtcaatatcgaaataattccactaatacgcgataccacaaacgccccgcgataacgtttcatttcaatcaaccgcttcgccatcaacgaacgaaacacctcacgaataatattacgcgaaattacaaactcctcacaaaattccgcctcaaccgaaaacga

SEQ ID NO: 13607 - DNA, 864 bp, Artificial Sequence
  chemically treated genomic DNA (Homo sapiens) CpG-island No: 13607
gaaaaataggtaggaatagataatacggtgtaattttttagtcgacgttgttgttaattatttttgttattattattggcgttttttttttacgttagtcggtcgtgatttttgttaatatcgtagtcggagatttttcgtttaggcgcgtgacgtttgtttttgattgtttgttttttaggtagtggtcgttttgataaagttaggcgcgtagattggtcgatttttagttaattgcgatgtagcgagttgttatgtgattttttttaattttcgtgtcgagttggcgattatggtaagcgtcgtttgttttgtcgtatcgtcgttttgatgtcgtatcgtatcgaatagcgttttatgtttttggagcgtttgcggtatggttggttttatcgtttatttaggttcgtttaaaaattcgtcgttgtagcgaattgatcgtaatgttaagttgttgtaatatcgggttatgtatcgattgtagtatcgtttcgtggtagcgaatattcgtttcgttaaacgtttcgcggttttgattgttggtaattatttcgtttagcgtcgatttaatttgcgttagatcgttggaagtcgcgcgttttgttgtttaacgggtaatcgtcggttttattagatttcgtatttcgtttatggtattgataagtcgtgggtcgtagttattttttagtatttattgtagtacgttagtgtcgaggtaattttattggtacgcggtgttataaacgtttcgcgataacgttttattttaattagtcgtttcgttattagcgaacggaatattttacggatgatgttgcgcgaggttgtaaattttttatagagtttcgttttagtcggaagcgg

SEQ ID NO: 13608 - DNA, 864 bp, Artificial Sequence
  chemically treated genomic DNA (Homo sapiens) CpG-island No: 13608
ccgcttccgactaaaacgaaactctataaaaaatttacaacctcgcgcaacatcatccgtaaaatattccgttcgctaataacgaaacgactaattaaaataaaacgttatcgcgaaacgtttataacaccgcgtaccaataaaattacctcgacactaacgtactacaataaatactaaaaaataactacgacccacgacttatcaataccataaacgaaatacgaaatctaataaaaccgacgattacccgttaaacaacaaaacgcgcgacttccaacgatctaacgcaaattaaatcgacgctaaacgaaataattaccaacaatcaaaaccgcgaaacgtttaacgaaacgaatattcgctaccacgaaacgatactacaatcgatacataacccgatattacaacaacttaacattacgatcaattcgctacaacgacgaatttttaaacgaacctaaataaacgataaaaccaaccataccgcaaacgctccaaaaacataaaacgctattcgatacgatacgacatcaaaacgacgatacgacaaaacaaacgacgcttaccataatcgccaactcgacacgaaaattaaaaaaaatcacataacaactcgctacatcgcaattaactaaaaatcgaccaatctacgcgcctaactttatcaaaacgaccactacctaaaaaacaaacaatcaaaaacaaacgtcacgcgcctaaacgaaaaatctccgactacgatattaacaaaaatcacgaccgactaacgtaaaaaaaaaacgccaataataataacaaaaataattaacaacaacgtcgactaaaaaattacaccgtattatctattcctacctatttttc

SEQ ID NO: 13609 - DNA, 728 bp, Artificial Sequence
  chemically treated genomic DNA (Homo sapiens) CpG-island No: 13609
  unsure (351)
gcgtaaagttgcgtaattcgatgttaattacggcgacgttttttagtaatgacggtgtgtgttgttgtgcggtaggcgagagcggatggaattaacgttgtcgttagtaaggtggttttcggtagcgaatttacgatcgtaattttcgtattttttagcgtggcgatttgttgcgagcggtattgcgggttacgtttagtgtttgttatcgtggtaatggtatatagtggttgattatttaaacgcgcggtataggttttttgttaggcgtttattagcgaggcggtaggatcggcggtcgtatcgaagttaattacgatattaagtagtaatacgcgtatttgcggttangcgtcgagatcggtaattaattggttgcgtaaggttgggtcgattatcggatggggacgttcgacggtgtagaaattatcgtcgaggttaataatttggtggttatcggcgtttagtattatgttatgttgatgggtatcgtcggtttttacgttaaggtgttcggtaagtaatttcgtcgtttcggtagttagcgtatcgatcggtatataaatcgtaaataaattcgttgttgataggcgttattgcgttacgtcgcgtcgtgacgcgtgaaagtaggtaagttaggcgtgcggttttatttagcgaagtgttggtatttgttttaaaattatttgtcgaagttgtgcgtttgaaaattgttaatgttatgaaag

SEQ ID NO: 13610 - DNA, 728 bp, Artificial Sequence
  chemically treated genomic DNA (Homo sapiens) CpG-island No: 13610
  unsure (378)
ctttcataacattaacaattttcaaacgcacaacttcgacaaataattttaaaacaaataccaacacttcgctaaataaaaccgcacgcctaacttacctactttcacgcgtcacgacgcgacgtaacgcaataacgcctatcaacaacgaatttatttacgatttatataccgatcgatacgctaactaccgaaacgacgaaattacttaccgaacaccttaacgtaaaaaccgacgatacccatcaacataacataatactaaacgccgataaccaccaaattattaacctcgacgataatttctacaccgtcgaacgtccccatccgataatcgacccaaccttacgcaaccaattaattaccgatctcgacgcntaaccgcaaatacgcgtattactacttaatatcgtaattaacttcgatacgaccgccgatcctaccgcctcgctaataaacgcctaacaaaaaacctataccgcgcgtttaaataatcaaccactatataccattaccacgataacaaacactaaacgtaacccgcaataccgctcgcaacaaatcgccacgctaaaaaatacgaaaattacgatcgtaaattcgctaccgaaaaccaccttactaacgacaacgttaattccatccgctctcgcctaccgcacaacaacacacaccgtcattactaaaaaacgtcgccgtaattaacatcgaattacgcaactttacgc

SEQ ID NO: 13611 - DNA, 728 bp, Artificial Sequence
  chemically treated genomic DNA (Homo sapiens) CpG-island No: 13611
  unsure (378)
tttttatggtattaataatttttagacgtatagtttcggtaggtggttttgaaataaatgttagtatttcgttggatgaggtcgtacgtttggtttgtttgtttttacgcgttacggcgcgacgtaacgtaatagcgtttgttagtagcggatttatttgcggtttgtatatcggtcggtacgttggttgtcgaagcggcgggattatttgtcggatattttggcgtggaagtcgacgatatttattaatatggtatgatgttggacgtcgatagttattagattattgatttcggcgatgatttttatatcgtcgggcgtttttattcgatgatcgatttaattttacgtaattagttaattgtcgatttcggcgtntaatcgtaagtgcgcgtgttgttgtttgatgtcgtgattggtttcggtgcgatcgtcgattttgtcgtttcgttggtgagcgtttggtaaaaagtttgtgtcgcgcgtttagataattaattattgtatgttattgttacggtgataggtattgaacgtgattcgtaatgtcgttcgtagtaaatcgttacgttggaagatgcggggattgcggtcgtgagttcgttatcggaagttattttgttggcggtagcgttaattttattcgttttcgtttgtcgtatagtaatatatatcgttattattggaaaacgtcgtcgtgattaatatcggattacgtagttttgcgt

SEQ ID NO: 13612 - DNA, 728 bp, Artificial Sequence
  chemically treated genomic DNA (Homo sapiens) CpG-island No: 13612
  unsure (351)
acgcaaaactacgtaatccgatattaatcacgacgacgttttccaataataacgatatatattactatacgacaaacgaaaacgaataaaattaacgctaccgccaacaaaataacttccgataacgaactcacgaccgcaatccccgcatcttccaacgtaacgatttactacgaacgacattacgaatcacgttcaatacctatcaccgtaacaataacatacaataattaattatctaaacgcgcgacacaaactttttaccaaacgctcaccaacgaaacgacaaaatcgacgatcgcaccgaaaccaatcacgacatcaaacaacaacacgcgcacttacgattanacgccgaaatcgacaattaactaattacgtaaaattaaatcgatcatcgaataaaaacgcccgacgatataaaaatcatcgccgaaatcaataatctaataactatcgacgtccaacatcataccatattaataaatatcgtcgacttccacgccaaaatatccgacaaataatcccgccgcttcgacaaccaacgtaccgaccgatatacaaaccgcaaataaatccgctactaacaaacgctattacgttacgtcgcgccgtaacgcgtaaaaacaaacaaaccaaacgtacgacctcatccaacgaaatactaacatttatttcaaaaccacctaccgaaactatacgtctaaaaattattaataccataaaaa

SEQ ID NO: 13613 - DNA, 1009 bp, Artificial Sequence
  chemically treated genomic DNA (Homo sapiens) CpG-island No: 13613
  unsure (940)
tcgttgcgggaattgatgcgcgatattattgagcggggttatgagggttattgtacggtggagttggtgacgatgtatatgaacgagtttagattttatgttcgttaggcgttggaacgttttcgcgcgttgttgtcggaggatgagagatgaaaattttggcgataatcggcgataattgcgtcgatatttattcgtaattgaataaagcgttttttggcggtaatgcggttaatgtggcggtgtattgtattcgttacggtatatagtcgggatgtattatttgggtgggtgacgatgattacggtataaagttgaagtaggatttcgttcgtatgggcgtcgatattagttatgtttatacgaaatacggcgttatcgtataaatttaggtggaattgtacgataatgatcgcgtttttggcgattatatcgaaggcgtgatggtcgaattttgttttgagtgaagaggattacgtttggttggcgtagtatgatattgtgtacgcggtaatttggggatatgcggaagacgtatttttatagttgtacgttgcgggtaaatttatcgttttcgattttttcgataagtgggatagttcgttttggtagatattggtgtcgtatttcgattttgtttttgttttcgtatcgtaagaagacgaaacgttgcgtttgaagatgaaagcgattgttgttcgtggcgtaggaatagtgattgttacgttgggtgaaaacggtagtattgtttgggatggcgcgtagttttggcgttaggtttttgaatcggtgacggttatcgatattatgggtgtcggagattcgtttattgtcggatttttttgcggttggtttgcggggatgatattatcgtaggcgatagcgtagggaacggcgtgcgcggcgaaaattatttagtattacggtgtttggtaggtantacgttggcgtgagtatttttacgttaacgtgttgttatttgtcggaaaacgattttataattcgagta

SEQ ID NO: 13614 - DNA, 1009 bp, Artificial Sequence
  chemically treated genomic DNA (Homo sapiens) CpG-island No: 13614
  unsure (70)
tactcgaattataaaatcgttttccgacaaataacaacacgttaacgtaaaaatactcacgccaacgtantacctaccaaacaccgtaatactaaataattttcgccgcgcacgccgttccctacgctatcgcctacgataatatcatccccgcaaaccaaccgcaaaaaaatccgacaataaacgaatctccgacacccataatatcgataaccgtcaccgattcaaaaacctaacgccaaaactacgcgccatcccaaacaatactaccgttttcacccaacgtaacaatcactattcctacgccacgaacaacaatcgctttcatcttcaaacgcaacgtttcgtcttcttacgatacgaaaacaaaaacaaaatcgaaatacgacaccaatatctaccaaaacgaactatcccacttatcgaaaaaatcgaaaacgataaatttacccgcaacgtacaactataaaaatacgtcttccgcatatccccaaattaccgcgtacacaatatcatactacgccaaccaaacgtaatcctcttcactcaaaacaaaattcgaccatcacgccttcgatataatcgccaaaaacgcgatcattatcgtacaattccacctaaatttatacgataacgccgtatttcgtataaacataactaatatcgacgcccatacgaacgaaatcctacttcaactttataccgtaatcatcgtcacccacccaaataatacatcccgactatataccgtaacgaatacaatacaccgccacattaaccgcattaccgccaaaaaacgctttattcaattacgaataaatatcgacgcaattatcgccgattatcgccaaaattttcatctctcatcctccgacaacaacgcgcgaaaacgttccaacgcctaacgaacataaaatctaaactcgttcatatacatcgtcaccaactccaccgtacaataaccctcataaccccgctcaataatatcgcgcatcaattcccgcaacga

SEQ ID NO: 13615 - DNA, 1009 bp, Artificial Sequence
  chemically treated genomic DNA (Homo sapiens) CpG-island No: 13615
  unsure (70)
tattcggattatagggtcgtttttcggtaagtaatagtacgttggcgtgaagatgtttacgttaacgtantatttattaggtatcgtggtattgaatggttttcgtcgcgtacgtcgttttttgcgttatcgtttgcggtaatgttattttcgtagattagtcgtaaaggaattcggtaatgaacgaattttcggtatttatggtgtcgataatcgttatcggtttaggagtttgacgttagaattgcgcgttattttaggtaatgttgtcgtttttatttagcgtgataattattgtttttgcgttacgggtaataatcgtttttatttttagacgtagcgtttcgtttttttgcggtgcggaggtaaaggtaaaatcgagatgcggtattagtgtttgttagagcgggttgttttatttgtcggagaagtcgaaagcggtaagtttgttcgtagcgtgtagttgtgggaatgcgtttttcgtatgtttttagattgtcgcgtgtataatgttatattgcgttagttaggcgtaattttttttatttagggtaaaattcggttattacgttttcggtgtagtcgttaaaaacgcgattattgtcgtgtagttttatttgagtttgtgcggtaacgtcgtgtttcgtatggatatggttgatatcgacgtttatgcgggcgagattttgttttagttttgtgtcgtagttatcgttatttatttaggtaatgtatttcggttgtatgtcgtagcgagtgtagtatatcgttatattgatcgtattatcgttagaaaacgttttatttagttgcgggtagatatcgacgtagttatcgtcgattgtcgttagggtttttattttttatttttcggtagtagcgcgcgaaagcgttttagcgtttggcgggtatagagtttgggttcgtttatatatatcgttattagttttatcgtatagtaatttttatagtttcgtttaataatatcgcgtattagttttcgtagcgg

SEQ ID NO: 13616 - DNA, 1009 bp, Artificial Sequence
  chemically treated genomic DNA (Homo sapiens) CpG-island No: 13616
  unsure (940)
ccgctacgaaaactaatacgcgatattattaaacgaaactataaaaattactatacgataaaactaataacgatatatataaacgaacccaaactctatacccgccaaacgctaaaacgctttcgcgcgctactaccgaaaaataaaaaataaaaaccctaacgacaatcgacgataactacgtcgatatctacccgcaactaaataaaacgttttctaacgataatacgatcaatataacgatatactacactcgctacgacatacaaccgaaatacattacctaaataaataacgataactacgacacaaaactaaaacaaaatctcgcccgcataaacgtcgatatcaaccatatccatacgaaacacgacgttaccgcacaaactcaaataaaactacacgacaataatcgcgtttttaacgactacaccgaaaacgtaataaccgaattttaccctaaataaaaaaaattacgcctaactaacgcaatataacattatacacgcgacaatctaaaaacatacgaaaaacgcattcccacaactacacgctacgaacaaacttaccgctttcgacttctccgacaaataaaacaacccgctctaacaaacactaataccgcatctcgattttacctttacctccgcaccgcaaaaaaacgaaacgctacgtctaaaaataaaaacgattattacccgtaacgcaaaaacaataattatcacgctaaataaaaacgacaacattacctaaaataacgcgcaattctaacgtcaaactcctaaaccgataacgattatcgacaccataaataccgaaaattcgttcattaccgaattcctttacgactaatctacgaaaataacattaccgcaaacgataacgcaaaaaacgacgtacgcgacgaaaaccattcaataccacgatacctaataaatantacgttaacgtaaacatcttcacgccaacgtactattacttaccgaaaaacgaccctataatccgaata

SEQ ID NO: 13617 - DNA, 722 bp, Artificial Sequence
  chemically treated genomic DNA (Homo sapiens) CpG-island No: 13617
  unsure (139, 196, 347, 359..360, 593, 605, 647, 656, 669, 677..)
tggcgttggttttttggtatggaaaaaagtatcgggataatacgtttagtatgaaacgtttttttaacggtcgcgggttttggtgtttgggtggtaaagcggcgaaaaattatcgtgagaaatcggtcgatgtcgtcgngtttacgatgaacgtggcggtattcgatgaacgatattgagataagagggatttttngacgttgtttgggtgataaacgtattgaggggtttgtttggtttaaatttattcgcggtttaacgttaaaaataaaggggatttgttagattgagcgtgttgttagcgagttcgggtattttatgcgtttttatgttgtttgttcgtattngtggtgaacganngtagtattttaaatttcggcgataaagagatttcgttcgggttgaaatggatatcgggcgaattttttaggcgttttttatttcgtgtgtgatatataatgtttgcgttattaagtagtaggagttggattttattgaagttcgttatatttgcgatattatcgggatttggacgcgcgacggtttattttggtttttattaataggtatcgaaatcgattcgttagatagtngtgacgttttantatcgtggacggcgatacgagtcgcggtttattatcgtaggnggttttagnagttcgggttaanagggacgnntggttataaaacgaaaggggatataggaaagcgtaaaattttcg

SEQ ID NO: 13618 - DNA, 722 bp, Artificial Sequence
  chemically treated genomic DNA (Homo sapiens) CpG-island No: 13618
  unsure (45..46, 54, 67, 76, 118, 130, 363..364, 376, 527, 584)
cgaaaattttacgctttcctatatcccctttcgttttataaccanncgtccctnttaacccgaactnctaaaaccncctacgataataaaccgcgactcgtatcgccgtccacgatantaaaacgtcacnactatctaacgaatcgatttcgatacctattaataaaaaccaaaataaaccgtcgcgcgtccaaatcccgataatatcgcaaatataacgaacttcaataaaatccaactcctactacttaataacgcaaacattatatatcacacacgaaataaaaaacgcctaaaaaattcgcccgatatccatttcaacccgaacgaaatctctttatcgccgaaatttaaaatactacnntcgttcaccacnaatacgaacaaacaacataaaaacgcataaaatacccgaactcgctaacaacacgctcaatctaacaaatcccctttatttttaacgttaaaccgcgaataaatttaaaccaaacaaacccctcaatacgtttatcacccaaacaacgtcnaaaaatccctcttatctcaatatcgttcatcgaataccgccacgttcatcgtaaacncgacgacatcgaccgatttctcacgataatttttcgccgctttaccacccaaacaccaaaacccgcgaccgttaaaaaaacgtttcatactaaacgtattatcccgatacttttttccataccaaaaaaccaacgcca

SEQ ID NO: 13619 - DNA, 722 bp, Artificial Sequence
  chemically treated genomic DNA (Homo sapiens) CpG-island No: 13619
  unsure (45..46, 54, 67, 76, 118, 130, 363..364, 376, 527, 584)
cgaaggttttacgtttttttgtattttttttcgttttgtagttanncgtttttnttaattcggattnttggaattntttacggtggtaaatcgcggttcgtatcgtcgtttacgatgntgaaacgttatngttgtttggcgggtcgatttcggtgtttgttgatgaaaattaggataaatcgtcgcgcgtttagatttcggtggtgtcgtagatgtaacgagttttagtgaaatttagtttttgttgtttaatgacgtaggtattatgtattatatacggggtaaaagacgtttggagggttcgttcggtgtttattttagttcgaacggggtttttttgtcgtcgaagtttaaggtattgtnntcgtttattatnagtgcggataggtaatatgaaaacgtatgaaatgttcggattcgttggtagtacgtttaatttggtaggttttttttgtttttggcgttgagtcgcgaatagatttgggttagatagattttttaatacgtttattatttaggtaacgttnggggattttttttgttttaatatcgtttatcgaatgtcgttacgtttatcgtgaatncggcgatatcgatcgattttttacgatagtttttcgtcgttttattatttagatattagaattcgcgatcgttggagaagcgttttatattgagcgtattgtttcggtgtttttttttatattagggggttagcgtta

SEQ ID NO: 13620 - DNA, 722 bp, Artificial Sequence
  chemically treated genomic DNA (Homo sapiens) CpG-island No: 13620
  unsure (139, 196, 347, 359..360, 593, 605, 647, 656, 669, 677..)
taacgctaaccccctaatataaaaaaaaacaccgaaacaatacgctcaatataaaacgcttctccaacgatcgcgaattctaatatctaaataataaaacgacgaaaaactatcgtaaaaaatcgatcgatatcgccgnattcacgataaacgtaacgacattcgataaacgatattaaaacaaaaaaaatccccnaacgttacctaaataataaacgtattaaaaaatctatctaacccaaatctattcgcgactcaacgccaaaaacaaaaaaaacctaccaaattaaacgtactaccaacgaatccgaacatttcatacgttttcatattacctatccgcactnataataaacgannacaataccttaaacttcgacgacaaaaaaaccccgttcgaactaaaataaacaccgaacgaaccctccaaacgtcttttaccccgtatataatacataatacctacgtcattaaacaacaaaaactaaatttcactaaaactcgttacatctacgacaccaccgaaatctaaacgcgcgacgatttatcctaattttcatcaacaaacaccgaaatcgacccgccaaacaacnataacgtttcancatcgtaaacgacgatacgaaccgcgatttaccaccgtaaanaattccaanaatccgaattaanaaaaacgnntaactacaaaacgaaaaaaaatacaaaaaaacgtaaaaccttcg

SEQ ID NO: 13621 - DNA, 568 bp, Artificial Sequence
  chemically treated genomic DNA (Homo sapiens) CpG-island No: 13621
tacggggtagttttatttttagttgttttgttggattcggtattttattcgacgagttgatttcgattagattttcgtcgttatgttgtatgtgtcgtagttgttgttgtacgttagtcgttcggttcgttgggatagcgattacgtagtgttgttggatgatgaaatttaggtaattgttagtgagattgtgcgttacgatttgtttgatcgggtgtatatcggttttgattttttcgatgtttttattaatcgtattgtcgcgtgggttattggtatacgtaatatgaaaaaagttttgttgcgtgcgttgttggaatttatcgttgagttgcgtaagttggaagcggcgggcgattatattgcgcgtttggtattgttggaagagtagaaatcgttgtcgtggtaggcggtttgggaaatgtattgttaacgttacgatacgttagtaggtagcgaatggttggagagcgtgcgggtttatgagaaagaaattttgagtcgtcgcgggtaaataatgtcggatgcggcgcgagcgttttattcggtttataatttttatatattt

SEQ ID NO: 13622 - DNA, 568 bp, Artificial Sequence
  chemically treated genomic DNA (Homo sapiens) CpG-island No: 13622
aaatatataaaaattataaaccgaataaaacgctcgcgccgcatccgacattatttacccgcgacgactcaaaatttctttctcataaacccgcacgctctccaaccattcgctacctactaacgtatcgtaacgttaacaatacatttcccaaaccgcctaccacgacaacgatttctactcttccaacaataccaaacgcgcaatataatcgcccgccgcttccaacttacgcaactcaacgataaattccaacaacgcacgcaacaaaacttttttcatattacgtataccaataacccacgcgacaatacgattaataaaaacatcgaaaaaatcaaaaccgatatacacccgatcaaacaaatcgtaacgcacaatctcactaacaattacctaaatttcatcatccaacaacactacgtaatcgctatcccaacgaaccgaacgactaacgtacaacaacaactacgacacatacaacataacgacgaaaatctaatcgaaatcaactcgtcgaataaaataccgaatccaacaaaacaactaaaaataaaactaccccgta

SEQ ID NO: 13623 - DNA, 568 bp, Artificial Sequence
  chemically treated genomic DNA (Homo sapiens) CpG-island No: 13623
aaatatgtgaaaattgtaggtcggataaggcgttcgcgtcgtattcggtattgtttattcgcggcgatttaaaattttttttttataagttcgtacgttttttagttattcgttatttgttggcgtatcgtgacgttggtaatatattttttagatcgtttgttacggtaacgatttttgtttttttagtagtgttagacgcgtagtgtaatcgttcgtcgtttttagtttgcgtagtttagcggtaggttttagtaacgtacgtagtagggttttttttatattgcgtgtattaatgatttacgcggtaatgcggttgatagaggtatcgaagaagttaaggtcgatatgtattcggttaaatagatcgtgacgtataattttattggtaattgtttgggttttattatttagtagtattacgtgatcgttgttttagcgaatcggacggttgacgtgtagtagtaattgcggtatatatagtatggcggcggaaatttggtcggaattaattcgtcgggtgaaatgtcgggtttagtaaggtagttgggggtggggttatttcgta

SEQ ID NO: 13624 - DNA, 568 bp, Artificial Sequence
  chemically treated genomic DNA (Homo sapiens) CpG-island No: 13624
tacgaaataaccccacccccaactaccttactaaacccgacatttcacccgacgaattaattccgaccaaatttccgccgccatactatatataccgcaattactactacacgtcaaccgtccgattcgctaaaacaacgatcacgtaatactactaaataataaaacccaaacaattaccaataaaattatacgtcacgatctatttaaccgaatacatatcgaccttaacttcttcgatacctctatcaaccgcattaccgcgtaaatcattaatacacgcaatataaaaaaaaccctactacgtacgttactaaaacctaccgctaaactacgcaaactaaaaacgacgaacgattacactacgcgtctaacactactaaaaaaacaaaaatcgttaccgtaacaaacgatctaaaaaatatattaccaacgtcacgatacgccaacaaataacgaataactaaaaaacgtacgaacttataaaaaaaaaattttaaatcgccgcgaataaacaataccgaatacgacgcgaacgccttatccgacctacaattttcacatattt

SEQ ID NO: 13625 - DNA, 588 bp, Artificial Sequence
  chemically treated genomic DNA (Homo sapiens) CpG-island No: 13625
tgcgtgtcgcgtaaaattattatcggcggtaatttggagaatggcggtacggtttaaatgaatagcgaaggggggaaatcggggaatgtattgatcgttaacggtaattatatcggaaataatggtttgatgacgtttaacgcgacgttgggcggcgatattcgtttatcgatagatgaacgtgaaaggcgatatttaaggggaatattcgcgttcgggttgataatattggcggcgtcggtgtataaacggttacggtattgaatttattgaggttggcggtaattttgtaggtatttcggttgattagcggattgtcgatgttgggtttagtttataggttggtacgggacgggaatgaggagaaaatggtatttgatagtaatggggagggtatgttcgggatagtatcgatttattaagaagtttttggagtggattcgaagcgtataaagtaacggtcgaggcggaggttatattttattatggcggttcgacgcgggcgcgtaataacggtggggagcgcgattatgattgcgtatagggggtacgaatagatgcgcgtggggataacgcggggtgcggttt

SEQ ID NO: 13626 - DNA, 588 bp, Artificial Sequence
  chemically treated genomic DNA (Homo sapiens) CpG-island No: 13626
aaaccgcaccccgcgttatccccacgcgcatctattcgtaccccctatacgcaatcataatcgcgctccccaccgttattacgcgcccgcgtcgaaccgccataataaaatataacctccgcctcgaccgttactttatacgcttcgaatccactccaaaaacttcttaataaatcgatactatcccgaacataccctccccattactatcaaataccattttctcctcattcccgtcccgtaccaacctataaactaaacccaacatcgacaatccgctaatcaaccgaaatacctacaaaattaccgccaacctcaataaattcaataccgtaaccgtttatacaccgacgccgccaatattatcaacccgaacgcgaatattccccttaaatatcgcctttcacgttcatctatcgataaacgaatatcgccgcccaacgtcgcgttaaacgtcatcaaaccattatttccgatataattaccgttaacgatcaatacattccccgatttccccccttcgctattcatttaaaccgtaccgccattctccaaattaccgccgataataattttacgcgacacgca

SEQ ID NO: 13627 - DNA, 588 bp, Artificial Sequence
  chemically treated genomic DNA (Homo sapiens) CpG-island No: 13627
gggtcgtatttcgcgttgtttttacgcgtatttattcgtgttttttgtacgtagttatgatcgcgttttttatcgttgttacgcgttcgcgtcgggtcgttatggtggagtatggttttcgtttcggtcgttattttgtgcgtttcggatttattttagggattttttgatggatcggtgttatttcgggtatattttttttattattgttagatattattttttttttattttcgtttcgtattagtttgtaaattaagtttagtatcgatagttcgttgattagtcgaagtatttgtagaattatcgttaattttaatgagtttaatatcgtgatcgtttgtgtatcgacgtcgttaatgttattaattcgaacgcgagtgttttttttgggtatcgttttttacgtttatttatcggtgggcgaatatcgtcgtttagcgtcgcgttgaacgttattaggttattgttttcggtatagttgtcgttaacggttagtatatttttcggtttttttttttcgttatttatttgaatcgtgtcgttattttttaggttgtcgtcgatagtggttttacgcgatacgta

SEQ ID NO: 13628 - DNA, 588 bp, Artificial Sequence
  chemically treated genomic DNA (Homo sapiens) CpG-island No: 13628
tacgtatcgcgtaaaaccactatcgacgacaacctaaaaaataacgacacgattcaaataaataacgaaaaaaaaaaaccgaaaaatatactaaccgttaacgacaactataccgaaaacaataacctaataacgttcaacgcgacgctaaacgacgatattcgcccaccgataaataaacgtaaaaaacgatacccaaaaaaaacactcgcgttcgaattaataacattaacgacgtcgatacacaaacgatcacgatattaaactcattaaaattaacgataattctacaaatacttcgactaatcaacgaactatcgatactaaacttaatttacaaactaatacgaaacgaaaataaaaaaaaaataatatctaacaataataaaaaaaatatacccgaaataacaccgatccatcaaaaaatccctaaaataaatccgaaacgcacaaaataacgaccgaaacgaaaaccatactccaccataacgacccgacgcgaacgcgtaacaacgataaaaaacgcgatcataactacgtacaaaaaacacgaataaatacgcgtaaaaacaacgcgaaatacgaccc

SEQ ID NO: 13629 - DNA, 643 bp, Artificial Sequence
  chemically treated genomic DNA (Homo sapiens) CpG-island No: 13629
  unsure (595, 602..603, 606, 631)
cgtttcgtttgtcgtcgttatagttgatcgtaattgttttttcgtttcgttttatagtgttttaaagtttggtgatatggttaaagtgagaattgtcgttgtatttcgttttttagacggatttgtagtttatcgagattcgtttcgtagcgttcgatttttttttgttgacgtagtgcggtttgtattaggtttaggtgattattggtcgtttgataattcgtttttagatcgttttcggtatcgttgtgttttgttagtttacgcgttatatcgacgtgtttgtattgtttagtcgttagttgttgcgcgaagtattagttcgcgacgaaattttagggttttgtcgagatggatacggcgttcgttggcgtgacgtatgtagttcgtcgttacgtagttggtggtttcgttgattagatgtttaaataggtcgcggttcgattgggtgatacgaatcgtttttagcgttatacggtttttacgtagcgtcgtttttatgttttggaacgttttacgtacgtcgttgttttttggtaataggtagtcgcgtagagaacgggtaatggtattggagtcgtattcgttgttgttnggaattnngtngacgcggatgagattaatgttgtantattaggaaatt

SEQ ID NO: 13630 - DNA, 643 bp, Artificial Sequence
  chemically treated genomic DNA (Homo sapiens) CpG-island No: 13630
  unsure (13, 38, 41..42, 49)
aatttcctaatantacaacattaatctcatccgcgtcnacnnaattccnaacaacaacgaatacgactccaataccattacccgttctctacgcgactacctattaccaaaaaacaacgacgtacgtaaaacgttccaaaacataaaaacgacgctacgtaaaaaccgtataacgctaaaaacgattcgtatcacccaatcgaaccgcgacctatttaaacatctaatcaacgaaaccaccaactacgtaacgacgaactacatacgtcacgccaacgaacgccgtatccatctcgacaaaaccctaaaatttcgtcgcgaactaatacttcgcgcaacaactaacgactaaacaatacaaacacgtcgatataacgcgtaaactaacaaaacacaacgataccgaaaacgatctaaaaacgaattatcaaacgaccaataatcacctaaacctaatacaaaccgcactacgtcaacaaaaaaaaatcgaacgctacgaaacgaatctcgataaactacaaatccgtctaaaaaacgaaatacaacgacaattctcactttaaccatatcaccaaactttaaaacactataaaacgaaacgaaaaaacaattacgatcaactataacgacgacaaacgaaacg

SEQ ID NO: 13631 - DNA, 643 bp, Artificial Sequence
  chemically treated genomic DNA (Homo sapiens) CpG-island No: 13631
  unsure (13, 38, 41..42, 49)
ggttttttggtgntgtaatattggttttattcgcgttnatnnaattttnagtaataacgagtacgattttagtgttattattcgttttttgcgcgattatttgttgttagaaaatagcggcgtgcgtaaagcgttttaggatatggaagcggcgttgcgtgaaaatcgtatgacgttggaagcgattcgtgttatttagtcggatcgcgatttgtttaagtatttgattagcgaagttattaattacgtggcggcggattatatgcgttacgttaacgagcgtcgtgtttatttcgataaagttttggagtttcgtcgcgagttaatatttcgcgtagtaattggcggttgagtagtataaatacgtcgatatggcgcgtgagttggtagagtataacggtgtcgaaggcgatttggaagcggattattaggcggttagtgattatttgaatttggtgtaaatcgtattgcgttagtaggagaagatcgaacgttacgaagcggatttcgatgagttgtagattcgtttgaagagcggggtatagcgatagtttttattttagttatattattaggttttggggtattgtagagcgagacggagaaatagttgcggttaattatggcggcggtaggcggagcg

SEQ ID NO: 13632 - DNA, 643 bp, Artificial Sequence
  chemically treated genomic DNA (Homo sapiens) CpG-island No: 13632
  unsure (595, 602..603, 606, 631)
cgctccgcctaccgccgccataattaaccgcaactatttctccgtctcgctctacaataccccaaaacctaataatataactaaaataaaaactatcgctataccccgctcttcaaacgaatctacaactcatcgaaatccgcttcgtaacgttcgatcttctcctactaacgcaatacgatttacaccaaattcaaataatcactaaccgcctaataatccgcttccaaatcgccttcgacaccgttatactctaccaactcacgcgccatatcgacgtatttatactactcaaccgccaattactacgcgaaatattaactcgcgacgaaactccaaaactttatcgaaataaacacgacgctcgttaacgtaacgcatataatccgccgccacgtaattaataacttcgctaatcaaatacttaaacaaatcgcgatccgactaaataacacgaatcgcttccaacgtcatacgattttcacgcaacgccgcttccatatcctaaaacgctttacgcacgccgctattttctaacaacaaataatcgcgcaaaaaacgaataataacactaaaatcgtactcgttattactnaaaattnnatnaacgcgaataaaaccaatattacancaccaaaaaacc

SEQ ID NO: 13633 - DNA, 555 bp, Artificial Sequence
  chemically treated genomic DNA (Homo sapiens) CpG-island No: 13633
cggcgggcggggggggcgttgttttttcgggacggcggggtgtttcgttggcgggcgcgggggtcgcgcggcgacgttcggcggattcggtagagtttggtcgcggcgcgtcgtcgttttcgtcgggtcggtacggtgtcgagttttttgtgttgaatcggcgggacgattggtgttcgggcgcgttagagcggggtaagcgttttaggttagggttgtttttggcgaagttcgattttcgttcggtatttatttcgtttttgttgcgcgttttttttgtttatttttttcgttcggatttatttttttcgttcgcgtcgcgattatcggcgtttcgtcgtttttcgtttggttttttatttagttttatgtttttaatacgttattcgggtgagtttcgcgttgtttgtggagggattgaggcgttcgttgtttttagagggagcgttttagtcgatgtagcgttttttttttttagatgcgatttcggaggggagatcgcggcgttcggggattgttggggtgtttttggaagtttttagttttttttttttt

SEQ ID NO: 13634 - DNA, 555 bp, Artificial Sequence
  chemically treated genomic DNA (Homo sapiens) CpG-island No: 13634
aaaaaaaaaaaaactaaaaacttccaaaaacaccccaacaatccccgaacgccgcgatctcccctccgaaatcgcatctaaaaaaaaaaaacgctacatcgactaaaacgctccctctaaaaacaacgaacgcctcaatccctccacaaacaacgcgaaactcacccgaataacgtattaaaaacataaaactaaataaaaaaccaaacgaaaaacgacgaaacgccgataatcgcgacgcgaacgaaaaaaataaatccgaacgaaaaaaataaacaaaaaaaacgcgcaacaaaaacgaaataaataccgaacgaaaatcgaacttcgccaaaaacaaccctaacctaaaacgcttaccccgctctaacgcgcccgaacaccaatcgtcccgccgattcaacacaaaaaactcgacaccgtaccgacccgacgaaaacgacgacgcgccgcgaccaaactctaccgaatccgccgaacgtcgccgcgcgacccccgcgcccgccaacgaaacaccccgccgtcccgaaaaaacaacgccccccccgcccgccg

SEQ ID NO: 13635 - DNA, 555 bp, Artificial Sequence
  chemically treated genomic DNA (Homo sapiens) CpG-island No: 13635
ggagagggggaagttgggaatttttaaggatattttaataattttcgggcgtcgcggtttttttttcggagtcgtatttgggagggaagggcgttgtatcggttggggcgttttttttggaggtaacgagcgttttagtttttttataaatagcgcggggtttattcgggtgacgtgttgggggtatggggttgaataaggggttaagcgaggggcggcggggcgtcggtggtcgcggcgcgggcggggaggatgggttcggacgaagggagtgagtaaagaggacgcgtagtaagagcgagataaatgtcgggcgaaggtcgggtttcgttaggggtagttttggtttggggcgtttatttcgttttggcgcgttcgagtattagtcgtttcgtcgatttagtataaaaggttcgatatcgtgtcggttcgacgaggacggcggcgcgtcgcggttagattttatcgagttcgtcgggcgtcgtcgcgcgattttcgcgttcgttagcgggatatttcgtcgtttcggaggagtagcgtttttttcgttcgtcg

SEQ ID NO: 13636 - DNA, 555 bp, Artificial Sequence
  chemically treated genomic DNA (Homo sapiens) CpG-island No: 13636
cgacgaacgaaaaaaacgctactcctccgaaacgacgaaatatcccgctaacgaacgcgaaaatcgcgcgacgacgcccgacgaactcgataaaatctaaccgcgacgcgccgccgtcctcgtcgaaccgacacgatatcgaaccttttatactaaatcgacgaaacgactaatactcgaacgcgccaaaacgaaataaacgccccaaaccaaaactacccctaacgaaacccgaccttcgcccgacatttatctcgctcttactacgcgtcctctttactcactcccttcgtccgaacccatcctccccgcccgcgccgcgaccaccgacgccccgccgcccctcgcttaaccccttattcaaccccatacccccaacacgtcacccgaataaaccccgcgctatttataaaaaaactaaaacgctcgttacctccaaaaaaaacgccccaaccgatacaacgcccttccctcccaaatacgactccgaaaaaaaaaccgcgacgcccgaaaattattaaaatatccttaaaaattcccaacttccccctctcc

SEQ ID NO: 13637 - DNA, 907 bp, Artificial Sequence
  chemically treated genomic DNA (Homo sapiens) CpG-island No: 13637
gcggttgttcggttgtgggggaaggcgttttgtgtatggacggtcggagattattcgggttgtttttttcggtgttcggcgttcggcgtttgttgcgtgttgttttttttttcgcgtacgatgtcgtgtttatcgttgtttaggttttgtttttttttttacgtttttttttttcgagttttcgcgtttttgtttgtgtttttgtttttttatttttttcggttgcgtttgtcgttttttcgcgttttcgttttcgtaggacgtatagggagcgaggttcggagttgcgttggttgtcgggttggcgggcggagggcgtgggtagagcgaggggcggggagtgggggcgggggcggggaggcgggcgttggggttttcggcgcggagacgtcgttatgagattgggagaggcggagacggggggggagggggtgtggagtaggaggcgggggcggggatttagagtcggggcgtcgaattggggatcgaggtgatcgaggttcggttgtgtagggcgggtttggggatttagcggcggggcgaggtcgttttgtgtcgtttacgtcggatgtatagtcggtttttttggcgtttacgtatttacgtgagcgtttcgtcggcgatatttttttttttttttattttttcgagttgagagaggagttttataattacgtataagtatataaagatatagaagcgtacggacgtgtatacgcgtttaaataattacggggacgttcgttgtttatatttaggttttgtggtgttggacgtgtgaatgttagtagtgagtcgggaaaagttagcgaaggttgggttgtgcggttttttttgtgcgtgtatttgattttcgtatagtgtgtatttaaggcgggtttgagagcgtggggttttgtagggattt

SEQ ID NO: 13638 - DNA, 907 bp, Artificial Sequence
  chemically treated genomic DNA (Homo sapiens) CpG-island No: 13638
aaatccctacaaaaccccacgctctcaaacccgccttaaatacacactatacgaaaatcaaatacacgcacaaaaaaaaccgcacaacccaaccttcgctaacttttcccgactcactactaacattcacacgtccaacaccacaaaacctaaatataaacaacgaacgtccccgtaattatttaaacgcgtatacacgtccgtacgcttctatatctttatatacttatacgtaattataaaactcctctctcaactcgaaaaaataaaaaaaaaaaaaaatatcgccgacgaaacgctcacgtaaatacgtaaacgccaaaaaaaccgactatacatccgacgtaaacgacacaaaacgacctcgccccgccgctaaatccccaaacccgccctacacaaccgaacctcgatcacctcgatccccaattcgacgccccgactctaaatccccgcccccgcctcctactccacaccccctccccccccgtctccgcctctcccaatctcataacgacgtctccgcgccgaaaaccccaacgcccgcctccccgcccccgcccccactccccgcccctcgctctacccacgccctccgcccgccaacccgacaaccaacgcaactccgaacctcgctccctatacgtcctacgaaaacgaaaacgcgaaaaaacgacaaacgcaaccgaaaaaaataaaaaaacaaaaacacaaacaaaaacgcgaaaactcgaaaaaaaaaaacgtaaaaaaaaaaacaaaacctaaacaacgataaacacgacatcgtacgcgaaaaaaaaaacaacacgcaacaaacgccgaacgccgaacaccgaaaaaaacaacccgaataatctccgaccgtccatacacaaaacgccttcccccacaaccgaacaaccgc

SEQ ID NO: 13639 - DNA, 907 bp, Artificial Sequence
  chemically treated genomic DNA (Homo sapiens) CpG-island No: 13639
agatttttgtagagttttacgtttttaggttcgttttaagtgtatattatacgggagttagatgtacgtatagaagaagtcgtatagtttagttttcgttaatttttttcggtttattgttaatatttatacgtttagtattataaggtttgagtatgggtaacgggcgttttcgtagttgtttaggcgcgtgtgtacgttcgtgcgtttttgtgtttttgtgtatttgtgcgtggttgtgaaattttttttttagttcggaggggtgggggagagaaggaatgtcgtcggcggggcgtttacgtgggtacgtgggcgttaagagggtcggttgtgtattcggcgtgggcggtatagaacgatttcgtttcgtcgttgggtttttaagttcgttttgtatagtcgggtttcggttatttcggtttttaattcggcgtttcggttttgaattttcgttttcgttttttgttttatatttttttttttttcgttttcgttttttttagttttatagcggcgttttcgcgtcgagagttttagcgttcgttttttcgttttcgtttttatttttcgtttttcgttttgtttacgtttttcgttcgttagttcggtagttagcgtagtttcgggtttcgttttttgtgcgttttgcgggggcggaggcgcggagaggcggtaagcgtagtcggggagggtgggggggtagaggtatagatagaggcgcggaggttcggagagagaagacgtggagggagggatagagtttggatagcggtggatacggtatcgtgcgcggggaagagggtagtacgtagtaggcgtcgagcgtcgggtatcgagaagggtagttcgggtgattttcggtcgtttatgtatagagcgtttttttttatagtcgagtagtcgt

SEQ ID NO: 13640 - DNA, 907 bp, Artificial Sequence
  chemically treated genomic DNA (Homo sapiens) CpG-island No: 13640
acgactactcgactataaaaaaaaacgctctatacataaacgaccgaaaatcacccgaactacccttctcgatacccgacgctcgacgcctactacgtactaccctcttccccgcgcacgataccgtatccaccgctatccaaactctatccctccctccacgtcttctctctccgaacctccgcgcctctatctatacctctacccccccaccctccccgactacgcttaccgcctctccgcgcctccgcccccgcaaaacgcacaaaaaacgaaacccgaaactacgctaactaccgaactaacgaacgaaaaacgtaaacaaaacgaaaaacgaaaaataaaaacgaaaacgaaaaaacgaacgctaaaactctcgacgcgaaaacgccgctataaaactaaaaaaaacgaaaacgaaaaaaaaaaaaatataaaacaaaaaacgaaaacgaaaattcaaaaccgaaacgccgaattaaaaaccgaaataaccgaaacccgactatacaaaacgaacttaaaaacccaacgacgaaacgaaatcgttctataccgcccacgccgaatacacaaccgaccctcttaacgcccacgtacccacgtaaacgccccgccgacgacattccttctctcccccacccctccgaactaaaaaaaaaatttcacaaccacgcacaaatacacaaaaacacaaaaacgcacgaacgtacacacgcgcctaaacaactacgaaaacgcccgttacccatactcaaaccttataatactaaacgtataaatattaacaataaaccgaaaaaaattaacgaaaactaaactatacgacttcttctatacgtacatctaactcccgtataatatacacttaaaacgaacctaaaaacgtaaaactctacaaaaatct

SEQ ID NO: 13641 - DNA, 593 bp, Artificial Sequence
  chemically treated genomic DNA (Homo sapiens) CpG-island No: 13641
gtcgtattcgatatgtttttttttaaattagaataatagcgttagttcgtcgataattatattagatattgttattatcgtttttgttagttataaggttttcgtcgggaacgttttgcgtagtataattagtgacggtaaatttattgtcgggagcgttattaataatgttagcgtcggagcggtttttatatttgttagtattatcgtttgtataatcggaatttttgttgtcgtgggaatgataaataagtattttgttatcgttatcgttattatttatattaggttgttatcgatagtattatcggtatgggggaataattagacgcgagcggtatttaatattagtattgtaaggatgtaaatcgggatcgtattttagaaaagcgtttatagcgttttgttttagcggttaaaaaattcgttttgtgttttcggtatgttaatttcgatcggtgtttgcgtttgcggtgttttacgtatttatttttgtattagcgttttattaggaaaatattaataggtcggttattagaagaattggcggaaaaattcggcgaggattaaagtttatataaattaggtttttt

SEQ ID NO: 13642 - DNA, 593 bp, Artificial Sequence
  chemically treated genomic DNA (Homo sapiens) CpG-island No: 13642
aaaaaacctaatttatataaactttaatcctcgccgaatttttccgccaattcttctaataaccgacctattaatattttcctaataaaacgctaatacaaaaataaatacgtaaaacaccgcaaacgcaaacaccgatcgaaattaacataccgaaaacacaaaacgaattttttaaccgctaaaacaaaacgctataaacgcttttctaaaatacgatcccgatttacatccttacaatactaatattaaataccgctcgcgtctaattattcccccataccgataatactatcgataacaacctaatataaataataacgataacgataacaaaatacttatttatcattcccacgacaacaaaaattccgattatacaaacgataatactaacaaatataaaaaccgctccgacgctaacattattaataacgctcccgacaataaatttaccgtcactaattatactacgcaaaacgttcccgacgaaaaccttataactaacaaaaacgataataacaatatctaatataattatcgacgaactaacgctattattctaatttaaaaaaaaacatatcgaatacgac

SEQ ID NO: 13643 - DNA, 593 bp, Artificial Sequence
  chemically treated genomic DNA (Homo sapiens) CpG-island No: 13643
ggggaatttggtttatatgggttttggttttcgtcgggttttttcgttaatttttttggtggtcggtttgttaatgtttttttgatgggacgttggtgtaaaaatgggtgcgtgaaatatcgtaaacgtaggtatcggtcgaaattgatatatcggaagtatagggcgggttttttagtcgttggggtagggcgttatggacgtttttttggagtacgatttcggtttatatttttgtagtattggtgttgggtgtcgttcgcgtttggttatttttttatgtcgatggtgttgtcgataatagtttgatgtgggtggtggcgatggcggtagtaggatgtttgtttgttatttttacggtagtagaaatttcgattgtataaacgatgatgttggtaggtatgggaatcgtttcggcgttggtattgttgatgacgttttcggtagtgagtttgtcgttattgattatgttgcgtaaagcgttttcggcgaaagttttatggttgataggggcgatggtggtagtgtttggtgtgattgtcggcgggttggcgttgttgttttgatttgagggaaaatatgtcggatgcggt

SEQ ID NO: 13644 - DNA, 593 bp, Artificial Sequence
  chemically treated genomic DNA (Homo sapiens) CpG-island No: 13644
accgcatccgacatattttccctcaaatcaaaacaacaacgccaacccgccgacaatcacaccaaacactaccaccatcgcccctatcaaccataaaactttcgccgaaaacgctttacgcaacataatcaataacgacaaactcactaccgaaaacgtcatcaacaataccaacgccgaaacgattcccatacctaccaacatcatcgtttatacaatcgaaatttctactaccgtaaaaataacaaacaaacatcctactaccgccatcgccaccacccacatcaaactattatcgacaacaccatcgacataaaaaaataaccaaacgcgaacgacacccaacaccaatactacaaaaatataaaccgaaatcgtactccaaaaaaacgtccataacgccctaccccaacgactaaaaaacccgccctatacttccgatatatcaatttcgaccgatacctacgtttacgatatttcacgcacccatttttacaccaacgtcccatcaaaaaaacattaacaaaccgaccaccaaaaaaattaacgaaaaaacccgacgaaaaccaaaacccatataaaccaaattcccc

SEQ ID NO: 13645 - DNA, 529 bp, Artificial Sequence
  chemically treated genomic DNA (Homo sapiens) CpG-island No: 13645
tggtggcgtagttgttaatattacgttggttattttcgaattttggcgtgataaagcgatcggcgagatgaaagaatagattgaatggtatcgcgttgtgttgttcggtaaattggtagaagtggcgagcgaatatttgcgttaaggtttttaggtgtatatcggaaggttaggtgcgtattcgtaattggatcgattaattcggttaggatcgttatattataagaagtcgtggtgaacgttggcggtattattaaatgtgagtggacgtaaggtggggggttcggtagatggaaaacgggggggttatcgaaggcggtgaggtagtttaaaatcgtaggggtaacgtttacggggttaatcgacgtaatatatcggagacgttaaggcgagagagaaaagtatttaagacgatttagacgcgtattttgggttttttcgtataacgaggagggcgtaagtaagttgaggaataattatagaaggagtattacgtttaagatttaacgcgtttttttatagtgtatat

SEQ ID NO: 13646 - DNA, 529 bp, Artificial Sequence
  chemically treated genomic DNA (Homo sapiens) CpG-island No: 13646
atatacactataaaaaaacgcgttaaatcttaaacgtaatactccttctataattattcctcaacttacttacgccctcctcgttatacgaaaaaacccaaaatacgcgtctaaatcgtcttaaatacttttctctctcgccttaacgtctccgatatattacgtcgattaaccccgtaaacgttacccctacgattttaaactacctcaccgccttcgataacccccccgttttccatctaccgaaccccccaccttacgtccactcacatttaataataccgccaacgttcaccacgacttcttataatataacgatcctaaccgaattaatcgatccaattacgaatacgcacctaaccttccgatatacacctaaaaaccttaacgcaaatattcgctcgccacttctaccaatttaccgaacaacacaacgcgataccattcaatctattctttcatctcgccgatcgctttatcacgccaaaattcgaaaataaccaacgtaatattaacaactacgccacca

SEQ ID NO: 13647 - DNA, 529 bp, Artificial Sequence
  chemically treated genomic DNA (Homo sapiens) CpG-island No: 13647
gtgtatattgtggaaaaacgcgttggattttaggcgtagtgttttttttatgattgttttttagtttatttgcgtttttttcgttatgcggagagatttaaaatgcgcgtttagatcgttttgagtgtttttttttttcgttttgacgttttcggtgtgttgcgtcggttggtttcgtggacgttgtttttgcggttttgggttgttttatcgttttcggtgattttttcgttttttatttgtcgggttttttattttgcgtttatttatatttgatggtgtcgttaacgtttattacggttttttgtggtgtaacgattttgatcggattgatcggtttagttacgggtacgtatttgatttttcgatatatatttgagaattttgacgtagatattcgttcgttatttttgttagtttgtcgaatagtataacgcggtgttatttagtttgtttttttatttcgtcggtcgttttattacgttaggattcggaagtagttagcgtaatgttggtaattgcgttatta

SEQ ID NO: 13648 - DNA, 529 bp, Artificial Sequence
  chemically treated genomic DNA (Homo sapiens) CpG-island No: 13648
taataacgcaattaccaacattacgctaactacttccgaatcctaacgtaataaaacgaccgacgaaataaaaaaacaaactaaataacaccgcgttatactattcgacaaactaacaaaaataacgaacgaatatctacgtcaaaattctcaaatatatatcgaaaaatcaaatacgtacccgtaactaaaccgatcaatccgatcaaaatcgttacaccacaaaaaaccgtaataaacgttaacgacaccatcaaatataaataaacgcaaaataaaaaacccgacaaataaaaaacgaaaaaatcaccgaaaacgataaaacaacccaaaaccgcaaaaacaacgtccacgaaaccaaccgacgcaacacaccgaaaacgtcaaaacgaaaaaaaaaaacactcaaaacgatctaaacgcgcattttaaatctctccgcataacgaaaaaaacgcaaataaactaaaaaacaatcataaaaaaaacactacgcctaaaatccaacgcgtttttccacaatatacac

SEQ ID NO: 13649 - DNA, 522 bp, Artificial Sequence
  chemically treated genomic DNA (Homo sapiens) CpG-island No: 13649
cgttggtcgtaagtgttgcgcggttggtttttatcgtcggggtagagatatcgtataaggtgagacgaattttcggcgaatggcgcgtaaaggtaattgaaagtacgttcgcgttatagtcgatatttagtattttatttttcgtgtgcggagttaacgtcgagagtagtaattggttatcgatatttagaacgtcgcggttaaatacgttaggtagagttttgatcgttaggttatcgacgttgtattcgttttagaattttttcgaattaatatcgggtgtaatttagagatttaaataacggtacgcgacgaggcggcgaattattaacggggatatcggtagtacggtcgggttggtaatagaggggtttgtaggtaaaatttggtttcggagagagaataatttatggagggtacggaggaaggtaaaatacgtgaatgagaaacgggaataaaagggatttagttaatcgggacggaatagcggtatggacgtattaagggtatattatttcgtag

SEQ ID NO: 13650 - DNA, 522 bp, Artificial Sequence
  chemically treated genomic DNA (Homo sapiens) CpG-island No: 13650
ctacgaaataatatacccttaatacgtccataccgctattccgtcccgattaactaaatcccttttattcccgtttctcattcacgtattttaccttcctccgtaccctccataaattattctctctccgaaaccaaattttacctacaaacccctctattaccaacccgaccgtactaccgatatccccgttaataattcgccgcctcgtcgcgtaccgttatttaaatctctaaattacacccgatattaattcgaaaaaattctaaaacgaatacaacgtcgataacctaacgatcaaaactctacctaacgtatttaaccgcgacgttctaaatatcgataaccaattactactctcgacgttaactccgcacacgaaaaataaaatactaaatatcgactataacgcgaacgtactttcaattacctttacgcgccattcgccgaaaattcgtctcaccttatacgatatctctaccccgacgataaaaaccaaccgcgcaacacttacgaccaacg

SEQ ID NO: 13651 - DNA, 522 bp, Artificial Sequence
  chemically treated genomic DNA (Homo sapiens) CpG-island No: 13651
ttacggggtaatgtatttttgatacgtttatgtcgttatttcgtttcggttgattggattttttttgttttcgttttttatttacgtgttttgttttttttcgtgttttttatggattatttttttttcggggttaaattttgtttgtagatttttttgttgttagttcgatcgtgttgtcgatattttcgttgataattcgtcgtttcgtcgcgtgtcgttatttgggtttttggattatattcggtattgattcggagaaattttggggcgaatatagcgtcgatggtttgacggttaaaattttgtttggcgtgtttagtcgcgacgttttggatgtcggtagttagttgttgttttcgacgttaatttcgtatacgaaaggtaaagtgttggatgtcggttgtggcgcgggcgtgtttttagttgtttttgcgcgttattcgtcgaaaattcgttttattttgtgcgatgtttttgtttcggcggtagaagttagtcgcgtaatatttgcggttaacg

SEQ ID NO: 13652 - DNA, 522 bp, Artificial Sequence
  chemically treated genomic DNA (Homo sapiens) CpG-island No: 13652
cgttaaccgcaaatattacgcgactaacttctaccgccgaaacaaaaacatcgcacaaaataaaacgaattttcgacgaataacgcgcaaaaacaactaaaaacacgcccgcgccacaaccgacatccaacactttacctttcgtatacgaaattaacgtcgaaaacaacaactaactaccgacatccaaaacgtcgcgactaaacacgccaaacaaaattttaaccgtcaaaccatcgacgctatattcgccccaaaatttctccgaatcaataccgaatataatccaaaaacccaaataacgacacgcgacgaaacgacgaattatcaacgaaaatatcgacaacacgatcgaactaacaacaaaaaaatctacaaacaaaatttaaccccgaaaaaaaaataatccataaaaaacacgaaaaaaaacaaaacacgtaaataaaaaacgaaaacaaaaaaaatccaatcaaccgaaacgaaataacgacataaacgtatcaaaaatacattaccccgtaa

SEQ ID NO: 13653 - DNA, 742 bp, Artificial Sequence
  chemically treated genomic DNA (Homo sapiens) CpG-island No: 13653
gtcgcgacgcgtcgtaatttggaaattatttagaatttggcgggtggtgcggaaaatacgttggtttttgtgttcgattgtatcgttacgtcgatgggtagtcgtatgttgaaacgttggttgtatatgttagtgcgcgatattcgcgtgttgtttgagcgttagtaaattattggcgtattgtaggattttatcgtcgggttatagtcggtattgcgttaggtcggcgatttggaacgtattttggtacgtttggttttacgaattgttcgtttacgcgatttggttcgtatgcgttacgttttttagtaattgtcggagttgcgtgcgtagttagaaattgtcgatagtgtatcggtataggcgttacgtgagaagatgggcgagtttgtcgagttgcgcgatttgttggagcgagtaattaatcgatatatcgtcggtgttggtacgcgacggtggtgttatcgtatcgggtataattaaaagcggatgatggggcgtttagatgaagggtttatcgatattaggaacgttggaaattttaatttatagttcgttggaattcgatagtgtttaaacgggacgaagtatttaattacgcgtcgtatatgggttatataaaggttattagtattaaacggcgttttttcgttagagaaaatttataatattcgtttattttgtatacgttgtttaagaagaacgaggagtgtaattatttttttttcgttcgtttcgtttt

SEQ ID NO: 13654 - DNA, 742 bp, Artificial Sequence
  chemically treated genomic DNA (Homo sapiens) CpG-island No: 13654
aaaacgaaacgaacgaaaaaaaaataattacactcctcgttcttcttaaacaacgtatacaaaataaacgaatattataaattttctctaacgaaaaaacgccgtttaatactaataacctttatataacccatatacgacgcgtaattaaatacttcgtcccgtttaaacactatcgaattccaacgaactataaattaaaatttccaacgttcctaatatcgataaacccttcatctaaacgccccatcatccgcttttaattatacccgatacgataacaccaccgtcgcgtaccaacaccgacgatatatcgattaattactcgctccaacaaatcgcgcaactcgacaaactcgcccatcttctcacgtaacgcctataccgatacactatcgacaatttctaactacgcacgcaactccgacaattactaaaaaacgtaacgcatacgaaccaaatcgcgtaaacgaacaattcgtaaaaccaaacgtaccaaaatacgttccaaatcgccgacctaacgcaataccgactataacccgacgataaaatcctacaatacgccaataatttactaacgctcaaacaacacgcgaatatcgcgcactaacatatacaaccaacgtttcaacatacgactacccatcgacgtaacgatacaatcgaacacaaaaaccaacgtattttccgcaccacccgccaaattctaaataatttccaaattacgacgcgtcgcgac

SEQ ID NO: 13655 - DNA, 742 bp, Artificial Sequence
  chemically treated genomic DNA (Homo sapiens) CpG-island No: 13655
ggaacgaggcgagcgagaaaagagtgattgtatttttcgttttttttaggtagcgtgtataaggtgagcgagtgttgtaaattttttttggcgggagagcgtcgtttgatgttggtagtttttgtgtggtttatatgcggcgcgtggttgggtgtttcgtttcgtttgagtattgtcgggttttagcgggttgtaggttggggtttttagcgtttttgatatcggtgggttttttatttgggcgttttattattcgtttttggttatgttcgatgcgataatattatcgtcgcgtattagtatcggcggtgtgtcgattgattgttcgttttagtagatcgcgtagttcggtaaattcgtttatttttttacgtagcgtttgtatcggtgtattatcgatagtttttaattgcgtacgtagtttcggtagttgttggaaagcgtggcgtatacgggttagatcgcgtgggcgagtagttcgtaaagttagacgtgttagaatacgttttaggtcgtcgatttgacgtagtatcggttgtagttcggcggtgaaattttgtaatgcgttaatagtttgttggcgtttaagtaatacgcgggtatcgcgtattggtatatgtagttagcgttttagtatacggttgtttatcggcgtgacggtgtagtcgagtatagaagttagcgtatttttcgtattattcgttaggttttgggtgatttttagattacgacgcgtcgcggt

SEQ ID NO: 13656 - DNA, 742 bp, Artificial Sequence
  chemically treated genomic DNA (Homo sapiens) CpG-island No: 13656
accgcgacgcgtcgtaatctaaaaatcacccaaaacctaacgaataatacgaaaaatacgctaacttctatactcgactacaccgtcacgccgataaacaaccgtatactaaaacgctaactacatataccaatacgcgatacccgcgtattacttaaacgccaacaaactattaacgcattacaaaatttcaccgccgaactacaaccgatactacgtcaaatcgacgacctaaaacgtattctaacacgtctaactttacgaactactcgcccacgcgatctaacccgtatacgccacgctttccaacaactaccgaaactacgtacgcaattaaaaactatcgataatacaccgatacaaacgctacgtaaaaaaataaacgaatttaccgaactacgcgatctactaaaacgaacaatcaatcgacacaccgccgatactaatacgcgacgataatattatcgcatcgaacataaccaaaaacgaataataaaacgcccaaataaaaaacccaccgatatcaaaaacgctaaaaaccccaacctacaacccgctaaaacccgacaatactcaaacgaaacgaaacacccaaccacgcgccgcatataaaccacacaaaaactaccaacatcaaacgacgctctcccgccaaaaaaaatttacaacactcgctcaccttatacacgctacctaaaaaaaacgaaaaatacaatcactcttttctcgctcgcctcgttcc

SEQ ID NO: 13657 - DNA, 629 bp, Artificial Sequence
  chemically treated genomic DNA (Homo sapiens) CpG-island No: 13657
gtcgttttatttaattggcgtagggtaatcgggaatagtgtgtcgttaattagcgtcgatttatcggaatttgaaatttcggtgatgtaggtaaatagatttatcggtagcgttagcgttacgttttttaggattgttgtcgtagtgacgttatgttagattttagtatttttttcggattcgtcggaacgcgttttttcggtattttaattttgcgtttgtcgtttatgtattgttcggttaacgatttcggtatcgttataatcgtttttagcggattttttgcgattattttatcgtcgtgaatatttgcgttcgggttaatgtcgattatatggttagcggcgcgaattgcgttttcgtcgtgttttattataattacggtattatcgagatcgcgtagatggataagcgtatttaataggcgttcgttattacgttggtgtaggtcgatagacggttcgtttagtacgtatataacgttaattaggttcgtattaatttggttcgttagacggatacgttgtgttttatcgttagaaagcgtttttgtcgagcgggaaagcgttaggtaatttaggtcgacgttaacgaggaattttagacgatcgtcgatttttttaaggatt

SEQ ID NO: 13658 - DNA, 629 bp, Artificial Sequence
  chemically treated genomic DNA (Homo sapiens) CpG-island No: 13658
aatccttaaaaaaatcgacgatcgtctaaaattcctcgttaacgtcgacctaaattacctaacgctttcccgctcgacaaaaacgctttctaacgataaaacacaacgtatccgtctaacgaaccaaattaatacgaacctaattaacgttatatacgtactaaacgaaccgtctatcgacctacaccaacgtaataacgaacgcctattaaatacgcttatccatctacgcgatctcgataataccgtaattataataaaacacgacgaaaacgcaattcgcgccgctaaccatataatcgacattaacccgaacgcaaatattcacgacgataaaataatcgcaaaaaatccgctaaaaacgattataacgataccgaaatcgttaaccgaacaatacataaacgacaaacgcaaaattaaaataccgaaaaaacgcgttccgacgaatccgaaaaaaatactaaaatctaacataacgtcactacgacaacaatcctaaaaaacgtaacgctaacgctaccgataaatctatttacctacatcaccgaaatttcaaattccgataaatcgacgctaattaacgacacactattcccgattaccctacgccaattaaataaaacgac

SEQ ID NO: 13659 - DNA, 629 bp, Artificial Sequence
  chemically treated genomic DNA (Homo sapiens) CpG-island No: 13659
aatttttaaagagatcggcgatcgtttgaaatttttcgttaacgtcggtttgaattatttgacgttttttcgttcggtagaaacgttttttggcggtgaagtatagcgtattcgtttggcgagttagattggtgcgggtttggttggcgttatgtacgtgttggacgagtcgtttatcggtttgtattagcgtgataacgagcgtttgttgggtacgtttatttatttgcgcgatttcggtaatatcgtgattgtggtggagtacgacgaagacgtaattcgcgtcgttgattatgtgatcgatattggttcgggcgtaggtgtttacggcggtgaagtggtcgtagaaggttcgttggaagcgattatggcggtgtcggagtcgttgatcgggtagtatatgagcggtaaacgtaagattgaagtgtcgaagaaacgcgtttcggcgaattcggaaaaagtgttgaagtttgatatggcgttattgcggtaataattttgaaggacgtgacgttgacgttgtcggtgggtttgtttatttgtattatcggggttttaggtttcggtaaatcgacgttgattaacgatatattgttttcgattgttttacgttagttgaatggggcgat

SEQ ID NO: 13660 - DNA, 629 bp, Artificial Sequence
  chemically treated genomic DNA (Homo sapiens) CpG-island No: 13660
atcgccccattcaactaacgtaaaacaatcgaaaacaatatatcgttaatcaacgtcgatttaccgaaacctaaaaccccgataatacaaataaacaaacccaccgacaacgtcaacgtcacgtccttcaaaattattaccgcaataacgccatatcaaacttcaacactttttccgaattcgccgaaacgcgtttcttcgacacttcaatcttacgtttaccgctcatatactacccgatcaacgactccgacaccgccataatcgcttccaacgaaccttctacgaccacttcaccgccgtaaacacctacgcccgaaccaatatcgatcacataatcaacgacgcgaattacgtcttcgtcgtactccaccacaatcacgatattaccgaaatcgcgcaaataaataaacgtacccaacaaacgctcgttatcacgctaatacaaaccgataaacgactcgtccaacacgtacataacgccaaccaaacccgcaccaatctaactcgccaaacgaatacgctatacttcaccgccaaaaaacgtttctaccgaacgaaaaaacgtcaaataattcaaaccgacgttaacgaaaaatttcaaacgatcgccgatctctttaaaaatt

SEQ ID NO: 13661 - DNA, 618 bp, Artificial Sequence
  chemically treated genomic DNA (Homo sapiens) CpG-island No: 13661
acgttttcggttatggtttgacgtttggcgtttatacgcgtattgatgaaattatcgtttaggttattggttcggtttatgttgggtaatttgtatgttaatcgtaatatggtgggcgtagtggttggtgtgtagtcgttcggcggcgaagggttgttcggtatcgggtcgaaagtaggcggttcgttttatttttatcgtttgttggcgaatcgttcggaaagtgcgttggtagtgacgttcgcgcgttaggatgtaaagtattcggtcgatgcgtagttgaaagtcgtattgatttagtcgttaaatgtattgcgggaatgggtagtaaatcgtttagaattgtaggcgttatgtacgtaatatggcgagttggcgtaggtaggaatataacgattgttgtcggggtcgacgggtgaacgtaatatttggacgttgttgtcgcgtgagcgcgtgttgtgtattgtcgtagaattgtacgaggggttagttagatagggtagattgcgggggttattttttggttcgaataacgtttatcggttaagagtgttcgggaaatagtaatttttcgagggtaaaatttttttagtgtaattttttatattttatttaaag

SEQ ID NO: 13662 - DNA, 618 bp, Artificial Sequence
  chemically treated genomic DNA (Homo sapiens) CpG-island No: 13662
ctttaaataaaatataaaaaattacactaaaaaaattttaccctcgaaaaattactatttcccgaacactcttaaccgataaacgttattcgaaccaaaaaataacccccgcaatctaccctatctaactaacccctcgtacaattctacgacaatacacaacacgcgctcacgcgacaacaacgtccaaatattacgttcacccgtcgaccccgacaacaatcgttatattcctacctacgccaactcgccatattacgtacataacgcctacaattctaaacgatttactacccattcccgcaatacatttaacgactaaatcaatacgactttcaactacgcatcgaccgaatactttacatcctaacgcgcgaacgtcactaccaacgcactttccgaacgattcgccaacaaacgataaaaataaaacgaaccgcctactttcgacccgataccgaacaacccttcgccgccgaacgactacacaccaaccactacgcccaccatattacgattaacatacaaattacccaacataaaccgaaccaataacctaaacgataatttcatcaatacgcgtataaacgccaaacgtcaaaccataaccgaaaacgt

SEQ ID NO: 13663 - DNA, 618 bp, Artificial Sequence
  chemically treated genomic DNA (Homo sapiens) CpG-island No: 13663
ttttaagtggggtgtggagaattatattgggaggattttgttttcggagaattgttgtttttcgagtatttttagtcgatggacgttattcggattagagggtgattttcgtagtttgttttatttgattagtttttcgtgtaattttgcgataatatataatacgcgtttacgcggtagtagcgtttaggtgttgcgtttattcgtcggtttcggtagtaatcgttgtgtttttgtttgcgttagttcgttatattgcgtatataacgtttgtaattttggacgatttgttgtttattttcgtagtgtatttagcggttgagttaatgcggtttttaattgcgtatcgatcggatattttgtattttgacgcgcgagcgttattgttagcgtatttttcgggcgattcgttagtagacggtagagatagagcggatcgtttgttttcggttcggtatcggataatttttcgtcgtcgaacggttgtatattaattattgcgtttattatattacggttaatatataggttatttaatatgggtcgagttagtgatttgggcgatggttttattaatgcgcgtatggacgttaagcgttagattataatcggaagcgt

SEQ ID NO: 13664 - DNA, 618 bp, Artificial Sequence
  chemically treated genomic DNA (Homo sapiens) CpG-island No: 13664
acgcttccgattataatctaacgcttaacgtccatacgcgcattaataaaaccatcgcccaaatcactaactcgacccatattaaataacctatatattaaccgtaatataataaacgcaataattaatatacaaccgttcgacgacgaaaaattatccgataccgaaccgaaaacaaacgatccgctctatctctaccgtctactaacgaatcgcccgaaaaatacgctaacaataacgctcgcgcgtcaaaatacaaaatatccgatcgatacgcaattaaaaaccgcattaactcaaccgctaaatacactacgaaaataaacaacaaatcgtccaaaattacaaacgttatatacgcaatataacgaactaacgcaaacaaaaacacaacgattactaccgaaaccgacgaataaacgcaacacctaaacgctactaccgcgtaaacgcgtattatatattatcgcaaaattacacgaaaaactaatcaaataaaacaaactacgaaaatcaccctctaatccgaataacgtccatcgactaaaaatactcgaaaaacaacaattctccgaaaacaaaatcctcccaatataattctccacaccccacttaaaa

SEQ ID NO: 13665 - DNA, 507 bp, Artificial Sequence
  chemically treated genomic DNA (Homo sapiens) CpG-island No: 13665
gtagattcgcgatattttggcgcgttcggcgttttattttatcgtttcgtagtaacgttgggaagaatatttgaagaaagggttaattaattcggatgcgacgtcggaatagacgcgcgtcgcggtgaaagcgatcgaaacgtttaacggtaattggcgtttatcgggcggtgcggtgaaatttaatatcgttatatcgtcggtgatcgggcgttggtttttcggtaattagatttggtcgtgggatatttggaagtaggcgtttgcgatggcgtattttaattcggatatcgttaaagagaatattcgcgcggtttttttttggtagatttagtttggcgatagcgtgcgttcgtaggatgtgggttttgttttcgaattgatagcgtgggaatttagattcgagcgtggtggcgatggcgggaattgggaataacgtgatatttaaatcgattttgttttgtgttcgaatggatgttataggtttttaaataaatttgggttgga

SEQ ID NO: 13666 - DNA, 507 bp, Artificial Sequence
  chemically treated genomic DNA (Homo sapiens) CpG-island No: 13666
tccaacccaaatttatttaaaaacctataacatccattcgaacacaaaacaaaatcgatttaaatatcacgttattcccaattcccgccatcgccaccacgctcgaatctaaattcccacgctatcaattcgaaaacaaaacccacatcctacgaacgcacgctatcgccaaactaaatctaccaaaaaaaaaccgcgcgaatattctctttaacgatatccgaattaaaatacgccatcgcaaacgcctacttccaaatatcccacgaccaaatctaattaccgaaaaaccaacgcccgatcaccgacgatataacgatattaaatttcaccgcaccgcccgataaacgccaattaccgttaaacgtttcgatcgctttcaccgcgacgcgcgtctattccgacgtcgcatccgaattaattaaccctttcttcaaatattcttcccaacgttactacgaaacgataaaataaaacgccgaacgcgccaaaatatcgcgaatctac

SEQ ID NO: 13667 - DNA, 507 bp, Artificial Sequence
  chemically treated genomic DNA (Homo sapiens) CpG-island No: 13667
tttaatttaggtttatttggggatttataatatttattcgagtatagagtaaagtcggtttggatattacgttgtttttagttttcgttatcgttattacgttcgggtttaagtttttacgttattagttcggggataaagtttatattttgcggacgtacgttatcgttaggttggatttgttaggagaagatcgcgcggatattttttttggcgatgttcggattgaaatgcgttatcgtaaacgtttgtttttaggtattttacggttaggtttgattgtcggagaattagcgttcggttatcgacggtgtaacggtgttaaattttatcgtatcgttcggtgagcgttagttatcgttgagcgtttcgatcgtttttatcgcgacgcgcgtttgtttcggcgtcgtattcggattggttaattttttttttaggtattttttttagcgttgttgcgaggcggtgagataaaacgtcggacgcgttagaatatcgcggatttgt

SEQ ID NO: 13668 - DNA, 507 bp, Artificial Sequence
  chemically treated genomic DNA (Homo sapiens) CpG-island No: 13668
acaaatccgcgatattctaacgcgtccgacgttttatctcaccgcctcgcaacaacgctaaaaaaaatacctaaaaaaaaaattaaccaatccgaatacgacgccgaaacaaacgcgcgtcgcgataaaaacgatcgaaacgctcaacgataactaacgctcaccgaacgatacgataaaatttaacaccgttacaccgtcgataaccgaacgctaattctccgacaatcaaacctaaccgtaaaatacctaaaaacaaacgtttacgataacgcatttcaatccgaacatcgccaaaaaaaatatccgcgcgatcttctcctaacaaatccaacctaacgataacgtacgtccgcaaaatataaactttatccccgaactaataacgtaaaaacttaaacccgaacgtaataacgataacgaaaactaaaaacaacgtaatatccaaaccgactttactctatactcgaataaatattataaatccccaaataaacctaaattaaa

SEQ ID NO: 13669 - DNA, 543 bp, Artificial Sequence
  chemically treated genomic DNA (Homo sapiens) CpG-island No: 13669
cgcgcgggtgaataggacggttatgcgtttattggcgttattattatatcgttatttattagatttatttcgatttcgtttgacgatttcgggttcgtatcggtttagcgtcgcgcgacgcgttattatagattatttttataaagggcgggtatttaacgtgttaatttttattcgaatttttcgtgcggattaatcgttaatggtatttaaaaatttgttgacgttattaacgtggtatatttatatacgtgtaacggaaatttcgtatatacgacggttcgtcgatatagttaggtcgttttataattaaatacggtaatcgagatatttttgatcggacggatttaattataattatacgacggatatttatagttatattacgtttgtagttaaatacgtaataggatcgaatttttagattatttagaaagatatgttttttttgttatagcgtttattcgaatgcgataacgattatgattacgaaaatattgtcggttaaattattaatattcgattttcgtataatttatttta

SEQ ID NO: 13670 - DNA, 543 bp, Artificial Sequence
  chemically treated genomic DNA (Homo sapiens) CpG-island No: 13670
taaaataaattatacgaaaatcgaatattaataatttaaccgacaatattttcgtaatcataatcgttatcgcattcgaataaacgctataacaaaaaaaacatatctttctaaataatctaaaaattcgatcctattacgtatttaactacaaacgtaatataactataaatatccgtcgtataattataattaaatccgtccgatcaaaaatatctcgattaccgtatttaattataaaacgacctaactatatcgacgaaccgtcgtatatacgaaatttccgttacacgtatataaatataccacgttaataacgtcaacaaatttttaaataccattaacgattaatccgcacgaaaaattcgaataaaaattaacacgttaaatacccgccctttataaaaataatctataataacgcgtcgcgcgacgctaaaccgatacgaacccgaaatcgtcaaacgaaatcgaaataaatctaataaataacgatataataataacgccaataaacgcataaccgtcctattcacccgcgcg

SEQ ID NO: 13671 - DNA, 543 bp, Artificial Sequence
  chemically treated genomic DNA (Homo sapiens) CpG-island No: 13671
tgggatagattgtgcggaaatcgggtattgatggtttagtcggtaatgttttcgtgattatgatcgttgtcgtattcgagtggacgttgtagtagggggggtatatttttttgggtagtttgggagttcggttttgttgcgtgtttggttgtaagcgtggtgtgattgtgagtgttcgtcgtatggttgtggttgagttcgttcggttaagggtgtttcggttgtcgtgtttggttgtagagcggtttagttatatcggcgggtcgtcgtgtgtacggggttttcgttgtacgtgtgtgggtgtgttacgttggtggcgttaataagtttttaggtgttattggcggttagttcgtacgggaggttcgggtgggaattaatacgttaggtattcgttttttgtgaaggtgatttgtgatgacgcgtcgcgcgacgttaagtcggtacggattcggagtcgttaggcgaggtcgaggtgagtttgatggatagcggtatagtagtagcgttaatgaacgtataatcgttttgtttattcgcgcg

SEQ ID NO: 13672 - DNA, 543 bp, Artificial Sequence
  chemically treated genomic DNA (Homo sapiens) CpG-island No: 13672
cgcgcgaataaacaaaacgattatacgttcattaacgctactactataccgctatccatcaaactcacctcgacctcgcctaacgactccgaatccgtaccgacttaacgtcgcgcgacgcgtcatcacaaatcaccttcacaaaaaacgaatacctaacgtattaattcccacccgaacctcccgtacgaactaaccgccaataacacctaaaaacttattaacgccaccaacgtaacacacccacacacgtacaacgaaaaccccgtacacacgacgacccgccgatataactaaaccgctctacaaccaaacacgacaaccgaaacacccttaaccgaacgaactcaaccacaaccatacgacgaacactcacaatcacaccacgcttacaaccaaacacgcaacaaaaccgaactcccaaactacccaaaaaaatataccccccctactacaacgtccactcgaatacgacaacgatcataatcacgaaaacattaccgactaaaccatcaatacccgatttccgcacaatctatccca

SEQ ID NO: 13673 - DNA, 1048 bp, Artificial Sequence
  chemically treated genomic DNA (Homo sapiens) CpG-island No: 13673
  unsure (1004..1005, 1007)
tgtcgaacgtcgaggttagtatatttacgacgatttgttcggttagtgttgaagaatcgataattatcgcgtttatgtcgtcggttttagcgatgagcggaatagggcgattttgagcgtttaggcggttggcgatattgcgttgtagtaacgtagcgatttcggttgaatcggtaaatattatttcgcgtacgcgattattattcgttagttgcgcgtttacggttttatttcgatttggtagtaattgtattacgtttggcggtatattcgtttttagtaaaatggcgattttttgcgcggtaattagcggcgtttgttttgtcggttttgttagtacgttgttatttgtcgttagtgcggcggcgatttgttcggtgaaaatagttagcgggaagttttacggattgatatatattataggttttaatggacggtgggtttcgttagcgaaattatttcgtatttgttcggcgtagtagtggagaaaatcgatcgtttcgcgtatttcggtaatggcgttattgaaggttttttcggttttacgtattagaatattaattagttgttgtatttggttttttattagtacggtagcgcggtgtaaaatcgttgcgcgtttagtcggaggcgtggtaaattagattggcgcgttattaatcgtattttttagcgtttgttttattttacgcggcgtggttttacggtatatagtttataatatttttcgggttcgtcgggtttatacggggcgagtttatttggcggtatcggtgttttttttggtaggtcgttatttgtagtgttaattatacgtcgaggaaacgagtatcgggttagtaaaaattaatcgtttatgtttgtcgtacgtaaatttcgggtaatttagcggatatgtttaggggcgaatattagattttgttattatcgaaagtgtacgaataggttttacgggcgtaacggtcgttaatatgggggacgttcggtatattttatttttgttnnnnttacgaattcgtaaagtggtatttatttgtaacgtgggtta

SEQ ID NO: 13674 - DNA, 1048 bp, Artificial Sequence
  chemically treated genomic DNA (Homo sapiens) CpG-island No: 13674
  unsure (42..43, 45)
taacccacgttacaaataaataccactttacgaattcgtaannnnaacaaaaataaaatataccgaacgtcccccatattaacgaccgttacgcccgtaaaacctattcgtacactttcgataataacaaaatctaatattcgcccctaaacatatccgctaaattacccgaaatttacgtacgacaaacataaacgattaatttttactaacccgatactcgtttcctcgacgtataattaacactacaaataacgacctaccaaaaaaaacaccgataccgccaaataaactcgccccgtataaacccgacgaacccgaaaaatattataaactatataccgtaaaaccacgccgcgtaaaataaaacaaacgctaaaaaatacgattaataacgcgccaatctaatttaccacgcctccgactaaacgcgcaacgattttacaccgcgctaccgtactaataaaaaaccaaatacaacaactaattaatattctaatacgtaaaaccgaaaaaaccttcaataacgccattaccgaaatacgcgaaacgatcgattttctccactactacgccgaacaaatacgaaataatttcgctaacgaaacccaccgtccattaaaacctataatatatatcaatccgtaaaacttcccgctaactattttcaccgaacaaatcgccgccgcactaacgacaaataacaacgtactaacaaaaccgacaaaacaaacgccgctaattaccgcgcaaaaaatcgccattttactaaaaacgaatataccgccaaacgtaatacaattactaccaaatcgaaataaaaccgtaaacgcgcaactaacgaataataatcgcgtacgcgaaataatatttaccgattcaaccgaaatcgctacgttactacaacgcaatatcgccaaccgcctaaacgctcaaaatcgccctattccgctcatcgctaaaaccgacgacataaacgcgataattatcgattcttcaacactaaccgaacaaatcgtcgtaaatatactaacctcgacgttcgaca

SEQ ID NO: 13675 - DNA, 1048 bp, Artificial Sequence
  chemically treated genomic DNA (Homo sapiens) CpG-island No: 13675
  unsure (42..43, 45)
taatttacgttgtaggtaaatgttattttgcggattcgtggnnnnaatagaggtgaaatatatcgagcgttttttatgttagcgatcgttgcgttcgtgggatttgttcgtgtattttcggtggtggtagggtttggtattcgtttttggatatgttcgttggattgttcgggatttacgtacggtaaatatggacggttgatttttattaattcggtgttcgttttttcggcgtgtaattggtattgtaaatggcggtttgttaagggggatatcggtatcgttaggtagattcgtttcgtatagattcggcggattcgagagatattgtgggttatgtgtcgtgaagttacgtcgcgtgaagtagaataggcgttggaaagtgcggttaataacgcgttaatttggtttgttacgttttcggttgaacgcgtagcgattttgtatcgcgttgtcgtgttgatggaaagttagatgtagtaattgattggtattttggtgcgtgaggtcggaaaaatttttagtaacgttattgtcgaagtgcgcgaagcggtcgattttttttattattacgtcggataggtgcgggatgatttcgttaacgaaatttatcgtttattagggtttgtggtgtgtattagttcgtggaatttttcgttggttatttttatcgggtagatcgtcgtcgtattggcggtaggtaatagcgtgttggtaaaatcggtagaataaacgtcgttgattgtcgcgtaagggatcgttattttgttggaagcgggtgtatcgttaggcgtggtgtaattgttgttaggtcggggtgaaatcgtgggcgcgtaattgacgggtgatgatcgcgtgcgcggggtgatgtttatcggtttaatcgaagtcgttacgttattgtagcgtaatatcgttagtcgtttggacgtttagggtcgttttatttcgtttatcgttgaaatcggcggtatgaacgcgatgattgtcgattttttagtattgatcgaataggtcgtcgtggatgtattggtttcggcgttcgata

SEQ ID NO: 13676 - DNA, 1048 bp, Artificial Sequence
  chemically treated genomic DNA (Homo sapiens) CpG-island No: 13676
  unsure (1004..1005, 1007)
tatcgaacgccgaaaccaatacatccacgacgacctattcgatcaatactaaaaaatcgacaatcatcgcgttcataccgccgatttcaacgataaacgaaataaaacgaccctaaacgtccaaacgactaacgatattacgctacaataacgtaacgacttcgattaaaccgataaacatcaccccgcgcacgcgatcatcacccgtcaattacgcgcccacgatttcaccccgacctaacaacaattacaccacgcctaacgatacacccgcttccaacaaaataacgatcccttacgcgacaatcaacgacgtttattctaccgattttaccaacacgctattacctaccgccaatacgacgacgatctacccgataaaaataaccaacgaaaaattccacgaactaatacacaccacaaaccctaataaacgataaatttcgttaacgaaatcatcccgcacctatccgacgtaataataaaaaaaatcgaccgcttcgcgcacttcgacaataacgttactaaaaatttttccgacctcacgcaccaaaataccaatcaattactacatctaactttccatcaacacgacaacgcgatacaaaatcgctacgcgttcaaccgaaaacgtaacaaaccaaattaacgcgttattaaccgcactttccaacgcctattctacttcacgcgacgtaacttcacgacacataacccacaatatctctcgaatccgccgaatctatacgaaacgaatctacctaacgataccgatatcccccttaacaaaccgccatttacaataccaattacacgccgaaaaaacgaacaccgaattaataaaaatcaaccgtccatatttaccgtacgtaaatcccgaacaatccaacgaacatatccaaaaacgaataccaaaccctaccaccaccgaaaatacacgaacaaatcccacgaacgcaacgatcgctaacataaaaaacgctcgatatatttcacctctattnnnnccacgaatccgcaaaataacatttacctacaacgtaaatta

SEQ ID NO: 13677 - DNA, 519 bp, Artificial Sequence
  chemically treated genomic DNA (Homo sapiens) CpG-island No: 13677
gttggtcgcgacgaaacgtggtaaagcgttggtagtacggttaagtgtgtaattgaatgcggcgttggtgaacgatgttacggcggtggatattgtcgatggttatatttgcgtcgaatatcggatgtatggcgggttagcgttcgtttaggaaaagattaatagttcgttggcgattattatttttgtattcggtgtttaggaatcgtgtattagtgatattttttattagtgttcgatagaaacggtattttatgttgtttcgcgttatgaaattttttgtcgcgaacgtcgtgcgaaagtcgtaagtagcgtggatttgagtaaagtaaaacgtgtggttggcgtcggtcgtggattggcggcgtaggatgatttaaaaatggtttacgaattggcggcggtgttgaatgttgaagtcggttgtttacgtttaattgtcgaaggcgagaattggatggagcgtgaattgatgtaatattatattattttgtatcgtttttcgcgtgttttttttat

SEQ ID NO: 13678 - DNA, 519 bp, Artificial Sequence
  chemically treated genomic DNA (Homo sapiens) CpG-island No: 13678
ataaaaaaaacacgcgaaaaacgatacaaaataatataatattacatcaattcacgctccatccaattctcgccttcgacaattaaacgtaaacaaccgacttcaacattcaacaccgccgccaattcgtaaaccatttttaaatcatcctacgccgccaatccacgaccgacgccaaccacacgttttactttactcaaatccacgctacttacgactttcgcacgacgttcgcgacaaaaaatttcataacgcgaaacaacataaaataccgtttctatcgaacactaataaaaaatatcactaatacacgattcctaaacaccgaatacaaaaataataatcgccaacgaactattaatcttttcctaaacgaacgctaacccgccatacatccgatattcgacgcaaatataaccatcgacaatatccaccgccgtaacatcgttcaccaacgccgcattcaattacacacttaaccgtactaccaacgctttaccacgtttcgtcgcgaccaac

SEQ ID NO: 13679 - DNA, 519 bp, Artificial Sequence
  chemically treated genomic DNA (Homo sapiens) CpG-island No: 13679
gtgaagaggatacgcgaaaaacggtgtagggtaatgtgatgttgtattaatttacgttttatttagttttcgttttcggtaattggacgtgaatagtcgattttagtatttagtatcgtcgttagttcgtggattatttttaggttattttgcgtcgttagtttacgatcgacgttaattatacgttttgttttgtttaggtttacgttgtttgcggttttcgtacggcgttcgcgatagagaattttatgacgcggagtaatataaggtatcgtttttgtcgggtattgatgagaggtattattggtgtacggtttttgaatatcgggtgtaagggtaatgatcgttagcgggttgttgatttttttttgagcgaacgttaattcgttatatattcggtgttcggcgtaaatgtgattatcgataatatttatcgtcgtggtatcgtttattagcgtcgtatttagttgtatatttaatcgtgttgttagcgttttattacgtttcgtcgcggttaat

SEQ ID NO: 13680 - DNA, 519 bp, Artificial Sequence
  chemically treated genomic DNA (Homo sapiens) CpG-island No: 13680
attaaccgcgacgaaacgtaataaaacgctaacaacacgattaaatatacaactaaatacgacgctaataaacgataccacgacgataaatattatcgataatcacatttacgccgaacaccgaatatataacgaattaacgttcgctcaaaaaaaaatcaacaacccgctaacgatcattacccttacacccgatattcaaaaaccgtacaccaataatacctctcatcaatacccgacaaaaacgataccttatattactccgcgtcataaaattctctatcgcgaacgccgtacgaaaaccgcaaacaacgtaaacctaaacaaaacaaaacgtataattaacgtcgatcgtaaactaacgacgcaaaataacctaaaaataatccacgaactaacgacgatactaaatactaaaatcgactattcacgtccaattaccgaaaacgaaaactaaataaaacgtaaattaatacaacatcacattaccctacaccgtttttcgcgtatcctcttcac

SEQ ID NO: 13681 - DNA, 765 bp, Artificial Sequence
  chemically treated genomic DNA (Homo sapiens) CpG-island No: 13681
gtgacgtcgattaaagtgggcgatatttttttattgtgtatcgtttattagcgtttgtttgcgtttgatgtcgagatggacggtatcgttacgttgaaagagattaaagcgttaaattcggtaatttcggtgttgattatgattgcgtattttagcgtcgagacggcggtagaggtattgaaaattggggcgttggattattttattaagtcgttggatttcgataatttataggcgacgttggaaaaagcgttcgcgtatacgtatagtattgatgttgaaatatttgcggtgattgttagttagttcggtatggtcggtaaaagttcggcgatgtaatatttgtttagtgaaatcgttttcgtcgcgttatcggaagttacggtattgatttacggcgatttcggtatcggtaaagagttggtcgttagggcgatttacgttagtagcgtacgtagcgaaaaatcgttggtaacgtttaattgtgcggtatttaacgaatttttgttggaatttgaattgttcggttacgaaaaaggggcgtttattggagtcgataaacgtcgggaagggcgttttgttgaggcggacggcggtacgttgtttttcgatgaaattggcgatatttcgtcgatgatgtaggtgcgtttgttgcgtgcgatttaggagcgcgaagtttagcgtgtcggtagtaattagattatttcggttgattttgttattgggtatcggtaatttgattatttcggttttgtggttgttaga

SEQ ID NO: 13682 - DNA, 765 bp, Artificial Sequence
  chemically treated genomic DNA (Homo sapiens) CpG-island No: 13682
tctaacaaccacaaaaccgaaataatcaaattaccgatacccaataacaaaatcaaccgaaataatctaattactaccgacacgctaaacttcgcgctcctaaatcgcacgcaacaaacgcacctacatcatcgacgaaatatcgccaatttcatcgaaaaacaacgtaccgccgtccgcctcaacaaaacgcccttcccgacgtttatcgactccaataaacgcccctttttcgtaaccgaacaattcaaattccaacaaaaattcgttaaataccgcacaattaaacgttaccaacgatttttcgctacgtacgctactaacgtaaatcgccctaacgaccaactctttaccgataccgaaatcgccgtaaatcaataccgtaacttccgataacgcgacgaaaacgatttcactaaacaaatattacatcgccgaacttttaccgaccataccgaactaactaacaatcaccgcaaatatttcaacatcaatactatacgtatacgcgaacgctttttccaacgtcgcctataaattatcgaaatccaacgacttaataaaataatccaacgccccaattttcaatacctctaccgccgtctcgacgctaaaatacgcaatcataatcaacaccgaaattaccgaatttaacgctttaatctctttcaacgtaacgataccgtccatctcgacatcaaacgcaaacaaacgctaataaacgatacacaataaaaaaatatcgcccactttaatcgacgtcac

SEQ ID NO: 13683 - DNA, 765 bp, Artificial Sequence
  chemically treated genomic DNA (Homo sapiens) CpG-island No: 13683
tttggtaattataaaatcgagatagttaggttatcgatatttagtggtaggattaatcgagataatttggttgttatcgatacgttgaatttcgcgtttttgaatcgtacgtagtagacgtatttgtattatcggcgagatatcgttaattttatcgagaaatagcgtgtcgtcgttcgttttaataaagcgtttttttcggcgtttatcggttttagtaaacgtttttttttcgtgatcgaataatttagattttagtaaggattcgttgagtgtcgtatagttgagcgttattagcggtttttcgttacgtgcgttattggcgtgaatcgttttggcgattagttttttatcggtgtcggaatcgtcgtggattagtatcgtggttttcgatggcgcgacgagggcgattttattgagtaggtgttgtatcgtcgggtttttatcgattatatcgaattggttggtagttatcgtaggtgttttagtattaatattgtgcgtatgcgcgagcgttttttttagcgtcgtttgtaggttatcgaaatttagcggtttgatgagataatttagcgttttagtttttagtgtttttatcgtcgtttcgacgttggagtacgtagttataattagtatcggaattgtcgggtttaacgttttgattttttttagcgtggcgatgtcgtttatttcggtattaagcgtaaataggcgttggtgagcggtatatagtaaaggggtgtcgtttattttaatcggcgttat

SEQ ID NO: 13684 - DNA, 765 bp, Artificial Sequence
  chemically treated genomic DNA (Homo sapiens) CpG-island No: 13684
ataacgccgattaaaataaacgacacccctttactatataccgctcaccaacgcctatttacgcttaataccgaaataaacgacatcgccacgctaaaaaaaatcaaaacgttaaacccgacaattccgatactaattataactacgtactccaacgtcgaaacgacgataaaaacactaaaaactaaaacgctaaattatctcatcaaaccgctaaatttcgataacctacaaacgacgctaaaaaaaacgctcgcgcatacgcacaatattaatactaaaacacctacgataactaccaaccaattcgatataatcgataaaaacccgacgatacaacacctactcaataaaatcgccctcgtcgcgccatcgaaaaccacgatactaatccacgacgattccgacaccgataaaaaactaatcgccaaaacgattcacgccaataacgcacgtaacgaaaaaccgctaataacgctcaactatacgacactcaacgaatccttactaaaatctaaattattcgatcacgaaaaaaaaacgtttactaaaaccgataaacgccgaaaaaaacgctttattaaaacgaacgacgacacgctatttctcgataaaattaacgatatctcgccgataatacaaatacgtctactacgtacgattcaaaaacgcgaaattcaacgtatcgataacaaccaaattatctcgattaatcctaccactaaatatcgataacctaactatctcgattttataattaccaaa

SEQ ID NO: 13685 - DNA, 603 bp, Artificial Sequence
  chemically treated genomic DNA (Homo sapiens) CpG-island No: 13685
agtcgcgtagatcggtggttagtaatgcgttaacgacgtttaacggaataattaatattatcgagaacggaattgattagtttttatagagtgcggcgagggcgaggaatattacgattagtgaaatcgtatatagcgtaggagtttgatttgaggataacgttttttgatacgatagttcggtttatgagtagtcgacgtttgtcggaagtttagcgattaggtttgttataaattttatggcgttatcggtatttttttcggtcgtcgttttatttaaaatttttattgacgggatgtcgttgtagcgttttagtcgcggtgaattataggtttattcggtagacgagtaggtagaaagcggtgttatcgtgttagaggcgttgcgtatatattattggttgatgttattcggtaatatacggaacggcgtgtttgtttggatatatattttttttattcgtttttggttgaggaagtcgtttacgtagttgttgtcgaaggcggtggaaattgtttggttgatattagatagcgttacgtttatcgttttagttttcgtagcgttgacgtttattttgaatatggtatcgcggtaatata

SEQ ID NO: 13686 - DNA, 603 bp, Artificial Sequence
  chemically treated genomic DNA (Homo sapiens) CpG-island No: 13686
tatattaccgcgataccatattcaaaataaacgtcaacgctacgaaaactaaaacgataaacgtaacgctatctaatatcaaccaaacaatttccaccgccttcgacaacaactacgtaaacgacttcctcaaccaaaaacgaataaaaaaaatatatatccaaacaaacacgccgttccgtatattaccgaataacatcaaccaataatatatacgcaacgcctctaacacgataacaccgctttctacctactcgtctaccgaataaacctataattcaccgcgactaaaacgctacaacgacatcccgtcaataaaaattttaaataaaacgacgaccgaaaaaaataccgataacgccataaaatttataacaaacctaatcgctaaacttccgacaaacgtcgactactcataaaccgaactatcgtatcaaaaaacgttatcctcaaatcaaactcctacgctatatacgatttcactaatcgtaatattcctcgccctcgccgcactctataaaaactaatcaattccgttctcgataatattaattattccgttaaacgtcgttaacgcattactaaccaccgatctacgcgact

SEQ ID NO: 13687 - DNA, 603 bp, Artificial Sequence
  chemically treated genomic DNA (Homo sapiens) CpG-island No: 13687
tatattgtcgcggtattatgtttaaagtgaacgttaacgttgcgaaagttgaagcgatgggcgtggcgttgtttgatattaattagataatttttatcgttttcggtagtagttacgtgaacgatttttttaattaggggcgggtgaaaaaagtgtatgtttaggtaggtacgtcgtttcgtatgttgtcggataatattaattaatggtatgtacgtaacgtttttggtacgatggtatcgttttttgtttattcgtttatcgaatggatttatggtttatcgcgattggaacgttataacggtatttcgttaatggagattttaggtgaagcggcggtcgggaaaagtatcggtgacgttatgaaatttatggtagatttggtcgttaaattttcggtaggcgtcggttatttatggatcggattatcgtattaggaagcgttatttttaaattaggtttttgcgttgtatgcgattttattggtcgtggtgtttttcgttttcgtcgtattttatgagagttggttaatttcgttttcggtgatgttggttgtttcgttaggcgtcgttggcgtattattggttatcgatttgcgcggtt

SEQ ID NO: 13688 - DNA, 603 bp, Artificial Sequence
  chemically treated genomic DNA (Homo sapiens) CpG-island No: 13688
aaccgcgcaaatcgataaccaataatacgccaacgacgcctaacgaaacaaccaacatcaccgaaaacgaaattaaccaactctcataaaatacgacgaaaacgaaaaacaccacgaccaataaaatcgcatacaacgcaaaaacctaatttaaaaataacgcttcctaatacgataatccgatccataaataaccgacgcctaccgaaaatttaacgaccaaatctaccataaatttcataacgtcaccgatacttttcccgaccgccgcttcacctaaaatctccattaacgaaataccgttataacgttccaatcgcgataaaccataaatccattcgataaacgaataaacaaaaaacgataccatcgtaccaaaaacgttacgtacataccattaattaatattatccgacaacatacgaaacgacgtacctacctaaacatacacttttttcacccgcccctaattaaaaaaatcgttcacgtaactactaccgaaaacgataaaaattatctaattaatatcaaacaacgccacgcccatcgcttcaactttcgcaacgttaacgttcactttaaacataataccgcgacaatata

SEQ ID NO: 13689 - DNA, 705 bp, Artificial Sequence
  chemically treated genomic DNA (Homo sapiens) CpG-island No: 13689
  unsure (467..468, 565)
ttgtcgcgagggattttcgttcgtttttcgttttcgtttttcggtgttcgaagttttcgaggttagggtttcggggaaggagcggcgttaggtagtattaggtgtagtcgttttcgtttcgttagcggttatttttttagatttagtaattttatttcgtttagtagcgtggggggcggcgagggcggcgttgtagttgtttttggcggcgtttttcgcgtttttcggtttcggttcgttatcgttcgcgtcgaagaagtttgttgtcggtttgaagtagacgaagggcgtttcgggtggttgcgtaggttgtaaagtagggagggcgcggggttaggtaggtagaaggtgttcgggaacgcggggttggagtatcgtcgttgttattatcgttgtcgttatcgtttttcgcgtttagcgtagttcgagttttaggttttttgaggcgcggcggtggttgcgggcgnnggggtttcgaggatttaaaggttgtaggtttagcggggcggcgcggcgggcggcgcggcggtatagtagtaagggttgggcggcggcgcgttggttnttgatttcgtagttgttcgttttgtttttttattttgcgtattagtttttgtagtttttttatttttagtttcgcgtttaatatcggttcggagttcgttttagagttgatttttgtcgaggcgtattttatttgtttcg

SEQ ID NO: 13690 - DNA, 705 bp, Artificial Sequence
  chemically treated genomic DNA (Homo sapiens) CpG-island No: 13690
  unsure (141, 238..)
cgaaacaaataaaatacgcctcgacaaaaatcaactctaaaacgaactccgaaccgatattaaacgcgaaactaaaaataaaaaaactacaaaaactaatacgcaaaataaaaaaacaaaacgaacaactacgaaatcaanaaccaacgcgccgccgcccaacccttactactataccgccgcgccgcccgccgcgccgccccgctaaacctacaacctttaaatcctcgaaaccccnncgcccgcaaccaccgccgcgcctcaaaaaacctaaaactcgaactacgctaaacgcgaaaaacgataacgacaacgataataacaacgacgatactccaaccccgcgttcccgaacaccttctacctacctaaccccgcgccctccctactttacaacctacgcaaccacccgaaacgcccttcgtctacttcaaaccgacaacaaacttcttcgacgcgaacgataacgaaccgaaaccgaaaaacgcgaaaaacgccgccaaaaacaactacaacgccgccctcgccgccccccacgctactaaacgaaataaaattactaaatctaaaaaaataaccgctaacgaaacgaaaacgactacacctaatactacctaacgccgctccttccccgaaaccctaacctcgaaaacttcgaacaccgaaaaacgaaaacgaaaaacgaacgaaaatccctcgcgacaa

SEQ ID NO: 13691 - DNA, 705 bp, Artificial Sequence
  chemically treated genomic DNA (Homo sapiens) CpG-island No: 13691
  unsure (141, 238..)
cggagtaggtgaaatgcgtttcggtaggggttagttttggagcgggtttcgggtcggtgttgaacgcggagttggaggtgaagaagttgtaggagttggtgcgtaagatggagaagtagaacgagtagttgcggagttagnagttagcgcgtcgtcgtttagtttttgttgttgtgtcgtcgcgtcgttcgtcgcgtcgtttcgttaggtttgtagtttttgggttttcggagttttnncgttcgtagttatcgtcgcgttttagggggtttggggttcgggttgcgttgggcgcggggggcggtggcggtagcggtagtggtagcggcggtgttttagtttcgcgttttcgggtattttttgtttgtttagtttcgcgttttttttgttttgtagtttgcgtagttattcgaggcgtttttcgtttattttaagtcggtagtaggttttttcggcgcgggcggtggcgggtcggagtcggggggcgcggggaacgtcgttaggggtagttgtagcgtcgttttcgtcgttttttacgttgttggacgaggtggaattgttggatttggagaggtagtcgttggcgggacgaggacgattatatttggtattgtttagcgtcgtttttttttcgagattttggtttcgggggtttcgggtatcggggagcgggggcggggggcggacgggggtttttcgcggtag

SEQ ID NO: 13692 - DNA, 705 bp, Artificial Sequence
  chemically treated genomic DNA (Homo sapiens) CpG-island No: 13692
  unsure (467..468, 565)
ctaccgcgaaaaacccccgtccgccccccgcccccgctccccgatacccgaaacccccgaaaccaaaatctcgaaaaaaaaacgacgctaaacaataccaaatataatcgtcctcgtcccgccaacgactacctctccaaatccaacaattccacctcgtccaacaacgtaaaaaacgacgaaaacgacgctacaactacccctaacgacgttccccgcgccccccgactccgacccgccaccgcccgcgccgaaaaaacctactaccgacttaaaataaacgaaaaacgcctcgaataactacgcaaactacaaaacaaaaaaaacgcgaaactaaacaaacaaaaaatacccgaaaacgcgaaactaaaacaccgccgctaccactaccgctaccgccaccgccccccgcgcccaacgcaacccgaaccccaaaccccctaaaacgcgacgataactacgaacgnnaaaactccgaaaacccaaaaactacaaacctaacgaaacgacgcgacgaacgacgcgacgacacaacaacaaaaactaaacgacgacgcgctaactnctaactccgcaactactcgttctacttctccatcttacgcaccaactcctacaacttcttcacctccaactccgcgttcaacaccgacccgaaacccgctccaaaactaacccctaccgaaacgcatttcacctactccg

SEQ ID NO: 13693 - DNA, 544 bp, Artificial Sequence
  chemically treated genomic DNA (Homo sapiens) CpG-island No: 13693
tggttggggtcgcgtgtgagagattggttggtcgcgagcgaaggggttgtagttcggggttgcgaggtcgcggttagggggcgagaggtatgggatgggatttgggtcgacgggggcgttgggttgatggttttcgtgattacgggggtggcgttcggttatgggcgtcggcggagtttagtcgtcgtgggtgtgggatggttgaagagggtcgttggttaaagtgtgggatgcgagtaaggtaaggcgcgcgtgggtatcgatggaggggaggggattgttttgggagggagtagcgtggaggagtgcggcgatggcgggaggtgtgggcgttagtgttaggggcggcgcggttttggagttgacgtcgtggattggggaggttgggggggcgcgttgtgtgaaggggtagcgtgggggcggttttgggggggaggttgggtggggcgggtaggtggagtgtggggggattgtgtggggtataggtggcggtgtattgtgagataggtggggttgtagggtttcgggggttatggagaggtta

SEQ ID NO: 13694 - DNA, 544 bp, Artificial Sequence
  chemically treated genomic DNA (Homo sapiens) CpG-island No: 13694
taacctctccataacccccgaaaccctacaaccccacctatctcacaatacaccgccacctataccccacacaatccccccacactccacctacccgccccacccaacctcccccccaaaaccgcccccacgctaccccttcacacaacgcgcccccccaacctccccaatccacgacgtcaactccaaaaccgcgccgcccctaacactaacgcccacacctcccgccatcgccgcactcctccacgctactccctcccaaaacaatcccctcccctccatcgatacccacgcgcgccttaccttactcgcatcccacactttaaccaacgaccctcttcaaccatcccacacccacgacgactaaactccgccgacgcccataaccgaacgccacccccgtaatcacgaaaaccatcaacccaacgcccccgtcgacccaaatcccatcccatacctctcgccccctaaccgcgacctcgcaaccccgaactacaaccccttcgctcgcgaccaaccaatctctcacacgcgaccccaacca

SEQ ID NO: 13695 - DNA, 544 bp, Artificial Sequence
  chemically treated genomic DNA (Homo sapiens) CpG-island No: 13695
taatttttttataattttcgaaattttataattttatttattttataatatatcgttatttatgttttatataatttttttatattttatttattcgttttatttaattttttttttaaaatcgtttttacgttatttttttatataacgcgtttttttaatttttttaatttacggcgttagttttaaggtcgcgtcgtttttaatattaacgtttatatttttcgttatcgtcgtatttttttacgttgtttttttttagggtagtttttttttttttatcggtatttacgcgcgttttattttgttcgtattttatattttggttaacggttttttttagttattttatatttacgacggttggatttcgtcggcgtttataatcgggcgttattttcgtagttacgaggattattaatttagcgttttcgtcggtttaaattttattttatatttttcgttttttgatcgcggtttcgtaatttcgggttatagttttttcgttcgcggttaattaattttttatacgcggttttaatta

SEQ ID NO: 13696 - DNA, 544 bp, Artificial Sequence
  chemically treated genomic DNA (Homo sapiens) CpG-island No: 13696
taattaaaaccgcgtataaaaaattaattaaccgcgaacgaaaaaactataacccgaaattacgaaaccgcgatcaaaaaacgaaaaatataaaataaaatttaaaccgacgaaaacgctaaattaataatcctcgtaactacgaaaataacgcccgattataaacgccgacgaaatccaaccgtcgtaaatataaaataactaaaaaaaaccgttaaccaaaatataaaatacgaacaaaataaaacgcgcgtaaataccgataaaaaaaaaaaaactaccctaaaaaaaaacaacgtaaaaaaatacgacgataacgaaaaatataaacgttaatattaaaaacgacgcgaccttaaaactaacgccgtaaattaaaaaaattaaaaaaacgcgttatataaaaaaataacgtaaaaacgattttaaaaaaaaaattaaataaaacgaataaataaaatataaaaaaattatataaaacataaataacgatatattataaaataaataaaattataaaatttcgaaaattataaaaaaatta

SEQ ID NO: 13697 - DNA, 620 bp, Artificial Sequence
  chemically treated genomic DNA (Homo sapiens) CpG-island No: 13697
gcgcggttttacgtcgtagaggttaaattaatttcgttattaaggtttcgtttatacgtttagagtttcgtttacgaggagagaggcgtcgttatatcgttaaggtttcgttttcgtttacgcgtaacgttatgatttcgtttataatggttttttttagttatcgttaaggatttcgttttacgtcgagggtttgtttttaggtttcgtttttcgaggtttcgtttttcggtttcgtttttagtcgtttagttttcgggagtggcggtagttgggtagaggcgtagcgatattttcgttttcgaggtttttgtcgaagcgtagagtcgttttgtttcgtagtcgacgggtttcgttttacgtttatcgtcgaggttcgcggtcgtcggtaagtgtggttttcgcgggttcggagcggtagaggcgtagagttcgggcggtggcgcgtttgttgtagtgcgggtacggtcgcgcgtgggtgtgggttttagattcggttttttgcgtttggtagggttcgtgcgagcgggtttcgggtcgtaggtggaggtcgaatggttatcgttgttagtttagtcggtttagggtcgttttggaagtttagtttttgttgggtaggg

SEQ ID NO: 13698 - DNA, 620 bp, Artificial Sequence
  chemically treated genomic DNA (Homo sapiens) CpG-island No: 13698
ccctacccaacaaaaactaaacttccaaaacgaccctaaaccgactaaactaacaacgataaccattcgacctccacctacgacccgaaacccgctcgcacgaaccctaccaaacgcaaaaaaccgaatctaaaacccacacccacgcgcgaccgtacccgcactacaacaaacgcgccaccgcccgaactctacgcctctaccgctccgaacccgcgaaaaccacacttaccgacgaccgcgaacctcgacgataaacgtaaaacgaaacccgtcgactacgaaacaaaacgactctacgcttcgacaaaaacctcgaaaacgaaaatatcgctacgcctctacccaactaccgccactcccgaaaactaaacgactaaaaacgaaaccgaaaaacgaaacctcgaaaaacgaaacctaaaaacaaaccctcgacgtaaaacgaaatccttaacgataactaaaaaaaaccattataaacgaaatcataacgttacgcgtaaacgaaaacgaaaccttaacgatataacgacgcctctctcctcgtaaacgaaactctaaacgtataaacgaaaccttaataacgaaattaatttaacctctacgacgtaaaaccgcgc

SEQ ID NO: 13699 - DNA, 620 bp, Artificial Sequence
  chemically treated genomic DNA (Homo sapiens) CpG-island No: 13699
ttttgtttaataaaggttgagtttttagaacggttttgggtcggttaggttgatagcggtggttattcgatttttatttgcggttcgaggttcgttcgtacggattttgttaggcgtagaaggtcgggtttgaagtttatatttacgcgcggtcgtattcgtattgtagtagacgcgttatcgttcgagttttacgtttttgtcgtttcgggttcgcggggattatatttatcggcggtcgcggatttcggcggtgggcgtgggacggagttcgtcggttgcgggataaggcggttttgcgtttcggtagagatttcgaaggcggaggtatcgttgcgtttttgtttagttgtcgttattttcgggaattgggcggttgggggcggggtcggaaggcgggatttcggggggcgggatttggaggtaggttttcggcgtggggcggggtttttagcggtgattgggaggggttattgtaggcggggttatgacgttgcgcgtgaacgggggcggagttttaacggtatggcggcgttttttttttcgtgggcgggattttaggcgtgtgggcggggttttggtggcggggttggtttggtttttgcggcgtggggtcgcgt

SEQ ID NO: 13700 - DNA, 620 bp, Artificial Sequence
  chemically treated genomic DNA (Homo sapiens) CpG-island No: 13700
acgcgaccccacgccgcaaaaaccaaaccaaccccgccaccaaaaccccgcccacacgcctaaaatcccgcccacgaaaaaaaaaacgccgccataccgttaaaactccgcccccgttcacgcgcaacgtcataaccccgcctacaataacccctcccaatcaccgctaaaaaccccgccccacgccgaaaacctacctccaaatcccgccccccgaaatcccgccttccgaccccgcccccaaccgcccaattcccgaaaataacgacaactaaacaaaaacgcaacgatacctccgccttcgaaatctctaccgaaacgcaaaaccgccttatcccgcaaccgacgaactccgtcccacgcccaccgccgaaatccgcgaccgccgataaatataatccccgcgaacccgaaacgacaaaaacgtaaaactcgaacgataacgcgtctactacaatacgaatacgaccgcgcgtaaatataaacttcaaacccgaccttctacgcctaacaaaatccgtacgaacgaacctcgaaccgcaaataaaaatcgaataaccaccgctatcaacctaaccgacccaaaaccgttctaaaaactcaacctttattaaacaaaa

SEQ ID NO: 13701 - DNA, 926 bp, Artificial Sequence
  chemically treated genomic DNA (Homo sapiens) CpG-island No: 13701
gtgggggaagggtgcggaaaacgttttcggacggtagcgatagaggtttttttttttgggttagcgcgcgacggcggggataagggaggttacgtcggtttgtagtagtttcgaggtttcgatttcggtttcggattttgttcggatagggttttcgattttttcggcggcgcgggcgggaaacggcggggggcgcgtagagggttatttttcgtttttcggtttagaggtttagcgggtggataaacggtattaggcgttcgtttcgtcgcgatttagtagtttatttcgagcgtcgcggatttggtcggggtacgaattacgggcgttagacgtaagggttcgggcgttagcgcgtcgtcgatttatatttttttacgcggtgtttattttgtttggggggtgcggcggtgacgtagttacgaggttttcgcggtcgggttggggaaagagggaggggagaggaggagggagtcgggttcgggtaggtgcgtacgtttaggtgcgagagaggaagcgagaggaaggagaggggtagagggacgagggatacgaggttgatagaaagcgagcgatacgggagcggggaggggcgggaataatttaggggcgaggtttgagcggggcgtcgagcggaaggggcgggagtttttaagataggcgttgttattttcggtaggtagcggcgtgtattggcggaacggcgtaaaggagcgaagtaattgataggggcgcgggaattattcgtcgtaagtaatatgggtatcgttagattgcgcgttacggggttaaataaacgggacgattggaggggattgaggtaaacggggcgcgtcgtttgttttaattatatttgtaatagaggagaaagtcggtagggaggagaggtaagtaggagtattaggtgagtaggcgagagaggagag

SEQ ID NO: 13702 - DNA, 926 bp, Artificial Sequence
  chemically treated genomic DNA (Homo sapiens) CpG-island No: 13702
ctctcctctctcgcctactcacctaatactcctacttacctctcctccctaccgactttctcctctattacaaatataattaaaacaaacgacgcgccccgtttacctcaatcccctccaatcgtcccgtttatttaaccccgtaacgcgcaatctaacgatacccatattacttacgacgaataattcccgcgcccctatcaattacttcgctcctttacgccgttccgccaatacacgccgctacctaccgaaaataacaacgcctatcttaaaaactcccgccccttccgctcgacgccccgctcaaacctcgcccctaaattattcccgcccctccccgctcccgtatcgctcgctttctatcaacctcgtatccctcgtccctctacccctctccttcctctcgcttcctctctcgcacctaaacgtacgcacctacccgaacccgactccctcctcctctcccctccctctttccccaacccgaccgcgaaaacctcgtaactacgtcaccgccgcaccccccaaacaaaataaacaccgcgtaaaaaaatataaatcgacgacgcgctaacgcccgaacccttacgtctaacgcccgtaattcgtaccccgaccaaatccgcgacgctcgaaataaactactaaatcgcgacgaaacgaacgcctaataccgtttatccacccgctaaacctctaaaccgaaaaacgaaaaataaccctctacgcgccccccgccgtttcccgcccgcgccgccgaaaaaatcgaaaaccctatccgaacaaaatccgaaaccgaaatcgaaacctcgaaactactacaaaccgacgtaacctcccttatccccgccgtcgcgcgctaacccaaaaaaaaaaacctctatcgctaccgtccgaaaacgttttccgcacccttcccccac

SEQ ID NO: 13703 - DNA, 926 bp, Artificial Sequence
  chemically treated genomic DNA (Homo sapiens) CpG-island No: 13703
tttttttttttcgtttatttatttgatatttttgtttgttttttttttttgtcggtttttttttttgttgtagatatgattaaagtagacgacgcgtttcgtttgttttaattttttttagtcgtttcgtttgtttggtttcgtggcgcgtagtttggcggtatttatgttgtttgcgacggatgattttcgcgtttttattagttgtttcgtttttttgcgtcgtttcgttagtgtacgtcgttgtttgtcggaagtgatagcgtttgttttgggagttttcgtttttttcgttcggcgtttcgtttaggtttcgtttttaggttgttttcgttttttttcgttttcgtgtcgttcgttttttgttagtttcgtgtttttcgtttttttgttttttttttttttttcgttttttttttcgtatttgagcgtacgtatttgttcgggttcggtttttttttttttttttttttttttttttttagttcggtcgcgggagtttcgtggttgcgttatcgtcgtattttttagataagatggatatcgcgtgaggaagtgtaagtcggcgacgcgttggcgttcgagtttttgcgtttggcgttcgtggttcgtatttcggttaggttcgcggcgttcgaggtgggttgttggatcgcggcggggcggacgtttggtgtcgtttgtttattcgttgggtttttgggtcggggagcggaaggtgattttttgcgcgtttttcgtcgtttttcgttcgcgtcgtcgagggggtcggggattttgttcgggtagggttcggggtcggggtcggggtttcggggttattgtaggtcggcgtggttttttttgttttcgtcgtcgcgcgttggtttagaaaagggggtttttgtcgttgtcgttcgggggcgtttttcgtattttttttttat

SEQ ID NO: 13704 - DNA, 926 bp, Artificial Sequence
  chemically treated genomic DNA (Homo sapiens) CpG-island No: 13704
ataaaaaaaaaatacgaaaaacgcccccgaacgacaacgacaaaaacccccttttctaaaccaacgcgcgacgacgaaaacaaaaaaaaccacgccgacctacaataaccccgaaaccccgaccccgaccccgaaccctacccgaacaaaatccccgaccccctcgacgacgcgaacgaaaaacgacgaaaaacgcgcaaaaaatcaccttccgctccccgacccaaaaacccaacgaataaacaaacgacaccaaacgtccgccccgccgcgatccaacaacccacctcgaacgccgcgaacctaaccgaaatacgaaccacgaacgccaaacgcaaaaactcgaacgccaacgcgtcgccgacttacacttcctcacgcgatatccatcttatctaaaaaatacgacgataacgcaaccacgaaactcccgcgaccgaactaaaaaaaaaaaaaaaaaaaaaaaaaaaaaaaccgaacccgaacaaatacgtacgctcaaatacgaaaaaaaaaacgaaaaaaaaaaaaaaaacaaaaaaacgaaaaacacgaaactaacaaaaaacgaacgacacgaaaacgaaaaaaaacgaaaacaacctaaaaacgaaacctaaacgaaacgccgaacgaaaaaaacgaaaactcccaaaacaaacgctatcacttccgacaaacaacgacgtacactaacgaaacgacgcaaaaaaacgaaacaactaataaaaacgcgaaaatcatccgtcgcaaacaacataaataccgccaaactacgcgccacgaaaccaaacaaacgaaacgactaaaaaaaattaaaacaaacgaaacgcgtcgtctactttaatcatatctacaacaaaaaaaaaaaccgacaaaaaaaaaaaacaaacaaaaatatcaaataaataaacgaaaaaaaaaaa

SEQ ID NO: 13705 - DNA, 700 bp, Artificial Sequence
  chemically treated genomic DNA (Homo sapiens) CpG-island No: 13705
gcgtttagcgttaggttcgcggattattagagggttatcgcgatattagcggttttcgatggtaaagacgttatcgtacggtagtagtgatgttaacggatgatttttacgtatcgtttttacgtttatacgcgttttatcgttggtatcgaaacgcgttacgtagcgtagtattagttttatttcgcgggtcgtttttagtcgttgtattatttgttcgtttagtttatcgttatttttaaagaaatggtcgatgttgtcgttttcgtaatgagtaggtattagcgattttatacgtatttgattcggttcgatgttgtaatttgttttacgcgttagaattattagtttgcgtattacgtttttgttagagagatcgttacgcgggttaggttcggttaagttttgttgttacgtttgatttattagttcggtaaacggtacgttatcgtcgaattgtaggaatagttaggagagcgtgtcggagaagatttcgttgatcgataaaatagtatcgtcgttgtcgattagatcgcgtacgggtggttattcggtaagttcgtatcgacgggtgtgtttgtacgtttagtatgatttcgcgttttaaagcgttgtaattcgataatatttataggaggggtttttttaatgtggcgcgaatagtgaatagggggggatatattatgttcgcgtgtgggga

SEQ ID NO: 13706 - DNA, 700 bp, Artificial Sequence
  chemically treated genomic DNA (Homo sapiens) CpG-island No: 13706
tccccacacgcgaacataatatatccccccctattcactattcgcgccacattaaaaaaacccctcctataaatattatcgaattacaacgctttaaaacgcgaaatcatactaaacgtacaaacacacccgtcgatacgaacttaccgaataaccacccgtacgcgatctaatcgacaacgacgatactattttatcgatcaacgaaatcttctccgacacgctctcctaactattcctacaattcgacgataacgtaccgtttaccgaactaataaatcaaacgtaacaacaaaacttaaccgaacctaacccgcgtaacgatctctctaacaaaaacgtaatacgcaaactaataattctaacgcgtaaaacaaattacaacatcgaaccgaatcaaatacgtataaaatcgctaatacctactcattacgaaaacgacaacatcgaccatttctttaaaaataacgataaactaaacgaacaaataatacaacgactaaaaacgacccgcgaaataaaactaatactacgctacgtaacgcgtttcgataccaacgataaaacgcgtataaacgtaaaaacgatacgtaaaaatcatccgttaacatcactactaccgtacgataacgtctttaccatcgaaaaccgctaatatcgcgataaccctctaataatccgcgaacctaacgctaaacgc

SEQ ID NO: 13707 - DNA, 700 bp, Artificial Sequence
  chemically treated genomic DNA (Homo sapiens) CpG-island No: 13707
tttttatacgcgaatatgatgtgtttttttttgtttattgttcgcgttatattggggggattttttttataaatattgtcgagttatagcgttttgaaacgcggggttatattgggcgtataaatatattcgtcggtgcgggtttgtcgaataattattcgtgcgcgatttgatcgatagcggcgatattattttgtcgattagcgggatttttttcggtacgtttttttggttgtttttgtaattcgacggtagcgtgtcgtttatcgagttggtggattaggcgtggtagtagggtttaatcgaatttgattcgcgtgacgatttttttggtaaagacgtgatgcgtaagttggtgattttggcgcgtgaagtaggttataatatcgaatcggattaggtacgtgtggaatcgttggtgtttgtttattgcgaaggcggtagtatcgattatttttttgaaaatggcgatgaattgaacgagtagatggtgtaacggttggaagcggttcgcgaaatggggttggtgttgcgttacgtggcgcgtttcgatgttaacggtaaagcgcgtgtaggcgtggaagcggtgcgtgaagattattcgttggtattattgttgtcgtgcgataacgtttttgttatcgaaagtcgttggtatcgcgataattttttggtgattcgcggatttggcgttgggcgt

SEQ ID NO: 13708 - DNA, 700 bp, Artificial Sequence
  chemically treated genomic DNA (Homo sapiens) CpG-island No: 13708
acgcccaacgccaaatccgcgaatcaccaaaaaattatcgcgataccaacgactttcgataacaaaaacgttatcgcacgacaacaataataccaacgaataatcttcacgcaccgcttccacgcctacacgcgctttaccgttaacatcgaaacgcgccacgtaacgcaacaccaaccccatttcgcgaaccgcttccaaccgttacaccatctactcgttcaattcatcgccattttcaaaaaaataatcgatactaccgccttcgcaataaacaaacaccaacgattccacacgtacctaatccgattcgatattataacctacttcacgcgccaaaatcaccaacttacgcatcacgtctttaccaaaaaaatcgtcacgcgaatcaaattcgattaaaccctactaccacgcctaatccaccaactcgataaacgacacgctaccgtcgaattacaaaaacaaccaaaaaaacgtaccgaaaaaaatcccgctaatcgacaaaataatatcgccgctatcgatcaaatcgcgcacgaataattattcgacaaacccgcaccgacgaatatatttatacgcccaatataaccccgcgtttcaaaacgctataactcgacaatatttataaaaaaaatccccccaatataacgcgaacaataaacaaaaaaaaacacatcatattcgcgtataaaaa

SEQ ID NO: 13709 - DNA, 755 bp, Artificial Sequence
  chemically treated genomic DNA (Homo sapiens) CpG-island No: 13709
gttgtcggtatcgaagcgcgtggttttttgtttggcgtttcggtagttttgggtttgggcgttggttttgtatcggttcgtaaatcgggtaaattgtcgcgtgaaattattagtgaaatttacgatttggaatacggtatcgattagttggagatttacgttgatgttattaaatcgggcgataaagttttggtggtggacgatttgttggtaatcggcggtattatcgaagcgatcgttaaattgattcgtcgtttgggtggtgaagtggttgacgttgcgtttattattaatttgttcgatttcggcggcgaatagcgtttcgaaaaatagggtattattagttatagttttgtttcgttttcgggttattaattatcgttagttttgtgttgtttacgttacggatagtataagatgtgtatttagtttcgtcgttttgacggggttgtgttagtattattttttcgtgaatttattttttagcgttttagagtttgttaatgagttattaggttttagttcgaaaatggcgtttataaatttttgttgacgtcgtcggttaggaatatgtgttgatcgtattggcgaacggtttgtcgttagggcgtatttattatgtttatttttttttcggtattcgtggcgtcggaaaaatttttattcgtttcgattgttggcgaaggggttaaattgcgaaattcggtattatcgcgacgtcgtgcggcgtgtgcgataattgtcgtgaaatcgag

SEQ ID NO: 13710 - DNA, 755 bp, Artificial Sequence
  chemically treated genomic DNA (Homo sapiens) CpG-island No: 13710
ctcgatttcacgacaattatcgcacacgccgcacgacgtcgcgataataccgaatttcgcaatttaaccccttcgccaacaatcgaaacgaataaaaatttttccgacgccacgaataccgaaaaaaaaataaacataataaatacgccctaacgacaaaccgttcgccaatacgatcaacacatattcctaaccgacgacgtcaacaaaaatttataaacgccattttcgaactaaaacctaataactcattaacaaactctaaaacgctaaaaaataaattcacgaaaaaataatactaacacaaccccgtcaaaacgacgaaactaaatacacatcttatactatccgtaacgtaaacaacacaaaactaacgataattaataacccgaaaacgaaacaaaactataactaataataccctatttttcgaaacgctattcgccgccgaaatcgaacaaattaataataaacgcaacgtcaaccacttcaccacccaaacgacgaatcaatttaacgatcgcttcgataataccgccgattaccaacaaatcgtccaccaccaaaactttatcgcccgatttaataacatcaacgtaaatctccaactaatcgataccgtattccaaatcgtaaatttcactaataatttcacgcgacaatttacccgatttacgaaccgatacaaaaccaacgcccaaacccaaaactaccgaaacgccaaacaaaaaaccacgcgcttcgataccgacaac

SEQ ID NO: 13711 - DNA, 755 bp, Artificial Sequence
  chemically treated genomic DNA (Homo sapiens) CpG-island No: 13711
ttcgattttacgatagttatcgtatacgtcgtacggcgtcgcggtaatgtcgggtttcgtagtttagttttttcgttagtagtcggggcggatagaggttttttcgacgttacgggtgtcggaaaaaagataagtatgatgaatacgttttaacgataagtcgttcgttagtgcggttagtatatgtttttggtcgacgacgttagtaaaggtttgtgggcgttattttcgggttaagatttgataatttattggtaggttttgaaacgttggaaggtggatttacgaaggggtaatgttaatatagtttcgttagaacggcgaggttgaatgtatattttgtgttgttcgtagcgtgggtagtataagattggcgataattaatggttcgggaacgggataaggttgtagttggtaatgttttgtttttcgagacgttgttcgtcgtcgagatcgaataggttgataatgaacgtagcgttagttattttattatttagacgacggattagtttaacggtcgtttcgatagtgtcgtcggttgttagtaggtcgtttattattagaattttgtcgttcggtttgatggtattaacgtggatttttagttgatcggtgtcgtattttaggtcgtaagttttattgatggttttacgcggtagtttgttcggtttacggatcggtataaagttaacgtttagatttagagttatcggagcgttaaataagaagttacgcgtttcggtgtcgataat

SEQ ID NO: 13712 - DNA, 755 bp, Artificial Sequence
  chemically treated genomic DNA (Homo sapiens) CpG-island No: 13712
attatcgacaccgaaacgcgtaacttcttatttaacgctccgataactctaaatctaaacgttaactttataccgatccgtaaaccgaacaaactaccgcgtaaaaccatcaataaaacttacgacctaaaatacgacaccgatcaactaaaaatccacgttaataccatcaaaccgaacgacaaaattctaataataaacgacctactaacaaccgacgacactatcgaaacgaccgttaaactaatccgtcgtctaaataataaaataactaacgctacgttcattatcaacctattcgatctcgacgacgaacaacgtctcgaaaaacaaaacattaccaactacaaccttatcccgttcccgaaccattaattatcgccaatcttatactacccacgctacgaacaacacaaaatatacattcaacctcgccgttctaacgaaactatattaacattaccccttcgtaaatccaccttccaacgtttcaaaacctaccaataaattatcaaatcttaacccgaaaataacgcccacaaacctttactaacgtcgtcgaccaaaaacatatactaaccgcactaacgaacgacttatcgttaaaacgtattcatcatacttatcttttttccgacacccgtaacgtcgaaaaaacctctatccgccccgactactaacgaaaaaactaaactacgaaacccgacattaccgcgacgccgtacgacgtatacgataactatcgtaaaatcgaa

SEQ ID NO: 13713 - DNA, 512 bp, Artificial Sequence
  chemically treated genomic DNA (Homo sapiens) CpG-island No: 13713
tacgtttattgcgggtgtcgataattattagttcgtttggttcgacgcggtttttttcgattatttcgttaggttggtaattttagatatcgattttagaggcgtaggtgatgagtttatttttggtgatgacgtagcgcgtcggacgtagatcgttacggtcgaggttataggcggtaaaacgatcgtcggatattacgatgttcgtcgggttattttacggttttatatgcgtggagttaaagtcgaggaaggtacgtagtttcgggtttatattcggggttgtttttgtaggcgggtggtattaatagacgtatggcgcggatgatatttatttcggtcgatagatagtagttttagtatgttatttttcggattgcggttcgaagcggggttcgttgaataacggggcgcgtcggtaagttaagataatcgcggttcggagtttaaattcgttcggttattggggggacgcgtaggggtgaatatcggtatcgtaaatagagacggtg

SEQ ID NO: 13714 - DNA, 512 bp, Artificial Sequence
  chemically treated genomic DNA (Homo sapiens) CpG-island No: 13714
caccgtctctatttacgataccgatattcacccctacgcgtccccccaataaccgaacgaatttaaactccgaaccgcgattatcttaacttaccgacgcgccccgttattcaacgaaccccgcttcgaaccgcaatccgaaaaataacatactaaaactactatctatcgaccgaaataaatatcatccgcgccatacgtctattaataccacccgcctacaaaaacaaccccgaatataaacccgaaactacgtaccttcctcgactttaactccacgcatataaaaccgtaaaataacccgacgaacatcgtaatatccgacgatcgttttaccgcctataacctcgaccgtaacgatctacgtccgacgcgctacgtcatcaccaaaaataaactcatcacctacgcctctaaaatcgatatctaaaattaccaacctaacgaaataatcgaaaaaaaccgcgtcgaaccaaacgaactaataattatcgacacccgcaataaacgta

SEQ ID NO: 13715 - DNA, 512 bp, Artificial Sequence
  chemically treated genomic DNA (Homo sapiens) CpG-island No: 13715
tatcgtttttatttgcgatatcggtgtttatttttgcgcgtttttttagtggtcgggcgaatttaaatttcgagtcgcggttattttgatttgtcgacgcgtttcgttgtttaacgaatttcgtttcgaatcgtagttcgagggataatatgttggaattgttgtttgtcggtcgggatggatattattcgcgttatgcgtttattagtattattcgtttgtaagaataatttcggatatggattcggaattgcgtgtttttttcgattttaattttacgtatatggagtcgtgggatggttcggcgggtatcgtgatgttcgacggtcgttttgtcgtttgtaatttcgatcgtaacggtttgcgttcggcgcgttacgttattattaaagataagtttattatttgcgtttttgaagtcggtatttgggattattagtttgacgaagtggtcgaaaaaggtcgcgtcgggttaggcgaattgatggttatcgatattcgtagtgggcgta

SEQ ID NO: 13716 - DNA, 512 bp, Artificial Sequence
  chemically treated genomic DNA (Homo sapiens) CpG-island No: 13716
tacgcccactacgaatatcgataaccatcaattcgcctaacccgacgcgacctttttcgaccacttcgtcaaactaataatcccaaataccgacttcaaaaacgcaaataataaacttatctttaataataacgtaacgcgccgaacgcaaaccgttacgatcgaaattacaaacgacaaaacgaccgtcgaacatcacgatacccgccgaaccatcccacgactccatatacgtaaaattaaaatcgaaaaaaacacgcaattccgaatccatatccgaaattattcttacaaacgaataatactaataaacgcataacgcgaataatatccatcccgaccgacaaacaacaattccaacatattatccctcgaactacgattcgaaacgaaattcgttaaacaacgaaacgcgtcgacaaatcaaaataaccgcgactcgaaatttaaattcgcccgaccactaaaaaaacgcgcaaaaataaacaccgatatcgcaaataaaaacgata

SEQ ID NO: 13717 - DNA, 596 bp, Artificial Sequence
  chemically treated genomic DNA (Homo sapiens) CpG-island No: 13717
agcggtaggggaggagggatagcggaagaaggatacgggaggataaggaaggcggtggtaaggaaagggaggagcgaagagcgggaatagggtagggggaaatgagcggaagaaaaggcgagacgacgcggacggaggagatagcgattaataggagagagaaaagaataagatagaagtagtatcgatcgcgtacgagtacgtcgacgtaggtagtcgtagggaaacgataggtacgtagtcgggaaacgaaaataagcgtgggacgagcgcgcgtcgatacgcggtggaggaaggaagagaaatataagaaagtcgaagataaagggatttatttattagcgtaacgaaagtaaaaaaatattaggagtaggtacgggaattaacggttaggtagagaacgaaaggaacgacgtatgaagtaaagaggacgacggacgaggaagataaaatgaacgagatagggcggataagaaacgaacgtcgcgaaaggacggttaagacgaaatagcgcgagataaagatacggagggataaaacgtatacgtaacgttacgagatagacgtaaatataataggaagaagaaaggaaacgt

SEQ ID NO: 13718 - DNA, 596 bp, Artificial Sequence
  chemically treated genomic DNA (Homo sapiens) CpG-island No: 13718
acgtttcctttcttcttcctattatatttacgtctatctcgtaacgttacgtatacgttttatccctccgtatctttatctcgcgctatttcgtcttaaccgtcctttcgcgacgttcgtttcttatccgccctatctcgttcattttatcttcctcgtccgtcgtcctctttacttcatacgtcgttcctttcgttctctacctaaccgttaattcccgtacctactcctaatatttttttactttcgttacgctaataaataaatccctttatcttcgactttcttatatttctcttccttcctccaccgcgtatcgacgcgcgctcgtcccacgcttattttcgtttcccgactacgtacctatcgtttccctacgactacctacgtcgacgtactcgtacgcgatcgatactacttctatcttattcttttctctctcctattaatcgctatctcctccgtccgcgtcgtctcgccttttcttccgctcatttccccctaccctattcccgctcttcgctcctccctttccttaccaccgccttccttatcctcccgtatccttcttccgctatccctcctcccctaccgct

SEQ ID NO: 13719 - DNA, 596 bp, Artificial Sequence
  chemically treated genomic DNA (Homo sapiens) CpG-island No: 13719
gcgtttttttttttttttttgttgtgtttacgtttgtttcgtggcgttgcgtgtgcgttttgttttttcgtgtttttatttcgcgttgtttcgttttagtcgttttttcgcggcgttcgttttttgttcgttttgtttcgtttattttgtttttttcgttcgtcgttttttttgttttatgcgtcgtttttttcgttttttgtttagtcgttggttttcgtgtttgtttttggtgtttttttgttttcgttgcgttgatgggtggatttttttgttttcggtttttttgtgtttttttttttttttttatcgcgtgtcggcgcgcgttcgttttacgtttgttttcgtttttcggttgcgtgtttgtcgtttttttgcggttgtttgcgtcggcgtgttcgtgcgcggtcggtgttgtttttgttttgttttttttttttttttgttagtcgttgtttttttcgttcgcgtcgtttcgttttttttttcgtttatttttttttgttttgttttcgtttttcgtttttttttttttttgttatcgttttttttgttttttcgtgtttttttttcgttgtttttttttttttgtcgtt

SEQ ID NO: 13720 - DNA, 596 bp, Artificial Sequence
  chemically treated genomic DNA (Homo sapiens) CpG-island No: 13720
aacgacaaaaaaaaaaaaacaacgaaaaaaaaacacgaaaaaacaaaaaaaacgataacaaaaaaaaaaaaaaacgaaaaacgaaaacaaaacaaaaaaaaataaacgaaaaaaaaaacgaaacgacgcgaacgaaaaaaacaacgactaacaaaaaaaaaaaaaaaacaaaacaaaaacaacaccgaccgcgcacgaacacgccgacgcaaacaaccgcaaaaaaacgacaaacacgcaaccgaaaaacgaaaacaaacgtaaaacgaacgcgcgccgacacgcgataaaaaaaaaaaaaaaaacacaaaaaaaccgaaaacaaaaaaatccacccatcaacgcaacgaaaacaaaaaaacaccaaaaacaaacacgaaaaccaacgactaaacaaaaaacgaaaaaaacgacgcataaaacaaaaaaaacgacgaacgaaaaaaacaaaataaacgaaacaaaacgaacaaaaaacgaacgccgcgaaaaaacgactaaaacgaaacaacgcgaaataaaaacacgaaaaaacaaaacgcacacgcaacgccacgaaacaaacgtaaacacaacaaaaaaaaaaaaaaaaacgc

SEQ ID NO: 13721 - DNA, 559 bp, Artificial Sequence
  chemically treated genomic DNA (Homo sapiens) CpG-island No: 13721
ttgtcggttcggtatcgtcgttatcgttgatatattttttattacgtagtgttagtattagagaattgaatatcgttttgtcgaagaatttcggcgcgttgatgtcgtgtagtacggagagacgttgcgcgacggtgcggttttttttttttagcgtatcgcggttgatcgacgggttggtatttaataattagaaggtgatggtataacgttgtagcgtttcgcgcgcgtttgcggttagtagttgtagcgtgcgagaatgcgtcgggttgatatgtaatttattattttgtagggtaattagtttttgacgttgtattttatttgttagcgtattaataacgttcggtaattcgtcgcgattttagcgtaggaatagtttcgtttttagtattgggtaaagtatattgacgtgttttattaatacgtcgcgggagatgtggcgatgttgggtgacgattgtcgttattagcgaaggtagtataatatatgttttatgttggtgcgatagtaggtttttttttgaatttcgtttttgtattcgtttgattatgagtga

SEQ ID NO: 13722 - DNA, 559 bp, Artificial Sequence
  chemically treated genomic DNA (Homo sapiens) CpG-island No: 13722
tcactcataatcaaacgaatacaaaaacgaaattcaaaaaaaaacctactatcgcaccaacataaaacatatattatactaccttcgctaataacgacaatcgtcacccaacatcgccacatctcccgcgacgtattaataaaacacgtcaatatactttacccaatactaaaaacgaaactattcctacgctaaaatcgcgacgaattaccgaacgttattaatacgctaacaaataaaatacaacgtcaaaaactaattaccctacaaaataataaattacatatcaacccgacgcattctcgcacgctacaactactaaccgcaaacgcgcgcgaaacgctacaacgttataccatcaccttctaattattaaataccaacccgtcgatcaaccgcgatacgctaaaaaaaaaaaaccgcaccgtcgcgcaacgtctctccgtactacacgacatcaacgcgccgaaattcttcgacaaaacgatattcaattctctaatactaacactacgtaataaaaaatatatcaacgataacgacgataccgaaccgacaa

SEQ ID NO: 13723 - DNA, 559 bp, Artificial Sequence
  chemically treated genomic DNA (Homo sapiens) CpG-island No: 13723
ttatttatgattaggcgaatgtaggaacgaagtttaaaggaggatttattatcgtattaatatggggtatatgttgtgttgttttcgttgatggcggtaatcgttatttagtatcgttatatttttcgcgacgtattgatggagtacgttaatgtgttttatttaatgttgaaagcggagttgtttttgcgttgggatcgcgacgagttgtcggacgttattgatgcgttggtaaatgagatgtaacgttaggggttgattattttgtaagatgatgagttgtatattaattcggcgtattttcgtacgttatagttgttggtcgtaggcgcgcgcgaaacgttgtaacgttatgttattattttttggttgttgagtgttaattcgtcgattaatcgcggtacgttggagaaagagagtcgtatcgtcgcgtaacgttttttcgtgttgtacggtattaacgcgtcggagtttttcgataaggcggtgtttagttttttggtgttgatattgcgtgatgaagggtatattagcgatagcggcgatgtcgaatcggtag

SEQ ID NO: 13724 - DNA, 559 bp, Artificial Sequence
  chemically treated genomic DNA (Homo sapiens) CpG-island No: 13724
ctaccgattcgacatcgccgctatcgctaatatacccttcatcacgcaatatcaacaccaaaaaactaaacaccgccttatcgaaaaactccgacgcgttaataccgtacaacacgaaaaaacgttacgcgacgatacgactctctttctccaacgtaccgcgattaatcgacgaattaacactcaacaaccaaaaaataataacataacgttacaacgtttcgcgcgcgcctacgaccaacaactataacgtacgaaaatacgccgaattaatatacaactcatcatcttacaaaataatcaacccctaacgttacatctcatttaccaacgcatcaataacgtccgacaactcgtcgcgatcccaacgcaaaaacaactccgctttcaacattaaataaaacacattaacgtactccatcaatacgtcgcgaaaaatataacgatactaaataacgattaccgccatcaacgaaaacaacacaacatataccccatattaatacgataataaatcctcctttaaacttcgttcctacattcgcctaatcataaataa

SEQ ID NO: 13725 - DNA, 570 bp, Artificial Sequence
  chemically treated genomic DNA (Homo sapiens) CpG-island No: 13725
taacgtcgtgaatttgggatatagttttggcggatatttaaattgaagatcgcgacgttattcgtatttttttttttaattattcgacgtataagttatttatagatagacggaagagtgagagaagggaggaagagcgggggggcgcgtcggaagggagggcggggggcgagggagggagaaggagagacgggggggtatacgcggcgggtacgtcggcgaacggatggcgtagcgcgtaatcggttacgaggaggacgagatcgggggatatattttgagaattcgcggaagcgcgagatataacgtattcgttaagcgtatcgcgtgtcggttatcgtaaaaatcgtagcgttaggaggaagaagaaaaaaagttagggggacgaagggataaagaagggagatacgagacggaggcgtaacgagtatcgagttaaagattatgtaagagagaggaagtttatacgttatacgttatgtaagtagtttcgaattttttagacggcgtattatttacgattatcgcgttattatttcgggtatcggtgaaatttttttttattaaaaa

SEQ ID NO: 13726 - DNA, 570 bp, Artificial Sequence
  chemically treated genomic DNA (Homo sapiens) CpG-island No: 13726
tttttaataaaaaaaaatttcaccgatacccgaaataataacgcgataatcgtaaataatacgccgtctaaaaaattcgaaactacttacataacgtataacgtataaacttcctctctcttacataatctttaactcgatactcgttacgcctccgtctcgtatctcccttctttatcccttcgtccccctaactttttttcttcttcctcctaacgctacgatttttacgataaccgacacgcgatacgcttaacgaatacgttatatctcgcgcttccgcgaattctcaaaatatatcccccgatctcgtcctcctcgtaaccgattacgcgctacgccatccgttcgccgacgtacccgccgcgtatacccccccgtctctccttctccctccctcgccccccgccctcccttccgacgcgcccccccgctcttcctcccttctctcactcttccgtctatctataaataacttatacgtcgaataattaaaaaaaaaaatacgaataacgtcgcgatcttcaatttaaatatccgccaaaactatatcccaaattcacgacgtta

SEQ ID NO: 13727 - DNA, 570 bp, Artificial Sequence
  chemically treated genomic DNA (Homo sapiens) CpG-island No: 13727
tttttagtagagaagagttttatcggtattcggggtggtggcgcggtgatcgtgggtagtgcgtcgtttggggggttcgggattgtttgtatggcgtgtggcgtgtgggtttttttttttttgtatggtttttggttcggtgttcgttgcgttttcgtttcgtattttttttttttgttttttcgtttttttggttttttttttttttttttttgacgttgcggtttttgcggtggtcggtacgcgatgcgtttggcgggtgcgttgtgtttcgcgttttcgcgggtttttagggtgtgtttttcggtttcgtttttttcgtggtcggttgcgcgttgcgttattcgttcgtcggcgtgttcgtcgcgtgtgttttttcgtttttttttttttttttttcgtttttcgttttttttttcggcgcgttttttcgttttttttttttttttttattttttcgtttgtttgtgagtagtttgtgcgtcgggtggttgggggggggggtgcgggtggcgtcgcgatttttagtttgggtattcgttagggttgtgttttaggtttacgacgttg

SEQ ID NO: 13728 - DNA, 570 bp, Artificial Sequence
  chemically treated genomic DNA (Homo sapiens) CpG-island No: 13728
caacgtcgtaaacctaaaacacaaccctaacgaatacccaaactaaaaatcgcgacgccacccgcacccccccccccaaccacccgacgcacaaactactcacaaacaaacgaaaaaataaaaaaaaaaaaaaaaaacgaaaaaacgcgccgaaaaaaaaaacgaaaaacgaaaaaaaaaaaaaaaaaaacgaaaaaacacacgcgacgaacacgccgacgaacgaataacgcaacgcgcaaccgaccacgaaaaaaacgaaaccgaaaaacacaccctaaaaacccgcgaaaacgcgaaacacaacgcacccgccaaacgcatcgcgtaccgaccaccgcaaaaaccgcaacgtcaaaaaaaaaaaaaaaaaaaaccaaaaaaacgaaaaaacaaaaaaaaaaaatacgaaacgaaaacgcaacgaacaccgaaccaaaaaccatacaaaaaaaaaaaaacccacacgccacacgccatacaaacaatcccgaaccccccaaacgacgcactacccacgatcaccgcgccaccaccccgaataccgataaaactcttctctactaaaaa

SEQ ID NO: 13729 - DNA, 1121 bp, Artificial Sequence
  chemically treated genomic DNA (Homo sapiens) CpG-island No: 13729
cgataatcggatcgtttattattttgtcgtttagggaaattacgtcgaggttttcgcgagcggcggttttagcggtttttacgacgcggcgggcgtgatttatttttttttgggtcggtgcgtagaggttgtgtagtagattaatttgacgcgggttgattagcgatttgtcgttaaagtttagttgtttgatgtgggcggttttttgtagaaattcggtttcgttgttagcgtcggaatagacggtatcgaacgtttgaatattcgtagagcgcgcggtttgtaaaatggaatagcgtgcgaatagtagtttagtttttttcggggagcgttttgtacgtaggttgcgtatatagttttttgtatcgagggcgatatcgattaaacgttcggaagcgtgagcgatttttattgcgcgggtaatttttagcggagatttaatcgtcgttagtaggtcggtgttgtcgggtttacgattataggttttttcgatacgtaggattttttttttaatatttagaatattttgagcggtatcggttttcggtagacgtataacgttcgtattatcgcgaacgacggtttttaggtcgttaatattttattcggaatttagcgcgttgatacgtataatggttttaatatcgcgatatagcggatgttgtagcgcgtggtaaattatgcggcgggcggtgttttttttacgtaatgttacggagttttcgaggttaaatattagggtattagtcgggtagatgaaggagttgttgattatcgcggtattggtattaggtataaataatatgttgcggcgggtgcgagttttttatgggtttgaaggcgttattatcgattcgtatattggagatcgtcgatcgttaacggaagatattttggcgattgttggaaaaaatcgtttttttcgtatataaaattggtgtatcgagcgcgattgaggttttgtatcgttaggtcgttagcggtttgaatgaagcgtagttaatgcgcgatttcgtcgtcgatggcggttcgttgattgggttggtgaaaaagtattgtgagatttgggtcggtgattaagtcgggaattgttttatagaagaatatttttgataatggtg

SEQ ID NO: 13730 - DNA, 1121 bp, Artificial Sequence
  chemically treated genomic DNA (Homo sapiens) CpG-island No: 13730
caccattatcaaaaatattcttctataaaacaattcccgacttaatcaccgacccaaatctcacaatactttttcaccaacccaatcaacgaaccgccatcgacgacgaaatcgcgcattaactacgcttcattcaaaccgctaacgacctaacgatacaaaacctcaatcgcgctcgatacaccaattttatatacgaaaaaaacgattttttccaacaatcgccaaaatatcttccgttaacgatcgacgatctccaatatacgaatcgataataacgccttcaaacccataaaaaactcgcacccgccgcaacatattatttatacctaataccaataccgcgataatcaacaactccttcatctacccgactaataccctaatatttaacctcgaaaactccgtaacattacgtaaaaaaaacaccgcccgccgcataatttaccacgcgctacaacatccgctatatcgcgatattaaaaccattatacgtatcaacgcgctaaattccgaataaaatattaacgacctaaaaaccgtcgttcgcgataatacgaacgttatacgtctaccgaaaaccgataccgctcaaaatattctaaatattaaaaaaaaaatcctacgtatcgaaaaaacctataatcgtaaacccgacaacaccgacctactaacgacgattaaatctccgctaaaaattacccgcgcaataaaaatcgctcacgcttccgaacgtttaatcgatatcgccctcgatacaaaaaactatatacgcaacctacgtacaaaacgctccccgaaaaaaactaaactactattcgcacgctattccattttacaaaccgcgcgctctacgaatattcaaacgttcgataccgtctattccgacgctaacaacgaaaccgaatttctacaaaaaaccgcccacatcaaacaactaaactttaacgacaaatcgctaatcaacccgcgtcaaattaatctactacacaacctctacgcaccgacccaaaaaaaaataaatcacgcccgccgcgtcgtaaaaaccgctaaaaccgccgctcgcgaaaacctcgacgtaatttccctaaacgacaaaataataaacgatccgattatcg

SEQ ID NO: 13731 - DNA, 1121 bp, Artificial Sequence
  chemically treated genomic DNA (Homo sapiens) CpG-island No: 13731
tattattgttagggatatttttttgtaaggtaattttcggtttagttatcggtttagattttataatgtttttttattagtttaattagcgagtcgttatcggcgacgaaatcgcgtattagttgcgttttatttagatcgttgacgatttggcgatgtagggttttaatcgcgttcgatgtattaattttatgtgcggaaggggcgattttttttagtaatcgttaaggtatttttcgttagcggtcgacgatttttagtgtgcggatcggtgatgacgtttttaagtttatagaaaattcgtattcgtcgtagtatgttgtttgtgtttggtgttaatgtcgcgatggttagtaatttttttatttattcggttgatgttttgatgtttgatttcgaagatttcgtagtattgcgtgaaaaagatatcgttcgtcgtatggtttattacgcgttgtaatattcgttgtatcgcgatattgaaattattgtgcgtgttaacgcgttggatttcgaatggggtgttaacgatttggaagtcgtcgttcgcggtggtgcggacgttgtgcgtttgtcgaaaatcgatatcgtttaggatgttttggatattgaaaaagagattttgcgtatcgaaaaagtttgtggtcgtgaattcggtagtatcggtttgttggcggcgattgaattttcgttggggattattcgcgtagtggaaatcgtttacgttttcgagcgtttgatcggtatcgttttcggtgtagaagattatgtgcgtaatttgcgtatagaacgtttttcggaaggaattgaattgttgttcgtacgttgttttattttgtaggtcgcgcgttttgcgggtatttaggcgttcgatatcgtttatttcgacgttaataacgaagtcggatttttgtaagaagtcgtttatattaaatagttgggttttgacggtaaatcgttgattaattcgcgttagattgatttgttgtataatttttacgtatcgatttagaaagaagtggattacgttcgtcgcgtcgtagaagtcgttgaagtcgtcgttcgcgaaggtttcggcgtggtttttttgaacggtaagatggtggacggttcggttatcg

SEQ ID NO: 13732 - DNA, 1121 bp, Artificial Sequence
  chemically treated genomic DNA (Homo sapiens) CpG-island No: 13732
cgataaccgaaccgtccaccatcttaccgttcaaaaaaaccacgccgaaaccttcgcgaacgacgacttcaacgacttctacgacgcgacgaacgtaatccacttctttctaaatcgatacgtaaaaattatacaacaaatcaatctaacgcgaattaatcaacgatttaccgtcaaaacccaactatttaatataaacgacttcttacaaaaatccgacttcgttattaacgtcgaaataaacgatatcgaacgcctaaatacccgcaaaacgcgcgacctacaaaataaaacaacgtacgaacaacaattcaattccttccgaaaaacgttctatacgcaaattacgcacataatcttctacaccgaaaacgataccgatcaaacgctcgaaaacgtaaacgatttccactacgcgaataatccccaacgaaaattcaatcgccgccaacaaaccgatactaccgaattcacgaccacaaactttttcgatacgcaaaatctctttttcaatatccaaaacatcctaaacgatatcgattttcgacaaacgcacaacgtccgcaccaccgcgaacgacgacttccaaatcgttaacaccccattcgaaatccaacgcgttaacacgcacaataatttcaatatcgcgatacaacgaatattacaacgcgtaataaaccatacgacgaacgatatctttttcacgcaatactacgaaatcttcgaaatcaaacatcaaaacatcaaccgaataaataaaaaaattactaaccatcgcgacattaacaccaaacacaaacaacatactacgacgaatacgaattttctataaacttaaaaacgtcatcaccgatccgcacactaaaaatcgtcgaccgctaacgaaaaataccttaacgattactaaaaaaaatcgccccttccgcacataaaattaatacatcgaacgcgattaaaaccctacatcgccaaatcgtcaacgatctaaataaaacgcaactaatacgcgatttcgtcgccgataacgactcgctaattaaactaataaaaaaacattataaaatctaaaccgataactaaaccgaaaattaccttacaaaaaaatatccctaacaataata

SEQ ID NO: 13733 - DNA, 636 bp, Artificial Sequence
  chemically treated genomic DNA (Homo sapiens) CpG-island No: 13733
  unsure (117)
gatttcggttggagaagtggttaggggtcgttgcgaaaggagaggagcgtgtatgacgttatattcggcgcgcggcggaattggttttttttgttttcgcggcggggtcggaagtangagcggcggcggcggcggcggcggcggtcgaaagcggagtgaaagaaggaagttaggagtcggagagtcggaatcggagtcgtagcggcggtaatagtgcgagatttttttaagttatcgtttttagcgcgggatcgcggggttcgacgggagttagcgggggtgcggttaggtcgttggacgtcggggggttttggggtcgatgtgaggggaggcgggggtgggggagtcgggtcggttttagaatcgagttgttcgtttcgagtttcggacggatattgattcgcgggttcgttttggttttttttaggagatttttgtgcggtgcggagggggcggcggtttcgattttgattcgcgtcgggggtgggttatggcggagattagcgatttggatcggtagatcgagtagttgcgtcgttgcgagtttattaaggagagcgaagttaaggttttgtgcgttaaggttaggtgagttcgttggttttggggaagggaggttaagtcgtcgtttacggg

SEQ ID NO: 13734 - DNA, 636 bp, Artificial Sequence
  chemically treated genomic DNA (Homo sapiens) CpG-island No: 13734
  unsure (520)
cccgtaaacgacgacttaacctcccttccccaaaaccaacgaactcacctaaccttaacgcacaaaaccttaacttcgctctccttaataaactcgcaacgacgcaactactcgatctaccgatccaaatcgctaatctccgccataacccacccccgacgcgaatcaaaatcgaaaccgccgccccctccgcaccgcacaaaaatctcctaaaaaaaaccaaaacgaacccgcgaatcaatatccgtccgaaactcgaaacgaacaactcgattctaaaaccgacccgactcccccacccccgcctcccctcacatcgaccccaaaaccccccgacgtccaacgacctaaccgcacccccgctaactcccgtcgaaccccgcgatcccgcgctaaaaacgataacttaaaaaaatctcgcactattaccgccgctacgactccgattccgactctccgactcctaacttccttctttcactccgctttcgaccgccgccgccgccgccgccgccgctcntacttccgaccccgccgcgaaaacaaaaaaaaccaattccgccgcgcgccgaatataacgtcatacacgctcctctcctttcgcaacgacccctaaccacttctccaaccgaaatc

SEQ ID NO: 13735 - DNA, 636 bp, Artificial Sequence
  chemically treated genomic DNA (Homo sapiens) CpG-island No: 13735
  unsure (520)
ttcgtgggcggcggtttggttttttttttttagggttaacgagtttatttggttttagcgtatagggttttgatttcgttttttttgatgagttcgtagcgacgtagttgttcgatttgtcggtttaggtcgttgattttcgttatggtttattttcggcgcgggttagagtcggggtcgtcgtttttttcgtatcgtataggggttttttgggaaaggttaagacgagttcgcggattagtgttcgttcggggttcggagcggataattcgattttagagtcggttcggtttttttattttcgtttttttttatatcggttttaggatttttcggcgtttaacggtttggtcgtattttcgttaattttcgtcgaatttcgcggtttcgcgttaaggacggtgatttagaggagtttcgtattattatcgtcgttgcgatttcggtttcggtttttcggtttttggttttttttttttatttcgttttcgatcgtcgtcgtcgtcgtcgtcgtcgtttntattttcggtttcgtcgcggaagtaaaggaggttagtttcgtcgcgcgtcggatgtggcgttatatacgttttttttttttcgtagcgatttttgattatttttttagtcgagatt

SEQ ID NO: 13736 - DNA, 636 bp, Artificial Sequence
  chemically treated genomic DNA (Homo sapiens) CpG-island No: 13736
  unsure (117)
aatctcgactaaaaaaataatcaaaaatcgctacgaaaaaaaaaaaacgtatataacgccacatccgacgcgcgacgaaactaacctcctttacttccgcgacgaaaccgaaaatanaaacgacgacgacgacgacgacgacgatcgaaaacgaaataaaaaaaaaaaaccaaaaaccgaaaaaccgaaaccgaaatcgcaacgacgataataatacgaaactcctctaaatcaccgtccttaacgcgaaaccgcgaaattcgacgaaaattaacgaaaatacgaccaaaccgttaaacgccgaaaaatcctaaaaccgatataaaaaaaaacgaaaataaaaaaaccgaaccgactctaaaatcgaattatccgctccgaaccccgaacgaacactaatccgcgaactcgtcttaacctttcccaaaaaacccctatacgatacgaaaaaaacgacgaccccgactctaacccgcgccgaaaataaaccataacgaaaatcaacgacctaaaccgacaaatcgaacaactacgtcgctacgaactcatcaaaaaaaacgaaatcaaaaccctatacgctaaaaccaaataaactcgttaaccctaaaaaaaaaaaaccaaaccgccgcccacgaa

SEQ ID NO: 13737 - DNA, 957 bp, Artificial Sequence
  chemically treated genomic DNA (Homo sapiens) CpG-island No: 13737
gttcgggaacgcgttttttttataaaatttaaatcgttgtttggaaaggtagcgatattacgtttttagcgtattttcgcgggggaggtttcgtttttaattttaggtggttttatttaaggttcgcggatttattttttttagaggtatttttttttatttttatttattcgaacgtgttgaaggcggtagggaggcggaggcgggagagacggatttggggtaggtgtttggggtcggggatgcggtttggaaagtattagggtggtcgtcggtgacgttttgagataagtcggaaaagggtcgggttcgtcgaaggtcgcgtaatttatttggtcgttgaggaggaaagagtcgtcgttcgagaagacggtcgaggtggcgtagtggacgtgagattcgtcgtcgtcgtcgttcgttttagtacgttcgggaagtcgtacgtcggttcggattttaggaagtcgtagttcgcgtttttagttgtcgcgtaggtgcggtattaggttcgtagggtttttttagggtgtattgcgcgtattgggggcgcgtcggaagattatcggacggtcggggggggcgcgggtcgaaaggcgagggtcgggcggcggtaggggtagatagttgacgaaggcgcgtcgcgttgttagaggaaaggcggttgtagagtacgggtcgggcgtcggagcggtagaatttggtgttagttgagtcgtcgtcgcgattcgtcgttgtgttgatgaacgtatttaggtagaagttatgtttcggtttattttttgaggcgtagcgggcgagtatcgagtcggtagagtttaatagattgcgtcgtttgttcgtttcgtagtttttttattcgagttgtttttttaattattcgagttagcggagtaaattattgtttatatatcgcggggcgttatttggcgggtattagttttaattttattaagttat

SEQ ID NO: 13738 - DNA, 957 bp, Artificial Sequence
  chemically treated genomic DNA (Homo sapiens) CpG-island No: 13738
ataacttaataaaattaaaactaatacccgccaaataacgccccgcgatatataaacaataatttactccgctaactcgaataattaaaaaaacaactcgaataaaaaaactacgaaacgaacaaacgacgcaatctattaaactctaccgactcgatactcgcccgctacgcctcaaaaaataaaccgaaacataacttctacctaaatacgttcatcaacacaacgacgaatcgcgacgacgactcaactaacaccaaattctaccgctccgacgcccgacccgtactctacaaccgcctttcctctaacaacgcgacgcgccttcgtcaactatctacccctaccgccgcccgaccctcgcctttcgacccgcgccccccccgaccgtccgataatcttccgacgcgcccccaatacgcgcaatacaccctaaaaaaaccctacgaacctaataccgcacctacgcgacaactaaaaacgcgaactacgacttcctaaaatccgaaccgacgtacgacttcccgaacgtactaaaacgaacgacgacgacgacgaatctcacgtccactacgccacctcgaccgtcttctcgaacgacgactctttcctcctcaacgaccaaataaattacgcgaccttcgacgaacccgacccttttccgacttatctcaaaacgtcaccgacgaccaccctaatactttccaaaccgcatccccgaccccaaacacctaccccaaatccgtctctcccgcctccgcctccctaccgccttcaacacgttcgaataaataaaaataaaaaaaaatacctctaaaaaaaataaatccgcgaaccttaaataaaaccacctaaaattaaaaacgaaacctcccccgcgaaaatacgctaaaaacgtaatatcgctacctttccaaacaacgatttaaattttataaaaaaaacgcgttcccgaac

SEQ ID NO: 13739 - DNA, 957 bp, Artificial Sequence
  chemically treated genomic DNA (Homo sapiens) CpG-island No: 13739
atgatttgatagaattggagttggtattcgttaagtggcgtttcgcggtatataggtaataatttatttcgttaattcgaatggttggagaggtagttcgggtagagaggttgcggagcgggtagacggcgtagtttgttaagttttgtcggttcggtattcgttcgttgcgttttagaaagtgggtcgaaatatgatttttatttgagtacgtttattagtatagcggcgggtcgcggcgacggtttagttggtattaagttttgtcgtttcgacgttcggttcgtgttttgtagtcgttttttttttggtaacgcgacgcgttttcgttagttgtttgtttttgtcgtcgttcgattttcgtttttcggttcgcgtttttttcggtcgttcggtaatttttcggcgcgtttttagtacgcgtagtgtattttggaggggttttacgaatttggtgtcgtatttgcgcggtagttgggggcgcggattacggttttttggggttcgggtcggcgtacgatttttcgggcgtgttggggcgggcggcgacgacggcgggttttacgtttattacgttatttcggtcgttttttcgggcggcggtttttttttttttagcggttaggtggattacgcggttttcggcgaattcggttttttttcggtttgttttaaagcgttatcgacggttattttggtgttttttagatcgtattttcggttttaggtatttattttaagttcgtttttttcgttttcgtttttttgtcgtttttagtacgttcgagtggatgaaagtgaagaggaatgtttttaagaaaggtaagttcgcgggttttggatggggttatttggggttggggacggagtttttttcgcggaaatgcgttgggagcgtggtgtcgttgtttttttagatagcggtttgggttttgtggaggagacgcgttttcgggt

SEQ ID NO: 13740 - DNA, 957 bp, Artificial Sequence
  chemically treated genomic DNA (Homo sapiens) CpG-island No: 13740
acccgaaaacgcgtctcctccacaaaacccaaaccgctatctaaaaaaacaacgacaccacgctcccaacgcatttccgcgaaaaaaactccgtccccaaccccaaataaccccatccaaaacccgcgaacttacctttcttaaaaacattcctcttcactttcatccactcgaacgtactaaaaacgacaaaaaaacgaaaacgaaaaaaacgaacttaaaataaatacctaaaaccgaaaatacgatctaaaaaacaccaaaataaccgtcgataacgctttaaaacaaaccgaaaaaaaaccgaattcgccgaaaaccgcgtaatccacctaaccgctaaaaaaaaaaaaaccgccgcccgaaaaaacgaccgaaataacgtaataaacgtaaaacccgccgtcgtcgccgcccgccccaacacgcccgaaaaatcgtacgccgacccgaaccccaaaaaaccgtaatccgcgcccccaactaccgcgcaaatacgacaccaaattcgtaaaacccctccaaaatacactacgcgtactaaaaacgcgccgaaaaattaccgaacgaccgaaaaaaacgcgaaccgaaaaacgaaaatcgaacgacgacaaaaacaaacaactaacgaaaacgcgtcgcgttaccaaaaaaaaaacgactacaaaacacgaaccgaacgtcgaaacgacaaaacttaataccaactaaaccgtcgccgcgacccgccgctatactaataaacgtactcaaataaaaatcatatttcgacccactttctaaaacgcaacgaacgaataccgaaccgacaaaacttaacaaactacgccgtctacccgctccgcaacctctctacccgaactacctctccaaccattcgaattaacgaaataaattattacctatataccgcgaaacgccacttaacgaataccaactccaattctatcaaatcat

SEQ ID NO: 13741 - DNA, 504 bp, Artificial Sequence
  chemically treated genomic DNA (Homo sapiens) CpG-island No: 13741
agtcgcgtcggcgtttcgtaggacggcgcgggggcggggtcggcggaagcgttcgagtgtcgttgtcggtgcgtcggaagtttttagttaggtttggcggtaattttgggggttttattgtagtcgtcgttgttgttggagtgggttttgcgagtttgaacgttggcggggttaggttcgttaattgtcgagagttttcgggtttgcggtggaggacgttgaggttcgtggggggtaggtattcgggcgtcggttttttagtcgatatgtttttagtggcggaagttttcgttttttagattgtaggtagcgcggttggtcgtagatttagaaggtggcggcgcggtttcggggagtcgcgtggggtatagggttggagtttttttttagttttgcggtattatacgttgaattcggttcggatggtggaggcgggtacggattattaattttattttatatatgggaaaattgagaaggagatatttggttaaggttatttcg

SEQ ID NO: 13742 - DNA, 504 bp, Artificial Sequence
  chemically treated genomic DNA (Homo sapiens) CpG-island No: 13742
cgaaataaccttaaccaaatatctccttctcaattttcccatatataaaataaaattaataatccgtacccgcctccaccatccgaaccgaattcaacgtataataccgcaaaactaaaaaaaaactccaaccctataccccacgcgactccccgaaaccgcgccgccaccttctaaatctacgaccaaccgcgctacctacaatctaaaaaacgaaaacttccgccactaaaaacatatcgactaaaaaaccgacgcccgaatacctaccccccacgaacctcaacgtcctccaccgcaaacccgaaaactctcgacaattaacgaacctaaccccgccaacgttcaaactcgcaaaacccactccaacaacaacgacgactacaataaaacccccaaaattaccgccaaacctaactaaaaacttccgacgcaccgacaacgacactcgaacgcttccgccgaccccgcccccgcgccgtcctacgaaacgccgacgcgact

SEQ ID NO: 13743 - DNA, 504 bp, Artificial Sequence
  chemically treated genomic DNA (Homo sapiens) CpG-island No: 13743
cggggtgattttggttaagtgttttttttttagtttttttatatgtgagataaggttggtagttcgtgttcgtttttattattcgggtcgggtttagcgtataatgtcgtaaggttggaggaaagttttagttttgtattttacgcggtttttcgagatcgcgtcgttattttttgggtttgcggttagtcgcgttatttgtaatttgggagacgaaggttttcgttattagagatatgtcggttgggaggtcggcgttcgggtgtttgttttttacgggttttagcgttttttatcgtaaattcggaggttttcggtagttaacgagtttagtttcgttaacgtttagattcgtaaagtttattttaatagtagcggcggttgtagtgaggtttttaaggttatcgttaggtttggttagggattttcggcgtatcgataacggtattcgagcgttttcgtcggtttcgttttcgcgtcgttttacggggcgtcggcgcggtt

SEQ ID NO: 13744 - DNA, 504 bp, Artificial Sequence
  chemically treated genomic DNA (Homo sapiens) CpG-island No: 13744
aaccgcgccgacgccccgtaaaacgacgcgaaaacgaaaccgacgaaaacgctcgaataccgttatcgatacgccgaaaatccctaaccaaacctaacgataaccttaaaaacctcactacaaccgccgctactattaaaataaactttacgaatctaaacgttaacgaaactaaactcgttaactaccgaaaacctccgaatttacgataaaaaacgctaaaacccgtaaaaaacaaacacccgaacgccgacctcccaaccgacatatctctaataacgaaaaccttcgtctcccaaattacaaataacgcgactaaccgcaaacccaaaaaataacgacgcgatctcgaaaaaccgcgtaaaatacaaaactaaaactttcctccaaccttacgacattatacgctaaacccgacccgaataataaaaacgaacacgaactaccaaccttatctcacatataaaaaaactaaaaaaaaaacacttaaccaaaatcaccccg

SEQ ID NO: 13745 - DNA, 655 bp, Artificial Sequence
  chemically treated genomic DNA (Homo sapiens) CpG-island No: 13745
ggcgggggcgcgtgcgcggggttttaggtttaatttcgtagtggcgttcgttggttgggcgttggggtagggttgggatcgcggcggatcgtcgcgttttattattatcgttatcgttcgtatcgttcgggaagtcgggtagcggtttatttaggagcgtacgtagcggtcgggttcggaggtagaggcggttaggggcggcgggggaacgtacgggtggtagagtcgtttatcgtcgtcgttgtcgggggttgggagggtatcgcggattacgaggtagagaatacggtcgatttgggggtaaaattatacgaggcgaattcggcggcggtggcggtcggttattagttatatttgtaggtcgttttgcgtttggttttcggtcgaagcgtcgcgaatatttcgtcgtttttatggtttataagcgagtttacgtagtagttgttgagggtgttattggaagatattttgaggcgtttcgtatttttatttaatattatattgttcgtcgtcgagtagtttttcgtcggcgttcgagttatcgattagttcgtaggttgtagtttttattattggtcgcgcggtttacgtgattatatttattaatatcgggagtaaattagttcgttaaattgggggttgttgtgattaaaaa

SEQ ID NO: 13746 - DNA, 655 bp, Artificial Sequence
  chemically treated genomic DNA (Homo sapiens) CpG-island No: 13746
tttttaatcacaacaacccccaatttaacgaactaatttactcccgatattaataaatataatcacgtaaaccgcgcgaccaataataaaaactacaacctacgaactaatcgataactcgaacgccgacgaaaaactactcgacgacgaacaatataatattaaataaaaatacgaaacgcctcaaaatatcttccaataacaccctcaacaactactacgtaaactcgcttataaaccataaaaacgacgaaatattcgcgacgcttcgaccgaaaaccaaacgcaaaacgacctacaaatataactaataaccgaccgccaccgccgccgaattcgcctcgtataattttacccccaaatcgaccgtattctctacctcgtaatccgcgataccctcccaacccccgacaacgacgacgataaacgactctaccacccgtacgttcccccgccgcccctaaccgcctctacctccgaacccgaccgctacgtacgctcctaaataaaccgctacccgacttcccgaacgatacgaacgataacgataataataaaacgcgacgatccgccgcgatcccaaccctaccccaacgcccaaccaacgaacgccactacgaaattaaacctaaaaccccgcgcacgcgcccccgcc

SEQ ID NO: 13747 - DNA, 655 bp, Artificial Sequence
  chemically treated genomic DNA (Homo sapiens) CpG-island No: 13747
tttttaattatagtagtttttagtttagcggattgatttattttcggtattggtaaatatgattacgtgggtcgcgcgattaatggtggaggttgtagtttgcgaattagtcggtggttcgggcgtcggcggggagttgttcggcggcggatagtgtaatgttgggtgggagtgcgggacgttttaaaatgttttttagtggtatttttagtaattattacgtggattcgtttataggttatgagggcgacgaggtgttcgcggcgtttcggtcgggggttaggcgtagggcggtttgtaggtgtggttgatggtcggtcgttatcgtcgtcgagttcgtttcgtgtagttttgtttttagatcggtcgtgttttttgtttcgtggttcgcggtgtttttttagttttcggtagcggcggcgatgagcggttttattattcgtacgttttttcgtcgtttttggtcgtttttgttttcgagttcggtcgttacgtgcgtttttggatggatcgttgttcggtttttcgggcggtgcgggcggtggcggtggtggtggagcgcggcggttcgtcgcggttttagttttgttttagcgtttagttaacgggcgttattacgggattaagtttgaaatttcgcgtacgcgttttcgtt

SEQ ID NO: 13748 - DNA, 655 bp, Artificial Sequence
  chemically treated genomic DNA (Homo sapiens) CpG-island No: 13748
aacgaaaacgcgtacgcgaaatttcaaacttaatcccgtaataacgcccgttaactaaacgctaaaacaaaactaaaaccgcgacgaaccgccgcgctccaccaccaccgccaccgcccgcaccgcccgaaaaaccgaacaacgatccatccaaaaacgcacgtaacgaccgaactcgaaaacaaaaacgaccaaaaacgacgaaaaaacgtacgaataataaaaccgctcatcgccgccgctaccgaaaactaaaaaaacaccgcgaaccacgaaacaaaaaacacgaccgatctaaaaacaaaactacacgaaacgaactcgacgacgataacgaccgaccatcaaccacacctacaaaccgccctacgcctaacccccgaccgaaacgccgcgaacacctcgtcgccctcataacctataaacgaatccacgtaataattactaaaaataccactaaaaaacattttaaaacgtcccgcactcccacccaacattacactatccgccgccgaacaactccccgccgacgcccgaaccaccgactaattcgcaaactacaacctccaccattaatcgcgcgacccacgtaatcatatttaccaataccgaaaataaatcaatccgctaaactaaaaactactataattaaaaa

SEQ ID NO: 13749 - DNA, 586 bp, Artificial Sequence
  chemically treated genomic DNA (Homo sapiens) CpG-island No: 13749
tcgcggtttgggttgtttacggcgtttttttttgacgttcgtagtcgtcgggttatgtaatgtgtgattttttttttttttttttttcgttatcgcgtttcggtcgtcgttagttttacgtgtttagtcgatttttggcgtacggttttttttttcgcgtcgcgtattttcggattcggttagatcgcgtcgtaaatttttttttatttgcggcgttcggtcggttatttagttcgcgttatttatattagcgcgcgttcgggcgttcgttttataagcgtttgtagaatgttattcgttatcgtcgtttttattcgtattttagttatagcgttttttcgtatttcgttttcgacgttttcggtgtattttagaatcggtcggaatgttcgaaggcggttgttgtttttttgtttttttttgttgtttgttcgttcgttaaatacgttgggcgtcgttttttaattgttttttcgagagttttttgtttatttttgtattgttatagtgacgtcgttttgggttatcgagcggcgttgtgtttcgttgttttttttatttatttttagtttgtaaagaaataatt

SEQ ID NO: 13750 - DNA, 586 bp, Artificial Sequence
  chemically treated genomic DNA (Homo sapiens) CpG-island No: 13750
aattatttctttacaaactaaaaataaataaaaaaaacaacgaaacacaacgccgctcgataacccaaaacgacgtcactataacaatacaaaaataaacaaaaaactctcgaaaaaacaattaaaaaacgacgcccaacgtatttaacgaacgaacaaacaacaaaaaaaaacaaaaaaacaacaaccgccttcgaacattccgaccgattctaaaatacaccgaaaacgtcgaaaacgaaatacgaaaaaacgctataactaaaatacgaataaaaacgacgataacgaataacattctacaaacgcttataaaacgaacgcccgaacgcgcgctaatataaataacgcgaactaaataaccgaccgaacgccgcaaataaaaaaaaatttacgacgcgatctaaccgaatccgaaaatacgcgacgcgaaaaaaaaaaccgtacgccaaaaatcgactaaacacgtaaaactaacgacgaccgaaacgcgataacgaaaaaaaaaaaaaaaaaaaatcacacattacataacccgacgactacgaacgtcaaaaaaaaacgccgtaaacaacccaaaccgcga

SEQ ID NO: 13751 - DNA, 586 bp, Artificial Sequence
  chemically treated genomic DNA (Homo sapiens) CpG-island No: 13751
gattatttttttataaattgagaataggtaggaagagtagcgaaatatagcgtcgttcggtggtttagagcggcgttattgtaatagtatagaagtgggtaaggggttttcggaaggatagttggggaacggcgtttagcgtatttagcgaacggataagtagtaaggaaaaataagggagtaataatcgttttcggatatttcgatcggttttgggatgtatcggggacgtcgaaggcggggtgcggaaaaacgttgtggttggagtgcgggtgggagcggcggtgacgggtgatattttataaacgtttgtggaacgaacgttcgaacgcgcgttgatatgaatggcgcgaattgaatggtcggtcgagcgtcgtaggtaggaaggagtttgcggcgcggtttgatcgggttcggagatgcgcggcgcggagggaagggtcgtgcgttaggggtcggttgggtacgtggggttggcggcggtcggggcgcgatgacggaagggaaggggaggggaggttatatattatataattcggcggttgcgagcgttaggggaaggcgtcgtggatagtttaggtcgcga

SEQ ID NO: 13752 - DNA, 586 bp, Artificial Sequence
  chemically treated genomic DNA (Homo sapiens) CpG-island No: 13752
tcgcgacctaaactatccacgacgccttcccctaacgctcgcaaccgccgaattatataatatataacctcccctccccttcccttccgtcatcgcgccccgaccgccgccaaccccacgtacccaaccgacccctaacgcacgacccttccctccgcgccgcgcatctccgaacccgatcaaaccgcgccgcaaactccttcctacctacgacgctcgaccgaccattcaattcgcgccattcatatcaacgcgcgttcgaacgttcgttccacaaacgtttataaaatatcacccgtcaccgccgctcccacccgcactccaaccacaacgtttttccgcaccccgccttcgacgtccccgatacatcccaaaaccgatcgaaatatccgaaaacgattattactcccttatttttccttactacttatccgttcgctaaatacgctaaacgccgttccccaactatccttccgaaaaccccttacccacttctatactattacaataacgccgctctaaaccaccgaacgacgctatatttcgctactcttcctacctattctcaatttataaaaaaataatc

SEQ ID NO: 13753 - DNA, 512 bp, Artificial Sequence
  chemically treated genomic DNA (Homo sapiens) CpG-island No: 13753
atcgtttttatatttattaggtaatatgtcgggtggaagacgtggcggttttcgtttagtagttatttttttattttttcgggttcgtttgattcgagagggcgggcgaggtaagtatttcgttggtggataaggtagcgatttcggcgggcgaaggttgcgcgtcgggggcgaaggattttagttgttttaggtttttgtgattcgcgtttttggtttcgagcgcggtttgttgacgacggcgttttcgcggttgtttggatacggttaattatagcgcggtttttggagtcgtttcgtttatagatcgcgtttttattggggcgatggttgcggatcgtggttaagaggtcggggtcgtcgaggtcgttatcgagttaggtgcggaaagtcggcgttcggaattattcgggtcgggacgatttttattttagatttttaaatagaggttacgttagagggatagggcgagtggcgttgttttttgcgtttattgttaatgggaaaattaa

SEQ ID NO: 13754 - DNA, 512 bp, Artificial Sequence
  chemically treated genomic DNA (Homo sapiens) CpG-island No: 13754
ttaattttcccattaacaataaacgcaaaaaacaacgccactcgccctatccctctaacgtaacctctatttaaaaatctaaaataaaaatcgtcccgacccgaataattccgaacgccgactttccgcacctaactcgataacgacctcgacgaccccgacctcttaaccacgatccgcaaccatcgccccaataaaaacgcgatctataaacgaaacgactccaaaaaccgcgctataattaaccgtatccaaacaaccgcgaaaacgccgtcgtcaacaaaccgcgctcgaaaccaaaaacgcgaatcacaaaaacctaaaacaactaaaatccttcgcccccgacgcgcaaccttcgcccgccgaaatcgctaccttatccaccaacgaaatacttacctcgcccgccctctcgaatcaaacgaacccgaaaaaataaaaaaataactactaaacgaaaaccgccacgtcttccacccgacatattacctaataaatataaaaacgat

SEQ ID NO: 13755 - DNA, 512 bp, Artificial Sequence
  chemically treated genomic DNA (Homo sapiens) CpG-island No: 13755
ttaatttttttattgatagtaggcgtaaggggtaacgttattcgttttgtttttttagcgtggtttttgtttgggggtttggggtggaggtcgtttcggttcgggtggtttcggacgtcggtttttcgtatttggttcggtgacggtttcggcggtttcggttttttggttacggttcgtagttatcgttttagtgagggcgcggtttgtgggcggggcggttttaggagtcgcgttgtgattggtcgtgtttaggtaatcgcggagacgtcgtcgttaatagatcgcgttcggaattagaggcgcgggttatagagatttagaatagttggaatttttcgttttcggcgcgtagttttcgttcgtcggaatcgttgttttatttattagcgggatgtttatttcgttcgttttttcgggttaggcgggttcgggaggatgggagggtggttgttgagcgggagtcgttacgttttttattcgatatattgtttagtaagtgtgggagcgat

SEQ ID NO: 13756 - DNA, 512 bp, Artificial Sequence
  chemically treated genomic DNA (Homo sapiens) CpG-island No: 13756
atcgctcccacacttactaaacaatatatcgaataaaaaacgtaacgactcccgctcaacaaccaccctcccatcctcccgaacccgcctaacccgaaaaaacgaacgaaataaacatcccgctaataaataaaacaacgattccgacgaacgaaaactacgcgccgaaaacgaaaaattccaactattctaaatctctataacccgcgcctctaattccgaacgcgatctattaacgacgacgtctccgcgattacctaaacacgaccaatcacaacgcgactcctaaaaccgccccgcccacaaaccgcgccctcactaaaacgataactacgaaccgtaaccaaaaaaccgaaaccgccgaaaccgtcaccgaaccaaatacgaaaaaccgacgtccgaaaccacccgaaccgaaacgacctccaccccaaacccccaaacaaaaaccacgctaaaaaaacaaaacgaataacgttaccccttacgcctactatcaataaaaaaattaa

SEQ ID NO: 13757 - DNA, 527 bp, Artificial Sequence
  chemically treated genomic DNA (Homo sapiens) CpG-island No: 13757
taggcgggaaaggtgtggggcgaggcggtcgcgggtttttggtatttttttttttacgtttaggttaagttggcgttgttgttggtgacgttggtggcggttacggttttttatttgcggatggagtagaagttgcggcggggcgtggtttcgcggtagtttcgtatttcgcggttttagtataaggtgcgcggttatcgttatttggaggaggataattcggacgagagcgacgcggagggcgattttggggacggcgaggaggcggaggcggaggtttcgttcgtagggtttaggtttggtttcgagttcgttggattcggtcgtcggttttgttcgtacgaataggcgtagggggcgatgggtcggaggagtagtgaggggtcgtttggttttcggatttagttttttttttcgtcggttttagtttattacgttttaggtcggggggatttttttcgagtttcgcgttgtttttaaaggtttttgtttttttttttttacgttggggacgttttttttagagt

SEQ ID NO: 13758 - DNA, 527 bp, Artificial Sequence
  chemically treated genomic DNA (Homo sapiens) CpG-island No: 13758
actctaaaaaaaacgtccccaacgtaaaaaaaaaaaaacaaaaacctttaaaaacaacgcgaaactcgaaaaaaatccccccgacctaaaacgtaataaactaaaaccgacgaaaaaaaaaactaaatccgaaaaccaaacgacccctcactactcctccgacccatcgccccctacgcctattcgtacgaacaaaaccgacgaccgaatccaacgaactcgaaaccaaacctaaaccctacgaacgaaacctccgcctccgcctcctcgccgtccccaaaatcgccctccgcgtcgctctcgtccgaattatcctcctccaaataacgataaccgcgcaccttatactaaaaccgcgaaatacgaaactaccgcgaaaccacgccccgccgcaacttctactccatccgcaaataaaaaaccgtaaccgccaccaacgtcaccaacaacaacgccaacttaacctaaacgtaaaaaaaaaaataccaaaaacccgcgaccgcctcgccccacacctttcccgccta

SEQ ID NO: 13759 - DNA, 527 bp, Artificial Sequence
  chemically treated genomic DNA (Homo sapiens) CpG-island No: 13759
gttttgggaggggcgtttttaacgtgggggaggggagataggggtttttgaagatagcgcgggattcggagggggttttttcgatttaagacgtggtaaattgaggtcggcgaggagggaggttgagttcggggattaggcggttttttattgttttttcggtttatcgttttttgcgtttgttcgtacgggtagggtcggcggtcgagtttagcgggttcggggttaggtttgggttttgcgggcggagttttcgttttcgttttttcgtcgtttttaagatcgtttttcgcgtcgttttcgttcgagttgtttttttttaagtagcggtaatcgcgtattttgtgttggggtcgcgggatgcggggttgtcgcggggttacgtttcgtcgtagtttttgttttattcgtaggtaggagatcgtggtcgttattagcgttattagtagtaacgttagtttagtttgggcgtaaggagagggatgttagggattcgcggtcgtttcgttttatatttttttcgttta

SEQ ID NO: 13760 - DNA, 527 bp, Artificial Sequence
  chemically treated genomic DNA (Homo sapiens) CpG-island No: 13760
taaacgaaaaaaatataaaacgaaacgaccgcgaatccctaacatccctctccttacgcccaaactaaactaacgttactactaataacgctaataacgaccacgatctcctacctacgaataaaacaaaaactacgacgaaacgtaaccccgcgacaaccccgcatcccgcgaccccaacacaaaatacgcgattaccgctacttaaaaaaaaacaactcgaacgaaaacgacgcgaaaaacgatcttaaaaacgacgaaaaaacgaaaacgaaaactccgcccgcaaaacccaaacctaaccccgaacccgctaaactcgaccgccgaccctacccgtacgaacaaacgcaaaaaacgataaaccgaaaaaacaataaaaaaccgcctaatccccgaactcaacctccctcctcgccgacctcaatttaccacgtcttaaatcgaaaaaaccccctccgaatcccgcgctatcttcaaaaacccctatctcccctcccccacgttaaaaacgcccctcccaaaac

SEQ ID NO: 13761 - DNA, 540 bp, Artificial Sequence
  chemically treated genomic DNA (Homo sapiens) CpG-island No: 13761
atggcgttcggttatagcgttcgtatttttgcgttgcggcgtttcgtttgttagtttgatcgcgttttttgttatcgatgtttttgtatgatgacggcggatcggttatttttattgttttgattcgtgagattcgtatcgtcgatacgattttttgtggtttttcgcgtgttcggcgcggcgacgggtcgttttcgtattgtcgtcgcgttggagtcgttttgatgacggggagttagtcgttattgggtgttacgtatcggtttggtcgtgcgttcggcgcggacgttgggcgcgcggtgtgttagggttggatggttttttttttgtgtttttttgtagtgtggggcggtgtcgttttatcgtttggttggtttattagttcggtcgatgcgattcgatcgtttttcgtgagagcgaattacgagttcgcggtgagttaagcggcgcgttggtgtgtgtttattatgtatagtcgtgttggcgttttggtggtcgttatatcgcgtcgtagtcgtagtagcgtatgatgtttagcgg

SEQ ID NO: 13762 - DNA, 540 bp, Artificial Sequence
  chemically treated genomic DNA (Homo sapiens) CpG-island No: 13762
ccgctaaacatcatacgctactacgactacgacgcgatataacgaccaccaaaacgccaacacgactatacataataaacacacaccaacgcgccgcttaactcaccgcgaactcgtaattcgctctcacgaaaaacgatcgaatcgcatcgaccgaactaataaaccaaccaaacgataaaacgacaccgccccacactacaaaaaaacacaaaaaaaaaaccatccaaccctaacacaccgcgcgcccaacgtccgcgccgaacgcacgaccaaaccgatacgtaacacccaataacgactaactccccgtcatcaaaacgactccaacgcgacgacaatacgaaaacgacccgtcgccgcgccgaacacgcgaaaaaccacaaaaaatcgtatcgacgatacgaatctcacgaatcaaaacaataaaaataaccgatccgccgtcatcatacaaaaacatcgataacaaaaaacgcgatcaaactaacaaacgaaacgccgcaacgcaaaaatacgaacgctataaccgaacgccat

SEQ ID NO: 13763 - DNA, 540 bp, Artificial Sequence
  chemically treated genomic DNA (Homo sapiens) CpG-island No: 13763
tcgttaaatattatgcgttattgcgattgcgacgcgatgtgacggttattagaacgttagtacggttatgtatggtggatatatattagcgcgtcgtttagtttatcgcgaattcgtggttcgtttttacggaggacgatcgagtcgtatcggtcggattggtaggttaattagacgatggaacggtatcgttttatattatagggagatataaagagaagattatttagttttagtatatcgcgcgtttagcgttcgcgtcgagcgtacggttaggtcggtgcgtagtatttagtaacggttagtttttcgttattagagcgattttagcgcggcggtagtgcggggacggttcgtcgtcgcgtcgggtacgcgaggggttatagaaagtcgtgtcgacggtgcgagttttacggattagggtaatagggatagtcgattcgtcgttattatatagaggtatcggtagtaagaaacgcggttaagttgatagacgaagcgtcgtaacgtaagagtgcgagcgttgtgatcgagcgttat

SEQ ID NO: 13764 - DNA, 540 bp, Artificial Sequence
  chemically treated genomic DNA (Homo sapiens) CpG-island No: 13764
ataacgctcgatcacaacgctcgcactcttacgttacgacgcttcgtctatcaacttaaccgcgtttcttactaccgatacctctatataataacgacgaatcgactatccctattaccctaatccgtaaaactcgcaccgtcgacacgactttctataacccctcgcgtacccgacgcgacgacgaaccgtccccgcactaccgccgcgctaaaatcgctctaataacgaaaaactaaccgttactaaatactacgcaccgacctaaccgtacgctcgacgcgaacgctaaacgcgcgatatactaaaactaaataatcttctctttatatctccctataatataaaacgataccgttccatcgtctaattaacctaccaatccgaccgatacgactcgatcgtcctccgtaaaaacgaaccacgaattcgcgataaactaaacgacgcgctaatatatatccaccatacataaccgtactaacgttctaataaccgtcacatcgcgtcgcaatcgcaataacgcataatatttaacga

SEQ ID NO: 13765 - DNA, 763 bp, Artificial Sequence
  chemically treated genomic DNA (Homo sapiens) CpG-island No: 13765
cgtgacggcgcggggtggtttgtggtgagtggggggttagagttttcgcgcggggttatatttttatcgtcgtgtaagttgtagcgcggttagagtcgggttaagttttttaaagttcgtgttttcgtagtaaagtttgtaagaagttggggggacgttcgggttcgcgtgggttttttatcgattttcgggtcgcgtttttgtagcggttagagtttgcgagcgtggattcgttcggtcggggcgcgttgttcggggaaggcgggcgtttcggggaaggggcggcgggtacgaggcgcggggtatttatcgttttttttttggtgggtttattgcggacggcgttcggagcgcgcgagtttcgttcggcgttggtggtggtggcggcggcggtcgggttcggggggtcgcggcgacgagtttgtaagatagagtagcgggggttatggttcggtcggcgttcgggtagtcgcgcgttttttcgcggtttcgtttcgtttttagagggcggcgttgacggtagtcggcggtcgcgggcgttaggattgtacgggttaggcgcggggcggacgggtttcgttcgtcgtttttttggggagcgtgttaggattcgttcggcgttttcggcggcggtttcgatttttcgttgtttgtttgttttttttttttaggtttcgggtagtttcggggaaagtttgggtcgcggcgtaggttttttatcgtgcgttttttttcggggttgggtgtcgggttttttgaggtt

SEQ ID NO: 13766 - DNA, 763 bp, Artificial Sequence
  chemically treated genomic DNA (Homo sapiens) CpG-island No: 13766
aacctcaaaaaacccgacacccaaccccgaaaaaaaacgcacgataaaaaacctacgccgcgacccaaactttccccgaaactacccgaaacctaaaaaaaaaaaacaaacaaacaacgaaaaatcgaaaccgccgccgaaaacgccgaacgaatcctaacacgctccccaaaaaaacgacgaacgaaacccgtccgccccgcgcctaacccgtacaatcctaacgcccgcgaccgccgactaccgtcaacgccgccctctaaaaacgaaacgaaaccgcgaaaaaacgcgcgactacccgaacgccgaccgaaccataacccccgctactctatcttacaaactcgtcgccgcgaccccccgaacccgaccgccgccgccaccaccaccaacgccgaacgaaactcgcgcgctccgaacgccgtccgcaataaacccaccaaaaaaaaaacgataaataccccgcgcctcgtacccgccgccccttccccgaaacgcccgccttccccgaacaacgcgccccgaccgaacgaatccacgctcgcaaactctaaccgctacaaaaacgcgacccgaaaatcgataaaaaacccacgcgaacccgaacgtccccccaacttcttacaaactttactacgaaaacacgaactttaaaaaacttaacccgactctaaccgcgctacaacttacacgacgataaaaatataaccccgcgcgaaaactctaaccccccactcaccacaaaccaccccgcgccgtcacg

SEQ ID NO: 13767 - DNA, 763 bp, Artificial Sequence
  chemically treated genomic DNA (Homo sapiens) CpG-island No: 13767
ggttttagggagttcggtatttagtttcggagaggggcgtacggtggggagtttacgtcgcggtttaaatttttttcgggattgttcggggtttggagggaggaaataggtaagtagcgaggggtcgggatcgtcgtcgagggcgtcgggcgggttttggtacgttttttagggaggcgacgggcgggattcgttcgtttcgcgtttggttcgtgtaattttggcgttcgcggtcgtcggttgtcgttagcgtcgttttttaggagcggggcgggatcgcgggaaggcgcgcggttgttcgagcgtcggtcgggttatgattttcgttgttttgttttgtaggttcgtcgtcgcggtttttcgagttcgatcgtcgtcgttattattattagcgtcgggcggggttcgcgcgtttcgggcgtcgttcgtagtgagtttattaagaaggaagcggtgagtgtttcgcgtttcgtgttcgtcgtttttttttcgggacgttcgtttttttcgagtaacgcgtttcggtcgggcgggtttacgttcgtaagttttagtcgttgtaggggcgcggttcgggggtcggtgggagatttacgcgggttcgggcgtttttttaattttttgtagattttgttgcggagatacgggttttgggaaatttggttcggttttggtcgcgttgtaatttgtacggcggtgggggtgtgatttcgcgcggaagttttggttttttatttattataggttatttcgcgtcgttacg

SEQ ID NO: 13768 - DNA, 763 bp, Artificial Sequence
  chemically treated genomic DNA (Homo sapiens) CpG-island No: 13768
cgtaacgacgcgaaataacctataataaataaaaaaccaaaacttccgcgcgaaatcacacccccaccgccgtacaaattacaacgcgaccaaaaccgaaccaaatttcccaaaacccgtatctccgcaacaaaatctacaaaaaattaaaaaaacgcccgaacccgcgtaaatctcccaccgacccccgaaccgcgcccctacaacgactaaaacttacgaacgtaaacccgcccgaccgaaacgcgttactcgaaaaaaacgaacgtcccgaaaaaaaaacgacgaacacgaaacgcgaaacactcaccgcttccttcttaataaactcactacgaacgacgcccgaaacgcgcgaaccccgcccgacgctaataataataacgacgacgatcgaactcgaaaaaccgcgacgacgaacctacaaaacaaaacaacgaaaatcataacccgaccgacgctcgaacaaccgcgcgccttcccgcgatcccgccccgctcctaaaaaacgacgctaacgacaaccgacgaccgcgaacgccaaaattacacgaaccaaacgcgaaacgaacgaatcccgcccgtcgcctccctaaaaaacgtaccaaaacccgcccgacgccctcgacgacgatcccgacccctcgctacttacctatttcctccctccaaaccccgaacaatcccgaaaaaaatttaaaccgcgacgtaaactccccaccgtacgcccctctccgaaactaaataccgaactccctaaaacc

SEQ ID NO: 13769 - DNA, 750 bp, Artificial Sequence
  chemically treated genomic DNA (Homo sapiens) CpG-island No: 13769
gtcgcgcggcgttttagtcgagaagcgggacgaggcggcggcgattgatggcgcggcgcgggttggcgggggattttttaggttcggtttcgtttgggtttcggtttttggaaaagcgattcgcgtttttgggaagtcgtagttttagattttagtcgcgtttttcgttcggcgtcgtcggaaagtagtttttttaacgtttgtcggaaagtagttcggttcggtattttacgacgttcgtagcgttattttttttcgttttacggtgattttcgtgcggtcgggtgcgggcggagtttttttcgatttcgtggtgttcgcgcgcggttttgttttttttcggtcgcgggatatcgggtgtagagggcggtcgcggcgggtagtggcggtaggtgagataggaggtggtcggatgcgcgtcgttaggtcgggtcgggtcgggggtcgggagttattaagtttgtacgttcgtagtttggtcgttcggttttagtaggaagtatcgaatgggtttcggagttaggtgatattgaggtcggtcgtggggatttcgggttcggtggttttaggttcggggggtcgtttcgaagtgttcggtttattttattcggtttcgtagcggttgcggatcggtttcgggtattgattttggagcgttcgttggtcgagggtttaggttgcggggaggcgggttcgcgttttgtgtttgtagttttcgtttttgtttttttaaaaggtttttgtgtaatt

SEQ ID NO: 13770 - DNA, 750 bp, Artificial Sequence
  chemically treated genomic DNA (Homo sapiens) CpG-island No: 13770
aattacacaaaaaccttttaaaaaaacaaaaacgaaaactacaaacacaaaacgcgaacccgcctccccgcaacctaaaccctcgaccaacgaacgctccaaaatcaatacccgaaaccgatccgcaaccgctacgaaaccgaataaaataaaccgaacacttcgaaacgaccccccgaacctaaaaccaccgaacccgaaatccccacgaccgacctcaatatcacctaactccgaaacccattcgatacttcctactaaaaccgaacgaccaaactacgaacgtacaaacttaataactcccgacccccgacccgacccgacctaacgacgcgcatccgaccacctcctatctcacctaccgccactacccgccgcgaccgccctctacacccgatatcccgcgaccgaaaaaaaacaaaaccgcgcgcgaacaccacgaaatcgaaaaaaactccgcccgcacccgaccgcacgaaaatcaccgtaaaacgaaaaaaaataacgctacgaacgtcgtaaaataccgaaccgaactactttccgacaaacgttaaaaaaactactttccgacgacgccgaacgaaaaacgcgactaaaatctaaaactacgacttcccaaaaacgcgaatcgcttttccaaaaaccgaaacccaaacgaaaccgaacctaaaaaatcccccgccaacccgcgccgcgccatcaatcgccgccgcctcgtcccgcttctcgactaaaacgccgcgcgac

SEQ ID NO: 13771 - DNA, 750 bp, Artificial Sequence
  chemically treated genomic DNA (Homo sapiens) CpG-island No: 13771
ggttgtatagggattttttgaaggagtaagggcggaggttgtaggtatagagcgcgggttcgttttttcgtagtttgagttttcggttagcgggcgttttaaggttagtgttcgaggtcggttcgtagtcgttgcgagatcgggtaagatggatcgggtatttcggggcggtttttcgagtttggagttatcgagttcggagtttttacggtcggttttaatgttatttggtttcgaggtttattcggtgttttttgttgaagtcgagcggttaggttgcggacgtgtagatttgatggttttcggttttcgattcggttcggtttggcggcgcgtattcggttattttttgttttatttgtcgttattgttcgtcgcgatcgttttttatattcggtgtttcgcgatcggaagagagtaaggtcgcgcgcgagtattacgggatcgaggaagatttcgttcgtattcggtcgtacggaggttatcgtggagcggaaaagggtagcgttgcgaacgtcgtaaaatgtcgggtcgggttgtttttcggtaggcgttggagaggttgtttttcggcggcgtcgggcgagaagcgcgattggagtttggggttgcggttttttagaggcgcgagtcgtttttttaggagtcgaggtttaaacggggtcgggtttgaagggtttttcgttagttcgcgtcgcgttattaatcgtcgtcgtttcgtttcgtttttcggttgaggcgtcgcgcggt

SEQ ID NO: 13772 - DNA, 750 bp, Artificial Sequence
  chemically treated genomic DNA (Homo sapiens) CpG-island No: 13772
accgcgcgacgcctcaaccgaaaaacgaaacgaaacgacgacgattaataacgcgacgcgaactaacgaaaaacccttcaaacccgaccccgtttaaacctcgactcctaaaaaaacgactcgcgcctctaaaaaaccgcaaccccaaactccaatcgcgcttctcgcccgacgccgccgaaaaacaacctctccaacgcctaccgaaaaacaacccgacccgacattttacgacgttcgcaacgctacccttttccgctccacgataacctccgtacgaccgaatacgaacgaaatcttcctcgatcccgtaatactcgcgcgcgaccttactctcttccgatcgcgaaacaccgaatataaaaaacgatcgcgacgaacaataacgacaaataaaacaaaaaataaccgaatacgcgccgccaaaccgaaccgaatcgaaaaccgaaaaccatcaaatctacacgtccgcaacctaaccgctcgacttcaacaaaaaacaccgaataaacctcgaaaccaaataacattaaaaccgaccgtaaaaactccgaactcgataactccaaactcgaaaaaccgccccgaaatacccgatccatcttacccgatctcgcaacgactacgaaccgacctcgaacactaaccttaaaacgcccgctaaccgaaaactcaaactacgaaaaaacgaacccgcgctctatacctacaacctccgcccttactccttcaaaaaatccctatacaacc

SEQ ID NO: 13773 - DNA, 601 bp, Artificial Sequence
  chemically treated genomic DNA (Homo sapiens) CpG-island No: 13773
ggtgtacgcgtcgtttgcgtcgtaggtagaagtgtttttgtagtaggtagtcgtaggcgatcgtacgtagcgtcgcgaggtttagcgtaggtttaggttcgggttcgggttcgggttcgggtttcgttgggggcggcggtagattcgataggaatacggttttggtgaagtattggtattagcggtcggtatttagcgcgaaggtttgcgggtaaattatgtattttataaattgtattttggtgaggattcgtagtttttcgtttatcgatttcgtagcgtgtatcgtcgtttgttagcgttcgattcgtcgtagtcgtgtagttttgttgtcggttgttatggaggttataatcggcgggtatcgcgcgacgggggtcgtcgcgacgttttggtaggtcgtttttgtagtcgtggcggcggtattagtcgcggtgtgtaatgaaagtttcggatcgcgtagtaaaggtttttaatatttggtcgtcgttatttttgttcgcgatttcggatttagaggttaatttaagtaattgtttttgtttttttgttgtagggattaatcggaaagcggaatttgagttagtttgggaaaggacga

SEQ ID NO: 13774 - DNA, 601 bp, Artificial Sequence
  chemically treated genomic DNA (Homo sapiens) CpG-island No: 13774
tcgtcctttcccaaactaactcaaattccgctttccgattaatccctacaacaaaaaaacaaaaacaattacttaaattaacctctaaatccgaaatcgcgaacaaaaataacgacgaccaaatattaaaaacctttactacgcgatccgaaactttcattacacaccgcgactaataccgccgccacgactacaaaaacgacctaccaaaacgtcgcgacgacccccgtcgcgcgatacccgccgattataacctccataacaaccgacaacaaaactacacgactacgacgaatcgaacgctaacaaacgacgatacacgctacgaaatcgataaacgaaaaactacgaatcctcaccaaaatacaatttataaaatacataatttacccgcaaaccttcgcgctaaataccgaccgctaataccaatacttcaccaaaaccgtattcctatcgaatctaccgccgcccccaacgaaacccgaacccgaacccgaacccgaacctaaacctacgctaaacctcgcgacgctacgtacgatcgcctacgactacctactacaaaaacacttctacctacgacgcaaacgacgcgtacacc

SEQ ID NO: 13775 - DNA, 601 bp, Artificial Sequence
  chemically treated genomic DNA (Homo sapiens) CpG-island No: 13775
tcgtttttttttagattggtttagatttcgtttttcgattggtttttatagtaagagggtaaggataattgtttaagttgatttttgggttcggaatcgcgggtaaagatggcggcggttaggtgttggaggtttttgttacgcggttcgaggtttttattgtatatcgcggttaatgtcgtcgttacggttatagaaacgatttgttaagacgtcgcggcgattttcgtcgcgcggtattcgtcgattgtggtttttatgatagtcgatagtaaagttgtacggttgcggcggatcgagcgttggtaggcgacggtgtacgttgcggagtcggtagacgagaagttgcgaatttttattaagatgtagtttatgaagtatatggtttattcgtagattttcgcgttgaatgtcgatcgttggtattagtattttattaagatcgtgtttttgtcgggtttgtcgtcgtttttagcggagttcgagttcgagttcgaattcgaatttgaatttgcgttggatttcgcggcgttgcgtgcggtcgtttgcgattgtttgttgtaggagtatttttatttgcggcgtaggcggcgcgtgtatt

SEQ ID NO: 13776 - DNA, 601 bp, Artificial Sequence
  chemically treated genomic DNA (Homo sapiens) CpG-island No: 13776
aatacacgcgccgcctacgccgcaaataaaaatactcctacaacaaacaatcgcaaacgaccgcacgcaacgccgcgaaatccaacgcaaattcaaattcgaattcgaactcgaactcgaactccgctaaaaacgacgacaaacccgacaaaaacacgatcttaataaaatactaataccaacgatcgacattcaacgcgaaaatctacgaataaaccatatacttcataaactacatcttaataaaaattcgcaacttctcgtctaccgactccgcaacgtacaccgtcgcctaccaacgctcgatccgccgcaaccgtacaactttactatcgactatcataaaaaccacaatcgacgaataccgcgcgacgaaaatcgccgcgacgtcttaacaaatcgtttctataaccgtaacgacgacattaaccgcgatatacaataaaaacctcgaaccgcgtaacaaaaacctccaacacctaaccgccgccatctttacccgcgattccgaacccaaaaatcaacttaaacaattatccttaccctcttactataaaaaccaatcgaaaaacgaaatctaaaccaatctaaaaaaaaacga

SEQ ID NO: 13777 - DNA, 591 bp, Artificial Sequence
  chemically treated genomic DNA (Homo sapiens) CpG-island No: 13777
aaagaagtaagtttcgggtattagggttcgtagtgattagtcgtcggttttttacgtttttagaggagacgatttggaattgattcgggagggttaagaaatatttttcgagtattaggttaaatttcgttagggagagagatcgggacgaaggttttaggttagtgcgatatcgtaggtcggggttttttggttggaggagcgcggtgggttgggaggggcgcgttggtgcgtattggaataggggttttcggtttgagtagcgcggtgagatagagttttcgcgttggaggggcgcggtgagatagaggttttgggttggagaggtgcgttggggcgtattggaatcggggtttcgggtttgagtggcgcggtgggatagagttttcgggttggaggggcgtagtgggatagaagattcgggttagaggggcgcggtgggacggagttttcgggatggacgggcgtagtgggataagggtttcggattggaggggcgcgttggggagtattggaataggggttttgagtaggaggggcgaggtgggttgggaggggcgcggtagggcgtattggaataggggttttggg

SEQ ID NO: 13778 - DNA, 591 bp, Artificial Sequence
  chemically treated genomic DNA (Homo sapiens) CpG-island No: 13778
cccaaaacccctattccaatacgccctaccgcgcccctcccaacccacctcgcccctcctactcaaaacccctattccaatactccccaacgcgcccctccaatccgaaacccttatcccactacgcccgtccatcccgaaaactccgtcccaccgcgcccctctaacccgaatcttctatcccactacgcccctccaacccgaaaactctatcccaccgcgccactcaaacccgaaaccccgattccaatacgccccaacgcacctctccaacccaaaacctctatctcaccgcgcccctccaacgcgaaaactctatctcaccgcgctactcaaaccgaaaacccctattccaatacgcaccaacgcgcccctcccaacccaccgcgctcctccaaccaaaaaaccccgacctacgatatcgcactaacctaaaaccttcgtcccgatctctctccctaacgaaatttaacctaatactcgaaaaatatttcttaaccctcccgaatcaattccaaatcgtctcctctaaaaacgtaaaaaaccgacgactaatcactacgaaccctaatacccgaaacttacttcttt

SEQ ID NO: 13779 - DNA, 591 bp, Artificial Sequence
  chemically treated genomic DNA (Homo sapiens) CpG-island No: 13779
tttaggatttttgttttagtgcgttttatcgcgttttttttagtttatttcgttttttttgtttaggatttttgttttaatgttttttaacgcgtttttttagttcgggatttttgttttattgcgttcgtttatttcgggagtttcgttttatcgcgtttttttagttcggattttttgttttattgcgtttttttagttcgggaattttgttttatcgcgttatttaagttcgggatttcggttttagtgcgttttaacgtatttttttagtttaggatttttgttttatcgcgtttttttagcgcgggaattttgttttatcgcgttgtttaagtcggggatttttgttttagtgcgtattaacgcgttttttttagtttatcgcgtttttttaattagggaatttcgatttgcggtgtcgtattagtttgggattttcgtttcggtttttttttttggcggggtttagtttggtattcggaaggtgttttttggttttttcgggttagttttaaatcgttttttttggaagcgtggaggatcggcggttggttattgcggattttggtgttcggggtttgttttttt

SEQ ID NO: 13780 - DNA, 591 bp, Artificial Sequence
  chemically treated genomic DNA (Homo sapiens) CpG-island No: 13780
aaaaaaacaaaccccgaacaccaaaatccgcaataaccaaccgccgatcctccacgcttccaaaaaaaacgatttaaaactaacccgaaaaaaccaaaaaacaccttccgaataccaaactaaaccccgccaaaaaaaaaaaccgaaacgaaaatcccaaactaatacgacaccgcaaatcgaaattccctaattaaaaaaacgcgataaactaaaaaaaacgcgttaatacgcactaaaacaaaaatccccgacttaaacaacgcgataaaacaaaattcccgcgctaaaaaaacgcgataaaacaaaaatcctaaactaaaaaaatacgttaaaacgcactaaaaccgaaatcccgaacttaaataacgcgataaaacaaaattcccgaactaaaaaaacgcaataaaacaaaaaatccgaactaaaaaaacgcgataaaacgaaactcccgaaataaacgaacgcaataaaacaaaaatcccgaactaaaaaaacgcgttaaaaaacattaaaacaaaaatcctaaacaaaaaaaacgaaataaactaaaaaaaacgcgataaaacgcactaaaacaaaaatcctaaa

SEQ ID NO: 13781 - DNA, 702 bp, Artificial Sequence
  chemically treated genomic DNA (Homo sapiens) CpG-island No: 13781
tcgggtttgggcggcgcggtgagacggagttttcgggttggaggggcgcggtgggataggggattcgggttggaggggcgcggcgagatcggggttttaggttggaaaggtgtaagtcgaggttggaggatcggcgggagggaatcgggaattcggcggagttaaggggcgtagagtgggggtggggtcgtgttgtcgggggagtttttttacgtaggaaggatcggggtcgcggattttatcgtttttatatttcgtcgtcgcggagttcgggtcgtttcggttgcgttcgggttttatttgttttcgttggtcgtgattacgtcgttttttttggggatgagtagcgcggtcgtgacggcgttttggtgtttttcgattttgtttagtagtatcgggcggttgttttgcggtttggagtggatttcggtcgttatgttcgcgcggcgattgttgcggttttttcggtaggtagtttattagttgacgtttgggcgggcgggggacgcgtcggttttttttcggttgttggggttttttgggcgtcgcgtcgtcgtaagttttcgagtgttgtcgtcgtatcgttcgtattgtttggggatgtcgcgtaagttgaaagtttgtggttgggagaggatgttacggggcgtttgcggagaaatggggaaagtaaggaaggtttaaaagtaaagttatttattt

SEQ ID NO: 13782 - DNA, 702 bp, Artificial Sequence
  chemically treated genomic DNA (Homo sapiens) CpG-island No: 13782
aaataaataactttacttttaaaccttccttactttccccatttctccgcaaacgccccgtaacatcctctcccaaccacaaactttcaacttacgcgacatccccaaacaatacgaacgatacgacgacaacactcgaaaacttacgacgacgcgacgcccaaaaaaccccaacaaccgaaaaaaaaccgacgcgtcccccgcccgcccaaacgtcaactaataaactacctaccgaaaaaaccgcaacaatcgccgcgcgaacataacgaccgaaatccactccaaaccgcaaaacaaccgcccgatactactaaacaaaatcgaaaaacaccaaaacgccgtcacgaccgcgctactcatccccaaaaaaaacgacgtaatcacgaccaacgaaaacaaataaaacccgaacgcaaccgaaacgacccgaactccgcgacgacgaaatataaaaacgataaaatccgcgaccccgatccttcctacgtaaaaaaactcccccgacaacacgaccccacccccactctacgccccttaactccgccgaattcccgattccctcccgccgatcctccaacctcgacttacacctttccaacctaaaaccccgatctcgccgcgcccctccaacccgaatcccctatcccaccgcgcccctccaacccgaaaactccgtctcaccgcgccgcccaaacccga

SEQ ID NO: 13783 - DNA, 702 bp, Artificial Sequence
  chemically treated genomic DNA (Homo sapiens) CpG-island No: 13783
gggtgaatggttttatttttaaattttttttattttttttattttttcgtaggcgtttcgtggtatttttttttagttatagatttttagtttgcgcggtatttttaggtaatacgggcggtgcggcggtagtattcgggggtttacggcggcgcggcgtttaagaggttttagtagtcgaagggaaatcggcgcgtttttcgttcgtttaggcgttagttgatgggttgtttgtcgaggaggtcgtagtagtcgtcgcgcgaatatggcggtcgaaatttattttaggtcgtagagtagtcgttcggtgttgttgagtaagatcgaggggtattaggacgtcgttacggtcgcgttgtttatttttaaggaggacggcgtgattacggttagcgaggataggtagggttcgggcgtagtcggggcggttcgaatttcgcgacgacggggtgtgggggcggtggggttcgcggtttcggttttttttgcgtgagggggttttttcggtagtacggttttatttttattttgcgttttttagtttcgtcgggttttcggttttttttcgtcggttttttagtttcgatttgtatttttttagtttgggatttcggtttcgtcgcgtttttttagttcggattttttgttttatcgcgtttttttagttcgggaatttcgttttatcgcgtcgtttaagttcgg

SEQ ID NO: 13784 - DNA, 702 bp, Artificial Sequence
  chemically treated genomic DNA (Homo sapiens) CpG-island No: 13784
ccgaacttaaacgacgcgataaaacgaaattcccgaactaaaaaaacgcgataaaacaaaaaatccgaactaaaaaaacgcgacgaaaccgaaatcccaaactaaaaaaatacaaatcgaaactaaaaaaccgacgaaaaaaaaccgaaaacccgacgaaactaaaaaacgcaaaataaaaataaaaccgtactaccgaaaaaaccccctcacgcaaaaaaaaccgaaaccgcgaaccccaccgcccccacaccccgtcgtcgcgaaattcgaaccgccccgactacgcccgaaccctacctatcctcgctaaccgtaatcacgccgtcctccttaaaaataaacaacgcgaccgtaacgacgtcctaatacccctcgatcttactcaacaacaccgaacgactactctacgacctaaaataaatttcgaccgccatattcgcgcgacgactactacgacctcctcgacaaacaacccatcaactaacgcctaaacgaacgaaaaacgcgccgatttcccttcgactactaaaacctcttaaacgccgcgccgccgtaaacccccgaatactaccgccgcaccgcccgtattacctaaaaataccgcgcaaactaaaaatctataactaaaaaaaaataccacgaaacgcctacgaaaaaataaaaaaaataaaaaaaatttaaaaataaaaccattcaccc

SEQ ID NO: 13785 - DNA, 1061 bp, Artificial Sequence
  chemically treated genomic DNA (Homo sapiens) CpG-island No: 13785
ttcggcggcgcgtagtttaagttcggggtaggggttgtcggcgagtagttggaaattttaggtttagggttagggtcggttcggatggtcgggtaggagttacgtcggtttcggtgtttttagttgcgggtattattggacgttatttcggggcggtttcgttttgttttgttcgggtttcgttcggggttttcggcgggcgggatcgggatgttcggcgagtatttagtttcggttaaggcggttcgcgggaggttgagaaagttttttgtttttcgacgtcggcgttttagggtttcgttggtttcgtagtttttcggtcgggcgtaaggttagggagtagggtcggtggcgcgcggagtttcggggagcgtttttcgtcgagggtagcgtcggtcgcgttcgggatttatcgcgtagtttgtatttatcgcgttcgttggatttttagggggcggtcgcggagggcggtgcggtcgtaatcggagcgggagtttggtttcggcggcgcggggagtcggaggacgtagttaagcggcggcggcgaggagggttatagtcggaaagaggtagcggtggcgtttgtagacgtcgcgtagttcgggtagttttatagcgtaagttggttgtcgcggcggcgggggttttatcggcggcgtcgcgcgggttttcgtttttttttgtcgttttcgttttcggttcgttttgtttcgttttttcgtcgttttttttgtgtggtcgcgggtcgtagcgttttcgcgttcggtttttaggacgtttttttttcgtttgcgatttttcggatgtcgtttcgttaggggttcgtgtcgtggggttgcgttcggaacgcgtcggggagacgcgtagatttcgaggtgcggcgttagttcgggtttagttgtacgtgggtttttcggatgggggtgtgtgaggtggcggggggaatattagggttcgtatcgcgtttttgagacgtagggtatgtcgttttggttgttttttggaagagatagagggcgttttgagatagcgtttagtttttcgggtgatggggaaacggt

SEQ ID NO: 13786 - DNA, 1061 bp, Artificial Sequence
  chemically treated genomic DNA (Homo sapiens) CpG-island No: 13786
accgtttccccatcacccgaaaaactaaacgctatctcaaaacgccctctatctcttccaaaaaacaaccaaaacgacataccctacgtctcaaaaacgcgatacgaaccctaatattccccccgccacctcacacacccccatccgaaaaacccacgtacaactaaacccgaactaacgccgcacctcgaaatctacgcgtctccccgacgcgttccgaacgcaaccccacgacacgaacccctaacgaaacgacatccgaaaaatcgcaaacgaaaaaaaaacgtcctaaaaaccgaacgcgaaaacgctacgacccgcgaccacacaaaaaaaacgacgaaaaaacgaaacaaaacgaaccgaaaacgaaaacgacaaaaaaaaacgaaaacccgcgcgacgccgccgataaaacccccgccgccgcgacaaccaacttacgctataaaactacccgaactacgcgacgtctacaaacgccaccgctacctctttccgactataaccctcctcgccgccgccgcttaactacgtcctccgactccccgcgccgccgaaaccaaactcccgctccgattacgaccgcaccgccctccgcgaccgccccctaaaaatccaacgaacgcgataaatacaaactacgcgataaatcccgaacgcgaccgacgctaccctcgacgaaaaacgctccccgaaactccgcgcgccaccgaccctactccctaaccttacgcccgaccgaaaaactacgaaaccaacgaaaccctaaaacgccgacgtcgaaaaacaaaaaactttctcaacctcccgcgaaccgccttaaccgaaactaaatactcgccgaacatcccgatcccgcccgccgaaaaccccgaacgaaacccgaacaaaacaaaacgaaaccgccccgaaataacgtccaataatacccgcaactaaaaacaccgaaaccgacgtaactcctacccgaccatccgaaccgaccctaaccctaaacctaaaatttccaactactcgccgacaacccctaccccgaacttaaactacgcgccgccgaa

SEQ ID NO: 13787 - DNA, 1061 bp, Artificial Sequence
  chemically treated genomic DNA (Homo sapiens) CpG-island No: 13787
atcgtttttttattattcggaggattgagcgttgttttagggcgttttttgttttttttagggggtagttaagacgatatgttttgcgttttagggacgcggtacgagttttggtatttttttcgttattttatatatttttattcgggagatttacgtgtagttgggttcgggttggcgtcgtatttcggggtttgcgcgttttttcggcgcgtttcgggcgtagttttacgatacggatttttggcggggcggtattcgagaagtcgtaggcggagagggggcgttttggaggtcgggcgcggggacgttgcggttcgcggttatataaaggaggcggcgggaaggcggggtaaggcgggtcgggggcgggggcggtaggaaggggcgggggttcgcgcggcgtcgtcgataaagttttcgtcgtcgcggtagttagtttgcgttgtggggttgttcgggttgcgcggcgtttgtaggcgttatcgttgttttttttcggttgtgatttttttcgtcgtcgtcgtttggttgcgtttttcgatttttcgcgtcgtcgagattaggttttcgtttcggttgcggtcgtatcgtttttcgcggtcgttttttggggatttagcgagcgcggtgagtataggttgcgcggtgagtttcgggcgcggtcggcgttgttttcggcgggggacgtttttcggggtttcgcgcgttatcggttttgttttttgattttgcgttcggtcgggaagttgcggggttagcgggattttggggcgtcgacgtcggggagtagagaatttttttagtttttcgcgggtcgttttggtcggggttgggtgttcgtcgggtatttcggtttcgttcgtcgggagtttcgagcgggattcgggtagggtaaggcggggtcgtttcggggtggcgtttagtgatattcgtagttgggagtatcggggtcggcgtggtttttgttcggttattcgagtcggttttgattttgaatttgaggtttttagttgttcgtcggtaatttttatttcggatttaggttgcgcgtcgtcgga

SEQ ID NO: 13788 - DNA, 1061 bp, Artificial Sequence
  chemically treated genomic DNA (Homo sapiens) CpG-island No: 13788
tccgacgacgcgcaacctaaatccgaaataaaaattaccgacgaacaactaaaaacctcaaattcaaaatcaaaaccgactcgaataaccgaacaaaaaccacgccgaccccgatactcccaactacgaatatcactaaacgccaccccgaaacgaccccgccttaccctacccgaatcccgctcgaaactcccgacgaacgaaaccgaaatacccgacgaacacccaaccccgaccaaaacgacccgcgaaaaactaaaaaaattctctactccccgacgtcgacgccccaaaatcccgctaaccccgcaacttcccgaccgaacgcaaaatcaaaaaacaaaaccgataacgcgcgaaaccccgaaaaacgtcccccgccgaaaacaacgccgaccgcgcccgaaactcaccgcgcaacctatactcaccgcgctcgctaaatccccaaaaaacgaccgcgaaaaacgatacgaccgcaaccgaaacgaaaacctaatctcgacgacgcgaaaaatcgaaaaacgcaaccaaacgacgacgacgaaaaaaatcacaaccgaaaaaaaacaacgataacgcctacaaacgccgcgcaacccgaacaaccccacaacgcaaactaactaccgcgacgacgaaaactttatcgacgacgccgcgcgaacccccgccccttcctaccgcccccgcccccgacccgccttaccccgccttcccgccgcctcctttatataaccgcgaaccgcaacgtccccgcgcccgacctccaaaacgccccctctccgcctacgacttctcgaataccgccccgccaaaaatccgtatcgtaaaactacgcccgaaacgcgccgaaaaaacgcgcaaaccccgaaatacgacgccaacccgaacccaactacacgtaaatctcccgaataaaaatatataaaataacgaaaaaaataccaaaactcgtaccgcgtccctaaaacgcaaaacatatcgtcttaactaccccctaaaaaaaacaaaaaacgccctaaaacaacgctcaatcctccgaataataaaaaaacgat

SEQ ID NO: 13789 - DNA, 710 bp, Artificial Sequence
  chemically treated genomic DNA (Homo sapiens) CpG-island No: 13789
ttaggattttttgttcgtcgcggttttttgttttttgtcgtcgcggttttttttgttttcgcggttttttgttcgattcggttttttgttttttcggtcgttgtggttttttgtcgtcgcggttttttgtcgtcgcggttttttgttttttcgtcgttatggtttttttatgtcgcggttttttgttcgtttcggttttttgttttttagttatcgcggtttattgatttatcgtcgcgcggttttttgttttttgcgtcgcggttttttgtttttttagcgtcgcggttttttttttcgtagttttttgtattttcgtcgtcgtcgtggttttttgtttcgcggttttttcgttacgtcgtcgcggtttgttgtcggttgcggttttttgttattttttacgttattgtggttttttgcgtttttgtgttttcgtcgttttggttttttgttcgcgttattattgttttttgtatttttaagtttttcgcgtcgcggttatttgtttttcgtcgtcgcgacgttatatggttttttgtttttattgttttttgtttcgcgtcgcggttttttgtttttttattatcgtagttttttgcgtttcggttttttgttttattaggtcgcggttttttttttatggttatcgttagaagtgtgagtggaatagagtgaagggaaagttgtttttttcgaaagtttaaaaattt

SEQ ID NO: 13790 - DNA, 710 bp, Artificial Sequence
  chemically treated genomic DNA (Homo sapiens) CpG-island No: 13790
aaatttttaaactttcgaaaaaaacaactttcccttcactctattccactcacacttctaacgataaccataaaaaaaaaaccgcgacctaataaaacaaaaaaccgaaacgcaaaaaactacgataataaaaaaacaaaaaaccgcgacgcgaaacaaaaaacaataaaaacaaaaaaccatataacgtcgcgacgacgaaaaacaaataaccgcgacgcgaaaaacttaaaaatacaaaaaacaataataacgcgaacaaaaaaccaaaacgacgaaaacacaaaaacgcaaaaaaccacaataacgtaaaaaataacaaaaaaccgcaaccgacaacaaaccgcgacgacgtaacgaaaaaaccgcgaaacaaaaaaccacgacgacgacgaaaatacaaaaaactacgaaaaaaaaaaccgcgacgctaaaaaaacaaaaaaccgcgacgcaaaaaacaaaaaaccgcgcgacgataaatcaataaaccgcgataactaaaaaacaaaaaaccgaaacgaacaaaaaaccgcgacataaaaaaaccataacgacgaaaaaacaaaaaaccgcgacgacaaaaaaccgcgacgacaaaaaaccacaacgaccgaaaaaacaaaaaaccgaatcgaacaaaaaaccgcgaaaacaaaaaaaaccgcgacgacaaaaaacaaaaaaccgcgacgaacaaaaaatcctaa

SEQ ID NO: 13791 - DNA, 710 bp, Artificial Sequence
  chemically treated genomic DNA (Homo sapiens) CpG-island No: 13791
agatttttgagttttcgaagaaaatagttttttttttattttgttttatttatatttttgacgatggttatggggaaaaagtcgcggtttggtggggtaaaaagtcgaggcgtaaaaagttgcggtggtgggggggtaaaaagtcgcggcgcgaggtaaaaagtagtgggagtaaaaaattatataacgtcgcggcggcggggggtaaatagtcgcggcgcggggggtttaaaggtgtaaaaagtagtggtggcgcgggtaaaaagttagggcgacggggatataaagacgtaaaaagttatagtggcgtggggggtggtaaaaagtcgtagtcggtaataagtcgcggcggcgtggcgaaaaagtcgcgggataaaaaattacggcggcggcggggatgtaaaaagttgcggaggaaaaagtcgcggcgttaggggggtaaaaagtcgcggcgtagggggtaaaaagtcgcgcggcggtgggttaataagtcgcggtggttggggggtaaaaagtcggggcgggtaaaaagtcgcggtatgaaaaagttatggcggcgggggggtaaaaagtcgcggcgataaaaagtcgcggcggtaaaaagttatagcggtcgggggggtaaaaagtcgggtcgggtaaaaagtcgcggaggtaaaaaaagtcgcggcggtagggggtaaaaagtcgcggcgggtagaaagttttgg

SEQ ID NO: 13792 - DNA, 710 bp, Artificial Sequence
  chemically treated genomic DNA (Homo sapiens) CpG-island No: 13792
ccaaaactttctacccgccgcgactttttaccccctaccgccgcgactttttttacctccgcgactttttacccgacccgactttttacccccccgaccgctataactttttaccgccgcgactttttatcgccgcgactttttacccccccgccgccataactttttcataccgcgactttttacccgccccgactttttaccccccaaccaccgcgacttattaacccaccgccgcgcgactttttaccccctacgccgcgactttttacccccctaacgccgcgactttttcctccgcaactttttacatccccgccgccgccgtaattttttatcccgcgactttttcgccacgccgccgcgacttattaccgactacgactttttaccaccccccacgccactataactttttacgtctttatatccccgtcgccctaactttttacccgcgccaccactactttttacacctttaaaccccccgcgccgcgactatttaccccccgccgccgcgacgttatataattttttactcccactactttttacctcgcgccgcgactttttacccccccaccaccgcaactttttacgcctcgactttttaccccaccaaaccgcgactttttccccataaccatcgtcaaaaatataaataaaacaaaataaaaaaaaaactattttcttcgaaaactcaaaaatct

SEQ ID NO: 13793 - DNA, 1298 bp, Artificial Sequence
  chemically treated genomic DNA (Homo sapiens) CpG-island No: 13793
gtaaaaaattgtagcggtgggcgtaaaaagtcggggcggtgggggaaaaggttagggcgacgggggtaataagttatggcggcggggttaaaaagtcgcggtggcggaggtaaaaagttgtggtggcggagtaaaaagttacggtgatgggtataaaaagtcgtaaaaagtcgtagtattgggggtaaaaagtcgcgacgcggtggtaaaaagtcgcggcgtataaaagatgcggcggcgggggtagaaagcggttgcgtgggggggcggtaaaaagtaggggcggtaaaaagtcgggttgggaaaaatttgttgcggcgggggaaaaaagtcgtggcgcgggttattaaaagtttgaaaaaggtgtcgtggacgggtgttaaaagtcgtaaaaaaattacggttgagggggtaataagttacggtcgtaaaagttatgatagcggggatataaagtcgtaaaaattttcgtcggtaggggtagatagtcgcggcgcgggtggtaaaaagtaacgtcggcgggggttaaaattcgcggcggggcgttaataaagcggtcggggtgataaaaagtcgtggcgcgtgggtcggaagtcgtatacggggtaaaatttcgcggtggtaggtgtaaatagtcgtaaatagtcgcggcggtgggggtaaaaagttcgggcggtgggggtaagaagtcggggtaggagaaatttgcggcgataggggaaaaaagtcgcggcggcgggggttaaaagtcgcggcggtaaaaagtcgaaaaagtcggggcgcggtgggtaagaagtcgcgacgggaaaaatttgcggcggcgggggcgaaaagtcgtaaaaagtcgcgggtcgggggttaaaagttataaaaagtcgcggcggcggtggtaaaaagtcgcggcggaaaaagtcgcggtggcgggggtaaaaagttgtagcggcgggggaaaaaagtcgtaaaaagtcgcggcggtggggggagaaagacgtaaaaagttgcggcggtaaaaagtcgcggttgcgagggtaaatatttttaaaaagtcgcggtagtaggggttaaatttcgggaggtcgggggtagaaagttgtggtggtcggggtagaaagtaacggaggcgggggtaaaaagtcgaggcggcggaggtataaagtcgtaaaatacgtagtagcgggggtaaaaatttatggcggtaaaaagcgcgtcggcgggggtaaagtagtggaaatggggtagaaggttagtatagtttggtatttttggagtgtgatgtggaaggaaaagtgtagaggaag

SEQ ID NO: 13794 - DNA, 1298 bp, Artificial Sequence
  chemically treated genomic DNA (Homo sapiens) CpG-island No: 13794
cttcctctacacttttccttccacatcacactccaaaaataccaaactatactaaccttctaccccatttccactactttacccccgccgacgcgctttttaccgccataaatttttacccccgctactacgtattttacgactttatacctccgccgcctcgactttttacccccgcctccgttactttctaccccgaccaccacaactttctacccccgacctcccgaaatttaacccctactaccgcgactttttaaaaatatttaccctcgcaaccgcgactttttaccgccgcaactttttacgtctttctccccccaccgccgcgactttttacgacttttttcccccgccgctacaactttttacccccgccaccgcgactttttccgccgcgactttttaccaccgccgccgcgactttttataacttttaacccccgacccgcgactttttacgacttttcgcccccgccgccgcaaatttttcccgtcgcgacttcttacccaccgcgccccgactttttcgactttttaccgccgcgacttttaacccccgccgccgcgacttttttcccctatcgccgcaaatttctcctaccccgacttcttacccccaccgcccgaactttttacccccaccgccgcgactatttacgactatttacacctaccaccgcgaaattttaccccgtatacgacttccgacccacgcgccacgactttttatcaccccgaccgctttattaacgccccgccgcgaattttaacccccgccgacgttactttttaccacccgcgccgcgactatctacccctaccgacgaaaatttttacgactttatatccccgctatcataacttttacgaccgtaacttattaccccctcaaccgtaatttttttacgacttttaacacccgtccacgacacctttttcaaacttttaataacccgcgccacgacttttttcccccgccgcaacaaatttttcccaacccgactttttaccgcccctactttttaccgcccccccacgcaaccgctttctacccccgccgccgcatcttttatacgccgcgactttttaccaccgcgtcgcgactttttacccccaatactacgactttttacgactttttatacccatcaccgtaactttttactccgccaccacaactttttacctccgccaccgcgactttttaaccccgccgccataacttattacccccgtcgccctaaccttttcccccaccgccccgactttttacgcccaccgctacaattttttac

SEQ ID NO: 13795 - DNA, 1298 bp, Artificial Sequence
  chemically treated genomic DNA (Homo sapiens) CpG-island No: 13795
ttttttttgtatttttttttttatattatattttaggaatgttaagttgtgttggttttttattttatttttattattttgttttcgtcgacgcgttttttgtcgttatggatttttgttttcgttgttgcgtgttttgcggttttatgttttcgtcgtttcgattttttgttttcgttttcgttgttttttgtttcggttattatagttttttgttttcggtttttcggaatttagtttttgttgtcgcggttttttggggatgtttgttttcgtagtcgcggttttttgtcgtcgtagttttttgcgtttttttttttttatcgtcgcggttttttgcggtttttttttttcgtcgttgtagttttttgttttcgttatcgcgatttttttcgtcgcggttttttgttatcgtcgtcgcggttttttatgatttttggttttcggttcgcggttttttacggtttttcgttttcgtcgtcgtaggtttttttcgtcgcggttttttgtttatcgcgtttcggttttttcggttttttgtcgtcgcggtttttggttttcgtcgtcgcgattttttttttttgtcgtcgtaggttttttttgtttcggttttttgtttttatcgttcgagttttttgtttttatcgtcgcggttatttgcggttatttgtatttgttatcgcggagttttgtttcgtatgcggttttcggtttacgcgttacggttttttattatttcggtcgttttattggcgtttcgtcgcgggttttagttttcgtcgacgttgttttttattattcgcgtcgcggttatttgtttttgtcgacgagggtttttgcggttttatattttcgttgttatagtttttgcggtcgtagtttattgtttttttagtcgtggtttttttgcggtttttggtattcgtttacgatattttttttaggtttttggtgattcgcgttacggtttttttttttcgtcgtagtagattttttttagttcggttttttgtcgtttttgttttttgtcgtttttttacgtagtcgttttttgttttcgtcgtcgtattttttatgcgtcgcggttttttgttatcgcgtcgcggttttttgtttttaatgttgcggttttttacggttttttgtgtttattatcgtagttttttgtttcgttattatagttttttgttttcgttatcgcggttttttgatttcgtcgttatggtttgttgttttcgtcgttttggtttttttttttatcgtttcggttttttgcgtttatcgttgtagttttttgt

SEQ ID NO: 13796 - DNA, 1298 bp, Artificial Sequence
  chemically treated genomic DNA (Homo sapiens) CpG-island No: 13796
acaaaaaactacaacgataaacgcaaaaaaccgaaacgataaaaaaaaaaaccaaaacgacgaaaacaacaaaccataacgacgaaatcaaaaaaccgcgataacgaaaacaaaaaactataataacgaaacaaaaaactacgataataaacacaaaaaaccgtaaaaaaccgcaacattaaaaacaaaaaaccgcgacgcgataacaaaaaaccgcgacgcataaaaaatacgacgacgaaaacaaaaaacgactacgtaaaaaaacgacaaaaaacaaaaacgacaaaaaaccgaactaaaaaaaatctactacgacgaaaaaaaaaaaccgtaacgcgaatcaccaaaaacctaaaaaaaatatcgtaaacgaataccaaaaaccgcaaaaaaaccacgactaaaaaaacaataaactacgaccgcaaaaactataacaacgaaaatataaaaccgcaaaaaccctcgtcgacaaaaacaaataaccgcgacgcgaataataaaaaacaacgtcgacgaaaactaaaacccgcgacgaaacgccaataaaacgaccgaaataataaaaaaccgtaacgcgtaaaccgaaaaccgcatacgaaacaaaactccgcgataacaaatacaaataaccgcaaataaccgcgacgataaaaacaaaaaactcgaacgataaaaacaaaaaaccgaaacaaaaaaaacctacgacgacaaaaaaaaaaaatcgcgacgacgaaaaccaaaaaccgcgacgacaaaaaaccgaaaaaaccgaaacgcgataaacaaaaaaccgcgacgaaaaaaacctacgacgacgaaaacgaaaaaccgtaaaaaaccgcgaaccgaaaaccaaaaatcataaaaaaccgcgacgacgataacaaaaaaccgcgacgaaaaaaatcgcgataacgaaaacaaaaaactacaacgacgaaaaaaaaaaaccgcaaaaaaccgcgacgataaaaaaaaaaaaacgcaaaaaactacgacgacaaaaaaccgcgactacgaaaacaaacatccccaaaaaaccgcgacaacaaaaactaaattccgaaaaaccgaaaacaaaaaactataataaccgaaacaaaaaacaacgaaaacgaaaacaaaaaatcgaaacgacgaaaacataaaaccgcaaaacacgcaacaacgaaaacaaaaatccataacgacaaaaaacgcgtcgacgaaaacaaaataataaaaataaaataaaaaaccaacacaacttaacattcctaaaatataatataaaaaaaaaaatacaaaaaaaa

SEQ ID NO: 13797 - DNA, 761 bp, Artificial Sequence
  chemically treated genomic DNA (Homo sapiens) CpG-island No: 13797
gtggtggtcgtagaggttaggatcgtatagttggatgaatattcggttgtgattggaattggggtgaggaagtaggcgtgagagattggagtattcgaggtcgggtttgttttttttagcgtcgtagtttggcgttttggggcggttcgcggggttagaaggtatggcgtagttcggagttgggtatttatcggaggatggacgattcgaataacgtgtgtagtatatttaggcgggttatacgagaggttgttgcgagttagttttgattacgggtattcgttgttgagtttataagtaggatagtcgggttgtcgtgtttcgggtatttggtgttttgcgtttcggggtttttcgcgtcgtttgttatttgtcgtcgttatcggtgttcgagggtttggttgttgcggtcgtcgtcgcgtcgttattgtcgtcgcgtcgtcgtcgcgtcgtagtcgggtttttagttttagacgcgttcgttcggcgcggttggttgggagtcgtcgggtgggttatagttcgcgttcggggcgtataggagcgaggtacgttaggcgtcgggtgtttaacgggtggatagggtttttatttgcggtagtttggtttttgttacgttcgattcggttttttttttttgcgttttttttggtcgtcgtagttattagaagttgcgttgcggttgtttttttttgtagtcgaagttcggttttaggatgttgtcgatgaaaaagttggtggtgcggtgtagttgggtcgtt

SEQ ID NO: 13798 - DNA, 761 bp, Artificial Sequence
  chemically treated genomic DNA (Homo sapiens) CpG-island No: 13798
aacgacccaactacaccgcaccaccaactttttcatcgacaacatcctaaaaccgaacttcgactacaaaaaaaaacaaccgcaacgcaacttctaataactacgacgaccaaaaaaaacgcaaaaaaaaaaaaccgaatcgaacgtaacaaaaaccaaactaccgcaaataaaaaccctatccacccgttaaacacccgacgcctaacgtacctcgctcctatacgccccgaacgcgaactataacccacccgacgactcccaaccaaccgcgccgaacgaacgcgtctaaaactaaaaacccgactacgacgcgacgacgacgcgacgacaataacgacgcgacgacgaccgcaacaaccaaaccctcgaacaccgataacgacgacaaataacaaacgacgcgaaaaaccccgaaacgcaaaacaccaaatacccgaaacacgacaacccgactatcctacttataaactcaacaacgaatacccgtaatcaaaactaactcgcaacaacctctcgtataacccgcctaaatatactacacacgttattcgaatcgtccatcctccgataaatacccaactccgaactacgccataccttctaaccccgcgaaccgccccaaaacgccaaactacgacgctaaaaaaaacaaacccgacctcgaatactccaatctctcacgcctacttcctcaccccaattccaatcacaaccgaatattcatccaactatacgatcctaacctctacgaccaccac

SEQ ID NO: 13799 - DNA, 761 bp, Artificial Sequence
  chemically treated genomic DNA (Homo sapiens) CpG-island No: 13799
agcggtttagttgtatcgtattattaatttttttatcgataatattttgaggtcggatttcggttgtaaaaaggagtagtcgtaacgtagtttttggtggttgcggcggttagaggaggcgtaggaggaggaggtcgggtcgagcgtgatagaggttagattgtcgtaggtagagattttgtttattcgttgggtattcggcgtttagcgtgtttcgtttttgtgcgtttcggacgcgaattgtggtttattcgacggtttttagttagtcgcgtcgggcgggcgcgtttaaagttgggaattcggttgcggcgcggcggcggcgcggcggtagtggcggcgcggcggcggtcgtagtagttaagttttcggatatcggtggcggcggtagatggtaggcggcgcggggagtttcggagcgtagggtattaaatattcggagtacggtaattcggttattttatttatgggtttagtaacgggtgttcgtggttaaaattgattcgtagtagtttttcgtatggttcgtttgggtgtattgtatacgttattcggatcgtttatttttcggtgagtatttaatttcgggttgcgttatgttttttggtttcgcggatcgttttagaacgttaagttgcggcgttagggagagtaaattcggtttcgggtattttagttttttacgtttgtttttttattttagttttagttataatcgaatgtttatttagttatgcgattttggtttttgcggttattat

SEQ ID NO: 13800 - DNA, 761 bp, Artificial Sequence
  chemically treated genomic DNA (Homo sapiens) CpG-island No: 13800
ataataaccgcaaaaaccaaaatcgcataactaaataaacattcgattataactaaaactaaaataaaaaaacaaacgtaaaaaactaaaatacccgaaaccgaatttactctccctaacgccgcaacttaacgttctaaaacgatccgcgaaaccaaaaaacataacgcaacccgaaattaaatactcaccgaaaaataaacgatccgaataacgtatacaatacacccaaacgaaccatacgaaaaactactacgaatcaattttaaccacgaacacccgttactaaacccataaataaaataaccgaattaccgtactccgaatatttaataccctacgctccgaaactccccgcgccgcctaccatctaccgccgccaccgatatccgaaaacttaactactacgaccgccgccgcgccgccactaccgccgcgccgccgccgcgccgcaaccgaattcccaactttaaacgcgcccgcccgacgcgactaactaaaaaccgtcgaataaaccacaattcgcgtccgaaacgcacaaaaacgaaacacgctaaacgccgaatacccaacgaataaacaaaatctctacctacgacaatctaacctctatcacgctcgacccgacctcctcctcctacgcctcctctaaccgccgcaaccaccaaaaactacgttacgactactcctttttacaaccgaaatccgacctcaaaatattatcgataaaaaaattaataatacgatacaactaaaccgct

SEQ ID NO: 13801 - DNA, 536 bp, Artificial Sequence
  chemically treated genomic DNA (Homo sapiens) CpG-island No: 13801
ttttatcgtaagcgtagggttttaggtatatattttttcgtagtttcgaatatttcgagggcgttatatagacgtagtttttattggcgtcgataggtggcgcgttttttatagggaagtcggtttttagtcgttcgcgagtttattagattcggttttttgcgttatcgtcggtttcgggtcgttttatggaaagaaaggggattggaagcggtgcggcgggggagttcgggtttggtgtcgaatggtttaaaataaaattcgagaaatttagattttagtttttcggtttagagcggttttacggttttattgtttaaggggtcgttgcgcgtcgggtgtagaggataaggtttcgtcggtttcgcggagagtatacgggatttattggggttatttttagggggcgcgatgtttttttcgtaaatttttttacgtatcggtttttttatgcgcgtttttgtagttttttcggttgttagttttagtttttattttttcgtttatttttttttttttttataaatgggggtggg

SEQ ID NO: 13802 - DNA, 536 bp, Artificial Sequence
  chemically treated genomic DNA (Homo sapiens) CpG-island No: 13802
cccacccccatttataaaaaaaaaaaaaaataaacgaaaaaataaaaactaaaactaacaaccgaaaaaactacaaaaacgcgcataaaaaaaccgatacgtaaaaaaatttacgaaaaaaacatcgcgccccctaaaaataaccccaataaatcccgtatactctccgcgaaaccgacgaaaccttatcctctacacccgacgcgcaacgaccccttaaacaataaaaccgtaaaaccgctctaaaccgaaaaactaaaatctaaatttctcgaattttattttaaaccattcgacaccaaacccgaactcccccgccgcaccgcttccaatcccctttctttccataaaacgacccgaaaccgacgataacgcaaaaaaccgaatctaataaactcgcgaacgactaaaaaccgacttccctataaaaaacgcgccacctatcgacgccaataaaaactacgtctatataacgccctcgaaatattcgaaactacgaaaaaatatatacctaaaaccctacgcttacgataaaa

SEQ ID NO: 13803 - DNA, 536 bp, Artificial Sequence
  chemically treated genomic DNA (Homo sapiens) CpG-island No: 13803
tttatttttatttataaaagaaaaaaaaaataggcggaaggatgggggttggggttggtagtcgaggaggttgtagggacgcgtatggaagagtcggtgcgtgggagggtttgcgggggggatatcgcgttttttaggggtgattttagtgggtttcgtgtgtttttcgcggagtcggcggagttttgttttttgtattcggcgcgtagcggttttttaaatagtggaatcgtgaggtcgttttaagtcgaagggttggaatttgggtttttcgggttttattttagattattcggtattaagttcgagttttttcgtcgtatcgtttttagttttttttttttttatagagcgattcgaagtcggcggtggcgtagggagtcgagtttgatgagttcgcgggcggttgaaggtcggtttttttgtggggaacgcgttatttgtcggcgttagtgagaattgcgtttgtgtggcgttttcggggtattcggggttgcggggagatgtgtgtttgaagttttgcgtttgcggtgggg

SEQ ID NO: 13804 - DNA, 536 bp, Artificial Sequence
  chemically treated genomic DNA (Homo sapiens) CpG-island No: 13804
ccccaccgcaaacgcaaaacttcaaacacacatctccccgcaaccccgaataccccgaaaacgccacacaaacgcaattctcactaacgccgacaaataacgcgttccccacaaaaaaaccgaccttcaaccgcccgcgaactcatcaaactcgactccctacgccaccgccgacttcgaatcgctctataaaaaaaaaaaaaactaaaaacgatacgacgaaaaaactcgaacttaataccgaataatctaaaataaaacccgaaaaacccaaattccaacccttcgacttaaaacgacctcacgattccactatttaaaaaaccgctacgcgccgaatacaaaaaacaaaactccgccgactccgcgaaaaacacacgaaacccactaaaatcacccctaaaaaacgcgatatcccccccgcaaaccctcccacgcaccgactcttccatacgcgtccctacaacctcctcgactaccaaccccaacccccatccttccgcctattttttttttcttttataaataaaaataaa

SEQ ID NO: 13805 - DNA, 566 bp, Artificial Sequence
  chemically treated genomic DNA (Homo sapiens) CpG-island No: 13805
cggatagtcggagcgttcggatgtttagttgagtcgcggcgcgggtagtcgggggcgtaaagttggaggtagggttgggcgacgaggagagagggagggtcgggagtcgaaggacgttcgggtgtatttcgttgtagaggtcgagttcgagcggtcggagaaggttggtcgtagaagggcggttttcggtgtaaaaaacggaaattttggagtagaggatgaggaggaatacggaggcggggagttatagaaaaagatgttgaggaaagaagaggagatttcggtttaaataaatcgaaattgtgtaatgaacgtggttcgggagaatcgggggtgaggggcgatggttggagttgcggtttaagtatagtttttagacgtttgttcggattttggcgcggggaggcggtcgggattgtttttttgcgcgcgtttttggagagcgggtgggtaggatttgcgtttcgcggtgggtaagaagatttggggtttcgtagtttttggggtcgggggcgggggtgaagtgtttttagagatttcggcggagttttagttgcgtttttatt

SEQ ID NO: 13806 - DNA, 566 bp, Artificial Sequence
  chemically treated genomic DNA (Homo sapiens) CpG-island No: 13806
aataaaaacgcaactaaaactccgccgaaatctctaaaaacacttcacccccgcccccgaccccaaaaactacgaaaccccaaatcttcttacccaccgcgaaacgcaaatcctacccacccgctctccaaaaacgcgcgcaaaaaaacaatcccgaccgcctccccgcgccaaaatccgaacaaacgtctaaaaactatacttaaaccgcaactccaaccatcgcccctcacccccgattctcccgaaccacgttcattacacaatttcgatttatttaaaccgaaatctcctcttctttcctcaacatctttttctataactccccgcctccgtattcctcctcatcctctactccaaaatttccgttttttacaccgaaaaccgcccttctacgaccaaccttctccgaccgctcgaactcgacctctacaacgaaatacacccgaacgtccttcgactcccgaccctccctctctcctcgtcgcccaaccctacctccaactttacgcccccgactacccgcgccgcgactcaactaaacatccgaacgctccgactatccg

SEQ ID NO: 13807 - DNA, 566 bp, Artificial Sequence
  chemically treated genomic DNA (Homo sapiens) CpG-island No: 13807
gatgggagcgtaattggggtttcgtcgaggtttttgagggtattttattttcgttttcgattttaggaattgcgaaattttaaatttttttgtttatcgcggggcgtaggttttgtttattcgttttttagggacgcgcgtagaaaggtagtttcggtcgttttttcgcgttagggttcgggtaagcgtttgaaagttgtgtttgggtcgtagttttagttatcgttttttattttcggttttttcgggttacgtttattgtatagtttcgatttgtttaggtcggggtttttttttttttttttaatatttttttttgtggtttttcgttttcgtatttttttttattttttgttttaaggttttcgttttttgtatcggaggtcgtttttttgcgattagtttttttcggtcgttcggattcggtttttgtagcggggtgtattcgggcgtttttcggttttcggtttttttttttttttcgtcgtttagttttgtttttaattttgcgttttcggttgttcgcgtcgcggtttaattggatattcgaacgtttcgattgttcg

SEQ ID NO: 13808 - DNA, 566 bp, Artificial Sequence
  chemically treated genomic DNA (Homo sapiens) CpG-island No: 13808
cgaacaatcgaaacgttcgaatatccaattaaaccgcgacgcgaacaaccgaaaacgcaaaattaaaaacaaaactaaacgacgaaaaaaaaaaaaaaaccgaaaaccgaaaaacgcccgaatacaccccgctacaaaaaccgaatccgaacgaccgaaaaaaactaatcgcaaaaaaacgacctccgatacaaaaaacgaaaaccttaaaacaaaaaataaaaaaaaatacgaaaacgaaaaaccacaaaaaaaaatattaaaaaaaaaaaaaaaaaccccgacctaaacaaatcgaaactatacaataaacgtaacccgaaaaaaccgaaaataaaaaacgataactaaaactacgacccaaacacaactttcaaacgcttacccgaaccctaacgcgaaaaaacgaccgaaactacctttctacgcgcgtccctaaaaaacgaataaacaaaacctacgccccgcgataaacaaaaaaatttaaaatttcgcaattcctaaaatcgaaaacgaaaataaaataccctcaaaaacctcgacgaaaccccaattacgctcccatc

SEQ ID NO: 13809 - DNA, 736 bp, Artificial Sequence
  chemically treated genomic DNA (Homo sapiens) CpG-island No: 13809
tcggcgttggcgcgcgttaggttagtcgcgacgtatcgttcgattttttattttttttcgtagttttcggcgcggggttcggcgagaaggggaggggaggggagcggagaatcgggttttcggacgcgtgtggtatttgaagtattattagcgagcgagagttagagagaaggaaagcgatcgattttatcgttttcgagttgtttcgggtcgcgggtttgtagcgttttcggtttttcgcgtttatagtttaagttatattcgaagggtgagggagtcgggagttgcgcgcggggtcgtcggagggaggggtggtatttttacgtcggggtttacgaagggcggggtagcgggcgcggtcgtcgtggtagagggataggatttgtattttttacgaggagtgtgatcgttgtgttttttgaggttcgtttacgcgaagtatgatcgttttattatgttttcgttttcgtatttagttgtcgtaggtagatagttagttttgtagatataggtagatgttatatggtcgcgattatttacgtaatttatttggttgatgagcgggatacggggagatttagaggatagtttgacgcgttgcgtgttagtatgtagtagattcgacggattgcgcgggtgatagttgatataaatgttataggtcggggaggcgtgatgtttaaattttaagatacgagtagggttgtaattacgttggggttacgcggtcgggatt

SEQ ID NO: 13810 - DNA, 736 bp, Artificial Sequence
  chemically treated genomic DNA (Homo sapiens) CpG-island No: 13810
aatcccgaccgcgtaaccccaacgtaattacaaccctactcgtatcttaaaatttaaacatcacgcctccccgacctataacatttatatcaactatcacccgcgcaatccgtcgaatctactacatactaacacgcaacgcgtcaaactatcctctaaatctccccgtatcccgctcatcaaccaaataaattacgtaaataatcgcgaccatataacatctacctatatctacaaaactaactatctacctacgacaactaaatacgaaaacgaaaacataataaaacgatcatacttcgcgtaaacgaacctcaaaaaacacaacgatcacactcctcgtaaaaaatacaaatcctatccctctaccacgacgaccgcgcccgctaccccgcccttcgtaaaccccgacgtaaaaataccacccctccctccgacgaccccgcgcgcaactcccgactccctcacccttcgaatataacttaaactataaacgcgaaaaaccgaaaacgctacaaacccgcgacccgaaacaactcgaaaacgataaaatcgatcgctttccttctctctaactctcgctcgctaataatacttcaaataccacacgcgtccgaaaacccgattctccgctcccctcccctccccttctcgccgaaccccgcgccgaaaactacgaaaaaaaataaaaaatcgaacgatacgtcgcgactaacctaacgcgcgccaacgccga

SEQ ID NO: 13811 - DNA, 736 bp, Artificial Sequence
  chemically treated genomic DNA (Homo sapiens) CpG-island No: 13811
ggtttcggtcgcgtggttttagcgtggttgtaattttgttcgtattttaaagtttgggtattacgttttttcgatttgtagtatttatgttagttattattcgcgtagttcgtcgggtttgttgtatgttagtacgtagcgcgttaggttattttttgaattttttcgtgtttcgtttattaattagatgagttgcgtgagtggtcgcgattatgtagtatttgtttgtatttataggattagttgtttgtttacgatagttaggtgcggagacggaggtatggtgagacgattatgtttcgcgtaagcgggttttagagagtatagcggttatatttttcgtggagagtgtaggttttgtttttttgttacggcggtcgcgttcgttgtttcgtttttcgtgagtttcggcgtgggggtgttattttttttttcggcggtttcgcgcgtagttttcggtttttttatttttcggatgtggtttgagttgtaggcgcggagggtcggagacgttgtagattcgcgattcggagtagttcggaggcggtgaagtcggtcgttttttttttttttagttttcgttcgttggtagtgttttagatgttatacgcgttcgggggttcggtttttcgttttttttttttttttttttcgtcggatttcgcgtcgggagttgcgggaaggagtggagggtcgggcggtgcgtcgcggttggtttggcgcgcgttagcgtcgg

SEQ ID NO: 13812 - DNA, 736 bp, Artificial Sequence
  chemically treated genomic DNA (Homo sapiens) CpG-island No: 13812
ccgacgctaacgcgcgccaaaccaaccgcgacgcaccgcccgaccctccactccttcccgcaactcccgacgcgaaatccgacgaaaaaaaaaaaaaaaaaaaacgaaaaaccgaacccccgaacgcgtataacatctaaaacactaccaacgaacgaaaactaaaaaaaaaaaaaacgaccgacttcaccgcctccgaactactccgaatcgcgaatctacaacgtctccgaccctccgcgcctacaactcaaaccacatccgaaaaataaaaaaaccgaaaactacgcgcgaaaccgccgaaaaaaaaaataacacccccacgccgaaactcacgaaaaacgaaacaacgaacgcgaccgccgtaacaaaaaaacaaaacctacactctccacgaaaaatataaccgctatactctctaaaacccgcttacgcgaaacataatcgtctcaccatacctccgtctccgcacctaactatcgtaaacaaacaactaatcctataaatacaaacaaatactacataatcgcgaccactcacgcaactcatctaattaataaacgaaacacgaaaaaattcaaaaaataacctaacgcgctacgtactaacatacaacaaacccgacgaactacgcgaataataactaacataaatactacaaatcgaaaaaacgtaatacccaaactttaaaatacgaacaaaattacaaccacgctaaaaccacgcgaccgaaacc

SEQ ID NO: 13813 - DNA, 672 bp, Artificial Sequence
  chemically treated genomic DNA (Homo sapiens) CpG-island No: 13813
tttttacggaggcggttggtcgatttttattgaggcgttaacggtttcgttatgttttttttaataatttattgattttaaattcgttatttttatcgcggatttagtcgttttagttcgatttttcgtagtcgagcgagatgagagagattttcgcggacgaatacgaatcggattcgttttggcgttgtagtgagaattgtcgttgttcgagaaataattttgcgaggagtattttcgtacgggattcggcgttgttgttattgtcgttagagtcgttgtcgtcgtttttttagaatttttttttttattaacgcgtttttcgttacgttaggtcgtcgcgtaaacgttttattcgtcgttaatggcgggaaggttttacgttttattttacgttaaatgcgtattttttttatttttgcggttagagatagtattcgacgttattttcgtaaatgcgtttaatgaattgcggaaggttagagttttgttagttattattttttggaatagggtttcgttttttgttttggcgtaaggtaggtgagaaacggtcgcgtagtttgaaattaacgtcgacgggaggggtttaattcgtagtttggagatttagtttttttaattcgggaggtggtttttgtagttacgttaatgataattttcgttagaaaa

SEQ ID NO: 13814 - DNA, 672 bp, Artificial Sequence
  chemically treated genomic DNA (Homo sapiens) CpG-island No: 13814
ttttctaacgaaaattatcattaacgtaactacaaaaaccacctcccgaattaaaaaaactaaatctccaaactacgaattaaacccctcccgtcgacgttaatttcaaactacgcgaccgtttctcacctaccttacgccaaaacaaaaaacgaaaccctattccaaaaaataataactaacaaaactctaaccttccgcaattcattaaacgcatttacgaaaataacgtcgaatactatctctaaccgcaaaaataaaaaaaatacgcatttaacgtaaaataaaacgtaaaaccttcccgccattaacgacgaataaaacgtttacgcgacgacctaacgtaacgaaaaacgcgttaataaaaaaaaaaattctaaaaaaacgacgacaacgactctaacgacaataacaacaacgccgaatcccgtacgaaaatactcctcgcaaaattatttctcgaacaacgacaattctcactacaacgccaaaacgaatccgattcgtattcgtccgcgaaaatctctctcatctcgctcgactacgaaaaatcgaactaaaacgactaaatccgcgataaaaataacgaatttaaaatcaataaattattaaaaaaaacataacgaaaccgttaacgcctcaataaaaatcgaccaaccgcctccgtaaaaa

SEQ ID NO: 13815 - DNA, 672 bp, Artificial Sequence
  chemically treated genomic DNA (Homo sapiens) CpG-island No: 13815
ttttttggcgggggttattattggcgtaattgtagggattatttttcgggttgagggggttggatttttaggttgcggattaagtttttttcgtcggcgttaattttaaattgcgcgatcgttttttatttgttttgcgttaaggtagggggcgggattttattttaagaggtagtaattagtaggattttagtttttcgtaatttattgagcgtatttacggaagtaacgtcgggtattgtttttggtcgtaagggtgggaggagtacgtatttggcgtaaggtggggcgtagagttttttcgttattggcggcggatagggcgtttacgcgacggtttgacgtagcggaagacgcgttagtgggggggaaggttttagaaaagcggcggtagcggttttagcggtagtagtagtagcgtcgggtttcgtgcggaggtgtttttcgtagagttgtttttcgagtagcggtagtttttattatagcgttaggacgagttcggttcgtgttcgttcgcggagattttttttatttcgttcggttgcgggaaatcgggttgaagcgattgagttcgcgatggaggtaacgggtttgaaattaatgagttattgaaaagggtatggcgaggtcgttggcgttttagtggaagtcggttagtcgttttcgtgggag

SEQ ID NO: 13816 - DNA, 672 bp, Artificial Sequence
  chemically treated genomic DNA (Homo sapiens) CpG-island No: 13816
ctcccacgaaaacgactaaccgacttccactaaaacgccaacgacctcgccatacccttttcaataactcattaatttcaaacccgttacctccatcgcgaactcaatcgcttcaacccgatttcccgcaaccgaacgaaataaaaaaaatctccgcgaacgaacacgaaccgaactcgtcctaacgctataataaaaactaccgctactcgaaaaacaactctacgaaaaacacctccgcacgaaacccgacgctactactactaccgctaaaaccgctaccgccgcttttctaaaaccttcccccccactaacgcgtcttccgctacgtcaaaccgtcgcgtaaacgccctatccgccgccaataacgaaaaaactctacgccccaccttacgccaaatacgtactcctcccacccttacgaccaaaaacaatacccgacgttacttccgtaaatacgctcaataaattacgaaaaactaaaatcctactaattactacctcttaaaataaaatcccgccccctaccttaacgcaaaacaaataaaaaacgatcgcgcaatttaaaattaacgccgacgaaaaaaacttaatccgcaacctaaaaatccaaccccctcaacccgaaaaataatccctacaattacgccaataataacccccgccaaaaaa

SEQ ID NO: 13817 - DNA, 929 bp, Artificial Sequence
  chemically treated genomic DNA (Homo sapiens) CpG-island No: 13817
gagcgtcgaggtgtagggcgtaagttgggaagttaacgttatcggtgtaggtttcgtttcgttaggttggcgtttttggttttcgtttttagttgttcgtttcgtttagcgtttatttcgggtagtcgcggtttttgtcgtttagaagtatagttttagttacgggagttagcgcgcgttttttcgtcgtcgtttgcgtgcgcgtcgttttttttatgtttttcgtcgcgtttcggaggcggtttttttttacgtttcgggagttcgggaaagggtcggcgatgagggtttcgagtcgaatgggtttcgggagtttttagagagtgattttgttttacgatcgttttttaaagtagcggggtagggagtttcgagtcgtcgttgaatgggtatttcgagaaagggcgcgtttttatagttttttacggcgcggcgatcgttgtcgttagcgcggatgtcggagtcgttcgtagttttcgtcgcgtagtttttagttttcgcgtcgttgtcgggtttcgaattacggagcggaggcgagagttcgtatcgttaatgagattttcgtagtcgtttttttttttttttttcgagcggtagttaatgagtcgggttggggcggggtcgcgggaggggcggtgacgcggcggcgttgggttggggttcgggaggcgtaggtgagttagaggtcgttttacgtgttttcggggcgtttcgggtttcgtttgtagttttttttttcgttcgcggagagaggaagcgggttgggagtcgggcggcggggatgcggttacgtcgcggggagttgagcggagtcggttggttttttggggcgaacgtcgtatagatatgtgggtatttcggttgtttaatttagttatttgtttttaggagattttcgttttgtttatttattttgagtttttttaaag

SEQ ID NO: 13818 - DNA, 929 bp, Artificial Sequence
  chemically treated genomic DNA (Homo sapiens) CpG-island No: 13818
ctttaaaaaaactcaaaataaataaacaaaacgaaaatctcctaaaaacaaataactaaattaaacaaccgaaatacccacatatctatacgacgttcgccccaaaaaaccaaccgactccgctcaactccccgcgacgtaaccgcatccccgccgcccgactcccaacccgcttcctctctccgcgaacgaaaaaaaaaactacaaacgaaacccgaaacgccccgaaaacacgtaaaacgacctctaactcacctacgcctcccgaaccccaacccaacgccgccgcgtcaccgcccctcccgcgaccccgccccaacccgactcattaactaccgctcgaaaaaaaaaaaaaaaaacgactacgaaaatctcattaacgatacgaactctcgcctccgctccgtaattcgaaacccgacaacgacgcgaaaactaaaaactacgcgacgaaaactacgaacgactccgacatccgcgctaacgacaacgatcgccgcgccgtaaaaaactataaaaacgcgccctttctcgaaatacccattcaacgacgactcgaaactccctaccccgctactttaaaaaacgatcgtaaaacaaaatcactctctaaaaactcccgaaacccattcgactcgaaaccctcatcgccgaccctttcccgaactcccgaaacgtaaaaaaaaaccgcctccgaaacgcgacgaaaaacataaaaaaaacgacgcgcacgcaaacgacgacgaaaaaacgcgcgctaactcccgtaactaaaactatacttctaaacgacaaaaaccgcgactacccgaaataaacgctaaacgaaacgaacaactaaaaacgaaaaccaaaaacgccaacctaacgaaacgaaacctacaccgataacgttaacttcccaacttacgccctacacctcgacgctc

SEQ ID NO: 13819 - DNA, 929 bp, Artificial Sequence
  chemically treated genomic DNA (Homo sapiens) CpG-island No: 13819
ttttagaagggtttaaagtagatgaataaaacggaggttttttggaagtaggtgattgagttaggtaatcgagatgtttatatatttgtgcggcgttcgttttaagaggttagtcggtttcgtttagtttttcgcggcgtggtcgtattttcgtcgttcgatttttagttcgtttttttttttcgcgagcgggggggggagttgtaggcggggttcgaagcgtttcgggggtacgtggagcggtttttggtttatttgcgtttttcgggttttagtttagcgtcgtcgcgttatcgtttttttcgcggtttcgttttagttcggtttattggttgtcgttcggaggggaggggaaggggcggttgcgggggttttattagcgatgcggattttcgttttcgtttcgtagttcggggttcggtagcggcgcgagggttgggaattgcgcggcggggattgcgggcgatttcggtattcgcgttggcggtagcggtcgtcgcgtcgtgggaagttatggggacgcgttttttttcggggtgtttatttagcggcggttcggagttttttgtttcgttgttttaggaagcgatcgtggagtagagttattttttgaagattttcgagatttattcgattcgggatttttatcgtcgattttttttcgggttttcggagcgtgaagaagagtcgttttcggaacgcggcgaggagtatggggagagcggcgcgtacgtaggcggcggcggaggggcgcgcgttggttttcgtggttggggttgtgtttttgggcggtagggatcgcggttgttcgaggtaagcgttgggcggagcgggtagttgggggcgagggttaggggcgttagtttgacggagcgggatttgtatcgatggcgttggttttttaatttgcgttttgtatttcggcgttt

SEQ ID NO: 13820 - DNA, 929 bp, Artificial Sequence
  chemically treated genomic DNA (Homo sapiens) CpG-island No: 13820
aaacgccgaaatacaaaacgcaaattaaaaaaccaacgccatcgatacaaatcccgctccgtcaaactaacgcccctaaccctcgcccccaactacccgctccgcccaacgcttacctcgaacaaccgcgatccctaccgcccaaaaacacaaccccaaccacgaaaaccaacgcgcgcccctccgccgccgcctacgtacgcgccgctctccccatactcctcgccgcgttccgaaaacgactcttcttcacgctccgaaaacccgaaaaaaaatcgacgataaaaatcccgaatcgaataaatctcgaaaatcttcaaaaaataactctactccacgatcgcttcctaaaacaacgaaacaaaaaactccgaaccgccgctaaataaacaccccgaaaaaaaacgcgtccccataacttcccacgacgcgacgaccgctaccgccaacgcgaataccgaaatcgcccgcaatccccgccgcgcaattcccaaccctcgcgccgctaccgaaccccgaactacgaaacgaaaacgaaaatccgcatcgctaataaaacccccgcaaccgccccttcccctcccctccgaacgacaaccaataaaccgaactaaaacgaaaccgcgaaaaaaacgataacgcgacgacgctaaactaaaacccgaaaaacgcaaataaaccaaaaaccgctccacgtacccccgaaacgcttcgaaccccgcctacaactcccccccccgctcgcgaaaaaaaaaaacgaactaaaaatcgaacgacgaaaatacgaccacgccgcgaaaaactaaacgaaaccgactaacctcttaaaacgaacgccgcacaaatatataaacatctcgattacctaactcaatcacctacttccaaaaaacctccgttttattcatctactttaaacccttctaaaa

SEQ ID NO: 13821 - DNA, 715 bp, Artificial Sequence
  chemically treated genomic DNA (Homo sapiens) CpG-island No: 13821
tttttgttcgttgttttcgggttgttttagcgggggtcggatagggtagcggtcgtttttcgcgacgttttcgcgtttcgtatgtatattttcgcgggtttttatatttgcggcgtcgttataaagtttcggtgagcggcgtgcgttcggaattggggtgcgtttcggttagattcggagtagttttttagttcggtttcgttttacgtattttttcgtcgttcggggttcgcggagtcgagcggagggggcgaagggacgggggaggagtttttttggtcgtcgtattttcgcggtttcgttttttttttcggtcgcgtcgttttttcgttcgtcgcgcgtttttcggttcgttcgtttagttgttgtcgtacgttttattttcggaatttcgttttttttcgcgtttttaatcgttttttttcgaaatttttcgttaagatggcggttttcgagttggtttgtcgcgtttttacgtgatcgttttttcggcgtttttagttaatgggaagtgaggaggcggttcgcgtcgagtttcgggtttttcgcgttgttattttcgggttggaagggggaggcgggtcgggggagggtaggggaacggaaggggtattcggggagtattttaagggaattttttcgtttaaaagggcggtcgttgaagtggttttgagaataaaggagttaatattcggattttataggtggttcgggg

SEQ ID NO: 13822 - DNA, 715 bp, Artificial Sequence
  chemically treated genomic DNA (Homo sapiens) CpG-island No: 13822
ccccgaaccacctataaaatccgaatattaactcctttattctcaaaaccacttcaacgaccgcccttttaaacgaaaaaattcccttaaaatactccccgaataccccttccgttcccctaccctcccccgacccgcctcccccttccaacccgaaaataacaacgcgaaaaacccgaaactcgacgcgaaccgcctcctcacttcccattaactaaaaacgccgaaaaaacgatcacgtaaaaacgcgacaaaccaactcgaaaaccgccatcttaacgaaaaatttcgaaaaaaaacgattaaaaacgcgaaaaaaaacgaaattccgaaaataaaacgtacgacaacaactaaacgaacgaaccgaaaaacgcgcgacgaacgaaaaaacgacgcgaccgaaaaaaaaaacgaaaccgcgaaaatacgacgaccaaaaaaactcctcccccgtcccttcgccccctccgctcgactccgcgaaccccgaacgacgaaaaaatacgtaaaacgaaaccgaactaaaaaactactccgaatctaaccgaaacgcaccccaattccgaacgcacgccgctcaccgaaactttataacgacgccgcaaatataaaaacccgcgaaaatatacatacgaaacgcgaaaacgtcgcgaaaaacgaccgctaccctatccgacccccgctaaaacaacccgaaaacaacgaacaaaaa

SEQ ID NO: 13823 - DNA, 715 bp, Artificial Sequence
  chemically treated genomic DNA (Homo sapiens) CpG-island No: 13823
tttcgggttatttgtggagttcgagtgttaatttttttgtttttagagttattttagcggtcgtttttttaagcgaagaggtttttttaggatgtttttcgggtatttttttcgtttttttgttttttttcgattcgttttttttttttaattcgaaggtagtagcgcggggagttcggggttcggcgcgagtcgtttttttattttttattggttgagagcgtcgggaaagcggttacgtgggagcgcggtaggttagttcgggggtcgttattttggcggaaagtttcgggggagagcggttgggggcgcggaaggaggcgaggtttcgggggtggggcgtgcggtagtaattgggcgagcgggtcggggggcgcgcggcgagcgaggaggcggcgcggtcgagaaggaggacgaggtcgcgggggtgcggcggttaggggagtttttttttcgttttttcgtttttttcgttcggtttcgcgggtttcgggcggcgggggggtacgtggagcggggtcgggttggggagttgtttcgagtttggtcggggcgtattttagtttcgagcgtacgtcgtttatcggaattttgtggcggcgtcgtaggtgtgggggttcgcggaggtgtgtatgcggggcgcgagggcgtcgcggagagcggtcgttgttttgttcggttttcgttggagtagttcggaggtagcgagtaagga

SEQ ID NO: 13824 - DNA, 715 bp, Artificial Sequence
  chemically treated genomic DNA (Homo sapiens) CpG-island No: 13824
tccttactcgctacctccgaactactccaacgaaaaccgaacaaaacaacgaccgctctccgcgacgccctcgcgccccgcatacacacctccgcgaacccccacacctacgacgccgccacaaaattccgataaacgacgtacgctcgaaactaaaatacgccccgaccaaactcgaaacaactccccaacccgaccccgctccacgtacccccccgccgcccgaaacccgcgaaaccgaacgaaaaaaacgaaaaaacgaaaaaaaaactcccctaaccgccgcacccccgcgacctcgtcctccttctcgaccgcgccgcctcctcgctcgccgcgcgccccccgacccgctcgcccaattactaccgcacgccccacccccgaaacctcgcctccttccgcgcccccaaccgctctcccccgaaactttccgccaaaataacgacccccgaactaacctaccgcgctcccacgtaaccgctttcccgacgctctcaaccaataaaaaataaaaaaacgactcgcgccgaaccccgaactccccgcgctactaccttcgaattaaaaaaaaaaaacgaatcgaaaaaaaacaaaaaaacgaaaaaaatacccgaaaaacatcctaaaaaaacctcttcgcttaaaaaaacgaccgctaaaataactctaaaaacaaaaaaattaacactcgaactccacaaataacccgaaa

SEQ ID NO: 13825 - DNA, 1179 bp, Artificial Sequence
  chemically treated genomic DNA (Homo sapiens) CpG-island No: 13825
gttattttcgagtggatgttgtgtattggttagtgtgttatttatatgcgcgttatttttgagtggatgttgtgtattggtcggtgtgttatttattacgcgcgttagttttgagtggttgttgtgtattggttggtgtgttatttatatgcgcgttatttttgagtggatgttgtgtattggtcggtgtgttatttattacgcgcgttagttttgagtggatgttgtgtattggtcggtgtgttatttatatgcgcgttatttttgagtggatgttgtgtattggttcgtgtgttatttatatgtacgttatttttgagtggatgttgtgtattggtcggtgtgttatttattacgcgcgttagttttgagtggatgttgtgtattggtcggtgtgttatttatacgcgcgttattttcgagtggatgttgtgtattggttcgtgtgttatttattatgtacgttattttcgagtggatgttgtgtattggtcggtgtgttatttattatgcgcgttattttcgagtggatgttgtgtattggtcggtgtgttatttattatgcgttttattttcgagtggatgttgtgtattggtcggtgtgttatttattatgcgttttattttcgagtggatgttgtgtattggtcggtgtgttatttattatgcgcgttattttcgagtggatgttgtgtattggtcggtgtgttatttattatgcgcgttattttcgagtggatgttgtgtattggtcggtgtgttatttattatgcgcgttattttcgagtggatgttgtgtattggtcggtgtgttatttattatgcgcgttattttcgagtggatgttgtgtattggtcggtgtgttatttattatgcgcgttattttcgagtggatgttgtgtattggtcggtgtgttatttattatgcgcgttattttcgagtggatgttgtgtattggtcggtgtgttatttattatgcgcgttattttcgagtggatgttgtgtattggtcggtgtgttatttattatgcgcgttattttcgagtggatgttgtgtattggtcggtgtgttatttatatgcgcgttattttcgagtggaggttgtgtattggtcggtgtgttatttatatgttttttttttttttgatatggtgattagtaacgttttaggtatag

SEQ ID NO: 13826 - DNA, 1179 bp, Artificial Sequence
  chemically treated genomic DNA (Homo sapiens) CpG-island No: 13826
ctatacctaaaacgttactaatcaccatatcaaaaaaaaaaaaaacatataaataacacaccgaccaatacacaacctccactcgaaaataacgcgcatataaataacacaccgaccaatacacaacatccactcgaaaataacgcgcataataaataacacaccgaccaatacacaacatccactcgaaaataacgcgcataataaataacacaccgaccaatacacaacatccactcgaaaataacgcgcataataaataacacaccgaccaatacacaacatccactcgaaaataacgcgcataataaataacacaccgaccaatacacaacatccactcgaaaataacgcgcataataaataacacaccgaccaatacacaacatccactcgaaaataacgcgcataataaataacacaccgaccaatacacaacatccactcgaaaataacgcgcataataaataacacaccgaccaatacacaacatccactcgaaaataacgcgcataataaataacacaccgaccaatacacaacatccactcgaaaataaaacgcataataaataacacaccgaccaatacacaacatccactcgaaaataaaacgcataataaataacacaccgaccaatacacaacatccactcgaaaataacgcgcataataaataacacaccgaccaatacacaacatccactcgaaaataacgtacataataaataacacacgaaccaatacacaacatccactcgaaaataacgcgcgtataaataacacaccgaccaatacacaacatccactcaaaactaacgcgcgtaataaataacacaccgaccaatacacaacatccactcaaaaataacgtacatataaataacacacgaaccaatacacaacatccactcaaaaataacgcgcatataaataacacaccgaccaatacacaacatccactcaaaactaacgcgcgtaataaataacacaccgaccaatacacaacatccactcaaaaataacgcgcatataaataacacaccaaccaatacacaacaaccactcaaaactaacgcgcgtaataaataacacaccgaccaatacacaacatccactcaaaaataacgcgcatataaataacacactaaccaatacacaacatccactcgaaaataac

SEQ ID NO: 13827 - DNA, 1179 bp, Artificial Sequence
  chemically treated genomic DNA (Homo sapiens) CpG-island No: 13827
ttgtatttgaaacgttgttggttattatgttagaaggaaagagagtatgtgaataatatatcggttagtatatagtttttattcgggagtgacgcgtatgtgaataatatatcggttagtatatagtatttattcgggagtgacgcgtatggtgaataatatatcggttagtatatagtatttattcgggagtgacgcgtatggtgaataatatatcggttagtatatagtatttattcgggagtgacgcgtatggtgaataatatatcggttagtatatagtatttattcgggagtgacgcgtatggtgaataatatatcggttagtatatagtatttattcgggagtgacgcgtatggtgaataatatatcggttagtatatagtatttattcgggagtgacgcgtatggtgaataatatatcggttagtatatagtatttattcgggagtgacgcgtatggtgaataatatatcggttagtatatagtatttattcgggagtgacgcgtatggtgaataatatatcggttagtatatagtatttattcgggagtgaggcgtatggtgaataatatatcggttagtatatagtatttattcgggagtgaggcgtatggtgaataatatatcggttagtatatagtatttattcgggagtgacgcgtatggtgaataatatatcggttagtatatagtatttattcgggagtgacgtgtatggtgaataatatacgggttagtatatagtatttattcgggagtgacgcgcgtgtgaataatatatcggttagtatatagtatttatttaggattgacgcgcgtggtgaataatatatcggttagtatatagtatttatttaggagtgacgtgtatgtgaataatatacgggttagtatatagtatttatttaggagtgacgcgtatgtgaataatatatcggttagtatatagtatttatttaggattgacgcgcgtggtgaataatatatcggttagtatatagtatttatttaggagtgacgcgtatgtgaataatatattagttagtatatagtaattatttaggattgacgcgcgtggtgaataatatatcggttagtatatagtatttatttaggagtgacgcgtatgtgaataatatattggttagtatatagtatttattcgggagtgat

SEQ ID NO: 13828 - DNA, 1179 bp, Artificial Sequence
  chemically treated genomic DNA (Homo sapiens) CpG-island No: 13828
atcactcccgaataaatactatatactaaccaatatattattcacatacgcgtcactcctaaataaatactatatactaaccgatatattattcaccacgcgcgtcaatcctaaataattactatatactaactaatatattattcacatacgcgtcactcctaaataaatactatatactaaccgatatattattcaccacgcgcgtcaatcctaaataaatactatatactaaccgatatattattcacatacgcgtcactcctaaataaatactatatactaacccgtatattattcacatacacgtcactcctaaataaatactatatactaaccgatatattattcaccacgcgcgtcaatcctaaataaatactatatactaaccgatatattattcacacgcgcgtcactcccgaataaatactatatactaacccgtatattattcaccatacacgtcactcccgaataaatactatatactaaccgatatattattcaccatacgcgtcactcccgaataaatactatatactaaccgatatattattcaccatacgcctcactcccgaataaatactatatactaaccgatatattattcaccatacgcctcactcccgaataaatactatatactaaccgatatattattcaccatacgcgtcactcccgaataaatactatatactaaccgatatattattcaccatacgcgtcactcccgaataaatactatatactaaccgatatattattcaccatacgcgtcactcccgaataaatactatatactaaccgatatattattcaccatacgcgtcactcccgaataaatactatatactaaccgatatattattcaccatacgcgtcactcccgaataaatactatatactaaccgatatattattcaccatacgcgtcactcccgaataaatactatatactaaccgatatattattcaccatacgcgtcactcccgaataaatactatatactaaccgatatattattcaccatacgcgtcactcccgaataaatactatatactaaccgatatattattcacatacgcgtcactcccgaataaaaactatatactaaccgatatattattcacatactctctttccttctaacataataaccaacaacgtttcaaatacaa

SEQ ID NO: 13829 - DNA, 1111 bp, Artificial Sequence
  chemically treated genomic DNA (Homo sapiens) CpG-island No: 13829
tggcgaaaggtcggggtcgtttttaagcgttagtttcggggaggcgttcgcggtagaggttttcgcgtttcgtcgggtaggatttcgcgtttatttttttggtaaggatatcggggaggcgtcgagacgcggttagggaggaattcggttgcggttatttcgattcgggtcggggtagacgacgcgtttcgagaaatttcgagggcgtttagttttatagtggaaggtttttagggcggcgtttttggatttaagtgtttttaggatttttcgagggaaacgcggcgttacgagaggacggagggcgtttttagttttattcggattttatggagttcgaatttatggggacgacgcggaggaggaagcggcgattttagtttcgtattttcgttttaaatttggtttcgtagattcgtttagtttttggtgcgcgtttttcgtttcggtcggaggtttcgcgtttttgtgtttttttcgcgatttgtcggggtcggtagtgtttgtaaataaacggttacgtggttcggcggcgtttttcgttttcggcgtttacggggattttacgcggaatcgagggcgtcgtatttttaatttcgcgtaggttcggtcgggggagttcggaggtcggggtcggggatttagagttcgagttgatagcgcgttttacgtttacgcgcgttcggttcgcgtcgtatttcggtgtatttattcggcgataggcggttttgttcggttagcgtggggtttggtttcgttggggtgcgtaacggcgaagcgcggttcggttggggttcgggttttcggtacgtttttaaagttatagttttcgttatcgtcgcggtcgttatttcgtattttttcgggttcgggtcgggggttatttcgtgatggacgcgttttcgtatttattttttcggtttagtatatagtaatacgtcgcgggttggtcgggcgtagtcgtagtttattcgcgtagagttaattattagaggacggaatttcgtttttcgtttttttcgatcgtttatttttttatttttcggttcggtttagtatgggttaggggagagcggttggttagggtttcgttcgtttaggtaatttgtcg

SEQ ID NO: 13830 - DNA, 1111 bp, Artificial Sequence
  chemically treated genomic DNA (Homo sapiens) CpG-island No: 13830
cgacaaattacctaaacgaacgaaaccctaaccaaccgctctcccctaacccatactaaaccgaaccgaaaaataaaaaaataaacgatcgaaaaaaacgaaaaacgaaattccgtcctctaataattaactctacgcgaataaactacgactacgcccgaccaacccgcgacgtattactatatactaaaccgaaaaaataaatacgaaaacgcgtccatcacgaaataacccccgacccgaacccgaaaaaatacgaaataacgaccgcgacgataacgaaaactataactttaaaaacgtaccgaaaacccgaaccccaaccgaaccgcgcttcgccgttacgcaccccaacgaaaccaaaccccacgctaaccgaacaaaaccgcctatcgccgaataaatacaccgaaatacgacgcgaaccgaacgcgcgtaaacgtaaaacgcgctatcaactcgaactctaaatccccgaccccgacctccgaactcccccgaccgaacctacgcgaaattaaaaatacgacgccctcgattccgcgtaaaatccccgtaaacgccgaaaacgaaaaacgccgccgaaccacgtaaccgtttatttacaaacactaccgaccccgacaaatcgcgaaaaaaacacaaaaacgcgaaacctccgaccgaaacgaaaaacgcgcaccaaaaactaaacgaatctacgaaaccaaatttaaaacgaaaatacgaaactaaaatcgccgcttcctcctccgcgtcgtccccataaattcgaactccataaaatccgaataaaactaaaaacgccctccgtcctctcgtaacgccgcgtttccctcgaaaaatcctaaaaacacttaaatccaaaaacgccgccctaaaaaccttccactataaaactaaacgccctcgaaatttctcgaaacgcgtcgtctaccccgacccgaatcgaaataaccgcaaccgaattcctccctaaccgcgtctcgacgcctccccgatatccttaccaaaaaaataaacgcgaaatcctacccgacgaaacgcgaaaacctctaccgcgaacgcctccccgaaactaacgcttaaaaacgaccccgacctttcgcca

SEQ ID NO: 13831 - DNA, 1111 bp, Artificial Sequence
  chemically treated genomic DNA (Homo sapiens) CpG-island No: 13831
cggtaagttgtttggacgggcgggattttaattagtcgtttttttttagtttatgttgggtcgggtcgaggggtgggggagtgggcggtcggggaaagcggggggcggagtttcgttttttgatgattggttttgcgcggatgggttgcggttgcgttcggttaattcgcggcgtgttgttatgtgttgagtcgaggggataggtgcgggggcgcgtttattacggggtagttttcggttcggattcggagggatgcggagtggcggtcgcggcggtggcggagattgtggttttaagagcgtgtcgggagttcgagttttagtcgggtcgcgtttcgtcgttgcgtattttagcggagttaagttttacgttggtcggatagggtcgtttgtcgtcgggtaagtgtatcggagtgcggcgcgggtcgggcgcgcgtgggcgtggggcgcgttgttagttcgggttttgggttttcggtttcggttttcggattttttcggtcgggtttgcgcggggttgggggtgcggcgttttcggtttcgcgtggggttttcgtgggcgtcggggacggggagcgtcgtcgggttacgtgatcgtttgtttataaatattgtcggtttcgatagatcgcggagggagtataagggcgcgggattttcggtcggggcgggagacgcgtattaggggttgggcgagtttgcggggttaggtttggggcgggggtgcggagttggaatcgtcgttttttttttcgcgtcgtttttatgggttcggattttatggggttcgggtggggttggggacgtttttcgttttttcgtgacgtcgcgtttttttcggagagttttggggatatttaggtttaggggcgtcgttttgggggttttttattgtgggattgggcgttttcgaaatttttcggagcgcgtcgtttgtttcgattcgggtcgaggtaatcgtagtcgagtttttttttggtcgcgtttcggcgttttttcggtgtttttgttaagggggtgggcgcgaggttttgttcgacggaacgcgggagtttttgtcgcgagcgttttttcggagttggcgtttaggggcggtttcgatttttcgtta

SEQ ID NO: 13832 - DNA, 1111 bp, Artificial Sequence
  chemically treated genomic DNA (Homo sapiens) CpG-island No: 13832
taacgaaaaatcgaaaccgcccctaaacgccaactccgaaaaaacgctcgcgacaaaaactcccgcgttccgtcgaacaaaacctcgcgcccacccccttaacaaaaacaccgaaaaaacgccgaaacgcgaccaaaaaaaaactcgactacgattacctcgacccgaatcgaaacaaacgacgcgctccgaaaaatttcgaaaacgcccaatcccacaataaaaaacccccaaaacgacgcccctaaacctaaatatccccaaaactctccgaaaaaaacgcgacgtcacgaaaaaacgaaaaacgtccccaaccccacccgaaccccataaaatccgaacccataaaaacgacgcgaaaaaaaaaacgacgattccaactccgcacccccgccccaaacctaaccccgcaaactcgcccaacccctaatacgcgtctcccgccccgaccgaaaatcccgcgcccttatactccctccgcgatctatcgaaaccgacaatatttataaacaaacgatcacgtaacccgacgacgctccccgtccccgacgcccacgaaaaccccacgcgaaaccgaaaacgccgcacccccaaccccgcgcaaacccgaccgaaaaaatccgaaaaccgaaaccgaaaacccaaaacccgaactaacaacgcgccccacgcccacgcgcgcccgacccgcgccgcactccgatacacttacccgacgacaaacgaccctatccgaccaacgtaaaacttaactccgctaaaatacgcaacgacgaaacgcgacccgactaaaactcgaactcccgacacgctcttaaaaccacaatctccgccaccgccgcgaccgccactccgcatccctccgaatccgaaccgaaaactaccccgtaataaacgcgcccccgcacctatcccctcgactcaacacataacaacacgccgcgaattaaccgaacgcaaccgcaacccatccgcgcaaaaccaatcatcaaaaaacgaaactccgccccccgctttccccgaccgcccactcccccacccctcgacccgacccaacataaactaaaaaaaaacgactaattaaaatcccgcccgtccaaacaacttaccg

SEQ ID NO: 13833 - DNA, 1122 bp, Artificial Sequence
  chemically treated genomic DNA (Homo sapiens) CpG-island No: 13833
ggtttttgcgattcgcgttcgtttttttcggttgggaagtatttgttagcggtttttatttgggtcgttttcgtcgcggggtatttttttgaagtagtcgttgagcgataggttgtggcggatggagttttgttagtcggttttgttgcgttggtagaaggggaagttatcggcgacgaattggtagatgtggttgagagtgagtttgcgttcgggcgcgttttgaatggttatggcgatgagcgtcgaatacgagtagggcggtcgtattatttttattaggttttcgcggttggttatggatagtagtttagtttttcgggtttcgcggcgcggcgggcgaggcgggcgcggcggggcgggttgcgcgaagggtcgttgagagtagtcgaaggtgtcggcggtaggcggtggttgtagaaagggttcggtcgcggttcggggggcggcggtcgcgcggagcgtttaggtacgcggcggcggttgcggcggcggcggagggcgggttttttacgtcgggttcgttgagttataggtaggggttgcggcggcggcggcggcgcggcgtagtcgttaagttcgtaaggtttttggttgtcggggggagttcggggcggcggcggtggcggcgggcgggggtaggtcgggttgcgaatatatttcgaagttgtcgtcgtagtagagggttatgtcggcggtcgtgggcgagttggtcggtcgcggcgaggggcgagcggggttggtttcgtcgttcgggcgagagtatttttttgggggttaattatatggttcgtttttattttcgttgggatcggtgtttcgggtcggggtcgggcgggtgttagcggagcgtttgttagtcggttttttataatcgagttcggcgcggttttttttgggtcggttcggagcggggcggtgtcgcgggtttgggttttttacgttttcgttacgttttatttgttcgcgcgtttaaattcggagttcgttcgtttcgtttttatcgtttttttgtcgggttcgggagcgtttggaggtcggcgtttttaggtttcgggtaaaaagtagtattttatttttagtttacgttttttaatattataataagtaaagttacgaata

SEQ ID NO: 13834 - DNA, 1122 bp, Artificial Sequence
  chemically treated genomic DNA (Homo sapiens) CpG-island No: 13834
tattcgtaactttacttattataatattaaaaaacgtaaactaaaaataaaatactactttttacccgaaacctaaaaacgccgacctccaaacgctcccgaacccgacaaaaaaacgataaaaacgaaacgaacgaactccgaatttaaacgcgcgaacaaataaaacgtaacgaaaacgtaaaaaacccaaacccgcgacaccgccccgctccgaaccgacccaaaaaaaaccgcgccgaactcgattataaaaaaccgactaacaaacgctccgctaacacccgcccgaccccgacccgaaacaccgatcccaacgaaaataaaaacgaaccatataattaacccccaaaaaaatactctcgcccgaacgacgaaaccaaccccgctcgcccctcgccgcgaccgaccaactcgcccacgaccgccgacataaccctctactacgacgacaacttcgaaatatattcgcaacccgacctacccccgcccgccgccaccgccgccgccccgaactccccccgacaaccaaaaaccttacgaacttaacgactacgccgcgccgccgccgccgccgcaacccctacctataactcaacgaacccgacgtaaaaaacccgccctccgccgccgccgcaaccgccgccgcgtacctaaacgctccgcgcgaccgccgccccccgaaccgcgaccgaaccctttctacaaccaccgcctaccgccgacaccttcgactactctcaacgacccttcgcgcaacccgccccgccgcgcccgcctcgcccgccgcgccgcgaaacccgaaaaactaaactactatccataaccaaccgcgaaaacctaataaaaataatacgaccgccctactcgtattcgacgctcatcgccataaccattcaaaacgcgcccgaacgcaaactcactctcaaccacatctaccaattcgtcgccgataacttccccttctaccaacgcaacaaaaccgactaacaaaactccatccgccacaacctatcgctcaacgactacttcaaaaaaataccccgcgacgaaaacgacccaaataaaaaccgctaacaaatacttcccaaccgaaaaaaacgaacgcgaatcgcaaaaacc

SEQ ID NO: 13835 - DNA, 1122 bp, Artificial Sequence
  chemically treated genomic DNA (Homo sapiens) CpG-island No: 13835
tattcgtggttttatttattatgatgttaagaaacgtgggttaggaatggggtgttgttttttgttcgaaatttggaggcgtcggtttttagacgttttcgggttcggtagaggggcggtaggggcggggcgggcgggtttcgggtttgggcgcgcgggtaggtggggcgtggcgggggcgtggagagtttaggttcgcggtatcgtttcgtttcgggtcggtttaggaggagtcgcgtcgggttcggttataagaggtcggttagtaggcgtttcgttagtattcgttcgatttcggttcggagtatcggttttagcgggggtgaaggcggattatgtggttggtttttaaagggatgttttcgttcgagcggcgagattagtttcgttcgtttttcgtcgcggtcggttagttcgtttacggtcgtcgatatggttttttattgcggcgataatttcggagtgtattcgtagttcggtttgttttcgttcgtcgttatcgtcgtcgtttcgggtttttttcggtagttaggggttttacgggtttggcgattacgtcgcgtcgtcgtcgtcgtcgtaatttttatttgtggtttaacgggttcggcgtgggaggttcgtttttcgtcgtcgtcgtagtcgtcgtcgcgtatttgggcgtttcgcgcggtcgtcgtttttcgggtcgcggtcgggttttttttgtagttatcgtttgtcgtcggtattttcggttgtttttagcggtttttcgcgtagttcgtttcgtcgcgttcgtttcgttcgtcgcgtcgcggggttcggggagttgggttgttgtttatggttagtcgcgaggatttgatgaagatggtgcggtcgttttattcgtattcggcgtttatcgttatggttatttagagcgcgttcgagcgtaaatttatttttagttatatttattagttcgtcgtcgatagtttttttttttattagcgtagtaaggtcggttggtagaattttattcgttataatttgtcgtttaacgattgttttaagaaggtgtttcgcgacgaggacgatttaggtgagggtcgttggtaggtgttttttagtcggggagggcggacgcgggtcgtaagggtt

SEQ ID NO: 13836 - DNA, 1122 bp, Artificial Sequence
  chemically treated genomic DNA (Homo sapiens) CpG-island No: 13836
aacccttacgacccgcgtccgccctccccgactaaaaaacacctaccaacgaccctcacctaaatcgtcctcgtcgcgaaacaccttcttaaaacaatcgttaaacgacaaattataacgaataaaattctaccaaccgaccttactacgctaataaaaaaaaaaactatcgacgacgaactaataaatataactaaaaataaatttacgctcgaacgcgctctaaataaccataacgataaacgccgaatacgaataaaacgaccgcaccatcttcatcaaatcctcgcgactaaccataaacaacaacccaactccccgaaccccgcgacgcgacgaacgaaacgaacgcgacgaaacgaactacgcgaaaaaccgctaaaaacaaccgaaaataccgacgacaaacgataactacaaaaaaaacccgaccgcgacccgaaaaacgacgaccgcgcgaaacgcccaaatacgcgacgacgactacgacgacgacgaaaaacgaacctcccacgccgaacccgttaaaccacaaataaaaattacgacgacgacgacgacgcgacgtaatcgccaaacccgtaaaacccctaactaccgaaaaaaacccgaaacgacgacgataacgacgaacgaaaacaaaccgaactacgaatacactccgaaattatcgccgcaataaaaaaccatatcgacgaccgtaaacgaactaaccgaccgcgacgaaaaacgaacgaaactaatctcgccgctcgaacgaaaacatccctttaaaaaccaaccacataatccgccttcacccccgctaaaaccgatactccgaaccgaaatcgaacgaatactaacgaaacgcctactaaccgacctcttataaccgaacccgacgcgactcctcctaaaccgacccgaaacgaaacgataccgcgaacctaaactctccacgcccccgccacgccccacctacccgcgcgcccaaacccgaaacccgcccgccccgcccctaccgcccctctaccgaacccgaaaacgtctaaaaaccgacgcctccaaatttcgaacaaaaaacaacaccccattcctaacccacgtttcttaacatcataataaataaaaccacgaata

SEQ ID NO: 13837 - DNA, 926 bp, Artificial Sequence
  chemically treated genomic DNA (Homo sapiens) CpG-island No: 13837
  unsure (610, 613)
gtttcgcgaagggttcgttgtttttttggagttattggagttatttgtttaaggtcgcgaaattatcggtgtcgtcggtaattagcgaggtttagcggggttgcgcggttttcggtttgtcggcgttcggcgtcgtttcggttttatttggtgtttcgtaatttgcgtaaaggttgggagatcgcgttttttttcgatttattattagtttaagttgggttcggaattaatattcgataagcgttggcggttagttgtagtcgggaaggagtatcggaaggaggcggtggcggggcggtcgagggcggagcgggtcggggcggggcgcggtttataaaagttacgcgcggcgcggtgggcgggtttgggcgcgagcggttgagtcggtaaaatttttggcgtcgtaaaggtcgcgggcgaggatcgggaggggagagggaggagataggaggaggagacgcgagtgcggggtggcgtcggtttattttcgtagcgtttttgttttttttaggttttggaaggcgggttcgggttgcggtagcggcggaatcggttgtatggagaggtgaagtcgggttgcggcggtttcggtcgggacggcggagggagncgnttgattcggcgagggtgggtaggtttgggcggtcggcgtcgttgcgaggtggaggggcggtttggtattttcggggcggggcggggttttcgagggtcgcggtcggtgcgtttttcgtaggttagtttttttcggggttttgtagaagcggtttttgcgtattcggggcggttgtgggaagggtgggggtcggtgtttgtagggtttttcgtggtcgttcgggagaggtgtttttcgtttaggttttttcggagatttgagggggtgcgcgttggcgtgtatggggtttgttttgtttttggtttggggatgt

SEQ ID NO: 13838 - DNA, 926 bp, Artificial Sequence
  chemically treated genomic DNA (Homo sapiens) CpG-island No: 13838
  unsure (314, 317)
acatccccaaaccaaaaacaaaacaaaccccatacacgccaacgcgcaccccctcaaatctccgaaaaaacctaaacgaaaaacacctctcccgaacgaccacgaaaaaccctacaaacaccgacccccacccttcccacaaccgccccgaatacgcaaaaaccgcttctacaaaaccccgaaaaaaactaacctacgaaaaacgcaccgaccgcgaccctcgaaaaccccgccccgccccgaaaataccaaaccgcccctccacctcgcaacgacgccgaccgcccaaacctacccaccctcgccgaatcaancgnctccctccgccgtcccgaccgaaaccgccgcaacccgacttcacctctccatacaaccgattccgccgctaccgcaacccgaacccgccttccaaaacctaaaaaaaacaaaaacgctacgaaaataaaccgacgccaccccgcactcgcgtctcctcctcctatctcctccctctcccctcccgatcctcgcccgcgacctttacgacgccaaaaattttaccgactcaaccgctcgcgcccaaacccgcccaccgcgccgcgcgtaacttttataaaccgcgccccgccccgacccgctccgccctcgaccgccccgccaccgcctccttccgatactccttcccgactacaactaaccgccaacgcttatcgaatattaattccgaacccaacttaaactaataataaatcgaaaaaaaacgcgatctcccaacctttacgcaaattacgaaacaccaaataaaaccgaaacgacgccgaacgccgacaaaccgaaaaccgcgcaaccccgctaaacctcgctaattaccgacgacaccgataatttcgcgaccttaaacaaataactccaataactccaaaaaaacaacgaacccttcgcgaaac

SEQ ID NO: 13839 - DNA, 926 bp, Artificial Sequence
  chemically treated genomic DNA (Homo sapiens) CpG-island No: 13839
  unsure (314, 317)
gtatttttaaattaaggatagaataggttttatgtacgttagcgcgtatttttttaagttttcgggggagtttgagcgaagagtatttttttcgagcggttacggagagttttgtaggtatcgatttttattttttttatagtcgtttcgggtacgtagaagtcgtttttgtaaggtttcgggggaggttgatttgcggaaaacgtatcgatcgcggttttcgggagtttcgtttcgtttcggggatgttaagtcgtttttttatttcgtagcggcgtcggtcgtttagatttgtttattttcgtcgggttagncgntttttttcgtcgtttcgatcgaggtcgtcgtagttcgattttatttttttatgtagtcgatttcgtcgttgtcgtagttcgggttcgttttttaaagtttgggggaggtaggagcgttgcggaggtggatcggcgttatttcgtattcgcgttttttttttttgtttttttttttttttttttcggttttcgttcgcggtttttgcggcgttagagattttgtcgatttagtcgttcgcgtttaggttcgtttatcgcgtcgcgcgtggtttttgtaggtcgcgtttcgtttcggttcgtttcgttttcggtcgtttcgttatcgttttttttcggtgttttttttcggttgtagttggtcgttagcgtttgtcgggtgttagtttcgggtttagtttgggttggtggtaggtcgggagagggcgcggttttttagtttttgcgtagattgcggggtattaggtggggtcgaggcgacgtcgaacgtcggtaggtcggaaatcgcgtagtttcgttggatttcgttgattgtcggcggtatcggtggtttcgcgattttgaataggtgattttaatagttttaggagggtagcgagtttttcgcggaat

SEQ ID NO: 13840 - DNA, 926 bp, Artificial Sequence
  chemically treated genomic DNA (Homo sapiens) CpG-island No: 13840
  unsure (610, 613)
attccgcgaaaaactcgctaccctcctaaaactattaaaatcacctattcaaaatcgcgaaaccaccgataccgccgacaatcaacgaaatccaacgaaactacgcgatttccgacctaccgacgttcgacgtcgcctcgaccccacctaataccccgcaatctacgcaaaaactaaaaaaccgcgccctctcccgacctaccaccaacccaaactaaacccgaaactaacacccgacaaacgctaacgaccaactacaaccgaaaaaaaacaccgaaaaaaaacgataacgaaacgaccgaaaacgaaacgaaccgaaacgaaacgcgacctacaaaaaccacgcgcgacgcgataaacgaacctaaacgcgaacgactaaatcgacaaaatctctaacgccgcaaaaaccgcgaacgaaaaccgaaaaaaaaaaaaaaaaaaacaaaaaaaaaaaacgcgaatacgaaataacgccgatccacctccgcaacgctcctacctcccccaaactttaaaaaacgaacccgaactacgacaacgacgaaatcgactacataaaaaaataaaatcgaactacgacgacctcgatcgaaacgacgaaaaaaancgnctaacccgacgaaaataaacaaatctaaacgaccgacgccgctacgaaataaaaaaacgacttaacatccccgaaacgaaacgaaactcccgaaaaccgcgatcgatacgttttccgcaaatcaacctcccccgaaaccttacaaaaacgacttctacgtacccgaaacgactataaaaaaaataaaaatcgatacctacaaaactctccgtaaccgctcgaaaaaaatactcttcgctcaaactcccccgaaaacttaaaaaaatacgcgctaacgtacataaaacctattctatccttaatttaaaaatac

SEQ ID NO: 13841 - DNA, 672 bp, Artificial Sequence
  chemically treated genomic DNA (Homo sapiens) CpG-island No: 13841
acgaggggcgtcggggagagggagttcggttagtcggtaggggcgttttttcggcggaagagggtcgtcgaagattttttttttatttggttgagttcgttttcggttgtaattcgtaatttcgggtcgatggtgttttttagcgtttggatgattcggttgaggtttattttttcgggtgggggtttcgcggttttcggaatagtaggtcggattgtagttttagtttttttttgatttttttagttttttttttcgcgatttttggattattttatattttatttttcggtatcgtcgttatttgcggttatttgttgcgttattttgatttcgcgttttttgtttttttttttttttttttataattcgttttttatttatcgttttacgatagtcggtgggaggcgggagaaggaagaagaggaagtagagttttttttacggcggttttttttttcgggcgtgatgttatgatcgtttttcgtcggcggtcgttatgttgttgtacggaaaacggtttaggtttttttttcggaaaggaattcgcgttttcgaatttaggtaggcggtcgttatgttttcgtacggtaaatagtttttcgtttttttttaggtgaggaaatttgagttggtcgggagtttgtttatagttgtttttaaattaagtat

SEQ ID NO: 13842 - DNA, 672 bp, Artificial Sequence
  chemically treated genomic DNA (Homo sapiens) CpG-island No: 13842
atacttaatttaaaaacaactataaacaaactcccgaccaactcaaatttcctcacctaaaaaaaaacgaaaaactatttaccgtacgaaaacataacgaccgcctacctaaattcgaaaacgcgaattcctttccgaaaaaaaaacctaaaccgttttccgtacaacaacataacgaccgccgacgaaaaacgatcataacatcacgcccgaaaaaaaaaaccgccgtaaaaaaaactctacttcctcttcttccttctcccgcctcccaccgactatcgtaaaacgataaataaaaaacgaattataaaaaaaaaaaaaaaaaaacaaaaaacgcgaaatcaaaataacgcaacaaataaccgcaaataacgacgataccgaaaaataaaatataaaataatccaaaaatcgcgaaaaaaaaaactaaaaaaatcaaaaaaaaactaaaactacaatccgacctactattccgaaaaccgcgaaacccccacccgaaaaaataaacctcaaccgaatcatccaaacgctaaaaaacaccatcgacccgaaattacgaattacaaccgaaaacgaactcaaccaaataaaaaaaaaatcttcgacgaccctcttccgccgaaaaaacgcccctaccgactaaccgaactccctctccccgacgcccctcgt

SEQ ID NO: 13843 - DNA, 672 bp, Artificial Sequence
  chemically treated genomic DNA (Homo sapiens) CpG-island No: 13843
atgtttaatttggaagtagttgtaagtagattttcggttagtttaagtttttttatttgggaagaggcgggaggttgtttatcgtacggaagtatagcggtcgtttgtttgagttcgggagcgcgggttttttttcgggaaagaagtttaggtcgtttttcgtatagtagtatggcggtcgtcgacgggaggcggttatagtattacgttcgggggaagaggtcgtcgtaaaggaagttttgttttttttttttttttttttcgttttttatcggttgtcgtaaaacggtgaatggagagcgagttgtgggggggaaaaagggaggatagggggcgcggagttagagtggcgtagtaagtggtcgtaggtggcgacggtgtcggggggtggggtgtgaggtaatttaggggtcgcggaagaggaggttgagagggttaaaagaaaattaaagttgtagttcggtttattgtttcgggggtcgcggagtttttattcggggagatggattttaatcggattatttaggcgttgaagggtattatcgattcgaagttgcggattgtagtcgagaacgagtttaattaggtgaggagagggttttcggcgattttttttcgtcgaaggggcgtttttgtcggttggtcgggtttttttttttcggcgtttttcgt

SEQ ID NO: 13844 - DNA, 672 bp, Artificial Sequence
  chemically treated genomic DNA (Homo sapiens) CpG-island No: 13844
acgaaaaacgccgaaaaaaaaaaacccgaccaaccgacaaaaacgccccttcgacgaaaaaaaatcgccgaaaaccctctcctcacctaattaaactcgttctcgactacaatccgcaacttcgaatcgataatacccttcaacgcctaaataatccgattaaaatccatctccccgaataaaaactccgcgacccccgaaacaataaaccgaactacaactttaattttcttttaaccctctcaacctcctcttccgcgacccctaaattacctcacaccccaccccccgacaccgtcgccacctacgaccacttactacgccactctaactccgcgccccctatcctccctttttcccccccacaactcgctctccattcaccgttttacgacaaccgataaaaaacgaaaaaaaaaaaaaaaaaaaacaaaacttcctttacgacgacctcttcccccgaacgtaatactataaccgcctcccgtcgacgaccgccatactactatacgaaaaacgacctaaacttctttcccgaaaaaaaacccgcgctcccgaactcaaacaaacgaccgctatacttccgtacgataaacaacctcccgcctcttcccaaataaaaaaacttaaactaaccgaaaatctacttacaactacttccaaattaaacat

SEQ ID NO: 13845 - DNA, 619 bp, Artificial Sequence
  chemically treated genomic DNA (Homo sapiens) CpG-island No: 13845
  unsure (379, 387, 481, 519, 577, 580)
tttcgttttttttttcgcgtcgcgtcggttttgtgcggcgtgttgtgtttcgttttttttcgttttcgttttcgtttttttttcgtcgtcgttttcgttcggtcgtcgtgttttttttcgtttttcggcgcgtcggcgttcgtcgggcgtttttcgtttggcgcgttttttcggcgtgttttggggcgttcgcgtcgtttcgtttcggttcgcgtttcgtcgtcgttttcgggtgtcgttgtttttcgttttcggcggttcgtttttgtttcgtttttttttttgcggcggttttttggcgtgtttttttcgtttgttttcggttcgtcgttgcggcggtttcgttttcgtgcgtcgtagcgcgcgcgcgtcgcgcggntgtgtttnttggtcgcgcgcgcggttttttttcgttgtttcgttcgcgcgtgttgtgttcgtcgcggttgtcgcgacgcggtcgtttgtttcgttcggtttncgcgcgcgttcgttcgcgtcgcgttcgtgttacgtttncgtagttcgtttgttttcgtacgtttcggcgtcgcgtatcgcgcgtcgcggttgcggnttncgcgttttaagtgagacgatcgaaataaatatatataag

SEQ ID NO: 13846 - DNA, 619 bp, Artificial Sequence
  chemically treated genomic DNA (Homo sapiens) CpG-island No: 13846
  unsure (40, 43, 101, 139, 233, 241)
cttatatatatttatttcgatcgtctcacttaaaacgcgnaanccgcaaccgcgacgcgcgatacgcgacgccgaaacgtacgaaaacaaacgaactacgnaaacgtaacacgaacgcgacgcgaacgaacgcgcgcgnaaaccgaacgaaacaaacgaccgcgtcgcgacaaccgcgacgaacacaacacgcgcgaacgaaacaacgaaaaaaaaccgcgcgcgcgaccaanaaacacanccgcgcgacgcgcgcgcgctacgacgcacgaaaacgaaaccgccgcaacgacgaaccgaaaacaaacgaaaaaaacacgccaaaaaaccgccgcaaaaaaaaaaacgaaacaaaaacgaaccgccgaaaacgaaaaacaacgacacccgaaaacgacgacgaaacgcgaaccgaaacgaaacgacgcgaacgccccaaaacacgccgaaaaaacgcgccaaacgaaaaacgcccgacgaacgccgacgcgccgaaaaacgaaaaaaaacacgacgaccgaacgaaaacgacgacgaaaaaaaaacgaaaacgaaaacgaaaaaaaacgaaacacaacacgccgcacaaaaccgacgcgacgcgaaaaaaaaaacgaaa

SEQ ID NO: 13847 - DNA, 619 bp, Artificial Sequence
  chemically treated genomic DNA (Homo sapiens) CpG-island No: 13847
  unsure (40, 43, 101, 139, 233, 241)
tttatgtgtgtttgtttcggtcgttttatttggagcgcgngantcgtagtcgcggcgcgcgatacgcggcgtcgggacgtgcgggagtaggcgagttgcgngagcgtagtacggacgcggcgcggacgggcgcgcgcgnaggtcggacggagtagacgatcgcgtcgcgatagtcgcggcgaatatagtacgcgcgaacgaggtagcgaggaagaatcgcgcgcgcggttaanagatatantcgcgcggcgcgcgcgcgttacggcgtacggggacgggatcgtcgtagcggcgagtcgaaggtaagcgaaaggaatacgttaagaggtcgtcgtagaggggagggcggggtagaggcgggtcgtcggggacgaggggtaacggtattcggaggcggcgacgggacgcgggtcgaggcgaggcggcgcgggcgttttaaagtacgtcgaaggagcgcgttaggcggaaaacgttcggcggacgtcggcgcgtcggggggcgggggggagtacggcggtcgggcgagggcggcgacgggggggaggcggaggcgggggcgaggggaggcggggtataatacgtcgtataggatcggcgcggcgcgggaaaaaggacgagg

SEQ ID NO: 13848 - DNA, 619 bp, Artificial Sequence
  chemically treated genomic DNA (Homo sapiens) CpG-island No: 13848
  unsure (379, 387, 481, 519, 577, 580)
cctcgtcctttttcccgcgccgcgccgatcctatacgacgtattataccccgcctcccctcgcccccgcctccgcctcccccccgtcgccgccctcgcccgaccgccgtactcccccccgccccccgacgcgccgacgtccgccgaacgttttccgcctaacgcgctccttcgacgtactttaaaacgcccgcgccgcctcgcctcgacccgcgtcccgtcgccgcctccgaataccgttacccctcgtccccgacgacccgcctctaccccgccctcccctctacgacgacctcttaacgtattcctttcgcttaccttcgactcgccgctacgacgatcccgtccccgtacgccgtaacgcgcgcgcgccgcgcgantatatctnttaaccgcgcgcgcgattcttcctcgctacctcgttcgcgcgtactatattcgccgcgactatcgcgacgcgatcgtctactccgtccgacctncgcgcgcgcccgtccgcgccgcgtccgtactacgctcncgcaactcgcctactcccgcacgtcccgacgccgcgtatcgcgcgccgcgactacgantcncgcgctccaaataaaacgaccgaaacaaacacacataaa

SEQ ID NO: 13849 - DNA, 537 bp, Artificial Sequence
  chemically treated genomic DNA (Homo sapiens) CpG-island No: 13849
  unsure (160, 440)
ttcggtttcgttttcggttttggggttttcggttgttttttggtcgttgtcgtcgcgcgggttttttttggcggggtcgttcgtacgtttgtttttgcgttttcgtttcgtttcgcgtttttcgcgtttttcgttgtttcgcgcgtcgtcgtcggtgttnttgtgcgtgggttgttttttcgtttttttttcgttttttttttcggttcgttttcgttgttgtttcgtttttttcgtttttgtttcgttgtttttttttttggtcgtcggtcgggttcgtgggttttcggttcgtcgttcgttttttcgttttcgcgtacgtcgtattttcgtgcgcgcgtcgttgttgtttcgcgtgttttttttcgttttgtcgtgttttgttttttgttttcgttcgttgcgttttcgttcgtttattttttttttggttattcgtnttcgttcgcgttcgttttggattatttcgtattcgcgtcgtgtcgcgtttttcgcgttcgttacgatcgacgttggcggataatcgtaaaaacgaaa

SEQ ID NO: 13850 - DNA, 537 bp, Artificial Sequence
  chemically treated genomic DNA (Homo sapiens) CpG-island No: 13850
  unsure (98, 378)
tttcgtttttacgattatccgccaacgtcgatcgtaacgaacgcgaaaaacgcgacacgacgcgaatacgaaataatccaaaacgaacgcgaacgaanacgaataaccaaaaaaaaaataaacgaacgaaaacgcaacgaacgaaaacaaaaaacaaaacacgacaaaacgaaaaaaaacacgcgaaacaacaacgacgcgcgcacgaaaatacgacgtacgcgaaaacgaaaaaacgaacgacgaaccgaaaacccacgaacccgaccgacgaccaaaaaaaaaaacaacgaaacaaaaacgaaaaaaacgaaacaacaacgaaaacgaaccgaaaaaaaaaacgaaaaaaaaacgaaaaaacaacccacgcacaanaacaccgacgacgacgcgcgaaacaacgaaaaacgcgaaaaacgcgaaacgaaacgaaaacgcaaaaacaaacgtacgaacgaccccgccaaaaaaaacccgcgcgacgacaacgaccaaaaaacaaccgaaaaccccaaaaccgaaaacgaaaccgaa

SEQ ID NO: 13851 - DNA, 537 bp, Artificial Sequence
  chemically treated genomic DNA (Homo sapiens) CpG-island No: 13851
  unsure (98, 378)
tttcgtttttacgattgttcgttagcgtcggtcgtggcgaacgcgggaggcgcgatacggcgcgggtacgggatgatttagagcgggcgcgggcgagnacgggtggttaggagagaggtgggcgagcggaaacgtaacggacgaagatagaggatagaatacggtagggcgggggggagtacgcggaatagtagcggcgcgcgtacgaggatgcgacgtgcgcgagggcgggggggcgggcgacgagtcgggagtttacggattcgatcggcggttaaggaggagggtagcggggtaggggcgggaaggacggagtagtaacgagagcgagtcgggagggggggcgaaggggaggcgagggggtagtttacgtatagngatatcgacggcgacgcgcggggtagcgggagacgcggagggcgcggggcggggcgagagcgtaggggtaaacgtgcggacggtttcgttagggagagttcgcgcgacgatagcgattaagagataatcggagattttagggtcggaggcgggatcgaa

SEQ ID NO: 13852 - DNA, 537 bp, Artificial Sequence
  chemically treated genomic DNA (Homo sapiens) CpG-island No: 13852
  unsure (160, 440)
ttcgatcccgcctccgaccctaaaatctccgattatctcttaatcgctatcgtcgcgcgaactctccctaacgaaaccgtccgcacgtttacccctacgctctcgccccgccccgcgccctccgcgtctcccgctaccccgcgcgtcgccgtcgatatcnctatacgtaaactaccccctcgcctccccttcgccccccctcccgactcgctctcgttactactccgtccttcccgcccctaccccgctaccctcctccttaaccgccgatcgaatccgtaaactcccgactcgtcgcccgcccccccgccctcgcgcacgtcgcatcctcgtacgcgcgccgctactattccgcgtactcccccccgccctaccgtattctatcctctatcttcgtccgttacgtttccgctcgcccacctctctcctaaccacccgtnctcgcccgcgcccgctctaaatcatcccgtacccgcgccgtatcgcgcctcccgcgttcgccacgaccgacgctaacgaacaatcgtaaaaacgaaa

SEQ ID NO: 13853 - DNA, 1291 bp, Artificial Sequence
  chemically treated genomic DNA (Homo sapiens) CpG-island No: 13853
  unsure (685, 688, 1146)
ggagtcggggaatttggatttttatatgttcgtcgagaattttttagttttcgtttataaagttttttcgtatggtacgtttattttttcgatttttagttgcgaggtcgagacgtttgttgttgtggttttcgacgaagttcggagatgttttttttttgcgaaagttgggttcggtagcgtcggtcgcggggtcgggcgttttcgggtttggcggtcggcgagggagcgtcgggcgcggggcggggcggtttttaggcgcgcgttgtttattcgggttgtaagagtcgcgggttcgcgagtttcggtttggagtaagaggcgcgcgcgggtcgtgggggttgggtcgaggcggagcgcgaggcggcggcggtggcgggaggcgtcgcgggacgaggtagcggttttcgtttttcgaagttcgttttcgcgcggggttggggagtttagggcggggaagtcgcggggtcgcgttacgtttttcgttcgttttagagcgggttttataggcggttttagtttgggggtttttgtgtttgcgattcgggagcggcgagagagtagattttttttttagagggcgttgtgagtgtgtcgttagggtcgggtcgcgagttttttgttttttttgttagcggtttttgaggcggcggcgaagaagaaggagtgggaggaggcggcggtngtngcggcgtattcgtttttagtatatgtcggtttcgggtggggggtcgtttttaggtcgcgttttcggttatcgtcgttgagtttcgtcggtgttcgtacgtcgtttcgtcgtttcgtcgtttcgaggtttcgttttttttttaaattttgtaaagtcggttcgcgtttttatcgttttcggtcgtgtttcggtttcgaggtttgtttcgtagtcgtagcggtttcgcgaggaggaggagtcgtcgtcgtagtattaaagagatcgaattttcgcggtttgggggggagttatgttttgcggtttgtattgtttttagaatacgagaaggattttatttttttgaagagagttttaggttatcgataacggtgtcgtattggcgtaatttgggtgagttacgttcgtcgtgtttcgtttttcgttttcgggaggttatcggtttttgttcggtttttagnttcgcgtcgtttcgtttttcgtttgtattttttcgtttcgtgtttgttattttcgtttttcgttttcgttttttcgttgttttttttatatttttttttttgatttttcgttttttcgatttttgcgtttcgttgtttttttttt

SEQ ID NO: 13854 - DNA, 1291 bp, Artificial Sequence
  chemically treated genomic DNA (Homo sapiens) CpG-island No: 13854
  unsure (146, 604, 607)
aaaaaaaaaacaacgaaacgcaaaaatcgaaaaaacgaaaaatcaaaaaaaaaaatataaaaaaaacaacgaaaaaacgaaaacgaaaaacgaaaataacaaacacgaaacgaaaaaatacaaacgaaaaacgaaacgacgcgaanctaaaaaccgaacaaaaaccgataacctcccgaaaacgaaaaacgaaacacgacgaacgtaactcacccaaattacgccaatacgacaccgttatcgataacctaaaactctcttcaaaaaaataaaatccttctcgtattctaaaaacaatacaaaccgcaaaacataactcccccccaaaccgcgaaaattcgatctctttaatactacgacgacgactcctcctcctcgcgaaaccgctacgactacgaaacaaacctcgaaaccgaaacacgaccgaaaacgataaaaacgcgaaccgactttacaaaatttaaaaaaaaaacgaaacctcgaaacgacgaaacgacgaaacgacgtacgaacaccgacgaaactcaacgacgataaccgaaaacgcgacctaaaaacgaccccccacccgaaaccgacatatactaaaaacgaatacgccgcnacnaccgccgcctcctcccactccttcttcttcgccgccgcctcaaaaaccgctaacaaaaaaaacaaaaaactcgcgacccgaccctaacgacacactcacaacgccctctaaaaaaaaaatctactctctcgccgctcccgaatcgcaaacacaaaaacccccaaactaaaaccgcctataaaacccgctctaaaacgaacgaaaaacgtaacgcgaccccgcgacttccccgccctaaactccccaaccccgcgcgaaaacgaacttcgaaaaacgaaaaccgctacctcgtcccgcgacgcctcccgccaccgccgccgcctcgcgctccgcctcgacccaacccccacgacccgcgcgcgcctcttactccaaaccgaaactcgcgaacccgcgactcttacaacccgaataaacaacgcgcgcctaaaaaccgccccgccccgcgcccgacgctccctcgccgaccgccaaacccgaaaacgcccgaccccgcgaccgacgctaccgaacccaactttcgcaaaaaaaaaacatctccgaacttcgtcgaaaaccacaacaacaaacgtctcgacctcgcaactaaaaatcgaaaaaataaacgtaccatacgaaaaaactttataaacgaaaactaaaaaattctcgacgaacatataaaaatccaaattccccgactcc

SEQ ID NO: 13855 - DNA, 1291 bp, Artificial Sequence
  chemically treated genomic DNA (Homo sapiens) CpG-island No: 13855
  unsure (146, 604, 607)
gggaaagagataacgggacgtaaaagtcgggggggcgagggattagggggggaggtgtagggggggtaacggggggacgggggcggggggcggggatagtaggtacggggcgggggggtgtagacgggaagcggggcggcgcgganttagggatcggatagaggtcgatggtttttcgggggcggggaacggggtacggcgaacgtggtttatttaggttgcgttaatgcggtatcgttatcggtgatttagaattttttttagggaaatgggatttttttcgtgttttggggatagtatagatcgtaaagtatgatttttttttaggtcgcgggaattcggtttttttgatgttgcggcggcggtttttttttttcgcggggtcgttgcggttgcgaggtaagtttcggagtcgaggtacggtcgagggcggtggggacgcgggtcgattttgtaaagtttgggaggaggacgaggtttcggggcggcggggcggcggggcggcgtgcgggtatcggcggggtttagcggcggtggtcgggagcgcggtttgggggcggttttttattcggggtcggtatgtgttgagggcgagtgcgtcgtngtngtcgtcgtttttttttattttttttttttcgtcgtcgttttaggagtcgttgataggggaagtaggaggttcgcggttcggttttggcggtatatttatagcgttttttgaggaggaggtttgttttttcgtcgttttcgagtcgtagatataaaagtttttagattggagtcgtttgtaaaattcgttttggggcgggcgagggacgtggcgcggtttcgcggttttttcgttttgagttttttagtttcgcgcggggacgggtttcggggggcgggggtcgttgtttcgtttcgcggcgtttttcgttatcgtcgtcgtttcgcgtttcgtttcggtttagtttttacggttcgcgcgcgttttttgttttaagtcggggttcgcgggttcgcggtttttgtagttcgggtgggtagcgcgcgtttaggggtcgtttcgtttcgcgttcggcgttttttcgtcgatcgttaggttcgagaacgttcgatttcgcggtcgacgttatcgggtttagttttcgtaaggaaagggtattttcgaatttcgtcggaggttatagtagtaggcgtttcggtttcgtagttagggatcggaaagatgaacgtattatgcgaggaaattttgtaagcgggagttggagagttttcggcgggtatgtggggatttagatttttcgatttt

SEQ ID NO: 13856 - DNA, 1291 bp, Artificial Sequence
  chemically treated genomic DNA (Homo sapiens) CpG-island No: 13856
  unsure (685, 688, 1146)
aaaatcgaaaaatctaaatccccacatacccgccgaaaactctccaactcccgcttacaaaatttcctcgcataatacgttcatctttccgatccctaactacgaaaccgaaacgcctactactataacctccgacgaaattcgaaaataccctttccttacgaaaactaaacccgataacgtcgaccgcgaaatcgaacgttctcgaacctaacgatcgacgaaaaaacgccgaacgcgaaacgaaacgacccctaaacgcgcgctacccacccgaactacaaaaaccgcgaacccgcgaaccccgacttaaaacaaaaaacgcgcgcgaaccgtaaaaactaaaccgaaacgaaacgcgaaacgacgacgataacgaaaaacgccgcgaaacgaaacaacgacccccgccccccgaaacccgtccccgcgcgaaactaaaaaactcaaaacgaaaaaaccgcgaaaccgcgccacgtccctcgcccgccccaaaacgaattttacaaacgactccaatctaaaaacttttatatctacgactcgaaaacgacgaaaaaacaaacctcctcctcaaaaaacgctataaatataccgccaaaaccgaaccgcgaacctcctacttcccctatcaacgactcctaaaacgacgacgaaaaaaaaaaaataaaaaaaaacgacgacnacnacgacgcactcgccctcaacacataccgaccccgaataaaaaaccgcccccaaaccgcgctcccgaccaccgccgctaaaccccgccgatacccgcacgccgccccgccgccccgccgccccgaaacctcgtcctcctcccaaactttacaaaatcgacccgcgtccccaccgccctcgaccgtacctcgactccgaaacttacctcgcaaccgcaacgaccccgcgaaaaaaaaaaaccgccgccgcaacatcaaaaaaaccgaattcccgcgacctaaaaaaaaatcatactttacgatctatactatccccaaaacacgaaaaaaatcccatttccctaaaaaaaattctaaatcaccgataacgataccgcattaacgcaacctaaataaaccacgttcgccgtaccccgttccccgcccccgaaaaaccatcgacctctatccgatccctaantccgcgccgccccgcttcccgtctacacccccccgccccgtacctactatccccgccccccgcccccgtccccccgttaccccccctacacctccccccctaatccctcgcccccccgacttttacgtcccgttatctctttccc

SEQ ID NO: 13857 - DNA, 641 bp, Artificial Sequence
  chemically treated genomic DNA (Homo sapiens) CpG-island No: 13857
tttatacgcgggttaggtatagcgcgattacgtttgttcggttttttttaggtagacggttttttttggttttgaggtcgtcggtgtcgtcgttgtcggtttcgattttttcgggtgtaacgtttttagattatgtttttcgtcgggtacgtagggggcgtacggcgttcgtcgtttagttcggagttcgtcgttcggttttcggttttcggttcgattcggtttttttttttcggtagcgttcgattcggggtttattatggtagtcgttttgttttcggggtttaaatttcgattttttggtttcgcggtcggggattaagcgtggtcggcgggttagaggttaaggaaagtcgtagagagcgcgtgcgcgatacggcgttgggtatgcgtattgttttagtttaagggcgggttatcgggagcgttttagcggttcggggcggggtcggaggcggggtttgattgagtttgcgtcgggttttggataattgggggcgggtttgggagggtaaggggcgttatcgggagttttaattgttcgcgtgtttattttagtgcgttggagtagttaagtatatcggttagacgtggggcgatttttgtttttgattttgttaaaatatttgggaatgtaatat

SEQ ID NO: 13858 - DNA, 641 bp, Artificial Sequence
  chemically treated genomic DNA (Homo sapiens) CpG-island No: 13858
atattacattcccaaatattttaacaaaatcaaaaacaaaaatcgccccacgtctaaccgatatacttaactactccaacgcactaaaataaacacgcgaacaattaaaactcccgataacgccccttaccctcccaaacccgcccccaattatccaaaacccgacgcaaactcaatcaaaccccgcctccgaccccgccccgaaccgctaaaacgctcccgataacccgcccttaaactaaaacaatacgcatacccaacgccgtatcgcgcacgcgctctctacgactttccttaacctctaacccgccgaccacgcttaatccccgaccgcgaaaccaaaaaatcgaaatttaaaccccgaaaacaaaacgactaccataataaaccccgaatcgaacgctaccgaaaaaaaaaaaccgaatcgaaccgaaaaccgaaaaccgaacgacgaactccgaactaaacgacgaacgccgtacgccccctacgtacccgacgaaaaacataatctaaaaacgttacacccgaaaaaatcgaaaccgacaacgacgacaccgacgacctcaaaaccaaaaaaaaccgtctacctaaaaaaaaccgaacaaacgtaatcgcgctatacctaacccgcgtataaa

SEQ ID NO: 13859 - DNA, 641 bp, Artificial Sequence
  chemically treated genomic DNA (Homo sapiens) CpG-island No: 13859
atgttgtatttttaaatattttggtaaaattaagggtagaaatcgttttacgtttgatcgatgtgtttagttgttttagcgtattggggtaagtacgcgggtaattgagattttcggtaacgttttttgtttttttaagttcgtttttagttatttagagttcgacgtaggtttagttaaatttcgttttcgatttcgtttcgagtcgttaagacgttttcggtggttcgtttttagattgaggtaatgcgtatgtttagcgtcgtatcgcgtacgcgttttttgcggttttttttgatttttgattcgtcgattacgtttgattttcggtcgcggggttaggaagtcggagtttgagtttcggaggtagagcggttgttatggtgagtttcgagtcgggcgttatcggggaggggaagtcgagtcgggtcgggggtcgggggtcgggcggcgagtttcgggttgggcggcgggcgtcgtgcgttttttgcgtgttcggcgggaagtatggtttgggggcgttgtattcgggggaatcgaggtcggtagcggcggtatcggcggttttagggttagggaaaatcgtttgtttggaagaggtcgggtaaacgtggtcgcgttgtgtttagttcgcgtgtgag

SEQ ID NO: 13860 - DNA, 641 bp, Artificial Sequence
  chemically treated genomic DNA (Homo sapiens) CpG-island No: 13860
ctcacacgcgaactaaacacaacgcgaccacgtttacccgacctcttccaaacaaacgattttccctaaccctaaaaccgccgataccgccgctaccgacctcgattcccccgaatacaacgcccccaaaccatacttcccgccgaacacgcaaaaaacgcacgacgcccgccgcccaacccgaaactcgccgcccgacccccgacccccgacccgactcgacttcccctccccgataacgcccgactcgaaactcaccataacaaccgctctacctccgaaactcaaactccgacttcctaaccccgcgaccgaaaatcaaacgtaatcgacgaatcaaaaatcaaaaaaaaccgcaaaaaacgcgtacgcgatacgacgctaaacatacgcattacctcaatctaaaaacgaaccaccgaaaacgtcttaacgactcgaaacgaaatcgaaaacgaaatttaactaaacctacgtcgaactctaaataactaaaaacgaacttaaaaaaacaaaaaacgttaccgaaaatctcaattacccgcgtacttaccccaatacgctaaaacaactaaacacatcgatcaaacgtaaaacgatttctacccttaattttaccaaaatatttaaaaatacaacat

SEQ ID NO: 13861 - DNA, 621 bp, Artificial Sequence
  chemically treated genomic DNA (Homo sapiens) CpG-island No: 13861
tcggtttacgagtttttcggtggggaaggggcgtgtttttacgcggtttcgtttcggttaatggggagaggtttcgtttttgtcgcggcgggttcgtttttcgggatttttaaggcgcgatttgtttttagcgagtcgatttcggagttcgagttcggggcgggtggacgcggattcgaacgtagttgtttcgggatttaggattttttcgggttcgattcgttaggaaagattgaggtcgcggtttgtttcgttcggttttttgcgtcgtcgtcgtttttcggtgagtttttgtggggttggggggttgcgggcggggaagggggcgttacggttaggttgtgtatacgcgcggggatcgtcgtcgcgcgtatatacgtattttcgggcgggatcgcggttttagttttatacggttatttgggtcgttcggcgggtaggttttgtacgttttttttttcgtcgttttggggcgtcgatagtttcgcggtcggttagggtgcgcgtttgagtgtgcggtgagttcgcgaggttgtaagtagataaaataaatatttcgttttatgttttttttttttacggttgggttttcggtatgattagttttatgaattaaatttt

SEQ ID NO: 13862 - DNA, 621 bp, Artificial Sequence
  chemically treated genomic DNA (Homo sapiens) CpG-island No: 13862
aaaatttaattcataaaactaatcataccgaaaacccaaccgtaaaaaaaaaaaacataaaacgaaatatttattttatctacttacaacctcgcgaactcaccgcacactcaaacgcgcaccctaaccgaccgcgaaactatcgacgccccaaaacgacgaaaaaaaaaacgtacaaaacctacccgccgaacgacccaaataaccgtataaaactaaaaccgcgatcccgcccgaaaatacgtatatacgcgcgacgacgatccccgcgcgtatacacaacctaaccgtaacgcccccttccccgcccgcaaccccccaaccccacaaaaactcaccgaaaaacgacgacgacgcaaaaaaccgaacgaaacaaaccgcgacctcaatctttcctaacgaatcgaacccgaaaaaatcctaaatcccgaaacaactacgttcgaatccgcgtccacccgccccgaactcgaactccgaaatcgactcgctaaaaacaaatcgcgccttaaaaatcccgaaaaacgaacccgccgcgacaaaaacgaaacctctccccattaaccgaaacgaaaccgcgtaaaaacacgccccttccccaccgaaaaactcgtaaaccga

SEQ ID NO: 13863 - DNA, 621 bp, Artificial Sequence
  chemically treated genomic DNA (Homo sapiens) CpG-island No: 13863
ggggtttgatttataaaattggttatgtcggaggtttagtcgtgggaggaggaagtatgggacggggtgtttattttgtttgtttgtagtttcgcgggtttatcgtatatttaggcgcgtattttggtcggtcgcggggttgtcggcgttttaggacggcgggggagggagcgtatagggtttgttcgtcgggcggtttaggtgatcgtgtggggttggggtcgcggtttcgttcgaaagtgcgtgtgtgcgcgcggcggcggttttcgcgcgtgtgtatagtttggtcgtggcgttttttttttcgttcgtagttttttagttttatagaaatttatcgggaggcggcggcggcgtagggagtcgggcggggtaggtcgcggttttagttttttttggcgggtcgggttcgagggggttttgggtttcgaagtaattgcgttcgagttcgcgtttattcgtttcgggttcgggtttcggagtcggttcgttggaggtaggtcgcgttttaagagtttcggggggcgggttcgtcgcggtaggggcggggtttttttttattggtcggggcggagtcgcgtggagatacgttttttttttatcgaggggttcgtgggtcgg

SEQ ID NO: 13864 - DNA, 621 bp, Artificial Sequence
  chemically treated genomic DNA (Homo sapiens) CpG-island No: 13864
ccgacccacgaacccctcgataaaaaaaaaacgtatctccacgcgactccgccccgaccaataaaaaaaaaccccgcccctaccgcgacgaacccgccccccgaaactcttaaaacgcgacctacctccaacgaaccgactccgaaacccgaacccgaaacgaataaacgcgaactcgaacgcaattacttcgaaacccaaaaccccctcgaacccgacccgccaaaaaaaactaaaaccgcgacctaccccgcccgactccctacgccgccgccgcctcccgataaatttctataaaactaaaaaactacgaacgaaaaaaaaaacgccacgaccaaactatacacacgcgcgaaaaccgccgccgcgcgcacacacgcactttcgaacgaaaccgcgaccccaaccccacacgatcacctaaaccgcccgacgaacaaaccctatacgctccctcccccgccgtcctaaaacgccgacaaccccgcgaccgaccaaaatacgcgcctaaatatacgataaacccgcgaaactacaaacaaacaaaataaacaccccgtcccatacttcctcctcccacgactaaacctccgacataaccaattttataaatcaaacccc

SEQ ID NO: 13865 - DNA, 547 bp, Artificial Sequence
  chemically treated genomic DNA (Homo sapiens) CpG-island No: 13865
tagcgttcggttttcgggtcggatttatttcgcggcggggcggtcgagtttcggtgtgtcggaatttggatattttgaagcggtttatggcgacgggtacggcggcggacgcgttttcgaggatttcgggcgtcgggttttaggtgtacgttgagtaatcgcgattttcgttgtttcggttttattcgggatttaatgtcgcggttacgttttcggcgcgttttattgttaatcgtagtcgttttcggttttttgggttacgtttttaagttttttttttttcgcgcgcgtattatcggtttcgtttttcggttaatttaggtacggtcgtttcgcgaggttacgttttgatatcgaggggacggattggcgcgggtgggaggttacgtggggcgtagttgttagtttacgttttttgcggtgtttgtttgcgtggggtttcggttgtagtattcgcgattttgtgtgtaggatttgttgtggagtttttgcggtgtatttagtacgttttttagtattatttatttttttttgtagagaggggaga

SEQ ID NO: 13866 - DNA, 547 bp, Artificial Sequence
  chemically treated genomic DNA (Homo sapiens) CpG-island No: 13866
tctcccctctctacaaaaaaaaataaataatactaaaaaacgtactaaatacaccgcaaaaactccacaacaaatcctacacacaaaatcgcgaatactacaaccgaaaccccacgcaaacaaacaccgcaaaaaacgtaaactaacaactacgccccacgtaacctcccacccgcgccaatccgtcccctcgatatcaaaacgtaacctcgcgaaacgaccgtacctaaattaaccgaaaaacgaaaccgataatacgcgcgcgaaaaaaaaaaaacttaaaaacgtaacccaaaaaaccgaaaacgactacgattaacaataaaacgcgccgaaaacgtaaccgcgacattaaatcccgaataaaaccgaaacaacgaaaatcgcgattactcaacgtacacctaaaacccgacgcccgaaatcctcgaaaacgcgtccgccgccgtacccgtcgccataaaccgcttcaaaatatccaaattccgacacaccgaaactcgaccgccccgccgcgaaataaatccgacccgaaaaccgaacgcta

SEQ ID NO: 13867 - DNA, 547 bp, Artificial Sequence
  chemically treated genomic DNA (Homo sapiens) CpG-island No: 13867
ttttttttttttataggaagaggtagatagtgttggaaggcgtgttaggtatatcgtaaagattttatagtaaattttgtatataaaatcgcgaatgttgtagtcgagattttacgtaagtaagtatcgtaggagacgtgggttgatagttgcgttttacgtgattttttattcgcgttagttcgttttttcggtattagggcgtggtttcgcggggcggtcgtatttggattggtcgggaggcgggatcggtggtgcgcgcgcgaaaggagaggggtttgggggcgtggtttagggggtcggagacggttgcgattggtagtggggcgcgtcgggggcgtgatcgcggtattgggtttcgggtggggtcgaggtagcgggagtcgcggttgtttagcgtgtatttgagattcgacgttcggggttttcgaagacgcgttcgtcgtcgtgttcgtcgttatgaatcgttttagggtgtttaagtttcggtatatcgaggttcggtcgtttcgtcgcgaggtgagttcggttcgaggatcgggcgttg

SEQ ID NO: 13868 - DNA, 547 bp, Artificial Sequence
  chemically treated genomic DNA (Homo sapiens) CpG-island No: 13868
caacgcccgatcctcgaaccgaactcacctcgcgacgaaacgaccgaacctcgatataccgaaacttaaacaccctaaaacgattcataacgacgaacacgacgacgaacgcgtcttcgaaaaccccgaacgtcgaatctcaaatacacgctaaacaaccgcgactcccgctacctcgaccccacccgaaacccaataccgcgatcacgcccccgacgcgccccactaccaatcgcaaccgtctccgaccccctaaaccacgcccccaaacccctctcctttcgcgcgcgcaccaccgatcccgcctcccgaccaatccaaatacgaccgccccgcgaaaccacgccctaataccgaaaaaacgaactaacgcgaataaaaaatcacgtaaaacgcaactatcaacccacgtctcctacgatacttacttacgtaaaatctcgactacaacattcgcgattttatatacaaaatttactataaaatctttacgatatacctaacacgccttccaacactatctacctcttcctataaaaaaaaaaaa

SEQ ID NO: 13869 - DNA, 722 bp, Artificial Sequence
  chemically treated genomic DNA (Homo sapiens) CpG-island No: 13869
ttttttataaatcggtaggggacgagaaaacgttttgtcgggtttaatttagttgtagaagttacgtttttttttttatcggggtcggttgttgttggagagaagttttcgagttttgcgcgtcgaaaaggtcgagggttcgagaagcgaagaggtttagggaaggcgaggcgaggatcgtagtttttttttttttcgcggggtcggcgcgttggttcgatttttcgttcgtagttgtcggcgggcgcggagtcgaagtttacgaggtggagttcggttagttattttttttggttttttcggtcgcgtcgggtttttgtagcggagcgttttgtatttatcgttggagttttatttttttttaagttttttgatttgttttaggtttagtttcgtattttcgttgacgtcgaagtggtttagtattttttttatcgttttggtgtgcgcgttttttatggtttcgggggttcggtcggtttcgtttttcgttttcgcggttttttcgttttcgtttcgtatttcggtcgcgggttcgtgttatttcgggagtttaggcgcggacgggttttttttttttttttttgcggtcgttttcgtttcgtcgggcgttgaattatttcgcgtttttttttttagataatcgtttttcgcgcggtttcgagtttcgtagggcgggttgggggtttttgatttatttttttttttttcgttagaaggga

SEQ ID NO: 13870 - DNA, 722 bp, Artificial Sequence
  chemically treated genomic DNA (Homo sapiens) CpG-island No: 13870
tcccttctaacgaaaaaaaaaaaaataaatcaaaaacccccaacccgccctacgaaactcgaaaccgcgcgaaaaacgattatctaaaaaaaaaaacgcgaaataattcaacgcccgacgaaacgaaaacgaccgcaaaaaaaaaaaaaaaaaacccgtccgcgcctaaactcccgaaataacacgaacccgcgaccgaaatacgaaacgaaaacgaaaaaaccgcgaaaacgaaaaacgaaaccgaccgaacccccgaaaccataaaaaacgcgcacaccaaaacgataaaaaaaatactaaaccacttcgacgtcaacgaaaatacgaaactaaacctaaaacaaatcaaaaaacttaaaaaaaaataaaactccaacgataaatacaaaacgctccgctacaaaaacccgacgcgaccgaaaaaaccaaaaaaaataactaaccgaactccacctcgtaaacttcgactccgcgcccgccgacaactacgaacgaaaaatcgaaccaacgcgccgaccccgcgaaaaaaaaaaaaactacgatcctcgcctcgccttccctaaacctcttcgcttctcgaaccctcgaccttttcgacgcgcaaaactcgaaaacttctctccaacaacaaccgaccccgataaaaaaaaaaacgtaacttctacaactaaattaaacccgacaaaacgttttctcgtcccctaccgatttataaaaaa

SEQ ID NO: 13871 - DNA, 722 bp, Artificial Sequence
  chemically treated genomic DNA (Homo sapiens) CpG-island No: 13871
ttttttttggcgaggggagggagggtgggttaggagtttttaattcgttttgcggagttcggggtcgcgcgaggggcggttgtttgggggagggggcgcggggtgatttagcgttcggcgaggcggaagcggtcgtaagaggaggaggggagagttcgttcgcgtttgggttttcggggtggtacgagttcgcggtcggagtgcgaggcggaggcgaggaggtcgcggggacgggaggcgaggtcggtcgggttttcgaagttatggagaacgcgtatattaagacggtggaggaggtgttgggttatttcggcgttaacgagagtacggggttgagtttggaataggttaagaagtttaaggagagatggggttttaacggtaggtgtagggcgtttcgttgtaggggttcggcgcggtcgggagagttagggaagatggttgatcgggttttatttcgtgggtttcggtttcgcgttcgtcgatagttgcgggcggagggtcgggttagcgcgtcggtttcgcgggagagaaaggggttgcggttttcgtttcgttttttttggattttttcgtttttcgggttttcgattttttcggcgcgtaaggttcggaggtttttttttagtagtagtcggtttcggtggagggagggacgtggtttttgtagttaggttgagttcggtaagacgttttttcgttttttgtcgatttatgaggag

SEQ ID NO: 13872 - DNA, 722 bp, Artificial Sequence
  chemically treated genomic DNA (Homo sapiens) CpG-island No: 13872
ctcctcataaatcgacaaaaaacgaaaaaacgtcttaccgaactcaacctaactacaaaaaccacgtccctccctccaccgaaaccgactactactaaaaaaaaacctccgaaccttacgcgccgaaaaaatcgaaaacccgaaaaacgaaaaaatccaaaaaaaacgaaacgaaaaccgcaacccctttctctcccgcgaaaccgacgcgctaacccgaccctccgcccgcaactatcgacgaacgcgaaaccgaaacccacgaaataaaacccgatcaaccatcttccctaactctcccgaccgcgccgaacccctacaacgaaacgccctacacctaccgttaaaaccccatctctccttaaacttcttaacctattccaaactcaaccccgtactctcgttaacgccgaaataacccaacacctcctccaccgtcttaatatacgcgttctccataacttcgaaaacccgaccgacctcgcctcccgtccccgcgacctcctcgcctccgcctcgcactccgaccgcgaactcgtaccaccccgaaaacccaaacgcgaacgaactctcccctcctcctcttacgaccgcttccgcctcgccgaacgctaaatcaccccgcgccccctcccccaaacaaccgcccctcgcgcgaccccgaactccgcaaaacgaattaaaaactcctaacccaccctccctcccctcgccaaaaaaaa

SEQ ID NO: 13873 - DNA, 545 bp, Artificial Sequence
  chemically treated genomic DNA (Homo sapiens) CpG-island No: 13873
tgtttcgttgtttaaggagtagttatgatttggtttcgtcgttagttttttatcggcgtcggcgtgttggtagtcgttagcggtatcgtagggcgcgtggtggcgaaaacgttgaatattaatggggtgcgttacggtatggtgtatgacgagtcgttatgtatcggttgtatcgtttgtatggatgtttgtcgggaagtgaataaggtgtcggaaggcgtttcgcgtttgacgattattcgtagcgagtcgtaggcgaattttttgatgtgaatatcgtttttttcgtaagttttgttagtattgcgattatgcgtcgtgcgttgacgtttgttcgatcggtgcgttttttcgcgatgttgttagtgggattgtcgatgttaatcggatttttgcgtcggttgttagtaatgtattcgcgtttgtcggtacgcggtcggtttatttattcggtacgaaaacgcggataaattcgattttgtcgtaaattaattttaagcggtaaatttcgcgtgcgttgaattggcggattaagggtatatttg

SEQ ID NO: 13874 - DNA, 545 bp, Artificial Sequence
  chemically treated genomic DNA (Homo sapiens) CpG-island No: 13874
caaatatacccttaatccgccaattcaacgcacgcgaaatttaccgcttaaaattaatttacgacaaaatcgaatttatccgcgttttcgtaccgaataaataaaccgaccgcgtaccgacaaacgcgaatacattactaacaaccgacgcaaaaatccgattaacatcgacaatcccactaacaacatcgcgaaaaaacgcaccgatcgaacaaacgtcaacgcacgacgcataatcgcaatactaacaaaacttacgaaaaaaacgatattcacatcaaaaaattcgcctacgactcgctacgaataatcgtcaaacgcgaaacgccttccgacaccttattcacttcccgacaaacatccatacaaacgatacaaccgatacataacgactcgtcatacaccataccgtaacgcaccccattaatattcaacgttttcgccaccacgcgccctacgataccgctaacgactaccaacacgccgacgccgataaaaaactaacgacgaaaccaaatcataactactccttaaacaacgaaaca

SEQ ID NO: 13875 - DNA, 545 bp, Artificial Sequence
  chemically treated genomic DNA (Homo sapiens) CpG-island No: 13875
taaatgtatttttggttcgttagtttaacgtacgcggaatttatcgtttgaaattggtttacggtagaatcggatttgttcgcgttttcgtatcggatggataagtcgatcgcgtatcgataggcgcgaatgtattattgataatcgacgtagagattcgattaatatcgataattttattggtagtatcgcgaaaagacgtatcggtcgggtagacgttaacgtacggcgtatgatcgtagtgttggtaagatttacggaagaagcgatatttatattaggaaattcgtttgcggttcgttacgaataatcgttaggcgcgagacgtttttcggtattttgtttatttttcgataagtatttatataggcggtatagtcgatgtataacgattcgttatgtattatgtcgtaacgtattttattgatatttaacgttttcgttattacgcgttttgcggtgtcgttgacggttgttagtacgtcgacgtcggtgagaaattggcgacgagattaggttatggttgttttttaagtaacggaata

SEQ ID NO: 13876 - DNA, 545 bp, Artificial Sequence
  chemically treated genomic DNA (Homo sapiens) CpG-island No: 13876
tattccgttacttaaaaaacaaccataacctaatctcgtcgccaatttctcaccgacgtcgacgtactaacaaccgtcaacgacaccgcaaaacgcgtaataacgaaaacgttaaatatcaataaaatacgttacgacataatacataacgaatcgttatacatcgactataccgcctatataaatacttatcgaaaaataaacaaaataccgaaaaacgtctcgcgcctaacgattattcgtaacgaaccgcaaacgaatttcctaatataaatatcgcttcttccgtaaatcttaccaacactacgatcatacgccgtacgttaacgtctacccgaccgatacgtcttttcgcgatactaccaataaaattatcgatattaatcgaatctctacgtcgattatcaataatacattcgcgcctatcgatacgcgatcgacttatccatccgatacgaaaacgcgaacaaatccgattctaccgtaaaccaatttcaaacgataaattccgcgtacgttaaactaacgaaccaaaaatacattta

SEQ ID NO: 13877 - DNA, 984 bp, Artificial Sequence
  chemically treated genomic DNA (Homo sapiens) CpG-island No: 13877
ggttagcggtaggcgcgatggtcgtagtggtataggtgaatttttcgcgtcggcgtgtatatcgggtttatttggttttgtatttgcgttatcgttaggtcgtacgatgttagttagcggcggttttttttatttattcggttagttaggattttattttttagtcggtcgagtatttgtattagtatcggcgggaatattatattgttatcgttttcgttatcggattgttgaagggtattcgttaggttgcggcgttgcgttttcgttagtttatcggtggcggttttaattttgatgagtggcgtgaagtttttcggttgataaatcgtttggatgcgggttttgtcgttttgtatcgtggttaggcggtcgtcgttttagtcgtattaggttatttgcggttttcgtgatagcgatatttagttcgttaggtttcgtttacgtcgttatattcgtttggttattttgcggtttagcgggtcgtaaagatagcgattttcgattagcggttttgtatattgtgttcgcgtgtagtgtattagtcggtgttgattgtcgtaatggtatcggtgggtgcgtttattattcgtgcggataatttttttcgggatgaggtcggttttttttgttagtttgtcgtgacggttatatcggtaaagatagtgcgcgttacgggcgatacggttattcggttatatgttgagggcgttgttcgggtgtagtttcgggtcgggtaggcggttatttgtcgggtttgtggtatacgggatgcggatatttagattcgttgcggtggtgtgaacgtcggttagtttgtcggtggtgttgtagttgtaatttcgggtttggcgcgggttgttgatgcggatgagttcgtcgttgtcgttttaggtgtaatcgcggttagatagtaggttgtttaggtgttggttttgtaattgttcggtaggggtataagcggtggtgtttttattcgttttt

SEQ ID NO: 13878 - DNA, 984 bp, Artificial Sequence
  chemically treated genomic DNA (Homo sapiens) CpG-island No: 13878
aaaaacgaataaaaacaccaccgcttatacccctaccgaacaattacaaaaccaacacctaaacaacctactatctaaccgcgattacacctaaaacgacaacgacgaactcatccgcatcaacaacccgcgccaaacccgaaattacaactacaacaccaccgacaaactaaccgacgttcacaccaccgcaacgaatctaaatatccgcatcccgtataccacaaacccgacaaataaccgcctacccgacccgaaactacacccgaacaacgccctcaacatataaccgaataaccgtatcgcccgtaacgcgcactatctttaccgatataaccgtcacgacaaactaacaaaaaaaaccgacctcatcccgaaaaaaattatccgcacgaataataaacgcacccaccgataccattacgacaatcaacaccgactaatacactacacgcgaacacaatatacaaaaccgctaatcgaaaatcgctatctttacgacccgctaaaccgcaaaataaccaaacgaatataacgacgtaaacgaaacctaacgaactaaatatcgctatcacgaaaaccgcaaataacctaatacgactaaaacgacgaccgcctaaccacgatacaaaacgacaaaacccgcatccaaacgatttatcaaccgaaaaacttcacgccactcatcaaaattaaaaccgccaccgataaactaacgaaaacgcaacgccgcaacctaacgaatacccttcaacaatccgataacgaaaacgataacaatataatattcccgccgatactaatacaaatactcgaccgactaaaaaataaaatcctaactaaccgaataaataaaaaaaaccgccgctaactaacatcgtacgacctaacgataacgcaaatacaaaaccaaataaacccgatatacacgccgacgcgaaaaattcacctataccactacgaccatcgcgcctaccgctaacc

SEQ ID NO: 13879 - DNA, 984 bp, Artificial Sequence
  chemically treated genomic DNA (Homo sapiens) CpG-island No: 13879
ggaaacgggtgagggtattatcgtttatatttttgtcgggtagttatagagttagtatttgaatagtttgttgtttgatcgcgattatatttggaacgataacggcgaatttattcgtattagtagttcgcgttagattcggagttatagttatagtattatcggtaggttgatcggcgtttatattatcgtagcgaatttggatattcgtatttcgtatattatagattcggtaggtaatcgtttgttcgattcggagttgtattcggatagcgtttttagtatgtggtcggataatcgtatcgttcgtgacgcgtattatttttatcggtatgatcgttacggtaggttgatagagaaaatcgattttatttcggaaggggttattcgtacggatgatgagcgtatttatcggtattattacgatagttagtatcggttggtgtattatacgcggatataatatgtagagtcgttggtcgaaagtcgttatttttacgattcgttgggtcgtagggtggttaaacgggtatggcggcgtgaacgggatttgacgggttggatgtcgttgttacggaaatcgtaagtgatttggtacggttgggacggcgatcgtttgattacgatatagaacgatagaattcgtatttagacgatttattagtcggggagttttacgttatttattagggttgaaatcgttatcggtgagttggcgaaaacgtagcgtcgtagtttggcggatattttttagtagttcggtggcgaagacggtggtagtgtggtgttttcgtcggtgttggtgtagatgttcgatcggttggaaagtgaaattttggttgatcgggtgagtgaggaaagtcgtcgttggttggtatcgtgcggtttgacggtggcgtagatgtaaagttagatggattcggtatatacgtcggcgcgaaaaatttatttgtattattgcgattatcgcgtttgtcgttggtt

SEQ ID NO: 13880 - DNA, 984 bp, Artificial Sequence
  chemically treated genomic DNA (Homo sapiens) CpG-island No: 13880
aaccaacgacaaacgcgataatcgcaataatacaaataaatttttcgcgccgacgtatataccgaatccatctaactttacatctacgccaccgtcaaaccgcacgataccaaccaacgacgactttcctcactcacccgatcaaccaaaatttcactttccaaccgatcgaacatctacaccaacaccgacgaaaacaccacactaccaccgtcttcgccaccgaactactaaaaaatatccgccaaactacgacgctacgttttcgccaactcaccgataacgatttcaaccctaataaataacgtaaaactccccgactaataaatcgtctaaatacgaattctatcgttctatatcgtaatcaaacgatcgccgtcccaaccgtaccaaatcacttacgatttccgtaacaacgacatccaacccgtcaaatcccgttcacgccgccatacccgtttaaccaccctacgacccaacgaatcgtaaaaataacgactttcgaccaacgactctacatattatatccgcgtataatacaccaaccgatactaactatcgtaataataccgataaatacgctcatcatccgtacgaataaccccttccgaaataaaatcgattttctctatcaacctaccgtaacgatcataccgataaaaataatacgcgtcacgaacgatacgattatccgaccacatactaaaaacgctatccgaatacaactccgaatcgaacaaacgattacctaccgaatctataatatacgaaatacgaatatccaaattcgctacgataatataaacgccgatcaacctaccgataatactataactataactccgaatctaacgcgaactactaatacgaataaattcgccgttatcgttccaaatataatcgcgatcaaacaacaaactattcaaatactaactctataactacccgacaaaaatataaacgataataccctcacccgtttcc

SEQ ID NO: 13881 - DNA, 903 bp, Artificial Sequence
  chemically treated genomic DNA (Homo sapiens) CpG-island No: 13881
ttggcgtatggtttgtcggacgttttaataaacgtttttttacgttaatgtggtagtcggttatttgttgtttgttggttggtttgttgatgtggattttcgattggttggcgtgatgaatgtttggacgttgttcgttttcgtcgcgttgttttttttcggtgtcgggatgttgttttcgttggcgattagcggcgcgatggagtcgtttttttttttggcgggtacggttggcgcgttggtcggcggtttgtaaaatattggtttcggcgtgttggcgtcgttttttgcgatgttgtcgtaaatcggttagggtagtttggggttgttgatgattttaatgggattgttgatcgtgttgtgttggttgtcgttggcgacgcggatgtcgtattaggggtagttcgtttaagcgtacgttatcgtagtatcgttattagttttatgggagaacgatgttgttttattagattacgtattattcgtatatgcggtgcggagtaagaataaaacgtttgatagttcgtataaagtacgttgtttggcgttttttggtcgagcgtgcgggtatcgggcgatgttagtcgtacgtttggagtatcgcgtcggtggcgggttttcgttttttttttgtagggggttaaaattatcgaaaaggtttcgttttcgttggttaatgagcgtatttttttggcgtggattcgtattgtattaggatttttggcggcgggggttgggtttgattaatttgcgttagatttcgttacgttcgttattcgcgaattgttggcgttgttgttgtgtttgtttttcggcgggttagcgatgtatggttatttgcgttggttacgtaatgaaaaagcgatgcgtttgaaagaggatttgttttatattaatagttta

SEQ ID NO: 13882 - DNA, 903 bp, Artificial Sequence
  chemically treated genomic DNA (Homo sapiens) CpG-island No: 13882
taaactattaatataaaacaaatcctctttcaaacgcatcgctttttcattacgtaaccaacgcaaataaccatacatcgctaacccgccgaaaaacaaacacaacaacaacgccaacaattcgcgaataacgaacgtaacgaaatctaacgcaaattaatcaaacccaacccccgccgccaaaaatcctaatacaatacgaatccacgccaaaaaaatacgctcattaaccaacgaaaacgaaaccttttcgataattttaaccccctacaaaaaaaaaacgaaaacccgccaccgacgcgatactccaaacgtacgactaacatcgcccgatacccgcacgctcgaccaaaaaacgccaaacaacgtactttatacgaactatcaaacgttttattcttactccgcaccgcatatacgaataatacgtaatctaataaaacaacatcgttctcccataaaactaataacgatactacgataacgtacgcttaaacgaactacccctaatacgacatccgcgtcgccaacgacaaccaacacaacacgatcaacaatcccattaaaatcatcaacaaccccaaactaccctaaccgatttacgacaacatcgcaaaaaacgacgccaacacgccgaaaccaatattttacaaaccgccgaccaacgcgccaaccgtacccgccaaaaaaaaaaacgactccatcgcgccgctaatcgccaacgaaaacaacatcccgacaccgaaaaaaaacaacgcgacgaaaacgaacaacgtccaaacattcatcacgccaaccaatcgaaaatccacatcaacaaaccaaccaacaaacaacaaataaccgactaccacattaacgtaaaaaaacgtttattaaaacgtccgacaaaccatacgccaa

SEQ ID NO: 13883 - DNA, 903 bp, Artificial Sequence
  chemically treated genomic DNA (Homo sapiens) CpG-island No: 13883
taagttgttggtgtagggtaggtttttttttagacgtatcgtttttttattgcgtaattagcgtaagtagttatatatcgttaattcgtcggaaaatagatataataataacgttagtagttcgcgaatgacgggcgtggcgaaatttggcgtaagttgattaagtttaattttcgtcgttagaaattttagtgtagtacggatttacgttagaaaagtacgtttattagttagcgagaacgaaattttttcggtgattttgattttttataaaggggggacgaaaattcgttatcggcgcggtgttttaggcgtgcgattggtatcgttcggtgttcgtacgttcggttaggagacgttagatagcgtgttttgtgcgggttattaggcgttttatttttatttcgtatcgtatatgcgggtgatgcgtgatttgataaagtagtatcgtttttttatggagttgatgacgatgttgcggtgacgtgcgtttaaacgggttgtttttgatgcgatattcgcgtcgttagcggtagttagtatagtacgattaataattttattaaggttattaataattttaggttgttttgatcggtttgcggtaatatcgtagagagcgacgttagtacgtcggaattaatgttttgtagatcgtcgattagcgcgttagtcgtgttcgttaggaaggggaacggttttatcgcgtcgttggtcgttagcggaaatagtatttcggtatcgaaaaagaatagcgcggcgggaacgagtagcgtttagatatttattacgttaattagtcggggatttatattagtaagttagttagtaggtagtagataatcgattgttatattaacgtggagaagcgtttattgggacgttcggtaaattatgcgttag

SEQ ID NO: 13884 - DNA, 903 bp, Artificial Sequence
  chemically treated genomic DNA (Homo sapiens) CpG-island No: 13884
ctaacgcataatttaccgaacgtcccaataaacgcttctccacgttaatataacaatcgattatctactacctactaactaacttactaatataaatccccgactaattaacgtaataaatatctaaacgctactcgttcccgccgcgctattctttttcgataccgaaatactatttccgctaacgaccaacgacgcgataaaaccgttccccttcctaacgaacacgactaacgcgctaatcgacgatctacaaaacattaattccgacgtactaacgtcgctctctacgatattaccgcaaaccgatcaaaacaacctaaaattattaataaccttaataaaattattaatcgtactatactaactaccgctaacgacgcgaatatcgcatcaaaaacaacccgtttaaacgcacgtcaccgcaacatcgtcatcaactccataaaaaaacgatactactttatcaaatcacgcatcacccgcatatacgatacgaaataaaaataaaacgcctaataacccgcacaaaacacgctatctaacgtctcctaaccgaacgtacgaacaccgaacgataccaatcgcacgcctaaaacaccgcgccgataacgaattttcgtcccccctttataaaaaatcaaaatcaccgaaaaaatttcgttctcgctaactaataaacgtacttttctaacgtaaatccgtactacactaaaatttctaacgacgaaaattaaacttaatcaacttacgccaaatttcgccacgcccgtcattcgcgaactactaacgttattattatatctattttccgacgaattaacgatatataactacttacgctaattacgcaataaaaaaacgatacgtctaaaaaaaaacctaccctacaccaacaactta

SEQ ID NO: 13885 - DNA, 1078 bp, Artificial Sequence
  chemically treated genomic DNA (Homo sapiens) CpG-island No: 13885
gatggtcgtattaatcggaacgattttcggttgaattagcggtagttggtttagtacggtaacgttacgcgtaatattaatgatgtttaagtagtcggtacggtttggcgttacgttgatttcgatggtgttgttattaagttttaggtatttacggatatcggtgttaatcggcgtattcgtaggtagttcgataatgtcgttgtgatcgttagaaatgtttagtttagagaaggttacgggtgttgcgcgttaaaattagtggattttttcgtagtgggtttacgacgtatagttggacgatttgttgagtgattacgatgtcgtgttttttggcgtcgggatttattagttaatgcgcggcgggttggaaaacgaagacgtcgatggcgtgtacgtagcgttgtcgttttttatcgttaatattaaatagttaatgggttttggtgaaattcgcgacgaatcgttcgttagtatggaaggtaaacgcgtggtggtttttggcggtggcgatattgcgatggattgcgtgcgtacgttcgtgcgttaggagcgaagtacgttatttgtgtttatcgtcgtgatgaagagaatatgtcgggttttcgtcgcgaagtgaaaaacgcgcgggaagaaggcgtagagtttaaatttaacgtttagtcgttgggtattgaagtgaacggtaacggtaaagttagcggcgtaaaaatggtgcgtatcgaaatgggcgaatcggacgttaaaggtcgtcgtcgcgcggagtatcgttgtaggtttcgaatatatcgtttcggtagatgcggtgattatggcgttggttttcgtttataaaatattggaatgggttggtaaaatatagcgtcgagttggatttataagtcgtattatcgtttcggaagtagcgataacgttttttagattagtaattcgaaaatttttgttggcggcgatatcgttcgtggtttcgatttggtggtgatcgttattgtcgaaggtcgtaaggcggtagacggtattatgaattggttggaagtttaagcgaggtaataatgaattcgttagattgtgtttggcg

SEQ ID NO: 13886 - DNA, 1078 bp, Artificial Sequence
  chemically treated genomic DNA (Homo sapiens) CpG-island No: 13886
cgccaaacacaatctaacgaattcattattacctcgcttaaacttccaaccaattcataataccgtctaccgccttacgaccttcgacaataacgatcaccaccaaatcgaaaccacgaacgatatcgccgccaacaaaaattttcgaattactaatctaaaaaacgttatcgctacttccgaaacgataatacgacttataaatccaactcgacgctatattttaccaacccattccaatattttataaacgaaaaccaacgccataatcaccgcatctaccgaaacgatatattcgaaacctacaacgatactccgcgcgacgacgacctttaacgtccgattcgcccatttcgatacgcaccatttttacgccgctaactttaccgttaccgttcacttcaatacccaacgactaaacgttaaatttaaactctacgccttcttcccgcgcgtttttcacttcgcgacgaaaacccgacatattctcttcatcacgacgataaacacaaataacgtacttcgctcctaacgcacgaacgtacgcacgcaatccatcgcaatatcgccaccgccaaaaaccaccacgcgtttaccttccatactaacgaacgattcgtcgcgaatttcaccaaaacccattaactatttaatattaacgataaaaaacgacaacgctacgtacacgccatcgacgtcttcgttttccaacccgccgcgcattaactaataaatcccgacgccaaaaaacacgacatcgtaatcactcaacaaatcgtccaactatacgtcgtaaacccactacgaaaaaatccactaattttaacgcgcaacacccgtaaccttctctaaactaaacatttctaacgatcacaacgacattatcgaactacctacgaatacgccgattaacaccgatatccgtaaatacctaaaacttaataacaacaccatcgaaatcaacgtaacgccaaaccgtaccgactacttaaacatcattaatattacgcgtaacgttaccgtactaaaccaactaccgctaattcaaccgaaaatcgttccgattaatacgaccatc

SEQ ID NO: 13887 - DNA, 1078 bp, Artificial Sequence
  chemically treated genomic DNA (Homo sapiens) CpG-island No: 13887
cgttagatatagtttggcgaatttattgttatttcgtttaaatttttagttagtttataatatcgtttgtcgttttacgattttcggtaatagcggttattattagatcggaattacggacgatatcgtcgttagtaaagattttcgggttgttggtttggaaggcgttgtcgttgttttcggggcgatgatgcggtttgtgaatttagttcgacgttgtgttttgttagtttattttaatgttttgtggacggaaattaacgttatgattatcgtatttgtcggaacgatatgttcggaatttgtaacgatgtttcgcgcggcgacggtttttggcgttcggttcgtttatttcggtacgtattatttttacgtcgttgattttgtcgttatcgtttattttaatatttagcggttggacgttgaatttgaattttacgtttttttttcgcgcgttttttatttcgcggcgggaattcggtatgttttttttattacgacgataggtataggtaacgtgtttcgtttttggcgtacggacgtacgtacgtagtttatcgtagtgtcgttatcgttaaggattattacgcgtttgttttttatgttgacgaacggttcgtcgcgggttttattaaagtttattaattgtttggtgttggcgatgaggaacggtagcgttgcgtatacgttatcggcgttttcgttttttagttcgtcgcgtattgattgataagtttcgacgttaaggaatacggtatcgtaattatttagtagatcgtttagttgtacgtcgtaggtttattgcggggggatttattagttttaacgcgtagtattcgtggttttttttgaattgggtatttttgacgattatagcggtattatcgaattgtttgcggatgcgtcgattggtatcgatattcgtgaatatttgaaatttgatgataatattatcgaaattagcgtgacgttaaatcgtgtcgattgtttaggtattattggtgttgcgcgtgacgttgtcgtgttgaattagttgtcgttggtttaatcggaaatcgtttcggttggtgcgattatt

SEQ ID NO: 13888 - DNA, 1078 bp, Artificial Sequence
  chemically treated genomic DNA (Homo sapiens) CpG-island No: 13888
aataatcgcaccaaccgaaacgatttccgattaaaccaacgacaactaattcaacacgacaacgtcacgcgcaacaccaataatacctaaacaatcgacacgatttaacgtcacgctaatttcgataatattatcatcaaatttcaaatattcacgaatatcgataccaatcgacgcatccgcaaacaattcgataataccgctataatcgtcaaaaatacccaattcaaaaaaaaccacgaatactacgcgttaaaactaataaatccccccgcaataaacctacgacgtacaactaaacgatctactaaataattacgataccgtattccttaacgtcgaaacttatcaatcaatacgcgacgaactaaaaaacgaaaacgccgataacgtatacgcaacgctaccgttcctcatcgccaacaccaaacaattaataaactttaataaaacccgcgacgaaccgttcgtcaacataaaaaacaaacgcgtaataatccttaacgataacgacactacgataaactacgtacgtacgtccgtacgccaaaaacgaaacacgttacctatacctatcgtcgtaataaaaaaaacataccgaattcccgccgcgaaataaaaaacgcgcgaaaaaaaaacgtaaaattcaaattcaacgtccaaccgctaaatattaaaataaacgataacgacaaaatcaacgacgtaaaaataatacgtaccgaaataaacgaaccgaacgccaaaaaccgtcgccgcgcgaaacatcgttacaaattccgaacatatcgttccgacaaatacgataatcataacgttaatttccgtccacaaaacattaaaataaactaacaaaacacaacgtcgaactaaattcacaaaccgcatcatcgccccgaaaacaacgacaacgccttccaaaccaacaacccgaaaatctttactaacgacgatatcgtccgtaattccgatctaataataaccgctattaccgaaaatcgtaaaacgacaaacgatattataaactaactaaaaatttaaacgaaataacaataaattcgccaaactatatctaacg

SEQ ID NO: 13889 - DNA, 707 bp, Artificial Sequence
  chemically treated genomic DNA (Homo sapiens) CpG-island No: 13889
tacgcgttggtttagttcgcgcgtaatggtaaatgttagcgtttcggtaatcgtgtcgcgtcgtttatgttcgattttatcgagtttataaacgtagtcggtatgatgttgtagtcgtcggagttaaaagtgatatttttatttattaggtacgcgtatattggcgtttttttatcgttagtggggttgtaatttagcgttagtaatatcggagaacgttttgaatcgcgttcgattgtgtgtagttttatataattttgtttacgtagattttcgtttttggtgattcgataagttatacgatcgttcgcgacgttgttgattagattaatagtacgttgtgttagttgcgatggttttaatttttttgtcggtgcgttgatggtgttacgtatttagtcgatgattattaggcggttatttagtttttggcgttgggtatcgtttagattcggttatattattttacgcgtgtttttcggggttttgtaattttgttagaatgtttagtagcgattcgtattttagtttttatcgtttaattgaatatgtttgatgtttagatcgttaattttgcgcgtcgtacgttggattagttttagatcgtttgtttcgtttaaatgtagggtaatgtcgttattattaatgttgtaagttgttttttttttttagcgcgcgtcggtaggttgggtagagagggtaatttt

SEQ ID NO: 13890 - DNA, 707 bp, Artificial Sequence
  chemically treated genomic DNA (Homo sapiens) CpG-island No: 13890
aaaattaccctctctacccaacctaccgacgcgcgctaaaaaaaaaaaacaacttacaacattaataataacgacattaccctacatttaaacgaaacaaacgatctaaaactaatccaacgtacgacgcgcaaaattaacgatctaaacatcaaacatattcaattaaacgataaaaactaaaatacgaatcgctactaaacattctaacaaaattacaaaaccccgaaaaacacgcgtaaaataatataaccgaatctaaacgatacccaacgccaaaaactaaataaccgcctaataatcatcgactaaatacgtaacaccatcaacgcaccgacaaaaaaattaaaaccatcgcaactaacacaacgtactattaatctaatcaacaacgtcgcgaacgatcgtataacttatcgaatcaccaaaaacgaaaatctacgtaaacaaaattatataaaactacacacaatcgaacgcgattcaaaacgttctccgatattactaacgctaaattacaaccccactaacgataaaaaaacgccaatatacgcgtacctaataaataaaaatatcacttttaactccgacgactacaacatcataccgactacgtttataaactcgataaaatcgaacataaacgacgcgacacgattaccgaaacgctaacatttaccattacgcgcgaactaaaccaacgcgta

SEQ ID NO: 13891 - DNA, 707 bp, Artificial Sequence
  chemically treated genomic DNA (Homo sapiens) CpG-island No: 13891
aagattattttttttatttaatttgtcgacgcgcgttggggagaaaaagtaatttatagtattaataatgacggtattattttgtatttgaacggggtagacgatttggggttgatttagcgtgcggcgcgtaagattgacggtttgggtattaagtatgtttagttaagcggtgaaggttgggatgcggatcgttgttgggtattttggtaaggttataaagtttcgaaaggtacgcgtaaagtggtgtggtcggatttggacgatgtttagcgttaggaattggataatcgtttgatgattatcgattgggtgcgtgatattattaacgtatcggtagaagaattgggattatcgtaattggtatagcgtgttgttgatttgattagtaacgtcgcgggcgatcgtgtgatttatcggattattaaaggcgaagatttgcgtgagtaaggttatatggggttgtatatagtcggacgcggtttagaacgtttttcggtattgttggcgttggattataattttattggcgataaagaagcgttagtgtacgcgtgtttggtaggtaaaggtattatttttgatttcggcggttatagtattatatcgattgcgtttatggattcgatgaagtcggatatgggcggcgcggtacggttatcggggcgttggtatttgttattacgcgcggattgaattagcgcgtg

SEQ ID NO: 13892 - DNA, 707 bp, Artificial Sequence
  chemically treated genomic DNA (Homo sapiens) CpG-island No: 13892
cacgcgctaattcaatccgcgcgtaataacaaataccaacgccccgataaccgtaccgcgccgcccatatccgacttcatcgaatccataaacgcaatcgatataatactataaccgccgaaatcaaaaataatacctttacctaccaaacacgcgtacactaacgcttctttatcgccaataaaattataatccaacgccaacaataccgaaaaacgttctaaaccgcgtccgactatatacaaccccatataaccttactcacgcaaatcttcgcctttaataatccgataaatcacacgatcgcccgcgacgttactaatcaaatcaacaacacgctataccaattacgataatcccaattcttctaccgatacgttaataatatcacgcacccaatcgataatcatcaaacgattatccaattcctaacgctaaacatcgtccaaatccgaccacaccactttacgcgtacctttcgaaactttataaccttaccaaaatacccaacaacgatccgcatcccaaccttcaccgcttaactaaacatacttaatacccaaaccgtcaatcttacgcgccgcacgctaaatcaaccccaaatcgtctaccccgttcaaatacaaaataataccgtcattattaatactataaattactttttctccccaacgcgcgtcgacaaattaaataaaaaaaataatctt

SEQ ID NO: 13893 - DNA, 656 bp, Artificial Sequence
  chemically treated genomic DNA (Homo sapiens) CpG-island No: 13893
ttagtagaataatttgtataatacgtatttagtcgcgtttagtttgtaggttggtgataaaggtttagttaaagaatgcgatatttagcgtcgattataagcgtaatttttatatattattaattattcgttttagtaggaagatcggtagtgcgaggattataaaattaaacgcggttttgatttgttttatttacgggtcgtttttcggtagtaagcggttattaaagacggtaattagtattagcggtaggtttatgtttaacgtatagagataaagcgtgtcgtcgtttagttatatgttttcgttttgggcgatatatagtagaatcgcgttaagcggtgcggtggtgtatggtgaatagattagttcggtaatcgtttttataataaatatatcgttaggtgagtcgttttgttggcgattgtttattaacgtgagacgtgtttgtagcgaagaggggagttgtagggtaaataagttaaatattgatatcgttagtaaggtaaagacgatggcgaggttaatgagtacgtatgggtgttgtagcgtcgtttggaattgtaattttgcggcggtaattattagatttagcgtcgtgtaggttagcgttattttttgtatataaataaaggttagtaataatgttttggta

SEQ ID NO: 13894 - DNA, 656 bp, Artificial Sequence
  chemically treated genomic DNA (Homo sapiens) CpG-island No: 13894
taccaaaacattattactaacctttatttatatacaaaaaataacgctaacctacacgacgctaaatctaataattaccgccgcaaaattacaattccaaacgacgctacaacacccatacgtactcattaacctcgccatcgtctttaccttactaacgatatcaatatttaacttatttaccctacaactcccctcttcgctacaaacacgtctcacgttaataaacaatcgccaacaaaacgactcacctaacgatatatttattataaaaacgattaccgaactaatctattcaccatacaccaccgcaccgcttaacgcgattctactatatatcgcccaaaacgaaaacatataactaaacgacgacacgctttatctctatacgttaaacataaacctaccgctaatactaattaccgtctttaataaccgcttactaccgaaaaacgacccgtaaataaaacaaatcaaaaccgcgtttaattttataatcctcgcactaccgatcttcctactaaaacgaataattaataatatataaaaattacgcttataatcgacgctaaatatcgcattctttaactaaacctttatcaccaacctacaaactaaacgcgactaaatacgtattatacaaattattctactaa

SEQ ID NO: 13895 - DNA, 656 bp, Artificial Sequence
  chemically treated genomic DNA (Homo sapiens) CpG-island No: 13895
tgttagagtattgttgttgatttttatttatgtgtaggggatggcgttgatttatacggcgttgggtttggtggttgtcgtcgtagggttatagttttaggcggcgttatagtatttatacgtgtttattggtttcgttatcgtttttattttgttggcgatgttaatgtttggtttgtttattttgtaattttttttttcgttgtaaatacgttttacgttgatgagtaatcgttaatagggcggtttatttggcggtgtgtttgttatgggggcgattgtcggattgatttgtttattatgtattatcgtatcgtttagcgcgattttgttgtatatcgtttaaagcgggaatatgtggttgggcggcggtacgttttatttttatgcgttgggtatgggtttgtcgttgatgttaattatcgtttttggtaatcgtttgttgtcgaaaagcggttcgtggatggaataagttaaaatcgcgtttggttttgtgattttcgtattgtcggtttttttgttggagcgagtgattggtgatgtatggggattacgtttgtggtcggcgttgggtgtcgtattttttggttgggtttttattattagtttataggttaaacgcggttggatgcgtattgtgtaaattattttgttgg

SEQ ID NO: 13896 - DNA, 656 bp, Artificial Sequence
  chemically treated genomic DNA (Homo sapiens) CpG-island No: 13896
ccaacaaaataatttacacaatacgcatccaaccgcgtttaacctataaactaataataaaaacccaaccaaaaaatacgacacccaacgccgaccacaaacgtaatccccatacatcaccaatcactcgctccaacaaaaaaaccgacaatacgaaaatcacaaaaccaaacgcgattttaacttattccatccacgaaccgcttttcgacaacaaacgattaccaaaaacgataattaacatcaacgacaaacccatacccaacgcataaaaataaaacgtaccgccgcccaaccacatattcccgctttaaacgatatacaacaaaatcgcgctaaacgatacgataatacataataaacaaatcaatccgacaatcgcccccataacaaacacaccgccaaataaaccgccctattaacgattactcatcaacgtaaaacgtatttacaacgaaaaaaaaaattacaaaataaacaaaccaaacattaacatcgccaacaaaataaaaacgataacgaaaccaataaacacgtataaatactataacgccgcctaaaactataaccctacgacgacaaccaccaaacccaacgccgtataaatcaacgccatcccctacacataaataaaaatcaacaacaatactctaaca

SEQ ID NO: 13897 - DNA, 715 bp, Artificial Sequence
  chemically treated genomic DNA (Homo sapiens) CpG-island No: 13897
gacgcgagattcgcgttcgtcgtcgttcgtttaggcggcgatgatacggcgttcgcggcggttcggaggcgtcgggtgggtcgtttgttgatcggatcgcggttattcgttagcgtgttcgcggcgtcgtcgttagtatgggttgtgtttcgagtatttatattttcgagcgtttggtggtcgaggacgcgtttagtttcgcggtatcgtcgttgtcgttcggcggtcgcgtttttcgtagggttagaagacggtcgttttgtttcggattcgcggcgtcggttttttggagtcggagtttcgcgacggtagcggtaagaaggtaaggggcgtcgggtattttggggtcgtcgcgaaattcgggttcggttagtaagtaattttttcgcgagtcgggcggggttttttttattcggttcggtgtttttttgtttcgttttggatggttttgattgacgttagtttttcgttttgtcggggtagcgtttagagaaggatcgatttagtttcgcgattttgattttttagggttgcgattaggacgtcgtttgtgtcgcggcgtcggttttttggatatattcgattttcggagcggcggggttcgatgtgaagttgattgaggcgtttgtattaattttttttttaagagcgggtgtttgagggaaattttaggatattttggcgcgtttttgtaatgttaaattagtgtgaattt

SEQ ID NO: 13898 - DNA, 715 bp, Artificial Sequence
  chemically treated genomic DNA (Homo sapiens) CpG-island No: 13898
aaattcacactaatttaacattacaaaaacgcgccaaaatatcctaaaatttccctcaaacacccgctcttaaaaaaaaaattaatacaaacgcctcaatcaacttcacatcgaaccccgccgctccgaaaatcgaatatatccaaaaaaccgacgccgcgacacaaacgacgtcctaatcgcaaccctaaaaaatcaaaatcgcgaaactaaatcgatccttctctaaacgctaccccgacaaaacgaaaaactaacgtcaatcaaaaccatccaaaacgaaacaaaaaaacaccgaaccgaataaaaaaaaccccgcccgactcgcgaaaaaattacttactaaccgaacccgaatttcgcgacgaccccaaaatacccgacgccccttaccttcttaccgctaccgtcgcgaaactccgactccaaaaaaccgacgccgcgaatccgaaacaaaacgaccgtcttctaaccctacgaaaaacgcgaccgccgaacgacaacgacgataccgcgaaactaaacgcgtcctcgaccaccaaacgctcgaaaatataaatactcgaaacacaacccatactaacgacgacgccgcgaacacgctaacgaataaccgcgatccgatcaacaaacgacccacccgacgcctccgaaccgccgcgaacgccgtatcatcgccgcctaaacgaacgacgacgaacgcgaatctcgcgtc

SEQ ID NO: 13899 - DNA, 715 bp, Artificial Sequence
  chemically treated genomic DNA (Homo sapiens) CpG-island No: 13899
aagtttatattgatttaatattgtaggggcgcgttagaatattttggggttttttttaaatattcgtttttggagaggaaattgatgtaagcgttttagttaattttatatcgggtttcgtcgtttcgggagtcggatgtgtttaaaaaatcgacgtcgcgatataggcggcgttttaatcgtaattttaggaaattagggtcgcgggattgggtcggtttttttttgaacgttgtttcggtaaggcgggagattggcgttaattagaattatttaaagcgggataagagggtatcgagtcgggtgggggggatttcgttcggttcgcgggaaagttgtttattggtcgggttcgagtttcgcggcggttttagagtgttcggcgttttttatttttttgtcgttgtcgtcgcgaagtttcgattttaagaggtcggcgtcgcgggttcggggtaaggcggtcgttttttggttttgcgggaggcgcggtcgtcggacgatagcggcggtgtcgcggggttaggcgcgttttcggttattaggcgttcggaaatgtggatgttcggggtatagtttatgttggcggcggcgtcgcggatacgttggcgggtagtcgcgattcggttagtaaacggtttattcggcgttttcgggtcgtcgcgggcgtcgtgttatcgtcgtttgggcgggcggcggcgagcgcggatttcgcgtt

SEQ ID NO: 13900 - DNA, 715 bp, Artificial Sequence
  chemically treated genomic DNA (Homo sapiens) CpG-island No: 13900
aacgcgaaatccgcgctcgccgccgcccgcccaaacgacgataacacgacgcccgcgacgacccgaaaacgccgaataaaccgtttactaaccgaatcgcgactacccgccaacgtatccgcgacgccgccgccaacataaactataccccgaacatccacatttccgaacgcctaataaccgaaaacgcgcctaaccccgcgacaccgccgctatcgtccgacgaccgcgcctcccgcaaaaccaaaaaacgaccgccttaccccgaacccgcgacgccgacctcttaaaatcgaaacttcgcgacgacaacgacaaaaaaataaaaaacgccgaacactctaaaaccgccgcgaaactcgaacccgaccaataaacaactttcccgcgaaccgaacgaaatcccccccacccgactcgataccctcttatcccgctttaaataattctaattaacgccaatctcccgccttaccgaaacaacgttcaaaaaaaaaccgacccaatcccgcgaccctaatttcctaaaattacgattaaaacgccgcctatatcgcgacgtcgattttttaaacacatccgactcccgaaacgacgaaacccgatataaaattaactaaaacgcttacatcaatttcctctccaaaaacgaatatttaaaaaaaaccccaaaatattctaacgcgcccctacaatattaaatcaatataaactt

SEQ ID NO: 13901 - DNA, 1025 bp, Artificial Sequence
  chemically treated genomic DNA (Homo sapiens) CpG-island No: 13901
aggatttaacgatattatcggattttttgggaaaagaggggagacgtcgtgatttaggtttcgttttattttgtcgtttcgtgttcggcgttaagatttagcgggcgcgtcgttcgttcggggttcggttttgttttttttcgttcgcggggtagttagtttagtttcggagagtcggcggcgcggcgggtatggttcgggtggcgtgggggttgttgtggttgttgttgggtagcgtcggggcgtagtacgagaagtatagttttcggggtttttcgttcgaggatttgatgtcgttggtcgcggcgtacgggtacgttttggagtagtacgagggagagagttggcgcgagagcgcgcgttatttggaggcggcgttgcggttgtatcggtttttgcgcgatagcgaggttttttgttacgttaattgtagcggtttcgcgttcgcggttaagttcgatttcgacggcggtcgcgtagacgagtgggtttgcgagttgcggtttttcggtcgcgttttggagcgagtcgtttgtttgcggcgttgtaagcggacgttgttcgttttttaggtgttttattcgtcgcggtagttgttgcgtgatttttagagtcgtttgttttattagtatttgtattacgcgttgtttaaggtgggagttcgtttttattcggggatttgtttcgggttgggcgtcgtggttttttatagatcggtcgaaggagcgttatttttatttaaggtacgaagttcgtcgtgcgttcggggtcgtttagtttcggttttgttgattcgtttttttattttttatttttcgattaggttaatcggttggagaaggcggtggcggcggttttatatttttttttagaggaattcgaagtacgagttgatcgttaagtattttaattattattaggggatgttggacgtcgtcgacgagttttttacggatttagaggtttagttttacgaggtggggtggagggttaggaggaggtttgtagaggagggttagtagagg

SEQ ID NO: 13902 - DNA, 1025 bp, Artificial Sequence
  chemically treated genomic DNA (Homo sapiens) CpG-island No: 13902
cctctactaaccctcctctacaaacctcctcctaaccctccaccccacctcgtaaaactaaacctctaaatccgtaaaaaactcgtcgacgacgtccaacatcccctaataataattaaaatacttaacgatcaactcgtacttcgaattcctctaaaaaaaaatataaaaccgccgccaccgccttctccaaccgattaacctaatcgaaaaataaaaaataaaaaaacgaatcaacaaaaccgaaactaaacgaccccgaacgcacgacgaacttcgtaccttaaataaaaataacgctccttcgaccgatctataaaaaaccacgacgcccaacccgaaacaaatccccgaataaaaacgaactcccaccttaaacaacgcgtaatacaaatactaataaaacaaacgactctaaaaatcacgcaacaactaccgcgacgaataaaacacctaaaaaacgaacaacgtccgcttacaacgccgcaaacaaacgactcgctccaaaacgcgaccgaaaaaccgcaactcgcaaacccactcgtctacgcgaccgccgtcgaaatcgaacttaaccgcgaacgcgaaaccgctacaattaacgtaacaaaaaacctcgctatcgcgcaaaaaccgatacaaccgcaacgccgcctccaaataacgcgcgctctcgcgccaactctctccctcgtactactccaaaacgtacccgtacgccgcgaccaacgacatcaaatcctcgaacgaaaaaccccgaaaactatacttctcgtactacgccccgacgctacccaacaacaaccacaacaacccccacgccacccgaaccatacccgccgcgccgccgactctccgaaactaaactaactaccccgcgaacgaaaaaaaacaaaaccgaaccccgaacgaacgacgcgcccgctaaatcttaacgccgaacacgaaacgacaaaataaaacgaaacctaaatcacgacgtctcccctcttttcccaaaaaatccgataatatcgttaaatcct

SEQ ID NO: 13903 - DNA, 1025 bp, Artificial Sequence
  chemically treated genomic DNA (Homo sapiens) CpG-island No: 13903
tttttattagtttttttttataagtttttttttgattttttattttatttcgtagggttgggtttttaggttcgtgagggattcgtcggcgacgtttagtattttttgatagtagttgagatatttggcggttagttcgtgtttcgggtttttttggaggaaggtgtgaggtcgtcgttatcgttttttttagtcggttagtttggtcggggggtagggggtgggggagcgggttagtaagatcggagttgggcggtttcgagcgtacggcgggtttcgtgttttgggtgaagataacgttttttcgatcgatttgtggggagttacgacgtttagttcgagataggttttcgggtgggggcgggtttttattttgagtagcgcgtagtgtaggtattggtagggtaggcggttttggaagttacgtagtagttgtcgcggcgggtagggtatttggaaggcgggtagcgttcgtttgtagcgtcgtaggtaggcggttcgttttaggacgcggtcgaagagtcgtagttcgtaggtttattcgtttgcgcggtcgtcgtcgggatcgggtttggtcgcgggcgcggggtcgttgtagttggcgtggtagaaggtttcgttgtcgcgtaggagtcggtgtagtcgtagcgtcgtttttaggtagcgcgcgttttcgcgttagttttttttttcgtattgttttagagcgtgttcgtacgtcgcggttagcggtattaggttttcgggcgggaagtttcggaagttgtatttttcgtattgcgtttcggcgttgtttagtagtaattatagtagtttttacgttattcgagttatgttcgtcgcgtcgtcggtttttcggagttgagttggttgtttcgcggacggaaggggatagggtcgggtttcgggcgggcggcgcgttcgttgggttttagcgtcgggtacgaggcggtaaggtggggcggggtttgggttacgacgttttttttttttttttagagggttcgatagtgtcgttaagtttt

SEQ ID NO: 13904 - DNA, 1025 bp, Artificial Sequence
  chemically treated genomic DNA (Homo sapiens) CpG-island No: 13904
aaaacttaacgacactatcgaaccctctaaaaaaaaaaaaaaaacgtcgtaacccaaaccccgccccaccttaccgcctcgtacccgacgctaaaacccaacgaacgcgccgcccgcccgaaacccgaccctatccccttccgtccgcgaaacaaccaactcaactccgaaaaaccgacgacgcgacgaacataactcgaataacgtaaaaactactataattactactaaacaacgccgaaacgcaatacgaaaaatacaacttccgaaacttcccgcccgaaaacctaataccgctaaccgcgacgtacgaacacgctctaaaacaatacgaaaaaaaaaactaacgcgaaaacgcgcgctacctaaaaacgacgctacgactacaccgactcctacgcgacaacgaaaccttctaccacgccaactacaacgaccccgcgcccgcgaccaaacccgatcccgacgacgaccgcgcaaacgaataaacctacgaactacgactcttcgaccgcgtcctaaaacgaaccgcctacctacgacgctacaaacgaacgctacccgccttccaaataccctacccgccgcgacaactactacgtaacttccaaaaccgcctaccctaccaatacctacactacgcgctactcaaaataaaaacccgcccccacccgaaaacctatctcgaactaaacgtcgtaactccccacaaatcgatcgaaaaaacgttatcttcacccaaaacacgaaacccgccgtacgctcgaaaccgcccaactccgatcttactaacccgctcccccaccccctaccccccgaccaaactaaccgactaaaaaaaacgataacgacgacctcacaccttcctccaaaaaaacccgaaacacgaactaaccgccaaatatctcaactactatcaaaaaatactaaacgtcgccgacgaatccctcacgaacctaaaaacccaaccctacgaaataaaataaaaaatcaaaaaaaaacttataaaaaaaaactaataaaaa

SEQ ID NO: 13905 - DNA, 868 bp, Artificial Sequence
  chemically treated genomic DNA (Homo sapiens) CpG-island No: 13905
  unsure (73)
tggaggcgaggcggcgttgttggaggcgaggcggcgttgttggaggcgaggcggcgtatgtgcggtcggcggncgatttggtttcgtttcgcgcgtattatttaattttagaatttttttgtgtcgtattaatagtcgtatcgtttcgaggttgtggaggtcgggcgtagcggcgttaagatggcggttgcggtagtggcggcggcggcggcggcggtcgcggttgtatttttttaggtattggaaatggagagtatggagacgggtcgtcgtcggttcggtaggattggtcgtcgaggttcgaggtagcggtacggtggatttcgggtttgggtcggggatttttgtaatggaggcgagcgggggcgattcgggtttagaagtcgaggatttcgagtgtagtttttattgtttagagttgttttggcggtagaacgagtagcggcgttagggttttttttgcgatattattttgtgtttcggcggggttggaggtcgcgagtttcgggtttatcgttcggtattggttgtcgttatcgagtattttacgtttttgttttcgggttagtttttcgagtttcgttcgggacgggtggagatgcgtaagtggagtttcgagtcggggttcgaattcgatatagtggaagtcgtaatcgagtatatgtatatcgggcgtattcgcgttagtacgggtagcgtgtacgaggtgttggagttggtcgataggtaggcgagggaggcgggagcgcggagggcggcgggcgcggagagggggagatgttcgttggcggaggggagggtagtgtttgttacggtagttcgcgagttttgagtgaatgtattggttttatattcgttgagcgtttgt

SEQ ID NO: 13906 - DNA, 868 bp, Artificial Sequence
  chemically treated genomic DNA (Homo sapiens) CpG-island No: 13906
  unsure (796)
acaaacgctcaacgaatataaaaccaatacattcactcaaaactcgcgaactaccgtaacaaacactaccctcccctccgccaacgaacatctccccctctccgcgcccgccgccctccgcgctcccgcctccctcgcctacctatcgaccaactccaacacctcgtacacgctacccgtactaacgcgaatacgcccgatatacatatactcgattacgacttccactatatcgaattcgaaccccgactcgaaactccacttacgcatctccacccgtcccgaacgaaactcgaaaaactaacccgaaaacaaaaacgtaaaatactcgataacgacaaccaataccgaacgataaacccgaaactcgcgacctccaaccccgccgaaacacaaaataatatcgcaaaaaaaaccctaacgccgctactcgttctaccgccaaaacaactctaaacaataaaaactacactcgaaatcctcgacttctaaacccgaatcgcccccgctcgcctccattacaaaaatccccgacccaaacccgaaatccaccgtaccgctacctcgaacctcgacgaccaatcctaccgaaccgacgacgacccgtctccatactctccatttccaatacctaaaaaaatacaaccgcgaccgccgccgccgccgccgccactaccgcaaccgccatcttaacgccgctacgcccgacctccacaacctcgaaacgatacgactattaatacgacacaaaaaaattctaaaattaaataatacgcgcgaaacgaaaccaaatcgnccgccgaccgcacatacgccgcctcgcctccaacaacgccgcctcgcctccaacaacgccgcctcgcctcca

SEQ ID NO: 13907 - DNA, 868 bp, Artificial Sequence
  chemically treated genomic DNA (Homo sapiens) CpG-island No: 13907
  unsure (796)
gtaggcgtttagcgagtgtgaaattaatgtatttatttaggattcgcgagttgtcgtggtaggtattgttttttttttcgttagcgagtattttttttttttcgcgttcgtcgtttttcgcgttttcgtttttttcgtttatttgtcggttaattttagtatttcgtgtacgttgttcgtgttgacgcggatgcgttcggtgtatatgtattcgattacggtttttattgtgtcgggttcgggtttcggttcggagttttatttgcgtatttttattcgtttcgagcgggattcggaaaattggttcgagagtaggggcgtgaagtattcggtggcggtagttagtatcgagcggtgggttcggaattcgcggtttttagtttcgtcgaagtatagggtaatgtcgtagaagaggttttggcgtcgttgttcgttttgtcgttaggatagttttgagtagtgagagttgtattcgaaattttcggtttttgggttcggatcgttttcgttcgtttttattgtagagattttcggtttaggttcgaagtttatcgtgtcgttgtttcggatttcggcggttagttttgtcgagtcggcggcggttcgtttttatgttttttatttttagtatttgaagagatgtagtcgcggtcgtcgtcgtcgtcgtcgttattgtcgtagtcgttattttgacgtcgttgcgttcggtttttatagtttcggaacgatgcggttgttggtacgatatagagggattttgggattaaatagtgcgcgcggggcggggttaggtcgntcgtcggtcgtatatgcgtcgtttcgtttttagtagcgtcgtttcgtttttagtagcgtcgtttcgttttta

SEQ ID NO: 13908 - DNA, 868 bp, Artificial Sequence
  chemically treated genomic DNA (Homo sapiens) CpG-island No: 13908
  unsure (73)
taaaaacgaaacgacgctactaaaaacgaaacgacgctactaaaaacgaaacgacgcatatacgaccgacgancgacctaaccccgccccgcgcgcactatttaatcccaaaatccctctatatcgtaccaacaaccgcatcgttccgaaactataaaaaccgaacgcaacgacgtcaaaataacgactacgacaataacgacgacgacgacgacgaccgcgactacatctcttcaaatactaaaaataaaaaacataaaaacgaaccgccgccgactcgacaaaactaaccgccgaaatccgaaacaacgacacgataaacttcgaacctaaaccgaaaatctctacaataaaaacgaacgaaaacgatccgaacccaaaaaccgaaaatttcgaatacaactctcactactcaaaactatcctaacgacaaaacgaacaacgacgccaaaacctcttctacgacattaccctatacttcgacgaaactaaaaaccgcgaattccgaacccaccgctcgatactaactaccgccaccgaatacttcacgcccctactctcgaaccaattttccgaatcccgctcgaaacgaataaaaatacgcaaataaaactccgaaccgaaacccgaacccgacacaataaaaaccgtaatcgaatacatatacaccgaacgcatccgcgtcaacacgaacaacgtacacgaaatactaaaattaaccgacaaataaacgaaaaaaacgaaaacgcgaaaaacgacgaacgcgaaaaaaaaaaaatactcgctaacgaaaaaaaaaacaatacctaccacgacaactcgcgaatcctaaataaatacattaatttcacactcgctaaacgcctac

SEQ ID NO: 13909 - DNA, 611 bp, Artificial Sequence
  chemically treated genomic DNA (Homo sapiens) CpG-island No: 13909
ttattcggatcgcggttattttcgggatcgttcgattttcggttttattttcgtttcgttttcggttttattaattttcgttcgggttttaggcgggaggcgacgtttgcgtagtgcggtcgcggggttgtcgttgtttcgcgagtcgtcgattaggtttcgaacgggatggtagaggaggtgaggagggaggaagcgttcggagtggggcgggttcggatttcgattttcggggcgtttcgagttttttagttggttatcgaggtatcgtcgttttatttaggttagtagtcgttttttcgcgtatttcggtttcgttttatacgcgcgttcgagcgagtttcgggtttttttcgggtttagcgtggcgtaggggttagtggttttttcgggtttcgggataggtgagtattttgatgaaggttacggttttgatgcggtagtttgggcgggtgtaggagatcgtgggcgtttttcgtaagggcggcggagatcgattataggtatttttcgggcgtacggtgttcggtcgggttgggggcggttggagaggttttttgtttattgggttttttcgttttgttttgtcgcggattttttttagttttttg

SEQ ID NO: 13910 - DNA, 611 bp, Artificial Sequence
  chemically treated genomic DNA (Homo sapiens) CpG-island No: 13910
caaaaaactaaaaaaaatccgcgacaaaacaaaacgaaaaaacccaataaacaaaaaacctctccaaccgcccccaacccgaccgaacaccgtacgcccgaaaaatacctataatcgatctccgccgcccttacgaaaaacgcccacgatctcctacacccgcccaaactaccgcatcaaaaccgtaaccttcatcaaaatactcacctatcccgaaacccgaaaaaaccactaacccctacgccacgctaaacccgaaaaaaacccgaaactcgctcgaacgcgcgtataaaacgaaaccgaaatacgcgaaaaaacgactactaacctaaataaaacgacgatacctcgataaccaactaaaaaactcgaaacgccccgaaaatcgaaatccgaacccgccccactccgaacgcttcctccctcctcacctcctctaccatcccgttcgaaacctaatcgacgactcgcgaaacaacgacaaccccgcgaccgcactacgcaaacgtcgcctcccgcctaaaacccgaacgaaaattaataaaaccgaaaacgaaacgaaaataaaaccgaaaatcgaacgatcccgaaaataaccgcgatccgaataa

SEQ ID NO: 13911 - DNA, 611 bp, Artificial Sequence
  chemically treated genomic DNA (Homo sapiens) CpG-island No: 13911
tagagagttaggaggggttcgcggtagagtaaagcgggaaggtttaatgggtaggaagtttttttagtcgtttttagttcggtcggatatcgtacgttcgagaggtatttgtaatcggttttcgtcgtttttgcggagggcgtttacgattttttgtattcgtttaggttgtcgtattaggatcgtggtttttattagggtgtttatttgtttcgagattcgagagaattattgatttttgcgttacgttgggttcgaggggagttcggggttcgttcgggcgcgcgtgtgaggcggggtcggggtgcgcgagggggcggttattggtttgggtgaagcggcggtgtttcggtgattagttggggggttcgaagcgtttcgggggtcggagttcgggttcgttttatttcggacgttttttttttttttattttttttgttatttcgttcgaggtttggtcggcggttcgcgggataacgatagtttcgcgatcgtattgcgtaggcgtcgtttttcgtttggagttcgggcgggggttggtggggtcgggggcggggcgggggtggggtcgagaatcgagcggtttcggagatggtcgcgattcgggtgg

SEQ ID NO: 13912 - DNA, 611 bp, Artificial Sequence
  chemically treated genomic DNA (Homo sapiens) CpG-island No: 13912
ccacccgaatcgcgaccatctccgaaaccgctcgattctcgaccccacccccgccccgcccccgaccccaccaacccccgcccgaactccaaacgaaaaacgacgcctacgcaatacgatcgcgaaactatcgttatcccgcgaaccgccgaccaaacctcgaacgaaataacaaaaaaaataaaaaaaaaaaaaacgtccgaaataaaacgaacccgaactccgacccccgaaacgcttcgaaccccccaactaatcaccgaaacaccgccgcttcacccaaaccaataaccgccccctcgcgcaccccgaccccgcctcacacgcgcgcccgaacgaaccccgaactcccctcgaacccaacgtaacgcaaaaatcaataattctctcgaatctcgaaacaaataaacaccctaataaaaaccacgatcctaatacgacaacctaaacgaatacaaaaaatcgtaaacgccctccgcaaaaacgacgaaaaccgattacaaatacctctcgaacgtacgatatccgaccgaactaaaaacgactaaaaaaacttcctacccattaaaccttcccgctttactctaccgcgaacccctcctaactctcta

SEQ ID NO: 13913 - DNA, 614 bp, Artificial Sequence
  chemically treated genomic DNA (Homo sapiens) CpG-island No: 13913
  unsure (590)
tttttcgttagtttagggcgagagttagggacgcggcgtcgggcgagttgcgcgggtttcgggggaggcgcgatttcggaggtatttgttcggattttttttcgttttgtttagatttttggttcgcggagtttcgaggcgcgttcggttcgaatcgcgcgatttttaagtcgtcgcgtttaggattttagcgcgttttttgtcgtcggtgtagggtggcgttcgatggtatcggtttttatttgtttagggacggttgggatcggtttcgcggtcgttcgttatttttttgtttttaacgatatttgcgttttcgatagttcgtatttgagtatggggtttgatcgggtcgggtcggggtcgggtcggggtgggagtcggcgcggatagcgaattgagttcggcgtggtcgggcggcggttgtttcggattttggttaaggtagtaatttagtaatcgaataaaaggcgaagagatttgatagttaagttacgtttttcgttatttcgaagtttcgttttgggggagacgtttatttttggtgcgagtttattggttatttcgtttgatttttcgtggagggggatttnttagagtcgaatcgtaggttgagt

SEQ ID NO: 13914 - DNA, 614 bp, Artificial Sequence
  chemically treated genomic DNA (Homo sapiens) CpG-island No: 13914
  unsure (25)
actcaacctacgattcgactctaanaaatccccctccacgaaaaatcaaacgaaataaccaataaactcgcaccaaaaataaacgtctcccccaaaacgaaacttcgaaataacgaaaaacgtaacttaactatcaaatctcttcgccttttattcgattactaaattactaccttaaccaaaatccgaaacaaccgccgcccgaccacgccgaactcaattcgctatccgcgccgactcccaccccgacccgaccccgacccgacccgatcaaaccccatactcaaatacgaactatcgaaaacgcaaatatcgttaaaaacaaaaaaataacgaacgaccgcgaaaccgatcccaaccgtccctaaacaaataaaaaccgataccatcgaacgccaccctacaccgacgacaaaaaacgcgctaaaatcctaaacgcgacgacttaaaaatcgcgcgattcgaaccgaacgcgcctcgaaactccgcgaaccaaaaatctaaacaaaacgaaaaaaaatccgaacaaatacctccgaaatcgcgcctcccccgaaacccgcgcaactcgcccgacgccgcgtccctaactctcgccctaaactaacgaaaaa

SEQ ID NO: 13915 - DNA, 614 bp, Artificial Sequence
  chemically treated genomic DNA (Homo sapiens) CpG-island No: 13915
  unsure (25)
gtttagtttgcggttcgattttagnggatttttttttacgggaagttaggcgagatagttagtgagttcgtattagaggtgggcgttttttttagggcggagtttcgaggtggcgaggggcgtggtttggttgttaggttttttcgttttttgttcggttattgagttgttgttttggttagagttcggagtagtcgtcgttcgattacgtcgagtttagttcgttgttcgcgtcggtttttatttcggttcgatttcgattcggttcggttaggttttatatttaggtgcgggttatcgggggcgtaggtatcgttggggatagaggggtggcgagcggtcgcggggtcggttttagtcgtttttgggtaggtgagggtcggtgttatcgagcgttattttgtatcggcggtagggggcgcgttggggttttgggcgcggcgatttgggggtcgcgcggttcggatcgagcgcgtttcggagtttcgcgaattagagatttgagtaaggcggggagggattcggataggtgttttcggggtcgcgtttttttcggggttcgcgtagttcgttcgacgtcgcgtttttgattttcgttttgggttggcggggga

SEQ ID NO: 13916 - DNA, 614 bp, Artificial Sequence
  chemically treated genomic DNA (Homo sapiens) CpG-island No: 13916
  unsure (590)
tcccccgccaacccaaaacgaaaatcaaaaacgcgacgtcgaacgaactacgcgaaccccgaaaaaaacgcgaccccgaaaacacctatccgaatccctccccgccttactcaaatctctaattcgcgaaactccgaaacgcgctcgatccgaaccgcgcgacccccaaatcgccgcgcccaaaaccccaacgcgccccctaccgccgatacaaaataacgctcgataacaccgaccctcacctacccaaaaacgactaaaaccgaccccgcgaccgctcgccacccctctatccccaacgatacctacgcccccgataacccgcacctaaatataaaacctaaccgaaccgaatcgaaatcgaaccgaaataaaaaccgacgcgaacaacgaactaaactcgacgtaatcgaacgacgactactccgaactctaaccaaaacaacaactcaataaccgaacaaaaaacgaaaaaacctaacaaccaaaccacgcccctcgccacctcgaaactccgccctaaaaaaaacgcccacctctaatacgaactcactaactatctcgcctaacttcccgtaaaaaaaaatccnctaaaatcgaaccgcaaactaaac

SEQ ID NO: 13917 - DNA, 583 bp, Artificial Sequence
  chemically treated genomic DNA (Homo sapiens) CpG-island No: 13917
  unsure (553)
gggcgattttttgttttcgaattatcgttcggcgcgatcgcgtttcgttcgtcgtatcgttaagttattacgttttttttttttcggtcgcgaagataaaggtatgaggtcgcggttcgtacgcggtatatttatttttttttttttgtattcgtttattttcgttaatatttattcgttttcgtttttttttttttgattattattttttttttttttattatttgagtttttttttatattatttttttacgtttttttttttaagcgtcgtttatcgtattttttttatttagttattcggcgtcgttttatataagacgtttttttttttcgacgttacgttattttttgtcgtatttttttttattatttcgtacgagtattaattttttatatacgtatttcgtacgtcgttttttattacgcgtttttatcgattcgaatttattttaaatttttatttataatttttttttatatacgtattgggtttttaattattgatttcgataattttcgtttattttattcgaacgcgcggtttattttngttttattcgattcgttttttcgtgtttta

SEQ ID NO: 13918 - DNA, 583 bp, Artificial Sequence
  chemically treated genomic DNA (Homo sapiens) CpG-island No: 13918
  unsure (31)
taaaacacgaaaaaacgaatcgaataaaacnaaaataaaccgcgcgttcgaataaaataaacgaaaattatcgaaatcaataattaaaaacccaatacgtatataaaaaaaaattataaataaaaatttaaaataaattcgaatcgataaaaacgcgtaataaaaaacgacgtacgaaatacgtatataaaaaattaatactcgtacgaaataataaaaaaaaatacgacaaaaaataacgtaacgtcgaaaaaaaaaaacgtcttatataaaacgacgccgaataactaaataaaaaaaatacgataaacgacgcttaaaaaaaaaaacgtaaaaaaataatataaaaaaaaactcaaataataaaaaaaaaaaaaataataatcaaaaaaaaaaaaacgaaaacgaataaatattaacgaaaataaacgaatacaaaaaaaaaaaaataaatataccgcgtacgaaccgcgacctcatacctttatcttcgcgaccgaaaaaaaaaaaacgtaataacttaacgatacgacgaacgaaacgcgatcgcgccgaacgataattcgaaaacaaaaaatcgccc

SEQ ID NO: 13919 - DNA, 583 bp, Artificial Sequence
  chemically treated genomic DNA (Homo sapiens) CpG-island No: 13919
  unsure (31)
taaggtacggaggagcggatcgggtggggtnaaggtaggtcgcgcgttcgaatagaatgggcgggggttatcggagttagtagttggagatttagtacgtgtgtgggaaggagttatagatggagatttggaatgggttcggatcggtggaggcgcgtgatggggagcggcgtgcggggtgcgtatgtggaaggttggtattcgtgcggagtagtgaaaaagagtgcggtagggggtgacgtgacgtcggaggggggagacgttttgtgtggggcgacgtcggataattaggtggggagggtgcggtgggcggcgtttgagagggaaaacgtgaaaagatagtgtgggggggggtttaggtaatgggggggaggggagtgatagttaggggaggggaggcgggggcgaataaatgttagcgagagtaggcgggtataggggggaagaggtagatgtgtcgcgtacgagtcgcgattttatgtttttgttttcgcggtcggggggggggaagcgtgatgatttggcgatgcggcggacggggcgcggtcgcgtcgggcggtagttcgggggtagggggtcgttt

SEQ ID NO: 13920 - DNA, 583 bp, Artificial Sequence
  chemically treated genomic DNA (Homo sapiens) CpG-island No: 13920
  unsure (553)
aaacgaccccctacccccgaactaccgcccgacgcgaccgcgccccgtccgccgcatcgccaaatcatcacgcttccccccccccgaccgcgaaaacaaaaacataaaatcgcgactcgtacgcgacacatctacctcttcccccctatacccgcctactctcgctaacatttattcgcccccgcctcccctcccctaactatcactcccctcccccccattacctaaacccccccccacactatcttttcacgttttccctctcaaacgccgcccaccgcaccctccccacctaattatccgacgtcgccccacacaaaacgtctcccccctccgacgtcacgtcaccccctaccgcactctttttcactactccgcacgaataccaaccttccacatacgcaccccgcacgccgctccccatcacgcgcctccaccgatccgaacccattccaaatctccatctataactccttcccacacacgtactaaatctccaactactaactccgataacccccgcccattctattcgaacgcgcgacctaccttnaccccacccgatccgctcctccgtacctta

SEQ ID NO: 13921 - DNA, 617 bp, Artificial Sequence
  chemically treated genomic DNA (Homo sapiens) CpG-island No: 13921
ggggttacgcgtcgtattgtatcgagcggcggtagcggtaagtttgggtgtgagttcgggagtcgttttgtttatcgttttgtcggttttagtcgtcgttaggaggttcgcgggttttgcggtaattttcgttatagacgttgggcggtcggcgatatttggtttatggttttcgcggcggttttgttttttttggtcgttagagttttaagtttcgtcgcgatatttatttcgtacggcgttttttgtaaggggttttttcgtattttgttcgtttttttcgagttggtttggtagttgcgtatgaatttttcgtatttttacgtcgcgggttcggtgatttttaatattcgattgtaggtatatatttagagttatgattaagataacggttttcggggttagtatgatggtcgatttttagggttcgttgcggcgcggcggagtagttaatggcgagttttatagtttcgcgagagtgtttaggcgtttttcgtggttgtttttttagttgttagcggagttttttagggggcggtcgggagtttataatttttagaaagaaaatacgttatttcggaaatagaattgtagttaagattttcgaaaagatttaa

SEQ ID NO: 13922 - DNA, 617 bp, Artificial Sequence
  chemically treated genomic DNA (Homo sapiens) CpG-island No: 13922
ttaaatcttttcgaaaatcttaactacaattctatttccgaaataacgtattttctttctaaaaattataaactcccgaccgccccctaaaaaactccgctaacaactaaaaaaacaaccacgaaaaacgcctaaacactctcgcgaaactataaaactcgccattaactactccgccgcgccgcaacgaaccctaaaaatcgaccatcatactaaccccgaaaaccgttatcttaatcataactctaaatatatacctacaatcgaatattaaaaatcaccgaacccgcgacgtaaaaatacgaaaaattcatacgcaactaccaaaccaactcgaaaaaaacgaacaaaatacgaaaaaaccccttacaaaaaacgccgtacgaaataaatatcgcgacgaaacttaaaactctaacgaccaaaaaaaacaaaaccgccgcgaaaaccataaaccaaatatcgccgaccgcccaacgtctataacgaaaattaccgcaaaacccgcgaacctcctaacgacgactaaaaccgacaaaacgataaacaaaacgactcccgaactcacacccaaacttaccgctaccgccgctcgatacaatacgacgcgtaacccc

SEQ ID NO: 13923 - DNA, 617 bp, Artificial Sequence
  chemically treated genomic DNA (Homo sapiens) CpG-island No: 13923
ttagattttttcgagggttttaattgtagttttgttttcggaatggcgtattttttttttaggaattgtaggttttcggtcgttttttgaggagtttcgttagtagttaagagggtagttacgaagagcgtttgagtattttcgcgagattgtggggttcgttattggttgtttcgtcgcgtcgtaacggattttgggagtcggttattatgttggtttcggaggtcgttattttagttatggttttaaatatgtatttgtaatcggatgttgaggattatcgagttcgcgacgtagaagtacgggaagtttatgcgtagttgttaggttagttcgaagaaggcgagtagggtgcgggagagttttttgtagaagacgtcgtacgaggtgggtgtcgcggcggggtttgaggttttgacggttaaggaggatagagtcgtcgcgggggttatgagttaggtgtcgtcggtcgtttagcgtttgtagcgagggttgtcgtagggttcgcggattttttagcgacggttgggatcggtaggacggtaagtaaagcggttttcgggtttatatttaagtttgtcgttgtcgtcgttcggtgtagtgcggcgcgtagtttt

SEQ ID NO: 13924 - DNA, 617 bp, Artificial Sequence
  chemically treated genomic DNA (Homo sapiens) CpG-island No: 13924
aaaactacgcgccgcactacaccgaacgacgacaacgacaaacttaaatataaacccgaaaaccgctttacttaccgtcctaccgatcccaaccgtcgctaaaaaatccgcgaaccctacgacaaccctcgctacaaacgctaaacgaccgacgacacctaactcataacccccgcgacgactctatcctccttaaccgtcaaaacctcaaaccccgccgcgacacccacctcgtacgacgtcttctacaaaaaactctcccgcaccctactcgccttcttcgaactaacctaacaactacgcataaacttcccgtacttctacgtcgcgaactcgataatcctcaacatccgattacaaatacatatttaaaaccataactaaaataacgacctccgaaaccaacataataaccgactcccaaaatccgttacgacgcgacgaaacaaccaataacgaaccccacaatctcgcgaaaatactcaaacgctcttcgtaactaccctcttaactactaacgaaactcctcaaaaaacgaccgaaaacctacaattcctaaaaaaaaaatacgccattccgaaaacaaaactacaattaaaaccctcgaaaaaatctaa

SEQ ID NO: 13925 - DNA, 625 bp, Artificial Sequence
  chemically treated genomic DNA (Homo sapiens) CpG-island No: 13925
ttcgtacgtcgcgtttcgatttggcgttcgggtaattgggcgcgcgttttgtttttcgttttcggtcgggtgcggtttgtttaggtcggggttttaggcggttgtcgcgcgttttatgttcggcgggttaggcgcggggttgcggggcgcgcgttttttgggcgtcgtcgggcggttgtgggcgtttcggttcggttcgcgtttcggtttttttgtcgtttgttttttgattttttcgcgttcggtttcgcgtttcgtttcggtcgtcgcgtgcgtcgttttgagttgtagtggtcgttatcgttatcgtagttgtagcgtttttttatatttttagcgcgtcgtcggtcgggtagtttggtcgcggtacggaggaggggttttggagggggcggtcgggggaggcgacgtcgaattatcgttttcgggtagtcgtcgtcgggggggagcgcggagatttggaaagggcgcgtcgggtaacgttttttttttttttatttcggtcgtttttttttattttcgttttttttttaattatttttttaatattatattcgtttatttttttttttttaattttttatttattttattttgttaatatataatattttttataagtttt

SEQ ID NO: 13926 - DNA, 625 bp, Artificial Sequence
  chemically treated genomic DNA (Homo sapiens) CpG-island No: 13926
aaaacttataaaaaatattatatattaacaaaataaaataaataaaaaattaaaaaaaaaaaaataaacgaatataatattaaaaaaataattaaaaaaaaaacgaaaataaaaaaaaacgaccgaaataaaaaaaaaaaaaacgttacccgacgcgccctttccaaatctccgcgctcccccccgacgacgactacccgaaaacgataattcgacgtcgcctcccccgaccgccccctccaaaacccctcctccgtaccgcgaccaaactacccgaccgacgacgcgctaaaaatataaaaaaacgctacaactacgataacgataacgaccactacaactcaaaacgacgcacgcgacgaccgaaacgaaacgcgaaaccgaacgcgaaaaaatcaaaaaacaaacgacaaaaaaaccgaaacgcgaaccgaaccgaaacgcccacaaccgcccgacgacgcccaaaaaacgcgcgccccgcaaccccgcgcctaacccgccgaacataaaacgcgcgacaaccgcctaaaaccccgacctaaacaaaccgcacccgaccgaaaacgaaaaacaaaacgcgcgcccaattacccgaacgccaaatcgaaacgcgacgtacgaa

SEQ ID NO: 13927 - DNA, 625 bp, Artificial Sequence
  chemically treated genomic DNA (Homo sapiens) CpG-island No: 13927
ggggtttgtaggaagtattgtatattggtaggatggaatgggtaggaagttggaagaggaggggtaggcgagtgtagtgttaggagggtagttgggaggggagcgggggtgaggaggggcggtcggagtgggaggaggggaggcgttgttcgacgcgttttttttaagttttcgcgttttttttcggcggcggttgttcgggggcggtggttcggcgtcgtttttttcgatcgttttttttagggtttttttttcgtgtcgcggttaggttgttcggtcggcggcgcgttggaaatatgaagagacgttgtagttgcggtggcggtggcggttattgtagtttagagcggcgtacgcggcggtcggggcgggacgcggggtcgggcgcggagaagttaaaaaatagacggtagagaggtcgggacgcggatcgggtcggggcgtttatagtcgttcgacggcgtttagagagcgcgcgtttcgtagtttcgcgtttagttcgtcgggtatggggcgcgcggtagtcgtttgaagtttcggtttggatagatcgtattcggtcggaggcggagggtagggcgcgcgtttagttgttcgggcgttaaatcggagcgcggcgtgcggg

SEQ ID NO: 13928 - DNA, 625 bp, Artificial Sequence
  chemically treated genomic DNA (Homo sapiens) CpG-island No: 13928
cccgcacgccgcgctccgatttaacgcccgaacaactaaacgcgcgccctaccctccgcctccgaccgaatacgatctatccaaaccgaaacttcaaacgactaccgcgcgccccatacccgacgaactaaacgcgaaactacgaaacgcgcgctctctaaacgccgtcgaacgactataaacgccccgacccgatccgcgtcccgacctctctaccgtctattttttaacttctccgcgcccgaccccgcgtcccgccccgaccgccgcgtacgccgctctaaactacaataaccgccaccgccaccgcaactacaacgtctcttcatatttccaacgcgccgccgaccgaacaacctaaccgcgacacgaaaaaaaaaccctaaaaaaaacgatcgaaaaaaacgacgccgaaccaccgcccccgaacaaccgccgccgaaaaaaaacgcgaaaacttaaaaaaaacgcgtcgaacaacgcctcccctcctcccactccgaccgcccctcctcacccccgctcccctcccaactaccctcctaacactacactcgcctacccctcctcttccaacttcctacccattccatcctaccaatatacaatacttcctacaaacccc

SEQ ID NO: 13929 - DNA, 598 bp, Artificial Sequence
  chemically treated genomic DNA (Homo sapiens) CpG-island No: 13929
gcgttcgtcgcgtaggttttcgatgagttgatgttttgggtcgaggattgtttcgaagttcggtatttcgtgtacgcggatttcggttttaataatgttttgacggataatggtcgtataatagcggttattgattggagcgaggcgatgttcggggatttttaatacgaggtcgttaatatttttttttggaggtcgtggttggtttgtatggagtagtagacgcgttatttcgagcggaggtattcggagtttgtaggatcgtcgcggtttcgggcgtatatgtttcgtattggttttgattaattttattagagtttggttgacggtaatttcgatgatgtagtttgggcgtagggtcgatgcgacgtaatcgttcgattcggagtcgggattgtcgggcgtatataaatcgttcgtagaagcgcggtcgtttggatcgatggttgtgtagaagtattcgtcgatagtggaaatcgacgttttagtattcgttcgagggtaaaggaatagagtagatgtcgatcgggatttatcgtcgataggtttcggatttgtagtacgtgttgataattaattatcggtatagtatatcggt

SEQ ID NO: 13930 - DNA, 598 bp, Artificial Sequence
  chemically treated genomic DNA (Homo sapiens) CpG-island No: 13930
accgatatactataccgataattaattatcaacacgtactacaaatccgaaacctatcgacgataaatcccgatcgacatctactctattcctttaccctcgaacgaatactaaaacgtcgatttccactatcgacgaatacttctacacaaccatcgatccaaacgaccgcgcttctacgaacgatttatatacgcccgacaatcccgactccgaatcgaacgattacgtcgcatcgaccctacgcccaaactacatcatcgaaattaccgtcaaccaaactctaataaaattaatcaaaaccaatacgaaacatatacgcccgaaaccgcgacgatcctacaaactccgaatacctccgctcgaaataacgcgtctactactccatacaaaccaaccacgacctccaaaaaaaaatattaacgacctcgtattaaaaatccccgaacatcgcctcgctccaatcaataaccgctattatacgaccattatccgtcaaaacattattaaaaccgaaatccgcgtacacgaaataccgaacttcgaaacaatcctcgacccaaaacatcaactcatcgaaaacctacgcgacgaacgc

SEQ ID NO: 13931 - DNA, 598 bp, Artificial Sequence
  chemically treated genomic DNA (Homo sapiens) CpG-island No: 13931
gtcgatatattatgtcgatgattaattgttaatacgtgttgtaggttcgaggtttgtcgacgatagatttcggtcggtatttattttatttttttgttttcggacgagtgttggggcgtcggtttttattatcggcgagtatttttatatagttatcggtttagacggtcgcgtttttgcgggcgatttgtgtacgttcgatagtttcggtttcggatcggacgattgcgtcgtatcgattttgcgtttaagttgtattatcgaaattgtcgttaattaagttttgatagagttggttaagattaatgcggagtatatacgttcggagtcgcggcgattttgtaagtttcggatgttttcgttcgaagtagcgcgtttgttgttttatataagttaattacggtttttagaagaagatgttggcgatttcgtattgggaattttcgaatatcgtttcgttttagttaatgatcgttgttatgcggttattgttcgttaggatattgttggagtcgaaattcgcgtgtacgaggtgtcggatttcggggtagttttcggtttaaagtattagtttatcgagagtttgcgcgacggacgt

SEQ ID NO: 13932 - DNA, 598 bp, Artificial Sequence
  chemically treated genomic DNA (Homo sapiens) CpG-island No: 13932
acgtccgtcgcgcaaactctcgataaactaatactttaaaccgaaaactaccccgaaatccgacacctcgtacacgcgaatttcgactccaacaatatcctaacgaacaataaccgcataacaacgatcattaactaaaacgaaacgatattcgaaaattcccaatacgaaatcgccaacatcttcttctaaaaaccgtaattaacttatataaaacaacaaacgcgctacttcgaacgaaaacatccgaaacttacaaaatcgccgcgactccgaacgtatatactccgcattaatcttaaccaactctatcaaaacttaattaacgacaatttcgataatacaacttaaacgcaaaatcgatacgacgcaatcgtccgatccgaaaccgaaactatcgaacgtacacaaatcgcccgcaaaaacgcgaccgtctaaaccgataactatataaaaatactcgccgataataaaaaccgacgccccaacactcgtccgaaaacaaaaaaataaaataaataccgaccgaaatctatcgtcgacaaacctcgaacctacaacacgtattaacaattaatcatcgacataatatatcgac

SEQ ID NO: 13933 - DNA, 572 bp, Artificial Sequence
  chemically treated genomic DNA (Homo sapiens) CpG-island No: 13933
ttcgtcgcgcgaggtaagtttaagggtttcgacgtagggcgcgggtagggaggcgcgtcgtcgttttcgggatatttaattttagtttggagttcgtcgggcgtcggacgttcgggtttttcggcgttcgcgtttttttttttttttttcggttgtttttcggagcgttttatttttcgttttgcgttcgtttcgcgcgtaggtatcggtcggcgggcgcggggagcggggcgcggcggtcgttcgtttttgcggagtcgttttttggtcgttgtcgtcgcgtatcgtttagttcgcgtcgttcgcgtcgttcgggttttagtcgtttcgttgttcgttttgagtgcgtcgcggttgttcgagcgtttcgtagacgggcgggtggtcgtggacgtttagttagtagttcgtagtatggattcggatttcggggagtagagcgagggcgagttcgtgatcgtcgtaggtatttaggggtcgcgacggtttaggcgggtgggttggggttggggaggacgggaggttggggtatgaaatcgggaagtcgatttttagtagttcgatttttttta

SEQ ID NO: 13934 - DNA, 572 bp, Artificial Sequence
  chemically treated genomic DNA (Homo sapiens) CpG-island No: 13934
taaaaaaaatcgaactactaaaaatcgacttcccgatttcataccccaacctcccgtcctccccaaccccaacccacccgcctaaaccgtcgcgacccctaaatacctacgacgatcacgaactcgccctcgctctactccccgaaatccgaatccatactacgaactactaactaaacgtccacgaccacccgcccgtctacgaaacgctcgaacaaccgcgacgcactcaaaacgaacaacgaaacgactaaaacccgaacgacgcgaacgacgcgaactaaacgatacgcgacgacaacgaccaaaaaacgactccgcaaaaacgaacgaccgccgcgccccgctccccgcgcccgccgaccgatacctacgcgcgaaacgaacgcaaaacgaaaaataaaacgctccgaaaaacaaccgaaaaaaaaaaaaaaaaacgcgaacgccgaaaaacccgaacgtccgacgcccgacgaactccaaactaaaattaaatatcccgaaaacgacgacgcgcctccctacccgcgccctacgtcgaaacccttaaacttacctcgcgcgacgaa

SEQ ID NO: 13935 - DNA, 572 bp, Artificial Sequence
  chemically treated genomic DNA (Homo sapiens) CpG-island No: 13935
tggaaggggtcgggttgttgaggatcggtttttcgattttatgttttagtttttcgttttttttagttttagtttattcgtttgggtcgtcgcggtttttaggtatttgcggcggttacgggttcgttttcgttttgtttttcggaattcgaatttatgttgcgggttgttggttgggcgtttacggttattcgttcgtttgcggggcgttcgggtagtcgcggcgtatttagggcggatagcggggcggttggagttcgggcggcgcgggcggcgcgggttgggcggtgcgcggcggtagcggttagggggcggtttcgtagaggcgagcggtcgtcgcgtttcgtttttcgcgttcgtcggtcggtgtttgcgcgcgaggcgagcgtagggcggagggtggggcgtttcgggagatagtcgggaggagggaggggaggcgcgagcgtcgaggagttcgagcgttcggcgttcggcgggttttaggttggggttaaatatttcgggggcggcggcgcgtttttttattcgcgttttgcgtcggagtttttggatttgtttcgcgcggcgag

SEQ ID NO: 13936 - DNA, 572 bp, Artificial Sequence
  chemically treated genomic DNA (Homo sapiens) CpG-island No: 13936
ctcgccgcgcgaaacaaatccaaaaactccgacgcaaaacgcgaataaaaaaacgcgccgccgcccccgaaatatttaaccccaacctaaaacccgccgaacgccgaacgctcgaactcctcgacgctcgcgcctcccctccctcctcccgactatctcccgaaacgccccaccctccgccctacgctcgcctcgcgcgcaaacaccgaccgacgaacgcgaaaaacgaaacgcgacgaccgctcgcctctacgaaaccgccccctaaccgctaccgccgcgcaccgcccaacccgcgccgcccgcgccgcccgaactccaaccgccccgctatccgccctaaatacgccgcgactacccgaacgccccgcaaacgaacgaataaccgtaaacgcccaaccaacaacccgcaacataaattcgaattccgaaaaacaaaacgaaaacgaacccgtaaccgccgcaaatacctaaaaaccgcgacgacccaaacgaataaactaaaactaaaaaaaacgaaaaactaaaacataaaatcgaaaaaccgatcctcaacaacccgaccccttcca

SEQ ID NO: 13937 - DNA, 817 bp, Artificial Sequence
  chemically treated genomic DNA (Homo sapiens) CpG-island No: 13937
cgcggatgagcggatatcgtaattcggggatatcgttttttagggaatatcgcgtttagggatatcgttttcgtcgtattatttggttttcgaggtaaattttttgagttagtttttgtaggagatagtagagtagtgaagttttcgttcgtagtttggaaatagcgtagtatcgcggttacggaatagggttcggagattcgcgcgggagcgttatagttcgttcgtcgtagtttatatggcgcggcgtcgggattcggagcgagtagggagataacgggcgtaggcgcggagcgataattgacgcgagggtggcggcgtgtggacggggcgacggcgtagagcgggaggaagatttacgtttggtaggcggcgtgtgggcggggcgatgatgtagggcggggcgatgatgtagggcggggcgaggatagacgcgaaattgacggcgtgtgggcggggttacggcgcggggcgggacgaagacggggtgtaaggcgggcggggtaacgacggcggaggggcgaaggttcgaggggggcggtaggtgggcggggcgaggatagacgcgaagttgacggcgtgtggacggggcgacggcgagggacggggtaaagattggacgtaagaaggggcggggcgataacggcggagggggcgaaggcgcgaggcgaacggcgagtgggcggggtgaagatcgacgcgaagcgggcggtggttgggcggggcgaagattgacgcgaggcgggcggtgaatgggcggggcgaagattggcgcgaggtgggcggtgggtgggtagggaaaagattgagcgagaag

SEQ ID NO: 13938 - DNA, 817 bp, Artificial Sequence
  chemically treated genomic DNA (Homo sapiens) CpG-island No: 13938
cttctcgctcaatcttttccctacccacccaccgcccacctcgcgccaatcttcgccccgcccattcaccgcccgcctcgcgtcaatcttcgccccgcccaaccaccgcccgcttcgcgtcgatcttcaccccgcccactcgccgttcgcctcgcgccttcgccccctccgccgttatcgccccgccccttcttacgtccaatctttaccccgtccctcgccgtcgccccgtccacacgccgtcaacttcgcgtctatcctcgccccgcccacctaccgcccccctcgaaccttcgcccctccgccgtcgttaccccgcccgccttacaccccgtcttcgtcccgccccgcgccgtaaccccgcccacacgccgtcaatttcgcgtctatcctcgccccgccctacatcatcgccccgccctacatcatcgccccgcccacacgccgcctaccaaacgtaaatcttcctcccgctctacgccgtcgccccgtccacacgccgccaccctcgcgtcaattatcgctccgcgcctacgcccgttatctccctactcgctccgaatcccgacgccgcgccatataaactacgacgaacgaactataacgctcccgcgcgaatctccgaaccctattccgtaaccgcgatactacgctatttccaaactacgaacgaaaacttcactactctactatctcctacaaaaactaactcaaaaaatttacctcgaaaaccaaataatacgacgaaaacgatatccctaaacgcgatattccctaaaaaacgatatccccgaattacgatatccgctcatccgcg

SEQ ID NO: 13939 - DNA, 817 bp, Artificial Sequence
  chemically treated genomic DNA (Homo sapiens) CpG-island No: 13939
tttttcgtttagttttttttttgtttatttatcgtttatttcgcgttagttttcgtttcgtttatttatcgttcgtttcgcgttagttttcgtttcgtttaattatcgttcgtttcgcgtcggtttttatttcgtttattcgtcgttcgtttcgcgttttcgtttttttcgtcgttgtcgtttcgtttttttttgcgtttagtttttgtttcgtttttcgtcgtcgtttcgtttatacgtcgttagtttcgcgtttgttttcgtttcgtttatttatcgtttttttcgggttttcgttttttcgtcgtcgttgtttcgttcgttttgtatttcgttttcgtttcgtttcgcgtcgtggtttcgtttatacgtcgttagtttcgcgtttgttttcgtttcgttttgtattatcgtttcgttttgtattatcgtttcgtttatacgtcgtttgttaggcgtgagtttttttttcgttttgcgtcgtcgtttcgtttatacgtcgttattttcgcgttagttgtcgtttcgcgtttgcgttcgttgtttttttgttcgtttcgggtttcggcgtcgcgttatgtgggttgcggcgggcgggttgtggcgttttcgcgcgggttttcgggttttgtttcgtagtcgcgatgttgcgttatttttaggttgcgagcggggattttattgttttgttgttttttgtaagaattggtttaagaaatttgtttcgaaaattaagtaatgcggcgggggcggtgtttttgggcgcggtattttttagggggcggtgttttcgggttgcggtgttcgtttattcgcg

SEQ ID NO: 13940 - DNA, 817 bp, Artificial Sequence
  chemically treated genomic DNA (Homo sapiens) CpG-island No: 13940
cgcgaataaacgaacaccgcaacccgaaaacaccgccccctaaaaaataccgcgcccaaaaacaccgcccccgccgcattacttaattttcgaaacaaatttcttaaaccaattcttacaaaaaacaacaaaacaataaaatccccgctcgcaacctaaaaataacgcaacatcgcgactacgaaacaaaacccgaaaacccgcgcgaaaacgccacaacccgcccgccgcaacccacataacgcgacgccgaaacccgaaacgaacaaaaaaacaacgaacgcaaacgcgaaacgacaactaacgcgaaaataacgacgtataaacgaaacgacgacgcaaaacgaaaaaaaaactcacgcctaacaaacgacgtataaacgaaacgataatacaaaacgaaacgataatacaaaacgaaacgaaaacaaacgcgaaactaacgacgtataaacgaaaccacgacgcgaaacgaaacgaaaacgaaatacaaaacgaacgaaacaacgacgacgaaaaaacgaaaacccgaaaaaaacgataaataaacgaaacgaaaacaaacgcgaaactaacgacgtataaacgaaacgacgacgaaaaacgaaacaaaaactaaacgcaaaaaaaaacgaaacgacaacgacgaaaaaaacgaaaacgcgaaacgaacgacgaataaacgaaataaaaaccgacgcgaaacgaacgataattaaacgaaacgaaaactaacgcgaaacgaacgataaataaacgaaacgaaaactaacgcgaaataaacgataaataaacaaaaaaaaaactaaacgaaaaa

SEQ ID NO: 13941 - DNA, 984 bp, Artificial Sequence
  chemically treated genomic DNA (Homo sapiens) CpG-island No: 13941
  unsure (117, 284)
tcgtttgtaagttattcgtggatttttatatttgagatattttcgagttttgtaaatgcggttcgatttgtgagcgttgagggagcggtttgtgtttttacgaatagttttattatngcgtgtttagattataatgagcgcgtagcgtttttgaaattattttatttgtgttgtattttcgatgtttgataagttattagtagcgttcgaattattacgttttttagttatatttgggattcgtagattaacgatcgatagacgttaatagcgtttatcgtatnggttagtataggtacgttttttgcgttacggtcgtaaaaggttcgtcgttttttacgaataggatcgtagcggtttatttcgagatttgttacgaagattaacggcgattcgcgaatataagaattcgcgtttggcgtttttgcgttattagtcgttttggcgatttttttcgcgggtataatatttttcggggttcgagtaagaaagtatcgtcgttttataaatttagaatattttttattattgataagcgaaaattgaagttacgttttgtaagcgtaattacggagaggttttagtaacgtatggtcgtagggagtatatcgatggttatttaggtcggagaattattaggcgagtttcgcgttattttttattttagatatacgataaattcggttggtagcgatcgtgcggtattaatagttttttataaaagggcgttttggaagagaatagattttcggttttttttatttcgaagcgtgtttcgttaatcgacgttattttatagcgttatgcggttggttaatatcgaatgacgattttcgttaatttagcgttagacgttatttcgtaagacgcggcgcgttttcgaaagcgatcggattttgatgattagaggtttacgtcgtataattttggttatatttagttttagagtacgggttaatatttttttttttttattattgtaga

SEQ ID NO: 13942 - DNA, 984 bp, Artificial Sequence
  chemically treated genomic DNA (Homo sapiens) CpG-island No: 13942
  unsure (701, 868)
tctacaataataaaaaaaaaaaaatattaacccgtactctaaaactaaatataaccaaaattatacgacgtaaacctctaatcatcaaaatccgatcgctttcgaaaacgcgccgcgtcttacgaaataacgtctaacgctaaattaacgaaaatcgtcattcgatattaaccaaccgcataacgctataaaataacgtcgattaacgaaacacgcttcgaaataaaaaaaaccgaaaatctattctcttccaaaacgcccttttataaaaaactattaataccgcacgatcgctaccaaccgaatttatcgtatatctaaaataaaaaataacgcgaaactcgcctaataattctccgacctaaataaccatcgatatactccctacgaccatacgttactaaaacctctccgtaattacgcttacaaaacgtaacttcaattttcgcttatcaataataaaaaatattctaaatttataaaacgacgatactttcttactcgaaccccgaaaaatattatacccgcgaaaaaaatcgccaaaacgactaataacgcaaaaacgccaaacgcgaattcttatattcgcgaatcgccgttaatcttcgtaacaaatctcgaaataaaccgctacgatcctattcgtaaaaaacgacgaaccttttacgaccgtaacgcaaaaaacgtacctatactaaccnatacgataaacgctattaacgtctatcgatcgttaatctacgaatcccaaatataactaaaaaacgtaataattcgaacgctactaataacttatcaaacatcgaaaatacaacacaaataaaataatttcaaaaacgctacgcgctcattataatctaaacacgcnataataaaactattcgtaaaaacacaaaccgctccctcaacgctcacaaatcgaaccgcatttacaaaactcgaaaatatctcaaatataaaaatccacgaataacttacaaacga

SEQ ID NO: 13943 - DNA, 984 bp, Artificial Sequence
  chemically treated genomic DNA (Homo sapiens) CpG-island No: 13943
  unsure (701, 868)
tttataatagtaggagagagagagtattagttcgtgttttgaagttggatgtggttaggattgtgcgacgtgagtttttgattattagggttcgatcgttttcggagacgcgtcgcgttttgcgggatgacgtttggcgttgagttggcgaggatcgttattcggtattagttagtcgtatagcgttgtgaggtggcgtcgattagcgggatacgtttcggagtagaggaggtcgggagtttgtttttttttagggcgtttttttgtgggaagttgttgatgtcgtacggtcgttgttagtcgggtttgtcgtgtgtttagggtgaagggtggcgcgaggttcgtttggtggtttttcggtttagatggttatcggtgtattttttgcggttatgcgttgttagagttttttcgtgattgcgtttgtagggcgtggttttagttttcgtttgttagtgatgggaggtgttttgagtttatgaggcggcggtatttttttgttcgggtttcggagagtgttgtgttcgcgggagaagtcgttagggcggttggtgacgtagggacgttaggcgcgagtttttgtgttcgcgggtcgtcgttggttttcgtggtaggtttcgagatgagtcgttacggttttgttcgtgggaggcgacgggttttttgcggtcgtggcgtaggaggcgtgtttgtgttgattnatgcggtgggcgttattggcgtttgtcgatcgttagtttgcgggttttagatatggttagggagcgtagtggttcggacgttgttgatgatttgttaggtatcggagatgtagtatagatgggatgattttaggagcgttacgcgtttattgtggtttggatacgtnatagtgaggttgttcgtagagatataggtcgtttttttagcgtttatagatcgggtcgtatttgtaggattcgggagtattttagatgtgagaatttacgagtgatttgtagacga

SEQ ID NO: 13944 - DNA, 984 bp, Artificial Sequence
  chemically treated genomic DNA (Homo sapiens) CpG-island No: 13944
  unsure (117, 284)
tcgtctacaaatcactcgtaaattctcacatctaaaatactcccgaatcctacaaatacgacccgatctataaacgctaaaaaaacgacctatatctctacgaacaacctcactatnacgtatccaaaccacaataaacgcgtaacgctcctaaaatcatcccatctatactacatctccgatacctaacaaatcatcaacaacgtccgaaccactacgctccctaaccatatctaaaacccgcaaactaacgatcgacaaacgccaataacgcccaccgcatnaatcaacacaaacacgcctcctacgccacgaccgcaaaaaacccgtcgcctcccacgaacaaaaccgtaacgactcatctcgaaacctaccacgaaaaccaacgacgacccgcgaacacaaaaactcgcgcctaacgtccctacgtcaccaaccgccctaacgacttctcccgcgaacacaacactctccgaaacccgaacaaaaaaataccgccgcctcataaactcaaaacacctcccatcactaacaaacgaaaactaaaaccacgccctacaaacgcaatcacgaaaaaactctaacaacgcataaccgcaaaaaatacaccgataaccatctaaaccgaaaaaccaccaaacgaacctcgcgccacccttcaccctaaacacacgacaaacccgactaacaacgaccgtacgacatcaacaacttcccacaaaaaaacgccctaaaaaaaaacaaactcccgacctcctctactccgaaacgtatcccgctaatcgacgccacctcacaacgctatacgactaactaataccgaataacgatcctcgccaactcaacgccaaacgtcatcccgcaaaacgcgacgcgtctccgaaaacgatcgaaccctaataatcaaaaactcacgtcgcacaatcctaaccacatccaacttcaaaacacgaactaatactctctctctcctactattataaa

SEQ ID NO: 13945 - DNA, 599 bp, Artificial Sequence
  chemically treated genomic DNA (Homo sapiens) CpG-island No: 13945
gttggcgatttcgtgggcggcgttttcgttggcgatgtcgtgggcggtattttcgttggcgatgtttttgtcggcggtttcgttagcgatgttttgggcggcgttttttttggcgatgttttgggcggcgttttttttggcgatgttttgggcggcgttttcgttggcgatgttttgggcggcgttttttttggcgatgttttgggcggcgttttcgttggcgatgttttgggcggcgttttcgttggcgatgtcgtggacggcgttttttatggcgatgttttggacggcgttttcgttggcgatgttttgggcggcgttttcgttggcgatgtcgtgggcggcgttttcgttggcgatgtcgtgggcggcgttttcgttggcgatgtcgtgggcggcgttttcgttggcgatgttgtgggcggtattttcgttggcgatgtttttgtcggcggtttcgttagcgatgtcgtgtatagtattttcgttagcgatgtcgtgtgtggcgttttcgttagtgatgtcgtgtacggtgtttttatggggagttagaaaaatatagagttaaggttagtgttttggtggtggagattgtgaat

SEQ ID NO: 13946 - DNA, 599 bp, Artificial Sequence
  chemically treated genomic DNA (Homo sapiens) CpG-island No: 13946
attcacaatctccaccaccaaaacactaaccttaactctatatttttctaactccccataaaaacaccgtacacgacatcactaacgaaaacgccacacacgacatcgctaacgaaaatactatacacgacatcgctaacgaaaccgccgacaaaaacatcgccaacgaaaataccgcccacaacatcgccaacgaaaacgccgcccacgacatcgccaacgaaaacgccgcccacgacatcgccaacgaaaacgccgcccacgacatcgccaacgaaaacgccgcccaaaacatcgccaacgaaaacgccgtccaaaacatcgccataaaaaacgccgtccacgacatcgccaacgaaaacgccgcccaaaacatcgccaacgaaaacgccgcccaaaacatcgccaaaaaaaacgccgcccaaaacatcgccaacgaaaacgccgcccaaaacatcgccaaaaaaaacgccgcccaaaacatcgccaaaaaaaacgccgcccaaaacatcgctaacgaaaccgccgacaaaaacatcgccaacgaaaataccgcccacgacatcgccaacgaaaacgccgcccacgaaatcgccaac

SEQ ID NO: 13947 - DNA, 599 bp, Artificial Sequence
  chemically treated genomic DNA (Homo sapiens) CpG-island No: 13947
atttatagtttttattattagggtattgattttaattttgtgtttttttagttttttatgaggatatcgtatacgatattattaacgaggacgttatatacgatatcgttaacgaggatattgtatacgatatcgttaacgaggtcgtcgataagggtatcgttaacgaggatgtcgtttatagtatcgttaacgaggacgtcgtttacggtatcgttagcgaggacgtcgtttacggtatcgttagcgaggacgtcgtttacggtatcgttagcgaggacgtcgtttagggtatcgttaacgaggacgtcgtttagggtatcgttatggaggacgtcgtttacggtatcgttaacgaggacgtcgtttagggtatcgttaacgaggacgtcgtttagggtatcgttaaggaggacgtcgtttagggtatcgttaacgaggacgtcgtttagggtatcgttaaagaggacgtcgtttagggtatcgttaaggaggacgtcgtttagggtatcgttaacgaggtcgtcgataagggtatcgttaacgaggatgtcgtttacggtatcgttagcgaggacgtcgtttacggaatcgttagt

SEQ ID NO: 13948 - DNA, 599 bp, Artificial Sequence
  chemically treated genomic DNA (Homo sapiens) CpG-island No: 13948
actaacgattccgtaaacgacgtcctcgctaacgataccgtaaacgacatcctcgttaacgatacccttatcgacgacctcgttaacgataccctaaacgacgtcctccttaacgataccctaaacgacgtcctctttaacgataccctaaacgacgtcctcgttaacgataccctaaacgacgtcctccttaacgataccctaaacgacgtcctcgttaacgataccctaaacgacgtcctcgttaacgataccgtaaacgacgtcctccataacgataccctaaacgacgtcctcgttaacgataccctaaacgacgtcctcgctaacgataccgtaaacgacgtcctcgctaacgataccgtaaacgacgtcctcgctaacgataccgtaaacgacgtcctcgttaacgatactataaacgacatcctcgttaacgatacccttatcgacgacctcgttaacgatatcgtatacaatatcctcgttaacgatatcgtatataacgtcctcgttaataatatcgtatacgatatcctcataaaaaactaaaaaaacacaaaattaaaatcaataccctaataataaaaactataaat

SEQ ID NO: 13949 - DNA, 503 bp, Artificial Sequence
  chemically treated genomic DNA (Homo sapiens) CpG-island No: 13949
ggcgatgtcgtgggcggcgttttttttggcgatgttttgggcggcgttttcgttggcgatgttttgggcggcgttttcgttggcgatgttttgggcggtattttttttgtcgatgttttggacggcgttttcgttggcgatttcgtgggcgtcgttttcgttggcgatgttttgggcggcgttttcgttggcgatgtcgtgggcggcgttttttttggcgatgttttgggcggcgttttcgttggcgatgttttgggcggcgttttttttggcgatgttttgggcggcgttttttttggcgatgttttgggcggcgttttttttggcgatgttttgggcggcgttttcgttggcgatgtcgtggacggcgtattttttggcgatgttttggatggcgttttcgttggcgatgttttgggtcggcgttttcgttggcgatgttttgggcggcgttttcgttggcgatgttttggacggcgttttttttgtcgatgttttggtcg

SEQ ID NO: 13950 - DNA, 503 bp, Artificial Sequence
  chemically treated genomic DNA (Homo sapiens) CpG-island No: 13950
cgaccaaaacatcgacaaaaaaaacgccgtccaaaacatcgccaacgaaaacgccgcccaaaacatcgccaacgaaaacgccgacccaaaacatcgccaacgaaaacgccatccaaaacatcgccaaaaaatacgccgtccacgacatcgccaacgaaaacgccgcccaaaacatcgccaaaaaaaacgccgcccaaaacatcgccaaaaaaaacgccgcccaaaacatcgccaaaaaaaacgccgcccaaaacatcgccaacgaaaacgccgcccaaaacatcgccaaaaaaaacgccgcccacgacatcgccaacgaaaacgccgcccaaaacatcgccaacgaaaacgacgcccacgaaatcgccaacgaaaacgccgtccaaaacatcgacaaaaaaaataccgcccaaaacatcgccaacgaaaacgccgcccaaaacatcgccaacgaaaacgccgcccaaaacatcgccaaaaaaaacgccgcccacgacatcgcc

SEQ ID NO: 13951 - DNA, 503 bp, Artificial Sequence
  chemically treated genomic DNA (Homo sapiens) CpG-island No: 13951
cgattagggtatcgataaggaggacgtcgtttagggtatcgttaacgaggacgtcgtttagggtatcgttaacgaggacgtcggtttagggtatcgttaacgaggacgttatttagggtatcgttaaggagtacgtcgtttacggtatcgttaacgaggacgtcgtttagggtatcgttaaggaggacgtcgtttagggtatcgttaaggaggacgtcgtttagggtatcgttaaggaggacgtcgtttagggtatcgttaacgaggacgtcgtttagggtatcgttaaagaggacgtcgtttacggtatcgttaacgaggacgtcgtttagggtatcgttaacgaggacggcgtttacggaatcgttagcgaggacgtcgtttagggtatcgataaggaggatgtcgtttagggtatcgttaacgaggacgtcgtttagggtatcgttaacgaggacgtcgtttagggtatcgttaaagaggacgtcgtttacggtatcgtt

SEQ ID NO: 13952 - DNA, 503 bp, Artificial Sequence
  chemically treated genomic DNA (Homo sapiens) CpG-island No: 13952
aacgataccgtaaacgacgtcctctttaacgataccctaaacgacgtcctcgttaacgataccctaaacgacgtcctcgttaacgataccctaaacgacatcctccttatcgataccctaaacgacgtcctcgctaacgattccgtaaacgccgtcctcgttaacgataccctaaacgacgtcctcgttaacgataccgtaaacgacgtcctctttaacgataccctaaacgacgtcctcgttaacgataccctaaacgacgtcctccttaacgataccctaaacgacgtcctccttaacgataccctaaacgacgtcctccttaacgataccctaaacgacgtcctcgttaacgataccgtaaacgacgtactccttaacgataccctaaataacgtcctcgttaacgataccctaaaccgacgtcctcgttaacgataccctaaacgacgtcctcgttaacgataccctaaacgacgtcctccttatcgataccctaatcg

SEQ ID NO: 13953 - DNA, 811 bp, Artificial Sequence
  chemically treated genomic DNA (Homo sapiens) CpG-island No: 13953
  unsure (596, 637, 653, 736)
gtcgtgggagagcgaacggggacggtgggatcgcggacgagatttattgggatcgggttggggttggttgtcgtaatttgagtaagtgatgcgaggaatcgtaaaggtatgggggaataagggggggagggggggcgtgggcgttacgaagagaggacgagggatggaatggtggcgtcgagaggtggaataggggagagagtgtatggcgttgcgtagtgtgggtgagagggttgagagagaagcgataggggtcgcgcgtgattattggagaggagtcgtagcggtataaggtgttttgtaaatggtggacggtgcgatggtagcgagcggggttggtggcgggtgattcgtaagtggacgtgagtgtttggacggttagttgcgggagtgcggcgaatattttggtgtaagttcgagtgtgattataatggatttgcgggtgaatatgtcgacgatagaatgttttgtggagtaaagttgtacgcgcgacgcgggatgcgaaaaacgttttcgttaacgtacggaaataggcgaacggtaatgagttcggagcgtaattttatgttcggggagtcgggtacgtaatcgagagnaggcgtcgcgtcgtatcgggaattattggtagaaggggagnaaataaatacgacgtncgcgcgttggcgggcgcgcgggggggggcgggcgggggggcggcggcgtgaggcgtggcgcggggcggttgggggggtcgcgnattatttagtcggttttttttattattacgaatgatagtgataagaaaatttaatattataaatatttggataag

SEQ ID NO: 13954 - DNA, 811 bp, Artificial Sequence
  chemically treated genomic DNA (Homo sapiens) CpG-island No: 13954
  unsure (76, 159, 175, 216)
cttatccaaatatttataatattaaattttcttatcactatcattcgtaataataaaaaaaaccgactaaataatncgcgacccccccaaccgccccgcgccacgcctcacgccgccgcccccccgcccgcccccccccgcgcgcccgccaacgcgcgnacgtcgtatttatttnctccccttctaccaataattcccgatacgacgcgacgcctnctctcgattacgtacccgactccccgaacataaaattacgctccgaactcattaccgttcgcctatttccgtacgttaacgaaaacgtttttcgcatcccgcgtcgcgcgtacaactttactccacaaaacattctatcgtcgacatattcacccgcaaatccattataatcacactcgaacttacaccaaaatattcgccgcactcccgcaactaaccgtccaaacactcacgtccacttacgaatcacccgccaccaaccccgctcgctaccatcgcaccgtccaccatttacaaaacaccttataccgctacgactcctctccaataatcacgcgcgacccctatcgcttctctctcaaccctctcacccacactacgcaacgccatacactctctcccctattccacctctcgacgccaccattccatccctcgtcctctcttcgtaacgcccacgccccccctcccccccttattcccccatacctttacgattcctcgcatcacttactcaaattacgacaaccaaccccaacccgatcccaataaatctcgtccgcgatcccaccgtccccgttcgctctcccacgac

SEQ ID NO: 13955 - DNA, 811 bp, Artificial Sequence
  chemically treated genomic DNA (Homo sapiens) CpG-island No: 13955
  unsure (76, 159, 175, 216)
tttgtttaagtgtttatagtgttagatttttttgttattattattcgtaatagtaggaaggatcggttgagtggtncgcggtttttttagtcgtttcgcgttacgttttacgtcgtcgttttttcgttcgttttttttcgcgcgttcgttaacgcgcgngcgtcgtgtttgtttnttttttttttgttaatgattttcggtgcggcgcggcgtttnttttcggttgcgtattcggtttttcgggtatggaattgcgtttcgggtttattatcgttcgtttattttcgtgcgttggcgaaggcgtttttcgtatttcgcgtcgcgcgtgtaattttgttttatagagtattttgtcgtcggtatgtttattcgtaggtttattatagttatattcgggtttgtattaaggtattcgtcgtattttcgtagttaatcgtttaaatatttacgtttatttacgggttattcgttattaatttcgttcgttattatcgtatcgtttattatttataaaatattttatgtcgttgcgatttttttttagtaattacgcgcggtttttatcgttttttttttagtttttttatttatattgcgtaacgttatatatttttttttttattttatttttcggcgttattattttatttttcgtttttttttcgtggcgtttacgtttttttttttttttttgtttttttatgtttttacggtttttcgtattatttatttaagttgcggtagttagttttagttcggttttagtagatttcgttcgcggttttatcgttttcgttcgtttttttacgat

SEQ ID NO: 13956 - DNA, 811 bp, Artificial Sequence
  chemically treated genomic DNA (Homo sapiens) CpG-island No: 13956
  unsure (596, 637, 653, 736)
atcgtaaaaaaacgaacgaaaacgataaaaccgcgaacgaaatctactaaaaccgaactaaaactaactaccgcaacttaaataaataatacgaaaaaccgtaaaaacataaaaaaacaaaaaaaaaaaaaaaaacgtaaacgccacgaaaaaaaaacgaaaaataaaataataacgccgaaaaataaaataaaaaaaaaaatatataacgttacgcaatataaataaaaaaactaaaaaaaaaacgataaaaaccgcgcgtaattactaaaaaaaaatcgcaacgacataaaatattttataaataataaacgatacgataataacgaacgaaattaataacgaataacccgtaaataaacgtaaatatttaaacgattaactacgaaaatacgacgaataccttaatacaaacccgaatataactataataaacctacgaataaacataccgacgacaaaatactctataaaacaaaattacacgcgcgacgcgaaatacgaaaaacgccttcgccaacgcacgaaaataaacgaacgataataaacccgaaacgcaattccatacccgaaaaaccgaatacgcaaccgaaaanaaacgccgcgccgcaccgaaaatcattaacaaaaaaaaaanaaacaaacacgacgcncgcgcgttaacgaacgcgcgaaaaaaaacgaacgaaaaaacgacgacgtaaaacgtaacgcgaaacgactaaaaaaaccgcgnaccactcaaccgatccttcctactattacgaataataataacaaaaaaatctaacactataaacacttaaacaaa

SEQ ID NO: 13957 - DNA, 752 bp, Artificial Sequence
  chemically treated genomic DNA (Homo sapiens) CpG-island No: 13957
ttgtcgtatttatttttttagattcgttacgtacgtatatggttcgtatttttgtacgttagttacgtttgtttaggttcgttacgttagggtttggtcgttttcggtttggattcggtttagattcgggtttgggttcgttatgttcgttcggttagttcgttagttcgatcgtagatagatagtcgtagatagtgttattattagtcgttatttttttatatatattttttatttaatttattttttttatacgcgttaattttatttttaatatttcgattttttatattaatatatttttataataattttattttattttttattttattatatattcgttttaacgattttcggttttattttattttatttacgtatttttatataatttacgttttaatttatttcgagtatttatgtatttattattattttttatatttaattatcgttaattttacgtatattttttatgatttattacggggatttagtattcgtatttacgttaattaaatgggttattaatatttttagagaaataaatatttttagtatacgtatttatcgttaattcgttttacgtttatttatttggggaattttcgattcggtatttcgatttatatttcggtattaagtaaaaatatttggtttcgtaattttttttaattttattttaatacgattttatatacggtatattacgataagaatgtagtcgtatataatttatattatatttt

SEQ ID NO: 13958 - DNA, 752 bp, Artificial Sequence
  chemically treated genomic DNA (Homo sapiens) CpG-island No: 13958
aaaatataatataaattatatacgactacattcttatcgtaatataccgtatataaaatcgtattaaaataaaattaaaaaaaattacgaaaccaaatatttttacttaataccgaaatataaatcgaaataccgaatcgaaaattccccaaataaataaacgtaaaacgaattaacgataaatacgtatactaaaaatatttatttctctaaaaatattaataacccatttaattaacgtaaatacgaatactaaatccccgtaataaatcataaaaaatatacgtaaaattaacgataattaaatataaaaaataataataaatacataaatactcgaaataaattaaaacgtaaattatataaaaatacgtaaataaaataaaataaaaccgaaaatcgttaaaacgaatatataataaaataaaaaataaaataaaattattataaaaatatattaatataaaaaatcgaaatattaaaaataaaattaacgcgtataaaaaaaataaattaaataaaaaatatatataaaaaaataacgactaataataacactatctacgactatctatctacgatcgaactaacgaactaaccgaacgaacataacgaacccaaacccgaatctaaaccgaatccaaaccgaaaacgaccaaaccctaacgtaacgaacctaaacaaacgtaactaacgtacaaaaatacgaaccatatacgtacgtaacgaatctaaaaaaataaatacgacaa

SEQ ID NO: 13959 - DNA, 752 bp, Artificial Sequence
  chemically treated genomic DNA (Homo sapiens) CpG-island No: 13959
aaaatgtgatgtgaattgtgtgcgattatatttttgtcgtggtgtatcgtatatggagtcgtgttggggtggagttaggggaggttgcggggttaggtgtttttatttggtgtcggggtgtgaatcgggatgtcgggtcgggggttttttaggtgggtgggcgtggggcgggttggcggtgagtgcgtgtgttaaaggtgtttgtttttttgggggtgttggtggtttatttggttggcgtgggtgcgggtattgggttttcgtggtgggttatggaaggtatgcgtggggttggcggtagttgggtgtggggggtggtggtggatgtatgagtgttcggagtggattggagcgtggattgtgtgggggtgcgtgggtggagtggggtggagtcggaggtcgttggagcgggtgtgtagtggaatgggaagtggaatggaattgttgtggaagtgtattggtgtggagggtcggggtgttgggggtgaggttggcgcgtgtggggagggtgagttgagtgaggagtgtgtgtggaggggtgacgattgatgatgatattatttacgattatttatttacgatcgagttagcgaattagtcgagcgagtatagcgaatttaagttcgagtttgagtcggatttaaatcggaagcggttaaattttagcgtaacgaatttgagtaaacgtagttgacgtatagaggtgcgagttatgtgcgtgcgtgacgggtttggggggataggtgcggtag

SEQ ID NO: 13960 - DNA, 752 bp, Artificial Sequence
  chemically treated genomic DNA (Homo sapiens) CpG-island No: 13960
ctaccgcacctatccccccaaacccgtcacgcacgcacataactcgcacctctatacgtcaactacgtttactcaaattcgttacgctaaaatttaaccgcttccgatttaaatccgactcaaactcgaacttaaattcgctatactcgctcgactaattcgctaactcgatcgtaaataaataatcgtaaataatatcatcatcaatcgtcacccctccacacacactcctcactcaactcaccctccccacacgcgccaacctcacccccaacaccccgaccctccacaccaatacacttccacaacaattccattccacttcccattccactacacacccgctccaacgacctccgactccaccccactccacccacgcacccccacacaatccacgctccaatccactccgaacactcatacatccaccaccaccccccacacccaactaccgccaaccccacgcataccttccataacccaccacgaaaacccaatacccgcacccacgccaaccaaataaaccaccaacacccccaaaaaaacaaacacctttaacacacgcactcaccgccaacccgccccacgcccacccacctaaaaaacccccgacccgacatcccgattcacaccccgacaccaaataaaaacacctaaccccgcaacctcccctaactccaccccaacacgactccatatacgatacaccacgacaaaaatataatcgcacacaattcacatcacatttt

SEQ ID NO: 13961 - DNA, 539 bp, Artificial Sequence
  chemically treated genomic DNA (Homo sapiens) CpG-island No: 13961
  unsure (346)
gacgttttgttatttaaatattttttgttattaatatcgtttgtcgtaattttatcgtattatcgttttcgttttatagtcgtggtacgtcgtcgttatatttaacggagcggatcgcgggttcgtatcgacgtttcggacgatattagtcgcgggtcgttttcgttcgcgtcgattcgcgtatcgcgtagtttgattttagcgtttcgtattacgcgatcgcggatatatatattatttattattcgatcgtcgacgttacggcgcggtcgtatcgcgttcgcgttttcgtattcgcgtttcgttcgttcgtttcgcgattttttttcgtcgttatcgcgcgttngcggcgacgacgttcgcgtagtacggtttattcgtcgcgcgacgcggttgttacggcgcgggcgtcgtcgtttcgcgtcgcgttcgacggcgttacgttcgcgtacgcgcgttcggttcgtatattcgtagttcgatatagcgtcgcgtcgcgcgagtatgacgtcgcgtcgtagttagcgttgtcgcgtttt

SEQ ID NO: 13962 - DNA, 539 bp, Artificial Sequence
  chemically treated genomic DNA (Homo sapiens) CpG-island No: 13962
  unsure (194)
aaaacgcgacaacgctaactacgacgcgacgtcatactcgcgcgacgcgacgctatatcgaactacgaatatacgaaccgaacgcgcgtacgcgaacgtaacgccgtcgaacgcgacgcgaaacgacgacgcccgcgccgtaacaaccgcgtcgcgcgacgaataaaccgtactacgcgaacgtcgtcgccgcnaacgcgcgataacgacgaaaaaaaatcgcgaaacgaacgaacgaaacgcgaatacgaaaacgcgaacgcgatacgaccgcgccgtaacgtcgacgatcgaataataaataatatatatatccgcgatcgcgtaatacgaaacgctaaaatcaaactacgcgatacgcgaatcgacgcgaacgaaaacgacccgcgactaatatcgtccgaaacgtcgatacgaacccgcgatccgctccgttaaatataacgacgacgtaccacgactataaaacgaaaacgataatacgataaaattacgacaaacgatattaataacaaaaaatatttaaataacaaaacgtc

SEQ ID NO: 13963 - DNA, 539 bp, Artificial Sequence
  chemically treated genomic DNA (Homo sapiens) CpG-island No: 13963
  unsure (194)
gaggcgcggtagcgttggttgcggcgcggcgttatgttcgcgcggcgcgacgttgtgtcggattgcgagtgtgcggatcgagcgcgcgtgcgcgagcgtggcgtcgtcgggcgcggcgcgaggcgacgacgttcgcgtcgtggtagtcgcgtcgcgcggcgagtaggtcgtgttgcgcgggcgtcgtcgtcgtnagcgcgcgatggcggcgggggagggtcgcggggcgggcgggcggggcgcgagtgcggaggcgcggacgcggtgcggtcgcgtcgtgacgtcggcggtcgggtggtgggtgatgtgtgtgttcgcggtcgcgtggtgcggggcgttgggattaggttgcgcggtgcgcgagtcggcgcgggcgggagcggttcgcggttggtgtcgttcggggcgtcggtgcgggttcgcggttcgtttcgttgggtgtggcggcggcgtgttacggttgtggggcgggggcggtgatgcggtagggttgcggtaggcggtgttagtagtaaggggtgtttaggtggtagggcgtt

SEQ ID NO: 13964 - DNA, 539 bp, Artificial Sequence
  chemically treated genomic DNA (Homo sapiens) CpG-island No: 13964
  unsure (346)
aacgccctaccacctaaacaccccttactactaacaccgcctaccgcaaccctaccgcatcaccgcccccgccccacaaccgtaacacgccgccgccacacccaacgaaacgaaccgcgaacccgcaccgacgccccgaacgacaccaaccgcgaaccgctcccgcccgcgccgactcgcgcaccgcgcaacctaatcccaacgccccgcaccacgcgaccgcgaacacacacatcacccaccacccgaccgccgacgtcacgacgcgaccgcaccgcgtccgcgcctccgcactcgcgccccgcccgcccgccccgcgaccctcccccgccgccatcgcgcgctnacgacgacgacgcccgcgcaacacgacctactcgccgcgcgacgcgactaccacgacgcgaacgtcgtcgcctcgcgccgcgcccgacgacgccacgctcgcgcacgcgcgctcgatccgcacactcgcaatccgacacaacgtcgcgccgcgcgaacataacgccgcgccgcaaccaacgctaccgcgcctc

SEQ ID NO: 13965 - DNA, 887 bp, Artificial Sequence
  chemically treated genomic DNA (Homo sapiens) CpG-island No: 13965
ttggacgtcgggtatttttattcgattgaagtgattttcgataagattttcgtcgttatgttgtatgtgtcgtagttgttgttgtacgttagtcgttcggttcgttgggatagcgattacgtagtgttgttggatgatgaaatttaggtaattgttagtgagattgtgcgttacgatttgtttgatcgggtgtatatcggttttgattttttcgatgtttttattaatcgtattgtcgcgtgggttattggtatacgtaatatgaaaaaagttttgttgcgtgcgttgttggaatttatcgttgagttgcgtaagttggaagcggcgggcgattatattgcgcgtttggtattgttggaagagtagaaatcgttgtcgtggtaggcggtttgggaaatgtattgttaacgttacgatacgttagtaggtagcgaatggttggagagcgtgcgggtttatgagaaagaaattttgagtcgtcgcgggtaaatattgtcggatgcggcgcgagcgttttattcggtttacgggtcggtaatagttgtaggtttgataagacgcgatagcgtcgtattaggtattgattgtcggatgcggtataagtgttttattcggtttataggtcggtaatagttgtaggtttgataagacgcgatagcgtcgtattaggtattgattgtcggatgcggtataagtgttttattcggattataggttggttatcgttgtaggtttgataagacgcggtagcgtcgtattaggtattgtgtacgattgtcggatgcggcgtaaacgttttattcggtatatattagttcggttgtagatttgataggcgaagcgtattagataacggttttagagtttaattgtttattcggtatgaa

SEQ ID NO: 13966 - DNA, 887 bp, Artificial Sequence
  chemically treated genomic DNA (Homo sapiens) CpG-island No: 13966
ttcataccgaataaacaattaaactctaaaaccgttatctaatacgcttcgcctatcaaatctacaaccgaactaatatataccgaataaaacgtttacgccgcatccgacaatcgtacacaatacctaatacgacgctaccgcgtcttatcaaacctacaacgataaccaacctataatccgaataaaacacttataccgcatccgacaatcaatacctaatacgacgctatcgcgtcttatcaaacctacaactattaccgacctataaaccgaataaaacacttataccgcatccgacaatcaatacctaatacgacgctatcgcgtcttatcaaacctacaactattaccgacccgtaaaccgaataaaacgctcgcgccgcatccgacaatatttacccgcgacgactcaaaatttctttctcataaacccgcacgctctccaaccattcgctacctactaacgtatcgtaacgttaacaatacatttcccaaaccgcctaccacgacaacgatttctactcttccaacaataccaaacgcgcaatataatcgcccgccgcttccaacttacgcaactcaacgataaattccaacaacgcacgcaacaaaacttttttcatattacgtataccaataacccacgcgacaatacgattaataaaaacatcgaaaaaatcaaaaccgatatacacccgatcaaacaaatcgtaacgcacaatctcactaacaattacctaaatttcatcatccaacaacactacgtaatcgctatcccaacgaaccgaacgactaacgtacaacaacaactacgacacatacaacataacgacgaaaatcttatcgaaaatcacttcaatcgaataaaaatacccgacgtccaa

SEQ ID NO: 13967 - DNA, 887 bp, Artificial Sequence
  chemically treated genomic DNA (Homo sapiens) CpG-island No: 13967
tttatgtcgaatgggtaattgaattttgaaatcgttgtttgatgcgtttcgtttgttaggtttataatcgggttaatgtatgtcggataaggcgtttacgtcgtattcggtaatcgtgtataatgtttgatgcgacgttgtcgcgttttattaggtttataacggtggttagtttgtagttcggataaggtatttgtgtcgtattcggtaattaatgtttgatgcgacgttgtcgcgttttattaggtttataattattgtcgatttgtaggtcggataaggtatttgtgtcgtattcggtaattaatgtttgatgcgacgttgtcgcgttttattaggtttataattgttgtcgattcgtaggtcggataaggcgttcgcgtcgtattcggtagtgtttattcgcggcgatttaaaattttttttttataagttcgtacgttttttagttattcgttatttgttggcgtatcgtgacgttggtaatatattttttagatcgtttgttacggtaacgatttttgtttttttagtagtgttagacgcgtagtgtaatcgttcgtcgtttttagtttgcgtagtttagcggtaggttttagtaacgtacgtagtagggttttttttatattgcgtgtattaatgatttacgcggtaatgcggttgatagaggtatcgaagaagttaaggtcgatatgtattcggttaaatagatcgtgacgtataattttattggtaattgtttgggttttattatttagtagtattacgtgatcgttgttttagcgaatcggacggttgacgtgtagtagtaattgcggtatatatagtatggcggcggaaattttgtcggaaattattttagtcgggtggaagtgttcggcgtttag

SEQ ID NO: 13968 - DNA, 887 bp, Artificial Sequence
  chemically treated genomic DNA (Homo sapiens) CpG-island No: 13968
ctaaacgccgaacacttccacccgactaaaataatttccgacaaaatttccgccgccatactatatataccgcaattactactacacgtcaaccgtccgattcgctaaaacaacgatcacgtaatactactaaataataaaacccaaacaattaccaataaaattatacgtcacgatctatttaaccgaatacatatcgaccttaacttcttcgatacctctatcaaccgcattaccgcgtaaatcattaatacacgcaatataaaaaaaaccctactacgtacgttactaaaacctaccgctaaactacgcaaactaaaaacgacgaacgattacactacgcgtctaacactactaaaaaaacaaaaatcgttaccgtaacaaacgatctaaaaaatatattaccaacgtcacgatacgccaacaaataacgaataactaaaaaacgtacgaacttataaaaaaaaaattttaaatcgccgcgaataaacactaccgaatacgacgcgaacgccttatccgacctacgaatcgacaacaattataaacctaataaaacgcgacaacgtcgcatcaaacattaattaccgaatacgacacaaataccttatccgacctacaaatcgacaataattataaacctaataaaacgcgacaacgtcgcatcaaacattaattaccgaatacgacacaaataccttatccgaactacaaactaaccaccgttataaacctaataaaacgcgacaacgtcgcatcaaacattatacacgattaccgaatacgacgtaaacgccttatccgacatacattaacccgattataaacctaacaaacgaaacgcatcaaacaacgatttcaaaattcaattacccattcgacataaa

SEQ ID NO: 13969 - DNA, 612 bp, Artificial Sequence
  chemically treated genomic DNA (Homo sapiens) CpG-island No: 13969
taacgtcgacgatatggtggatatcgtgtttatgaattttttgcggggcggttggttcggggcgggggtttgggtttttcgggttaggggggtgttttttcgcgttgtcgttcgttgtagttcgtttcgtaggaggtggtgtcgtacgggtattttcgtcgtttcgattattttttagaagagaggagcgttcgggatttgtttaagcgtttggaggcgtcgcggtcgtcggcggtgttggatttggtgtattcggtcgaacgtttggcgttggtttcggtcgcgcggttttcgcgtttcggcgtttgttttcgttgtggggcgttggttagtcgcgcgttttgttaggtttgtttttttttggacggtttgaatcgcggtcggtttcgtttggttatcggtaagggtcgtcgggggttggacgaggaggcgacgtcggggacgttcggggattcggttcgggtttttattttcgagatcgtttttattttttagcgatttcgggtttttcgtcgggattcgacgcgttcgggtgaggtttgtttgtaaatgatattgtgaataaattcgttattttatttggttttttatgtgaggtgggagggggatggg

SEQ ID NO: 13970 - DNA, 612 bp, Artificial Sequence
  chemically treated genomic DNA (Homo sapiens) CpG-island No: 13970
cccatccccctcccacctcacataaaaaaccaaataaaataacgaatttattcacaatatcatttacaaacaaacctcacccgaacgcgtcgaatcccgacgaaaaacccgaaatcgctaaaaaataaaaacgatctcgaaaataaaaacccgaaccgaatccccgaacgtccccgacgtcgcctcctcgtccaacccccgacgacccttaccgataaccaaacgaaaccgaccgcgattcaaaccgtccaaaaaaaaacaaacctaacaaaacgcgcgactaaccaacgccccacaacgaaaacaaacgccgaaacgcgaaaaccgcgcgaccgaaaccaacgccaaacgttcgaccgaatacaccaaatccaacaccgccgacgaccgcgacgcctccaaacgcttaaacaaatcccgaacgctcctctcttctaaaaaataatcgaaacgacgaaaatacccgtacgacaccacctcctacgaaacgaactacaacgaacgacaacgcgaaaaaacacccccctaacccgaaaaacccaaacccccgccccgaaccaaccgccccgcaaaaaattcataaacacgatatccaccatatcgtcgacgtta

SEQ ID NO: 13971 - DNA, 612 bp, Artificial Sequence
  chemically treated genomic DNA (Homo sapiens) CpG-island No: 13971
tttattttttttttattttatatggaaggttaggtaaggtaacgggtttatttatagtgttatttataggtagattttattcgggcgcgtcggatttcggcgggaggttcggagtcgttagaaggtggggacggtttcggaagtgggggttcgggtcggattttcgggcgttttcggcgtcgttttttcgtttagttttcggcggtttttgtcgatggttaggcggggtcgatcgcggtttaggtcgtttaggagggagtaggtttggtagagcgcgcggttggttagcgttttatagcgggggtaggcgtcggggcgcgggggtcgcgcggtcgaggttagcgttaggcgttcggtcgagtgtattaggtttagtatcgtcgacggtcgcggcgtttttaggcgtttgagtaggtttcgggcgttttttttttttgagaagtagtcgaggcggcggaagtgttcgtacggtattattttttgcgaggcgaattgtagcgggcggtagcgcggaagggtatttttttagttcggagagtttaggttttcgtttcgggttagtcgtttcgtaggaagtttatgagtacggtgtttattatgtcgtcggcgttg

SEQ ID NO: 13972 - DNA, 612 bp, Artificial Sequence
  chemically treated genomic DNA (Homo sapiens) CpG-island No: 13972
caacgccgacgacataataaacaccgtactcataaacttcctacgaaacgactaacccgaaacgaaaacctaaactctccgaactaaaaaaatacccttccgcgctaccgcccgctacaattcgcctcgcaaaaaataataccgtacgaacacttccgccgcctcgactacttctcaaaaaaaaaaaacgcccgaaacctactcaaacgcctaaaaacgccgcgaccgtcgacgatactaaacctaatacactcgaccgaacgcctaacgctaacctcgaccgcgcgacccccgcgccccgacgcctacccccgctataaaacgctaaccaaccgcgcgctctaccaaacctactccctcctaaacgacctaaaccgcgatcgaccccgcctaaccatcgacaaaaaccgccgaaaactaaacgaaaaaacgacgccgaaaacgcccgaaaatccgacccgaacccccacttccgaaaccgtccccaccttctaacgactccgaacctcccgccgaaatccgacgcgcccgaataaaatctacctataaataacactataaataaacccgttaccttacctaaccttccatataaaataaaaaaaaaataaa

SEQ ID NO: 13973 - DNA, 662 bp, Artificial Sequence
  chemically treated genomic DNA (Homo sapiens) CpG-island No: 13973
tagtttatcgaattttcgagcgttttgaaggttgtgtatatgatttcgcgtttgtcgttttagcgttgcgttacgtatacgtatttgcgagtttttattagcgtttttattgttagtcgtttaggatttttcgtttttatttttcgataggtttcggcgtttatcgcgttcgtcgtcgcgggtttttagggttggtggtagttgtcgttttatacgtacgtggcggggttttcgttagcgaagatttcgcggaatatgtcgattatgtagaggttttcggcgcggttgttatttattattatgaggacgcgtagtcgcgcgcgcgggtatagtagggcgcgggcggacgttaggtattggcgtaggtacgcggggtttttttggtaggcggagatggttagcgttatattgcgcgcggtggttgtatttagcggttttcgcgtcgtcgtcgttattcgtcggtgttttaggtacgcgaagaggttttgcgttattaggtgcgttgaaaggaaggtttcgtagaggtcgaaggttaggaggtcgtagcgatcggaggttagcggtatttcggcggcgtaggtttaggttatgaggtttaggatgagtagggcgaaggcgatggttagtatttttcgggttaggtcggagtagcggtaggttgt

SEQ ID NO: 13974 - DNA, 662 bp, Artificial Sequence
  chemically treated genomic DNA (Homo sapiens) CpG-island No: 13974
acaacctaccgctactccgacctaacccgaaaaatactaaccatcgccttcgccctactcatcctaaacctcataacctaaacctacgccgccgaaataccgctaacctccgatcgctacgacctcctaaccttcgacctctacgaaaccttcctttcaacgcacctaataacgcaaaacctcttcgcgtacctaaaacaccgacgaataacgacgacgacgcgaaaaccgctaaatacaaccaccgcgcgcaatataacgctaaccatctccgcctaccaaaaaaaccccgcgtacctacgccaatacctaacgtccgcccgcgccctactatacccgcgcgcgcgactacgcgtcctcataataataaataacaaccgcgccgaaaacctctacataatcgacatattccgcgaaatcttcgctaacgaaaaccccgccacgtacgtataaaacgacaactaccaccaaccctaaaaacccgcgacgacgaacgcgataaacgccgaaacctatcgaaaaataaaaacgaaaaatcctaaacgactaacaataaaaacgctaataaaaactcgcaaatacgtatacgtaacgcaacgctaaaacgacaaacgcgaaatcatatacacaaccttcaaaacgctcgaaaattcgataaacta

SEQ ID NO: 13975 - DNA, 662 bp, Artificial Sequence
  chemically treated genomic DNA (Homo sapiens) CpG-island No: 13975
gtagtttgtcgttgtttcggtttggttcggagggtgttgattatcgttttcgttttgtttattttgggttttatgatttgggtttacgtcgtcggggtgtcgttggttttcgatcgttacggttttttggttttcggtttttacggggttttttttttagcgtatttggtggcgtagagttttttcgcgtatttggagtatcggcgggtggcggcggcggcgcgggggtcgttggatgtagttatcgcgcgtagtgtggcgttgattattttcgtttattaggaggatttcgcgtatttgcgttagtgtttggcgttcgttcgcgttttgttgtattcgcgcgcgcggttgcgcgtttttatggtggtggatggtaatcgcgtcgaggatttttatatggtcgatatgtttcgcgaggttttcgttgacgaggatttcgttacgtacgtgtgggacggtaattattattagttttgggaattcgcggcggcgggcgcggtgggcgtcggagtttatcgggaggtggaggcggaggattttgggcggttggtagtggaggcgttggtgaggattcgtaggtgcgtgtgcgtggcgtagcgttggggcggtaagcgcgaggttatgtatatagtttttaaggcgttcggagattcggtggatta

SEQ ID NO: 13976 - DNA, 662 bp, Artificial Sequence
  chemically treated genomic DNA (Homo sapiens) CpG-island No: 13976
taatccaccgaatctccgaacgccttaaaaactatatacataacctcgcgcttaccgccccaacgctacgccacgcacacgcacctacgaatcctcaccaacgcctccactaccaaccgcccaaaatcctccgcctccacctcccgataaactccgacgcccaccgcgcccgccgccgcgaattcccaaaactaataataattaccgtcccacacgtacgtaacgaaatcctcgtcaacgaaaacctcgcgaaacatatcgaccatataaaaatcctcgacgcgattaccatccaccaccataaaaacgcgcaaccgcgcgcgcgaatacaacaaaacgcgaacgaacgccaaacactaacgcaaatacgcgaaatcctcctaataaacgaaaataatcaacgccacactacgcgcgataactacatccaacgacccccgcgccgccgccgccacccgccgatactccaaatacgcgaaaaaactctacgccaccaaatacgctaaaaaaaaaaccccgtaaaaaccgaaaaccaaaaaaccgtaacgatcgaaaaccaacgacaccccgacgacgtaaacccaaatcataaaacccaaaataaacaaaacgaaaacgataatcaacaccctccgaaccaaaccgaaacaacgacaaactac

SEQ ID NO: 13977 - DNA, 637 bp, Artificial Sequence
  chemically treated genomic DNA (Homo sapiens) CpG-island No: 13977
  unsure (9)
tgttgtttncgggggggggggagggcgacgaagggttttttgtgggttggcggtgtacgatgggggcgttttcggtttggggtggtcgtgtggtgatagtggcgttttcgtttttaggcggtgcgggggttgtttgtttggtttttttttggtcgtatacgtttgtttttttcggggttcgcgtggggcggtttttcgcggtgtcggggtgttttcgcggggtcgtcgcggtggttcgcgttttcgcggggcgcgtcgtttttttttattggcggtcgtcggcgcgcggcgcgtcgttcgaaggcgggggcgcggttcgggggggggggcgtggttttgcgggcgttatcggggatgcgtgcgttttttttttcggcgtcgcgtcgaatatagaggggcgtgtgcggcggtggggcgtttttcgttttcgtcggtgcggatgggcggggggtggcggggggcggggtcggtttttcgcgcgggcggggttttcgggcgggttacgcgcggcgggcgtgtgagttcgggttcgcgtttcgtgcggtgggcgtggggcgcggggtgtcgattgtcgtcggtatatttcgcgggtgcggtcggtacgggagtatcgagagggacgttcgcgttagttcgt

SEQ ID NO: 13978 - DNA, 637 bp, Artificial Sequence
  chemically treated genomic DNA (Homo sapiens) CpG-island No: 13978
  unsure (629)
acgaactaacgcgaacgtccctctcgatactcccgtaccgaccgcacccgcgaaatataccgacgacaatcgacaccccgcgccccacgcccaccgcacgaaacgcgaacccgaactcacacgcccgccgcgcgtaacccgcccgaaaaccccgcccgcgcgaaaaaccgaccccgccccccgccaccccccgcccatccgcaccgacgaaaacgaaaaacgccccaccgccgcacacgcccctctatattcgacgcgacgccgaaaaaaaaaacgcacgcatccccgataacgcccgcaaaaccacgcccccccccccgaaccgcgcccccgccttcgaacgacgcgccgcgcgccgacgaccgccaataaaaaaaaacgacgcgccccgcgaaaacgcgaaccaccgcgacgaccccgcgaaaacaccccgacaccgcgaaaaaccgccccacgcgaaccccgaaaaaaacaaacgtatacgaccaaaaaaaaaccaaacaaacaacccccgcaccgcctaaaaacgaaaacgccactatcaccacacgaccaccccaaaccgaaaacgcccccatcgtacaccgccaacccacaaaaaacccttcgtcgccctcccccccccccgnaaacaaca

SEQ ID NO: 13979 - DNA, 637 bp, Artificial Sequence
  chemically treated genomic DNA (Homo sapiens) CpG-island No: 13979
  unsure (629)
gcgggttggcgcgggcgtttttttcggtgttttcgtgtcgatcgtattcgcggggtatgtcgacggtaatcggtatttcgcgttttacgtttatcgtacggggcgcgaattcgggtttatacgttcgtcgcgcgtaattcgttcggggatttcgttcgcgcggggaatcggtttcgtttttcgttatttttcgtttattcgtatcggcggaagcggggggcgttttatcgtcgtatacgtttttttatattcggcgcggcgtcgggggggggggcgtacgtattttcggtggcgttcgtagggttacgttttttttttcgggtcgcgttttcgttttcgaacggcgcgtcgcgcgtcgacggtcgttaatgagggagggcggcgcgtttcgcgggggcgcggattatcgcggcggtttcgcgggggtatttcgatatcgcgaagggtcgttttacgcggatttcgaagaaggtagacgtgtgcggttaaaagggggttaagtagatagttttcgtatcgtttggggacgggggcgttattgttattatacgattattttaggtcggaggcgtttttatcgtatatcgttagtttataaggaatttttcgtcgttttttttttttttcgnaaataata

SEQ ID NO: 13980 - DNA, 637 bp, Artificial Sequence
  chemically treated genomic DNA (Homo sapiens) CpG-island No: 13980
  unsure (9)
tattatttncgaaaaaaaaaaaaaacgacgaaaaattccttataaactaacgatatacgataaaaacgcctccgacctaaaataatcgtataataacaataacgcccccgtccccaaacgatacgaaaactatctacttaacccccttttaaccgcacacgtctaccttcttcgaaatccgcgtaaaacgacccttcgcgatatcgaaatacccccgcgaaaccgccgcgataatccgcgcccccgcgaaacgcgccgccctccctcattaacgaccgtcgacgcgcgacgcgccgttcgaaaacgaaaacgcgacccgaaaaaaaaaacgtaaccctacgaacgccaccgaaaatacgtacgcccccccccccgacgccgcgccgaatataaaaaaacgtatacgacgataaaacgccccccgcttccgccgatacgaataaacgaaaaataacgaaaaacgaaaccgattccccgcgcgaacgaaatccccgaacgaattacgcgcgacgaacgtataaacccgaattcgcgccccgtacgataaacgtaaaacgcgaaataccgattaccgtcgacataccccgcgaatacgatcgacacgaaaacaccgaaaaaaacgcccgcgccaacccgc

SEQ ID NO: 13981 - DNA, 637 bp, Artificial Sequence
  chemically treated genomic DNA (Homo sapiens) CpG-island No: 13981
  unsure (315)
gtgattttggtcggtcgttgtggttggggtcggttaagtcgaatatcggttatacgtaagcggcggcgggtgtggttggtgtgattaagatggtgatggcgatgcggtacgggtagttgttacgtacgttgtacgtggaatcgtttcgtcggaggtggattggtcggcggggacggtttaattttttacggagaatacgttttggtttaggagtggtcgtgttcgtcgggtgggggtgtcgtcgttcgggattagtggtattaacgcgtacgttattttcgaatagttttcgggagtgtcgagttagtttgcggngtcgggttcgggttttgtcgtggatgtttcggtggtgtcgtggatggtgtcgggtaaaatattcgaagcgttattcgcgtaggtaacggcgttgatgatttatttggacgagcgatttgatgttttttcgttggatgttgggtattcgttggcgttgatacgggtcggcgttggatgatcgagcggtggtgttggggtcggatcgtgaaacgttgttgtgcgggggaaagcgttgtttgtcggtttgaggtttttgggttggtgatcggattgtgggggtttggggtcgaatgggtttgtgttttcggttagggtggtaatg

SEQ ID NO: 13982 - DNA, 637 bp, Artificial Sequence
  chemically treated genomic DNA (Homo sapiens) CpG-island No: 13982
  unsure (323)
cattaccaccctaaccgaaaacacaaacccattcgaccccaaacccccacaatccgatcaccaacccaaaaacctcaaaccgacaaacaacgctttcccccgcacaacaacgtttcacgatccgaccccaacaccaccgctcgatcatccaacgccgacccgtatcaacgccaacgaatacccaacatccaacgaaaaaacatcaaatcgctcgtccaaataaatcatcaacgccgttacctacgcgaataacgcttcgaatattttacccgacaccatccacgacaccaccgaaacatccacgacaaaacccgaacccgacnccgcaaactaactcgacactcccgaaaactattcgaaaataacgtacgcgttaataccactaatcccgaacgacgacacccccacccgacgaacacgaccactcctaaaccaaaacgtattctccgtaaaaaattaaaccgtccccgccgaccaatccacctccgacgaaacgattccacgtacaacgtacgtaacaactacccgtaccgcatcgccatcaccatcttaatcacaccaaccacacccgccgccgcttacgtataaccgatattcgacttaaccgaccccaaccacaacgaccgaccaaaatcac

SEQ ID NO: 13983 - DNA, 637 bp, Artificial Sequence
  chemically treated genomic DNA (Homo sapiens) CpG-island No: 13983
  unsure (323)
tattgttattttgatcgaaaatataaatttattcggttttaggtttttataattcggttattaatttagaagttttaggtcggtagatagcgttttttttcgtataataacgttttacggttcgattttagtattatcgttcggttatttagcgtcgattcgtgttaacgttagcgagtatttaatatttagcgaggagatattaggtcgttcgtttagataggttattaacgtcgttgtttgcgcggatagcgtttcgggtgttttgttcgatattatttacggtattatcggaatatttacgatagaattcgaattcggtntcgtagattgattcggtattttcgggggttgttcgaggatgacgtgcgcgttagtattattgatttcgaacgacgatatttttattcgacgaatacgattatttttgggttagggcgtgtttttcgtaaggagttgaatcgttttcgtcgattaatttattttcggcgaagcgattttacgtgtaacgtgcgtggtagttgttcgtgtcgtatcgttattattattttgattatattagttatattcgtcgtcgtttgcgtatgatcgatgttcgatttgatcgattttaattataacggtcggttaggattat

SEQ ID NO: 13984 - DNA, 637 bp, Artificial Sequence
  chemically treated genomic DNA (Homo sapiens) CpG-island No: 13984
  unsure (315)
ataatcctaaccgaccgttataattaaaatcgatcaaatcgaacatcgatcatacgcaaacgacgacgaatataactaatataatcaaaataataataacgatacgacacgaacaactaccacgcacgttacacgtaaaatcgcttcgccgaaaataaattaatcgacgaaaacgattcaactccttacgaaaaacacgccctaacccaaaaataatcgtattcgtcgaataaaaatatcgtcgttcgaaatcaataatactaacgcgcacgtcatcctcgaacaacccccgaaaataccgaatcaatctacganaccgaattcgaattctatcgtaaatattccgataataccgtaaataatatcgaacaaaacacccgaaacgctatccgcgcaaacaacgacgttaataacctatctaaacgaacgacctaatatctcctcgctaaatattaaatactcgctaacgttaacacgaatcgacgctaaataaccgaacgataatactaaaatcgaaccgtaaaacgttattatacgaaaaaaaacgctatctaccgacctaaaacttctaaattaataaccgaattataaaaacctaaaaccgaataaatttatattttcgatcaaaataacaata

SEQ ID NO: 13985 - DNA, 744 bp, Artificial Sequence
  chemically treated genomic DNA (Homo sapiens) CpG-island No: 13985
  unsure (595)
gacgtgtatgttattttcggtgatatcgattatgcgttgtttgataaaggcgtatatgtttcgttcggtatttgtttttcgggtaacgcggcgcgtttggtagcggtaaatttacgggagaaaattttgttttacggcgcgtaaatgttgggtgagttagtggtagatgtttaattggtaacgtcgggcgtcgtgcgcggtaagaaaggcgaagttagtttcggggatattgtttataaaggcgaaatcggtatcggttttggtttattggtgggaattggtagttatattacgtttgatttcgttttttcgtatggcgtaaatttcgttgaagttgtcgttaatacgcgtacgggtgaaattcgtttggataaattttacgttttgttggattgcggtatatcggttaatttagagttagcgttgggataaatttacggtgttattttgcgtgttatcggttatagtatgagcgaagagattatttatgacgtcgaaggttattcgttaacgcgtgatttacgtagttacggcgtatcgaaaattggtgatatttcgcgtgattttcgcgttgtgttggtgtcgagcgacgatnaagtcggttcgttcggggcgaaatcgatttcggaaatcggtgtaaatggcgtagtttcggcgattgttatcgtaatttacgatgtatgcggtatttggttacgcgaatggtattttatatcggagaaaatatttattgcgttggaaaaa

SEQ ID NO: 13986 - DNA, 744 bp, Artificial Sequence
  chemically treated genomic DNA (Homo sapiens) CpG-island No: 13986
  unsure (150)
tttttccaacgcaataaatattttctccgatataaaataccattcgcgtaaccaaataccgcatacatcgtaaattacgataacaatcgccgaaactacgccatttacaccgatttccgaaatcgatttcgccccgaacgaaccgacttnatcgtcgctcgacaccaacacaacgcgaaaatcacgcgaaatatcaccaattttcgatacgccgtaactacgtaaatcacgcgttaacgaataaccttcgacgtcataaataatctcttcgctcatactataaccgataacacgcaaaataacaccgtaaatttatcccaacgctaactctaaattaaccgatataccgcaatccaacaaaacgtaaaatttatccaaacgaatttcacccgtacgcgtattaacgacaacttcaacgaaatttacgccatacgaaaaaacgaaatcaaacgtaatataactaccaattcccaccaataaaccaaaaccgataccgatttcgcctttataaacaatatccccgaaactaacttcgcctttcttaccgcgcacgacgcccgacgttaccaattaaacatctaccactaactcacccaacatttacgcgccgtaaaacaaaattttctcccgtaaatttaccgctaccaaacgcgccgcgttacccgaaaaacaaataccgaacgaaacatatacgcctttatcaaacaacgcataatcgatatcaccgaaaataacatacacgtc

SEQ ID NO: 13987 - DNA, 744 bp, Artificial Sequence
  chemically treated genomic DNA (Homo sapiens) CpG-island No: 13987
  unsure (150)
tttttttagcgtagtgagtatttttttcggtgtgaaatgttattcgcgtaattagatgtcgtatgtatcgtgaattgcggtagtaatcgtcggagttgcgttatttatatcgattttcgagatcgatttcgtttcgaacgggtcgatttnatcgtcgttcggtattagtatagcgcggaaattacgcggaatgttattaattttcggtgcgtcgtaattgcgtaaattacgcgttaacgggtgattttcggcgttataaatgattttttcgtttatattgtggtcgatagtacgtagggtggtatcgtagatttgttttaacgttaattttggattgatcggtgtatcgtagtttagtaaggcgtagaatttatttaggcggattttattcgtacgcgtgttgacggtaattttagcgaagtttgcgttatacgggaaggcgaaattaggcgtgatataattgttagtttttattagtgaattaaagtcggtgtcggtttcgtttttatgggtaatattttcgaaattaatttcgttttttttgtcgcgtacgacgttcggcgttgttagttgaatatttgttattggtttatttaatatttgcgcgtcgtggaatagaattttttttcgtagatttatcgttgttaaacgcgtcgcgttattcgagaagtaagtatcggacgaggtatatgcgtttttattaaataacgtatgatcggtattatcggagataatatgtacgtt

SEQ ID NO: 13988 - DNA, 744 bp, Artificial Sequence
  chemically treated genomic DNA (Homo sapiens) CpG-island No: 13988
  unsure (595)
aacgtacatattatctccgataataccgatcatacgttatttaataaaaacgcatatacctcgtccgatacttacttctcgaataacgcgacgcgtttaacaacgataaatctacgaaaaaaaattctattccacgacgcgcaaatattaaataaaccaataacaaatattcaactaacaacgccgaacgtcgtacgcgacaaaaaaaacgaaattaatttcgaaaatattacccataaaaacgaaaccgacaccgactttaattcactaataaaaactaacaattatatcacgcctaatttcgccttcccgtataacgcaaacttcgctaaaattaccgtcaacacgcgtacgaataaaatccgcctaaataaattctacgccttactaaactacgatacaccgatcaatccaaaattaacgttaaaacaaatctacgataccaccctacgtactatcgaccacaatataaacgaaaaaatcatttataacgccgaaaatcacccgttaacgcgtaatttacgcaattacgacgcaccgaaaattaataacattccgcgtaatttccgcgctatactaataccgaacgacgatnaaatcgacccgttcgaaacgaaatcgatctcgaaaatcgatataaataacgcaactccgacgattactaccgcaattcacgatacatacgacatctaattacgcgaataacatttcacaccgaaaaaaatactcactacgctaaaaaaa

SEQ ID NO: 13989 - DNA, 602 bp, Artificial Sequence
  chemically treated genomic DNA (Homo sapiens) CpG-island No: 13989
ggcgattatttgacgttttggttttgtcgtttgcgtatttagcgtttgcggttatggcgttagttatcgaatcgtggttaaacgaatttaataggcgtacgtttgtcgtttattttttagtataacgtgtcgtttatatcgttggcgtattaacgttataggtgtaataattagcgttatcggcggttaaatatgtattaatttgttgcgttagtattattgcgggtgtaataggttttttcgttcggttttagttaaatcgtttagttttttgcgggcgtcgcggttatttttttagcgtttttattttagaaatttgcgtatcggtttttttttttattaatggaagtaatgtacgtagagtcgtatttgtatatcgtcgattagtgttatattttatttatgttgtgtagcgtcgtatgttggttgggttgtatattaatttgtatatgtattttggtatcggtcgggtcgataggcgcggttagggtaaattagcgtgtcgtagtagtaattaacgtgttacgggcgtatattatggtttggatatttgacgagaagtcgattaattcgggttatttaataattatacggattatcgt

SEQ ID NO: 13990 - DNA, 602 bp, Artificial Sequence
  chemically treated genomic DNA (Homo sapiens) CpG-island No: 13990
acgataatccgtataattattaaataacccgaattaatcgacttctcgtcaaatatccaaaccataatatacgcccgtaacacgttaattactactacgacacgctaatttaccctaaccgcgcctatcgacccgaccgataccaaaatacatatacaaattaatatacaacccaaccaacatacgacgctacacaacataaataaaatataacactaatcgacgatatacaaatacgactctacgtacattacttccattaataaaaaaaaaaaccgatacgcaaatttctaaaataaaaacgctaaaaaaataaccgcgacgcccgcaaaaaactaaacgatttaactaaaaccgaacgaaaaaacctattacacccgcaataatactaacgcaacaaattaatacatatttaaccgccgataacgctaattattacacctataacgttaatacgccaacgatataaacgacacgttatactaaaaaataaacgacaaacgtacgcctattaaattcgtttaaccacgattcgataactaacgccataaccgcaaacgctaaatacgcaaacgacaaaaccaaaacgtcaaataatcgcc

SEQ ID NO: 13991 - DNA, 602 bp, Artificial Sequence
  chemically treated genomic DNA (Homo sapiens) CpG-island No: 13991
acgataattcgtatgattgttggatgattcgggttaatcggtttttcgttaggtgtttagattatgatgtacgttcgtgatacgttgattgttattgcggtacgttaatttgttttgatcgcgtttgtcgattcgatcgatgttaaaatgtatgtgtagattgatatgtaatttagttagtatgcggcgttgtatagtataggtgggatatggtattggtcggcgatatgtaagtgcgattttgcgtgtattgtttttattggtggaagaaaaagtcgatgcgtaagtttttgggataaaggcgttgggaagatgatcgcgacgttcgtaaagggttggacgatttagttgaaatcgagcgagaaagtttattgtattcgtaatgatgttggcgtagtaaattagtgtatgtttggtcgtcgatgacgttgattgttgtatttgtgacgttggtacgttaacggtgtgggcggtacgttatgttgaaaaatgaacggtaagcgtgcgtttgttaggttcgtttaattacggttcgatggttaacgttatggtcgtaggcgttgggtgcgtaggcgatagagttagaacgttaggtggtcgtt

SEQ ID NO: 13992 - DNA, 602 bp, Artificial Sequence
  chemically treated genomic DNA (Homo sapiens) CpG-island No: 13992
aacgaccacctaacgttctaactctatcgcctacgcacccaacgcctacgaccataacgttaaccatcgaaccgtaattaaacgaacctaacaaacgcacgcttaccgttcatttttcaacataacgtaccgcccacaccgttaacgtaccaacgtcacaaatacaacaatcaacgtcatcgacgaccaaacatacactaatttactacgccaacatcattacgaatacaataaactttctcgctcgatttcaactaaatcgtccaaccctttacgaacgtcgcgatcatcttcccaacgcctttatcccaaaaacttacgcatcgactttttcttccaccaataaaaacaatacacgcaaaatcgcacttacatatcgccgaccaataccatatcccacctatactatacaacgccgcatactaactaaattacatatcaatctacacatacattttaacatcgatcgaatcgacaaacgcgatcaaaacaaattaacgtaccgcaataacaatcaacgtatcacgaacgtacatcataatctaaacacctaacgaaaaaccgattaacccgaatcatccaacaatcatacgaattatcgt

SEQ ID NO: 13993 - DNA, 1812 bp, Artificial Sequence
  chemically treated genomic DNA (Homo sapiens) CpG-island No: 13993
  unsure (679, 1173, 1216, 1468)
tatgtaaggttatacgcgttttaaggttagtattttttttattcgaatttaggtcgtaagtttcgatttttaacgtttttttattttttttcgtgttttcgcgtcgttcgtttttttttattacgtttattcggtttcgatttttttatcgtattttttcgttcgtcgacgacgtttgcgtttacgttttattttttatcgacggtataattttataaattattttagttattagtttcgcgcgttatagttatttttattattttcgttaattttttagttattttttcgcggtaagtttgcgcgttcgtcgaagtatttatttttgtcgcgtttatacgagttttcgattatttagtttttgcgttttatatatttaattcgagcgatttttttagtacgtatttcgtcgcggtttattcgtagtttttcgtaatttttcgttatatttattgcgttttattacgtttcggtttttttttgttttttgtaatatttgttttattttcgttttttattatattttcgtatttattatattatttatttacgtttcgcgtatacgttatttatatacgttcgtttaatacgttttttcgcgcgttcgttttttatattcgtacgttcgtacgttttatatttttttttatttttatattttcgttcgttttcgtcgttnttttattattgtatttcgtcgtcgtttgtttacgttttcgcgcgtatatatttttcgtttttcgtcgttttacgttttcgtttatttgtattattggtatattttcgtcgatatatattcggttagtttcgcgtgtcgtacgtacgcgtacgtcgttttttcgtcgtttaatttgcgcgtttcgtttaagcgcgttcgggatttttttttttttttttttattttacgttcgttcgtatcgggcgtcgatattacgttttgtattttcgttttttttttttatttcgttttttcgggtttttttgttagtacgacgttttttttacgtttatacgtagtcgttcgtttatcgtttcgcgttttttcgttttttacgttacggcgtcgtatataatttttttcggtttttcgtattttttttgcgtttttttcgtaatattttcggttataatatttttttttttattattattttataatacgatattacgttnttcgacgtattagcgcgtttcgacgttgttttgtttttttatntttttcggatattatacgacgtttttattttattttaatatagtaatcgttcgcgtattttttatacgttttaatacgcgcgtcgatttaatatattcgtttttattttagcgcgcgttatgtcgtttatttttatcgtttcgatatttattttattttatatattatacgttttttttgcgcgcgttcgtaggttcgttcgttattcgtttattataattcgcgtatatttcgtatatacgcgtacgtttntttcgtatttttacgtcgtttttgtttcgcggcgataacgttcgtcgcgatttcgttgcgcgacgattaaggtatagttttatttatcgtcgtatcggtattcgcggcgttatcgtttttcgttattttttttattcggtttacgtgttcgttatttttattttatatttcgttcgtcgttttaattcgtttcgttttattatttttttttttttattcgtttcgttttttatcgtttttatttttatatttcgtttttttcgttattattttttttcgtttttatatttttttatttttttttttcgttttttttaggtaaatgtattaaatgaggttaggta

SEQ ID NO: 13994 - DNA, 1812 bp, Artificial Sequence
  chemically treated genomic DNA (Homo sapiens) CpG-island No: 13994
  unsure (345, 597, 640, 1134)
tacctaacctcatttaatacatttacctaaaaaaaacgaaaaaaaaaaataaaaaaatataaaaacgaaaaaaaataataacgaaaaaaacgaaatataaaaataaaaacgataaaaaacgaaacgaataaaaaaaaaaaaataataaaacgaaacgaattaaaacgacgaacgaaatataaaataaaaataacgaacacgtaaaccgaataaaaaaaataacgaaaaacgataacgccgcgaataccgatacgacgataaataaaactataccttaatcgtcgcgcaacgaaatcgcgacgaacgttatcgccgcgaaacaaaaacgacgtaaaaatacgaaanaaacgtacgcgtatatacgaaatatacgcgaattataataaacgaataacgaacgaacctacgaacgcgcgcaaaaaaaacgtataatatataaaataaaataaatatcgaaacgataaaaataaacgacataacgcgcgctaaaataaaaacgaatatattaaatcgacgcgcgtattaaaacgtataaaaaatacgcgaacgattactatattaaaataaaataaaaacgtcgtataatatccgaaaaanataaaaaaacaaaacaacgtcgaaacgcgctaatacgtcgaanaacgtaatatcgtattataaaataataataaaaaaaaaaatattataaccgaaaatattacgaaaaaaacgcaaaaaaaatacgaaaaaccgaaaaaaattatatacgacgccgtaacgtaaaaaacgaaaaaacgcgaaacgataaacgaacgactacgtataaacgtaaaaaaaacgtcgtactaacaaaaaaacccgaaaaaacgaaataaaaaaaaaaaacgaaaatacaaaacgtaatatcgacgcccgatacgaacgaacgtaaaataaaaaaaaaaaaaaaaaaatcccgaacgcgcttaaacgaaacgcgcaaattaaacgacgaaaaaacgacgtacgcgtacgtacgacacgcgaaactaaccgaatatatatcgacgaaaatataccaataatacaaataaacgaaaacgtaaaacgacgaaaaacgaaaaatatatacgcgcgaaaacgtaaacaaacgacgacgaaatacaataataaaanaacgacgaaaacgaacgaaaatataaaaataaaaaaaaatataaaacgtacgaacgtacgaatataaaaaacgaacgcgcgaaaaaacgtattaaacgaacgtatataaataacgtatacgcgaaacgtaaataaataatataataaatacgaaaatataataaaaaacgaaaataaaacaaatattacaaaaaacaaaaaaaaaccgaaacgtaataaaacgcaataaatataacgaaaaattacgaaaaactacgaataaaccgcgacgaaatacgtactaaaaaaatcgctcgaattaaatatataaaacgcaaaaactaaataatcgaaaactcgtataaacgcgacaaaaataaatacttcgacgaacgcgcaaacttaccgcgaaaaaataactaaaaaattaacgaaaataataaaaataactataacgcgcgaaactaataactaaaataatttataaaattataccgtcgataaaaaataaaacgtaaacgcaaacgtcgtcgacgaacgaaaaaatacgataaaaaaatcgaaaccgaataaacgtaataaaaaaaaacgaacgacgcgaaaacacgaaaaaaaataaaaaaacgttaaaaatcgaaacttacgacctaaattcgaataaaaaaaatactaaccttaaaacgcgtataaccttacata

SEQ ID NO: 13995 - DNA, 1812 bp, Artificial Sequence
  chemically treated genomic DNA (Homo sapiens) CpG-island No: 13995
  unsure (345, 597, 640, 1134)
tatttaattttatttaatatatttatttagagagggcggggagggggggtgggggggtgtaagggcgggggggagtggtgacgggggaagcggggtgtggaggtgggggcggtggggagcgaggcgagtgggggaggaggggtggtgaggcggggcgagttggagcggcgggcggggtgtggggtgggggtagcgagtacgtgagtcgggtgaggggggtggcgggaggcggtgacgtcgcgggtgtcggtgcggcggtgggtggggttgtgttttggtcgtcgcgtagcggggtcgcggcgggcgttgtcgtcgcggggtagaggcggcgtaagagtgcggagngggcgtgcgcgtgtgtacgaggtgtgcgcgagttgtggtgggcgggtgacgggcgagtttgcggacgcgcgtagaaggaacgtgtgatgtgtggggtggagtgggtgtcgaggcggtgagggtgggcggtatggcgcgcgttggagtaggagcgggtgtgttgggtcggcgcgcgtgttggagcgtgtgggaggtgcgcgagcggttgttgtgttagagtagggtgggagcgtcgtgtggtgttcgaaggangtgagagagtagagtagcgtcgagacgcgttagtgcgtcgggnggcgtagtgtcgtgttgtggagtggtagtgagagggggagtgttgtggtcgggagtgttgcgggagaagcgtagggggagtgcgaagagtcgaggggagttgtgtgcggcgtcgtggcgtggggggcgaggagacgcgaggcggtgggcgagcggttgcgtgtgggcgtagggagagcgtcgtgttgataggggggttcgaaggggcggggtgagagagggaggcgagaatgtagggcgtggtgtcggcgttcggtgcggacgagcgtggggtggagagagggagagagaggtttcgagcgcgtttgggcggggcgcgtagattgagcggcgagagagcgacgtgcgcgtgcgtgcgatacgcggagttggtcgagtgtgtgtcgacgggagtgtgttaatggtataggtgggcgagggcgtggggcggcgggaggcgaggggtgtgtgcgcgcgggagcgtaggtagacgacggcggggtgtagtggtggganggcggcgagagcgggcgagagtgtgagagtgggagagggtgtgaggcgtgcgagcgtgcgagtgtgaggggcgagcgcgcggaggggcgtgttgagcgagcgtgtgtgagtggcgtgtgcgcggggcgtgggtgagtggtgtggtgggtgcgagagtgtggtgggaggcgggagtgagataagtgttgtagggagtaggggaagatcgaggcgtagtggagcgtagtgagtgtagcggagagttgcggagggttgcgggtgagtcgcggcgggatgcgtgttgaggaggtcgttcgagttgagtgtgtggggcgtaggggttgggtggtcgagagttcgtgtgggcgcggtagaggtggatgtttcgacgagcgcgtaggtttgtcgcgaagaggtggttgggagattgacgagggtggtggaggtggttgtggcgcgcgggattgatggttgggatagtttgtggggttgtatcgtcggtggagggtgggacgtgggcgtaggcgtcgtcggcgggcgggggggtgcggtggggaggtcggggtcgagtgggcgtggtgggggggggcgggcggcgcgggggtacgggggggggtgggggggcgttaggggtcggaatttacgatttgagttcgggtaagggaagtgttggttttaagacgcgtgtggttttgtatg

SEQ ID NO: 13996 - DNA, 1812 bp, Artificial Sequence
  chemically treated genomic DNA (Homo sapiens) CpG-island No: 13996
  unsure (679, 1173, 1216, 1468)
catacaaaaccacacgcgtcttaaaaccaacacttcccttacccgaactcaaatcgtaaattccgacccctaacgcccccccacccccccccgtacccccgcgccgcccgcccccccccaccacgcccactcgaccccgacctccccaccgcacccccccgcccgccgacgacgcctacgcccacgtcccaccctccaccgacgatacaaccccacaaactatcccaaccatcaatcccgcgcgccacaaccacctccaccaccctcgtcaatctcccaaccacctcttcgcgacaaacctacgcgctcgtcgaaacatccacctctaccgcgcccacacgaactctcgaccacccaacccctacgccccacacactcaactcgaacgacctcctcaacacgcatcccgccgcgactcacccgcaaccctccgcaactctccgctacactcactacgctccactacgcctcgatcttcccctactccctacaacacttatctcactcccgcctcccaccacactctcgcacccaccacaccactcacccacgccccgcgcacacgccactcacacacgctcgctcaacacgcccctccgcgcgctcgcccctcacactcgcacgctcgcacgcctcacaccctctcccactctcacactctcgcccgctctcgccgccntcccaccactacaccccgccgtcgtctacctacgctcccgcgcgcacacacccctcgcctcccgccgccccacgccctcgcccacctataccattaacacactcccgtcgacacacactcgaccaactccgcgtatcgcacgcacgcgcacgtcgctctctcgccgctcaatctacgcgccccgcccaaacgcgctcgaaacctctctctccctctctccaccccacgctcgtccgcaccgaacgccgacaccacgccctacattctcgcctccctctctcaccccgccccttcgaacccccctatcaacacgacgctctccctacgcccacacgcaaccgctcgcccaccgcctcgcgtctcctcgccccccacgccacgacgccgcacacaactcccctcgactcttcgcactccccctacgcttctcccgcaacactcccgaccacaacactccccctctcactaccactccacaacacgacactacgccncccgacgcactaacgcgtctcgacgctactctactctctcacntccttcgaacaccacacgacgctcccaccctactctaacacaacaaccgctcgcgcacctcccacacgctccaacacgcgcgccgacccaacacacccgctcctactccaacgcgcgccataccgcccaccctcaccgcctcgacacccactccaccccacacatcacacgttccttctacgcgcgtccgcaaactcgcccgtcacccgcccaccacaactcgcgcacacctcgtacacacgcgcacgcccnctccgcactcttacgccgcctctaccccgcgacgacaacgcccgccgcgaccccgctacgcgacgaccaaaacacaaccccacccaccgccgcaccgacacccgcgacgtcaccgcctcccgccacccccctcacccgactcacgtactcgctacccccaccccacaccccgcccgccgctccaactcgccccgcctcaccacccctcctcccccactcgcctcgctccccaccgcccccacctccacaccccgcttcccccgtcaccactcccccccgcccttacacccccccaccccccctccccgccctctctaaataaatatattaaataaaattaaata

SEQ ID NO: 13997 - DNA, 604 bp, Artificial Sequence
  chemically treated genomic DNA (Homo sapiens) CpG-island No: 13997
tcgtttatttttgcgttcgaggatgcgttcgtggtgtcgtattcgattattatttgcgaggaggatgcgttcgtcgagtcgtattcgtttattatttgcgtaggaggtgcgttcgtcgagtcgtattcgtttattaattgcgtaggaggatgcgttgtcgagtcgtattcgtttattatttgcgtaggaggatgcgttcgtcgagcgtattcgttgattatttgcgtaggaggatgcgttcgtcgagtcgtatcgtttattatttgtatacgaagatgcgttcgtcgagtcgtattcgtttatatttgcgtaggaggatgcgttcgtcgagtcgtattcgtttattatttgttaggaggatgcgttcggcgagtcgtatacggttattattttatacgagacgttcgcgagtgtacggtgattttttcggcgagatgttttaggtttatatttagtggcgtaagtagttggaggtacgaggtttttttagtttttcgagtatagcgtttttatatggttttacgtcgttttttgagttagtattaaggttatttttcgtattagggaatcggattttcgcgtttattggtgaacgtttaagata

SEQ ID NO: 13998 - DNA, 604 bp, Artificial Sequence
  chemically treated genomic DNA (Homo sapiens) CpG-island No: 13998
tatcttaaacgttcaccaataaacgcgaaaatccgattccctaatacgaaaaataaccttaatactaactcaaaaaacgacgtaaaaccatataaaaacgctatactcgaaaaactaaaaaaacctcgtacctccaactacttacgccactaaatataaacctaaaacatctcgccgaaaaaatcaccgtacactcgcgaacgtctcgtataaaataataaccgtatacgactcgccgaacgcatcctcctaacaaataataaacgaatacgactcgacgaacgcatcctcctacgcaaatataaacgaatacgactcgacgaacgcatcttcgtatacaaataataaacgatacgactcgacgaacgcatcctcctacgcaaataatcaacgaatacgctcgacgaacgcatcctcctacgcaaataataaacgaatacgactcgacaacgcatcctcctacgcaattaataaacgaatacgactcgacgaacgcacctcctacgcaaataataaacgaatacgactcgacgaacgcatcctcctcgcaaataataatcgaatacgacaccacgaacgcatcctcgaacgcaaaaataaacga

SEQ ID NO: 13999 - DNA, 604 bp, Artificial Sequence
  chemically treated genomic DNA (Homo sapiens) CpG-island No: 13999
tattttaggcgtttattagtaggcgcgaaggttcggttttttagtgcgaagaatggttttaatgttaatttaggaaacgacgtgaaattatgtaaaggcgttatgttcggagggttagaggggtttcgtgtttttagttgtttacgttattgaatataggtttgaggtatttcgtcgaaagggttatcgtgtattcgcgaacgtttcgtatgaaatggtaatcgtgtgcgattcgtcgaacgtatttttttagtaaatggtgaacgggtgcgattcgacgaacgtatttttttacgtaaatgtgaacgggtgcgattcgacgaacgtattttcgtatgtaaatggtgaacggtgcgattcgacgaacgtatttttttacgtaaatggttaacgggtgcgttcgacgaacgtatttttttacgtaaatggtgaacgggtgcgattcgataacgtatttttttacgtaattggtgaacgggtgcgattcgacgaacgtattttttacgtaaatggtgaacgggtgcgattcgacgaacgtatttttttcgtaaatggtgatcgggtgcgatattacgaacgtattttcgaacgtaaaggtgaacgg

SEQ ID NO: 14000 - DNA, 604 bp, Artificial Sequence
  chemically treated genomic DNA (Homo sapiens) CpG-island No: 14000
ccgttcacctttacgttcgaaaatacgttcgtaatatcgcacccgatcaccatttacgaaaaaaatacgttcgtcgaatcgcacccgttcaccatttacgtaaaaaatacgttcgtcgaatcgcacccgttcaccaattacgtaaaaaaatacgttatcgaatcgcacccgttcaccatttacgtaaaaaaatacgttcgtcgaacgcacccgttaaccatttacgtaaaaaaatacgttcgtcgaatcgcaccgttcaccatttacatacgaaaatacgttcgtcgaatcgcacccgttcacatttacgtaaaaaaatacgttcgtcgaatcgcacccgttcaccatttactaaaaaaatacgttcgacgaatcgcacacgattaccatttcatacgaaacgttcgcgaatacacgataaccctttcgacgaaatacctcaaacctatattcaataacgtaaacaactaaaaacacgaaacccctctaaccctccgaacataacgcctttacataatttcacgtcgtttcctaaattaacattaaaaccattcttcgcactaaaaaaccgaaccttcgcgcctactaataaacgcctaaaata

SEQ ID NO: 14001 - DNA, 787 bp, Artificial Sequence
  chemically treated genomic DNA (Homo sapiens) CpG-island No: 14001
  unsure (141, 189, 276, 398, 418, 431)
cggtggtcggcgtaacggtatttaagagggttatttatcgcgatttttttaagattagcggagttaattcgagcgacgaatcgaatatgttcgcgtttaattggtgatcggtatcgatttttgcgttcgtaattggtttgntagggcgtaatattattggaagtttcgtaatgttacgtgtttgtattntcgggggattcggttatgtcgtattagcgggttgtcgtataaaaattagagtagacgttagatttagtagagtttatgcgcgttgtntagggtatttagcggatcggaaaatcggcgttttatttttttgtgggtttgtatacggtgtgatggtagaatagtttggcgtattgggtttgttcgcgttttgaaattggagcgtgttgagngtaaagaggagggagggtgnaaatagtcgtttnaatggatattgtagggcgattggcgtgggttcgacgattcgtgtgaggaattgacgattttaattaatttgtgaatcggttcgttatagttgcggtatgatttgaattatcgattataatagttagtaagatttcgggggtttagtatacgaatttacggattggtgagttataagggatattggggcggtgttaaacggatagtaggtgtggtggttttaggaaagattgcggaatttcggtatgttagggcgggttcgtgtagtacggtatgtatcgtcgtgggatgtttattttgttgtgtaattaagcggaatggtttatatcgttggtttggtaaatatatattaacggga

SEQ ID NO: 14002 - DNA, 787 bp, Artificial Sequence
  chemically treated genomic DNA (Homo sapiens) CpG-island No: 14002
  unsure (357, 370, 390, 512, 599, 647)
tcccgttaatatatatttaccaaaccaacgatataaaccattccgcttaattacacaacaaaataaacatcccacgacgatacataccgtactacacgaacccgccctaacataccgaaattccgcaatctttcctaaaaccaccacacctactatccgtttaacaccgccccaatatcccttataactcaccaatccgtaaattcgtatactaaacccccgaaatcttactaactattataatcgataattcaaatcataccgcaactataacgaaccgattcacaaattaattaaaatcgtcaattcctcacacgaatcgtcgaacccacgccaatcgccctacaatatccattnaaacgactatttncaccctccctcctctttacnctcaacacgctccaatttcaaaacgcgaacaaacccaatacgccaaactattctaccatcacaccgtatacaaacccacaaaaaaataaaacgccgattttccgatccgctaaataccctanacaacgcgcataaactctactaaatctaacgtctactctaatttttatacgacaacccgctaatacgacataaccgaatcccccganaatacaaacacgtaacattacgaaacttccaataatattacgccctancaaaccaattacgaacgcaaaaatcgataccgatcaccaattaaacgcgaacatattcgattcgtcgctcgaattaactccgctaatcttaaaaaaatcgcgataaataaccctcttaaataccgttacgccgaccaccg

SEQ ID NO: 14003 - DNA, 787 bp, Artificial Sequence
  chemically treated genomic DNA (Homo sapiens) CpG-island No: 14003
  unsure (357, 370, 390, 512, 599, 647)
tttcgttgatgtatatttgttaaattagcgatgtaagttatttcgtttaattgtatagtaaggtgaatattttacggcggtatatgtcgtgttgtacgggttcgttttgatatatcgaaatttcgtaattttttttaggattattatatttgttgttcgtttggtatcgttttaatattttttgtggtttattaattcgtgaattcgtgtattaggttttcggggttttattggttgttatgatcggtgatttaggttatgtcgtaattgtagcgggtcggtttatagattaattggagtcgttaattttttatacgggtcgtcggatttacgttaatcgttttgtaatgtttattngggcggttatttntatttttttttttttttgtntttagtacgttttagttttagggcgcgagtagatttagtgcgttaagttattttattattatatcgtatgtagatttatagagaggtgagacgtcggtttttcgattcgttaaatgttttangtaacgcgtataaattttgttggatttggcgtttattttggtttttatgcgatagttcgttaatacggtatggtcgggtttttcgangatgtaggtacgtagtattacgaggtttttaatgatattgcgttttgntaagttaattacgagcgtaaaggtcggtgtcggttattaattgaacgcggatatattcgattcgtcgttcgaattgatttcgttaattttggaaggatcgcgataagtggtttttttgaatatcgttacgtcgattatcg

SEQ ID NO: 14004 - DNA, 787 bp, Artificial Sequence
  chemically treated genomic DNA (Homo sapiens) CpG-island No: 14004
  unsure (141, 189, 276, 398, 418, 431)
cgataatcgacgtaacgatattcaaaaaaaccacttatcgcgatccttccaaaattaacgaaatcaattcgaacgacgaatcgaatatatccgcgttcaattaataaccgacaccgacctttacgctcgtaattaacttancaaaacgcaatatcattaaaaacctcgtaatactacgtacctacatcntcgaaaaacccgaccataccgtattaacgaactatcgcataaaaaccaaaataaacgccaaatccaacaaaatttatacgcgttacntaaaacatttaacgaatcgaaaaaccgacgtctcacctctctataaatctacatacgatataataataaaataacttaacgcactaaatctactcgcgccctaaaactaaaacgtactaaanacaaaaaaaaaaaaaaatanaaataaccgcccnaataaacattacaaaacgattaacgtaaatccgacgacccgtataaaaaattaacgactccaattaatctataaaccgacccgctacaattacgacataacctaaatcaccgatcataacaaccaataaaaccccgaaaacctaatacacgaattcacgaattaataaaccacaaaaaatattaaaacgataccaaacgaacaacaaatataataatcctaaaaaaaattacgaaatttcgatatatcaaaacgaacccgtacaacacgacatataccgccgtaaaatattcaccttactatacaattaaacgaaataacttacatcgctaatttaacaaatatacatcaacgaaa

SEQ ID NO: 14005 - DNA, 568 bp, Artificial Sequence
  chemically treated genomic DNA (Homo sapiens) CpG-island No: 14005
aaggcgtagtagttattatcgttatcggtttttgtttgcgtggggcggtgttgtcgtagttggagttaatttaattggcgtagtagtttgtaagaagttttgttaggtaaaatcgttattaatatttcgggttttcgtcgaattcgtataattttttcgcgatcgttgcgtatattattattacggtaaatcgtcgaaattggatgataaaaatcgttcgattttcgtttaggtcgtttgatttacgaatattgcgaacgtcgttcgtatttcgatgttgtcgttttgttaaagagttcggtgatgaagggtatcgcgaaggttggtgttgtattattcgggtgtaagggtagaaattacggtattgattagttgaaacgcgatgtggcggggtggcgggggattggtatttgtatggtgacgaaagatcggttttaggtttttagtgtatcgcgaaaaggcgtttataacgggtagaaaggggagtttatttgtgtcgggatggtacgtttaaaggaggtataaaatcgaagaataattggtggcgtgtcgttttttttttataacg

SEQ ID NO: 14006 - DNA, 568 bp, Artificial Sequence
  chemically treated genomic DNA (Homo sapiens) CpG-island No: 14006
cgttataaaaaaaaaacgacacgccaccaattattcttcgattttatacctcctttaaacgtaccatcccgacacaaataaactcccctttctacccgttataaacgccttttcgcgatacactaaaaacctaaaaccgatctttcgtcaccatacaaataccaatcccccgccaccccgccacatcgcgtttcaactaatcaataccgtaatttctacccttacacccgaataatacaacaccaaccttcgcgatacccttcatcaccgaactctttaacaaaacgacaacatcgaaatacgaacgacgttcgcaatattcgtaaatcaaacgacctaaacgaaaatcgaacgatttttatcatccaatttcgacgatttaccgtaataataatatacgcaacgatcgcgaaaaaattatacgaattcgacgaaaacccgaaatattaataacgattttacctaacaaaacttcttacaaactactacgccaattaaattaactccaactacgacaacaccgccccacgcaaacaaaaaccgataacgataataactactacgcctt

SEQ ID NO: 14007 - DNA, 568 bp, Artificial Sequence
  chemically treated genomic DNA (Homo sapiens) CpG-island No: 14007
cgttatgaaaagagagcggtacgttattaattatttttcggttttgtgttttttttggacgtattatttcgatataggtaagtttttttttttattcgttgtaagcgttttttcgcggtgtattgagaatttaggatcgatttttcgttattatgtaggtattaatttttcgttatttcgttatatcgcgttttagttgattaatgtcgtagtttttgtttttatattcgagtggtatagtattagttttcgcggtgttttttattatcgaattttttggtaaaacgatagtatcgaagtgcgggcgacgttcgtagtgttcgtgaattagacggtttaggcgaaggtcggacggtttttgttatttagtttcggcggtttgtcgtagtgatgatgtgcgtaacggtcgcgaggaagttgtgcgggttcggcgggagttcggaatattgataacggttttgtttggtagaattttttgtaggttattgcgttagttgggttaattttagttgcggtaatatcgttttacgtaggtaggaatcgatagcgataatggttgttgcgtttt

SEQ ID NO: 14008 - DNA, 568 bp, Artificial Sequence
  chemically treated genomic DNA (Homo sapiens) CpG-island No: 14008
aaaacgcaacaaccattatcgctatcgattcctacctacgtaaaacgatattaccgcaactaaaattaacccaactaacgcaataacctacaaaaaattctaccaaacaaaaccgttatcaatattccgaactcccgccgaacccgcacaacttcctcgcgaccgttacgcacatcatcactacgacaaaccgccgaaactaaataacaaaaaccgtccgaccttcgcctaaaccgtctaattcacgaacactacgaacgtcgcccgcacttcgatactatcgttttaccaaaaaattcgataataaaaaacaccgcgaaaactaatactataccactcgaatataaaaacaaaaactacgacattaatcaactaaaacgcgatataacgaaataacgaaaaattaatacctacataataacgaaaaatcgatcctaaattctcaatacaccgcgaaaaaacgcttacaacgaataaaaaaaaaaacttacctatatcgaaataatacgtccaaaaaaaacacaaaaccgaaaaataattaataacgtaccgctctcttttcataacg

SEQ ID NO: 14009 - DNA, 1070 bp, Artificial Sequence
  chemically treated genomic DNA (Homo sapiens) CpG-island No: 14009
  unsure (905, 907..908, 916..917, 921, 1007, 1030)
tagtagcggttttttttatttattcggttagttaggattttattttttagtcggcgagtatttgtattagtatcggcgggaatattatattgttatcgttttttcgtcggattgttgaagggtattcgttaggttgcggcgttgcgttttcgtagtttatcggtggtagtttcgattttgatgagtggcgtgaagtttttcgttgataaatcgtttggatgcggtttttgtcgttttgtatcgtggttagcggtcgtcgttttagtcgtattaggttatttgcggttttcgtgatagcgtatttagttcgttaggtttcgtttacgtcgttatattcgttttgttatttgcggtttagcgggtcgtaaagatagcgattttcgattagcggtttttttattgtgttcgcgtgtagtgtattagtcggtgttgattgtcgtaatggttcggtgagttcgtttattattcgtgcggataatttttttcgggatgaggcggttttttttgttagtttgtcgtgacggttatatcggtaaagatagtggcgttacgggcgatacggttattcggttatatgttgagggtgttgttcggtgtagtttcgggtcgggtaggcggttatttgtcgggtttgtggtatacggatgcggatatttagattcgttgcggtggtgtgaacgtcggttagttttcggtggtgttgtagttgtaatttcgggtttggcgcgggttgttgatgcgatgagttcgtcgttgtcgttttaggtgtaatcgcggttagatagtaggtgtttaggtgttggttttgtaattgttcggtaggggtataagcggtggtagtttataacggtcgaagttgcgtaagcgttttttcggtggttagggcgggtcggcggggtggtatntnnttattagnncggntgtgtcgtcgagtttatgtttgttaggtatcgttgtttagttagttattttacggcgggtaggcgttcggtatatagcggttcgtntagtttttggcgcggttggtatngttttggttttgggggttttttatattggtttggttttag

SEQ ID NO: 14010 - DNA, 1070 bp, Artificial Sequence
  chemically treated genomic DNA (Homo sapiens) CpG-island No: 14010
  unsure (41, 64, 150, 154..155, 163..164, 166)
ctaaaaccaaaccaatataaaaaacccccaaaaccaaaacnataccaaccgcgccaaaaactanacgaaccgctatataccgaacgcctacccgccgtaaaataactaactaaacaacgatacctaacaaacataaactcgacgacacanccgnnctaataannanataccaccccgccgacccgccctaaccaccgaaaaaacgcttacgcaacttcgaccgttataaactaccaccgcttatacccctaccgaacaattacaaaaccaacacctaaacacctactatctaaccgcgattacacctaaaacgacaacgacgaactcatcgcatcaacaacccgcgccaaacccgaaattacaactacaacaccaccgaaaactaaccgacgttcacaccaccgcaacgaatctaaatatccgcatccgtataccacaaacccgacaaataaccgcctacccgacccgaaactacaccgaacaacaccctcaacatataaccgaataaccgtatcgcccgtaacgccactatctttaccgatataaccgtcacgacaaactaacaaaaaaaaccgcctcatcccgaaaaaaattatccgcacgaataataaacgaactcaccgaaccattacgacaatcaacaccgactaatacactacacgcgaacacaataaaaaaaccgctaatcgaaaatcgctatctttacgacccgctaaaccgcaaataacaaaacgaatataacgacgtaaacgaaacctaacgaactaaatacgctatcacgaaaaccgcaaataacctaatacgactaaaacgacgaccgctaaccacgatacaaaacgacaaaaaccgcatccaaacgatttatcaacgaaaaacttcacgccactcatcaaaatcgaaactaccaccgataaactacgaaaacgcaacgccgcaacctaacgaatacccttcaacaatccgacgaaaaaacgataacaatataatattcccgccgatactaatacaaatactcgccgactaaaaaataaaatcctaactaaccgaataaataaaaaaaaccgctacta

SEQ ID NO: 14011 - DNA, 1070 bp, Artificial Sequence
  chemically treated genomic DNA (Homo sapiens) CpG-island No: 14011
  unsure (41, 64, 150, 154..155, 163..164, 166)
ttggggttaggttaatgtgagggatttttaggattagggtngtattaatcgcgttaggggttgngcgaatcgttgtatatcggacgtttgttcgtcgtggaatggttgattaggtagcggtatttggtaggtataaattcggcgatatantcgnnttggtggnnangtattatttcgtcgattcgttttggttatcggggaaacgtttgcgtagtttcggtcgttatgaattattatcgtttatatttttgtcgggtagttatagagttagtatttgaatatttgttgtttgatcgcgattatatttggaacgataacggcgaatttatcgtattagtagttcgcgttagattcggagttatagttatagtattatcggaggttgatcggcgtttatattatcgtagcgaatttggatattcgtattcgtatgttatagattcggtaggtaatcgtttgttcgattcggagttgtatcggatagtatttttagtatgtggtcggataatcgtatcgttcgtgacgttattatttttatcggtatgatcgttacggtaggttgatagagaaaatcgttttatttcggaaggggttattcgtacggatgatgagcggatttatcggattattacgatagttagtatcggttggtgtattatacgcggatataatagaagagtcgttggtcgaaagtcgttatttttacgattcgttgggtcgtaggtggtaaaacgggtgtggcggcgtgaacgggatttgacgggttggatgcgttgttacggaaatcgtaagtgatttggtacggttgggacggcgatcgttgattacgatatagaacgataggagtcgtatttagacgatttattagcggggagttttacgttatttattagggtcgaaattgttatcggtgagttgcgaaaacgtagcgtcgtagtttggcggatgttttttagtagttcggcgggaagacggtggtagtgtggtgttttcgtcggtgttggtgtagatgttcgtcggttggaaagtgaaattttggttgatcgggtgagtgaggaaagtcgttgttg

SEQ ID NO: 14012 - DNA, 1070 bp, Artificial Sequence
  chemically treated genomic DNA (Homo sapiens) CpG-island No: 14012
  unsure (905, 907..908, 916..917, 921, 1007, 1030)
caacaacgactttcctcactcacccgatcaaccaaaatttcactttccaaccgacgaacatctacaccaacaccgacgaaaacaccacactaccaccgtcttcccgccgaactactaaaaaacatccgccaaactacgacgctacgttttcgcaactcaccgataacaatttcgaccctaataaataacgtaaaactccccgctaataaatcgtctaaatacgactcctatcgttctatatcgtaatcaacgatcgccgtcccaaccgtaccaaatcacttacgatttccgtaacaacgcatccaacccgtcaaatcccgttcacgccgccacacccgttttaccacctacgacccaacgaatcgtaaaaataacgactttcgaccaacgactcttctattatatccgcgtataatacaccaaccgatactaactatcgtaataatccgataaatccgctcatcatccgtacgaataaccccttccgaaataaaacgattttctctatcaacctaccgtaacgatcataccgataaaaataataacgtcacgaacgatacgattatccgaccacatactaaaaatactatccgatacaactccgaatcgaacaaacgattacctaccgaatctataacatacgaatacgaatatccaaattcgctacgataatataaacgccgatcaacctccgataatactataactataactccgaatctaacgcgaactactaatacgataaattcgccgttatcgttccaaatataatcgcgatcaaacaacaaatattcaaatactaactctataactacccgacaaaaatataaacgataataattcataacgaccgaaactacgcaaacgtttccccgataaccaaaacgaatcgacgaaataatacntnnccaccaanncgantatatcgccgaatttatacctaccaaataccgctacctaatcaaccattccacgacgaacaaacgtccgatatacaacgattcgcncaacccctaacgcgattaatacnaccctaatcctaaaaatccctcacattaacctaaccccaa

SEQ ID NO: 14013 - DNA, 947 bp, Artificial Sequence
  chemically treated genomic DNA (Homo sapiens) CpG-island No: 14013
gttcgtgtatttgttttatagtaaaattattatcgttttgtgataataagacgcggattattacgtcggattttacgagtagtaattgtgtcggatttagattgtcgtattgtttttttttattacgcgggcgtagttgtttagttagattgcgttttttttttatcgtttttttttatcgtaaatagtatttgtcgtttttagtgttgtgggttttgtcgcgggtcgcgttatatttcggtcgtcgttgtcgttgtgatcgcggttacgtaattattagtcgtgataggtattagtttcgggtatatttttgttatttaggttttattttgggtgacgtatatatttttattatcgattaggcggtaaggttgggtttggtattacgtcgttttagttgtcgttatcgttattacgttcggggttaaggttttacgtattaggtcggggataaagtttatattttgcggacgtacgttatcgttagttggatttgttaggagaagatcgcgcggatattttttttggcgatgttcgattgaaatgcgttatcgtaaacgtttgtttttaggtattttacggttagtttgattgtcggagaattagcgttcggttatcgacggtgtaacggtgtaaattttatcgtatcgttcggtgagcgttagttatcgttgagcgtttcgtcgtttttatcgcgacgcgcgtttgtttcggcgtcgtattcggattggtaattttttttttaggtattttttttagcgttgttgcgaggcggtgagataaacgtcggacgcgttagaatatcgcggatttgtatttgttttttgttattttttgagcggttagtagatgggaataggtggtgtagagcgtggtcgatcgttgatatgcgttttattggtaaagcgattatcgttgattttagttttatcggtagggatttatgt

SEQ ID NO: 14014 - DNA, 947 bp, Artificial Sequence
  chemically treated genomic DNA (Homo sapiens) CpG-island No: 14014
acataaatccctaccgataaaactaaaatcaacgataatcgctttaccaataaaacgcatatcaacgatcgaccacgctctacaccacctattcccatctactaaccgctcaaaaaataacaaaaaacaaatacaaatccgcgatattctaacgcgtccgacgtttatctcaccgcctcgcaacaacgctaaaaaaaatacctaaaaaaaaaattaccaatccgaatacgacgccgaaacaaacgcgcgtcgcgataaaaacgacgaaacgctcaacgataactaacgctcaccgaacgatacgataaaatttacaccgttacaccgtcgataaccgaacgctaattctccgacaatcaaactaaccgtaaaatacctaaaaacaaacgtttacgataacgcatttcaatcgaacatcgccaaaaaaaatatccgcgcgatcttctcctaacaaatccaactaacgataacgtacgtccgcaaaatataaactttatccccgacctaatacgtaaaaccttaaccccgaacgtaataacgataacgacaactaaaacgacgtaataccaaacccaaccttaccgcctaatcgataataaaaatatatacgtcacccaaaataaaacctaaataacaaaaatatacccgaaactaatacctatcacgactaataattacgtaaccgcgatcacaacgacaacgacgaccgaaatataacgcgacccgcgacaaaacccacaacactaaaaacgacaaatactatttacgataaaaaaaaacgataaaaaaaaaacgcaatctaactaaacaactacgcccgcgtaataaaaaaaaacaatacgacaatctaaatccgacacaattactactcgtaaaatccgacgtaataatccgcgtcttattatcacaaaacgataataattttactataaaacaaatacacgaac

SEQ ID NO: 14015 - DNA, 947 bp, Artificial Sequence
  chemically treated genomic DNA (Homo sapiens) CpG-island No: 14015
gtataaatttttgtcggtgagattgaaattaacggtaatcgttttattagtaaggcgtatattaacggtcgattacgttttatattatttatttttatttgttgatcgtttaggaagtagtaaagagtaaatgtagattcgcgatattttggcgcgttcggcgtttattttatcgtttcgtagtaacgttgggaagaatatttgaagaaagggttattaattcggatgcgacgtcggaatagacgcgcgtcgcggtgaaagcgacgaaacgtttaacggtaattggcgtttatcgggcggtgcggtgaaatttatatcgttatatcgtcggtgatcgggcgttggtttttcggtaattagattggtcgtgggatatttggaagtaggcgtttgcgatggcgtattttaatcggatatcgttaaagagaatattcgcgcggtttttttttggtagatttagttggcgatagcgtgcgttcgtaggatgtgggttttgttttcgatttgatgcgtggaattttagtttcgagcgtggtggcgatggcggtaattggaacgacgtaatattaaatttagttttgtcgtttggtcggtgatggaagtgtatacgttatttaagataaaatttgggtggtagagatgtattcgaaattggtgtttattacgattggtggttacgtaatcgcgattataacggtaacggcggtcggaatatggcgcgattcgcgataaagtttataatattgagagcggtagatgttgtttacggtgaaaaaaggcgataaagaagagacgtagtttggttgaataattacgttcgcgtggtggagaaaggtagtacgatagtttgaattcggtatagttgttgttcgtgggattcggcgtgatgattcgcgttttgttattataagacggtggtaattttgttatggggtaagtatacgggt

SEQ ID NO: 14016 - DNA, 947 bp, Artificial Sequence
  chemically treated genomic DNA (Homo sapiens) CpG-island No: 14016
acccgtatacttaccccataacaaaattaccaccgtcttataataacaaaacgcgaatcatcacgccgaatcccacgaacaacaactataccgaattcaaactatcgtactacctttctccaccacgcgaacgtaattattcaaccaaactacgtctcttctttatcgccttttttcaccgtaaacaacatctaccgctctcaatattataaactttatcgcgaatcgcgccatattccgaccgccgttaccgttataatcgcgattacgtaaccaccaatcgtaataaacaccaatttcgaatacatctctaccacccaaattttatcttaaataacgtatacacttccatcaccgaccaaacgacaaaactaaatttaatattacgtcgttccaattaccgccatcgccaccacgctcgaaactaaaattccacgcatcaaatcgaaaacaaaacccacatcctacgaacgcacgctatcgccaactaaatctaccaaaaaaaaaccgcgcgaatattctctttaacgatatccgattaaaatacgccatcgcaaacgcctacttccaaatatcccacgaccaatctaattaccgaaaaaccaacgcccgatcaccgacgatataacgatataaatttcaccgcaccgcccgataaacgccaattaccgttaaacgtttcgtcgctttcaccgcgacgcgcgtctattccgacgtcgcatccgaattaataaccctttcttcaaatattcttcccaacgttactacgaaacgataaaataaacgccgaacgcgccaaaatatcgcgaatctacatttactctttactacttcctaaacgatcaacaaataaaaataaataatataaaacgtaatcgaccgttaatatacgccttactaataaaacgattaccgttaatttcaatctcaccgacaaaaatttatac

SEQ ID NO: 14017 - DNA, 599 bp, Artificial Sequence
  chemically treated genomic DNA (Homo sapiens) CpG-island No: 14017
tattagcgtatcgggaatattgtatgttttcgcgtaaagtcgatttttttgtcgttttgttagacggttaggcggtcgaattgttgggtataaagttgatgattttttcgttaggagcgtaagttcggaggcgttatggtgtagggcgtttggaacgatatatgcgaggtttagatgaaaggataaacgcgggacgcgaacggaattaagagggggcgtaacgaaacgtaaaaggcggtcggcggggaattttcggcggtggggaaatatttaagatttataagtggaagggcggggtaacgaacgggcggtatagtttcgtgtaatttttttcgtttatttttcgtattgttggcgttgaatggcgtaatagtaggaagcggattattggatttaggttgatttgtatcgatgtcgtggtggtagttttcgttgttatcgggtattcgggatcgaaatattggtcggattcgttttttgttgaatagtggcggcgtatcggttgtcgggtaattcgttagttgtaaattttgtatattattaggttacggtttttatttagtttaaattgttcgttacggttgtagatatcgaatcgt

SEQ ID NO: 14018 - DNA, 599 bp, Artificial Sequence
  chemically treated genomic DNA (Homo sapiens) CpG-island No: 14018
acgattcgatatctacaaccgtaacgaacaatttaaactaaataaaaaccgtaacctaataatatacaaaatttacaactaacgaattacccgacaaccgatacgccgccactattcaacaaaaaacgaatccgaccaatatttcgatcccgaatacccgataacaacgaaaactaccaccacgacatcgatacaaatcaacctaaatccaataatccgcttcctactattacgccattcaacgccaacaatacgaaaaataaacgaaaaaaattacacgaaactataccgcccgttcgttaccccgcccttccacttataaatcttaaatatttccccaccgccgaaaattccccgccgaccgccttttacgtttcgttacgccccctcttaattccgttcgcgtcccgcgtttatcctttcatctaaacctcgcatatatcgttccaaacgccctacaccataacgcctccgaacttacgctcctaacgaaaaaatcatcaactttatacccaacaattcgaccgcctaaccgtctaacaaaacgacaaaaaaatcgactttacgcgaaaacatacaatattcccgatacgctaata

SEQ ID NO: 14019 - DNA, 599 bp, Artificial Sequence
  chemically treated genomic DNA (Homo sapiens) CpG-island No: 14019
acggttcggtgtttatagtcgtaacggataatttaagttggatgaaaatcgtaatttggtgatatgtaaggtttatagttgacgggttattcggtaatcggtacgtcgttattatttagtaaggggcgaattcgattaatatttcgatttcgaatattcgatggtagcgaaaattattattacggtatcgatgtagattaatttgaatttagtgattcgttttttattgttacgttatttagcgttagtaatgcggaaagtaagcggaggaggttatacggaattgtgtcgttcgttcgttatttcgtttttttatttgtaagttttaaatatttttttatcgtcggaaatttttcgtcgatcgttttttgcgtttcgttgcgtttttttttagtttcgttcgcgtttcgcgtttatttttttatttggatttcgtatgtatcgttttagacgttttatattatggcgttttcgggtttgcgtttttgacgaagaggttattaattttatgtttagtaattcgatcgtttgatcgtttggtaggacggtaagaaagtcgattttacgcggaggtatatagtattttcggtgcgttggtg

SEQ ID NO: 14020 - DNA, 599 bp, Artificial Sequence
  chemically treated genomic DNA (Homo sapiens) CpG-island No: 14020
caccaacgcaccgaaaatactatatacctccgcgtaaaatcgactttcttaccgtcctaccaaacgatcaaacgatcgaattactaaacataaaattaataacctcttcgtcaaaaacgcaaacccgaaaacgccataatataaaacgtctaaaacgatacatacgaaatccaaataaaaaaataaacgcgaaacgcgaacgaaactaaaaaaaaacgcaacgaaacgcaaaaaacgatcgacgaaaaatttccgacgataaaaaaatatttaaaacttacaaataaaaaaacgaaataacgaacgaacgacacaattccgtataacctcctccgcttactttccgcattactaacgctaaataacgtaacaataaaaaacgaatcactaaattcaaattaatctacatcgataccgtaataataattttcgctaccatcgaatattcgaaatcgaaatattaatcgaattcgccccttactaaataataacgacgtaccgattaccgaataacccgtcaactataaaccttacatatcaccaaattacgattttcatccaacttaaattatccgttacgactataaacaccgaaccgt

SEQ ID NO: 14021 - DNA, 644 bp, Artificial Sequence
  chemically treated genomic DNA (Homo sapiens) CpG-island No: 14021
atcgtcgcggtgaacggttcgtcgtaatatattgggcgatggtttacggattgatcggtattgcgtagttgtgaataagtaaaagtacgcgtcgtttttaattttttgaaataggcggttgtttgttgcgggtaaacgcggttttagtttatatgtggtagtggtagattaaagtggttattttcggtacgttttcgtcgatgatgtttagtaagtcgacgtcgtgtttttttcgttgcgtcgttttagtagttgtatttttaagtagatgttagtatcggttgggtataggttttgatgagattaaatagttcgcgtttattatttgatttatcgtcgtttgcgtagtgttaacgtcgggtaaaaatagttatcggttagtaatacgacgttcgggttacggttgattttgggtttatatcgtgacgcgtaatggtagattttatcgagtttaggttggcgtagtcggattaaggattattacgtttattatagtatttttttcgacgagggtagggatcgttttttacgcggattggttggcgtacgtgcgattaaaggttttgatagaatttttatacggtgatgatcgttttatttttggttttaggtgtaggttcgtttatggtgtatgaagcgatcgg

SEQ ID NO: 14022 - DNA, 644 bp, Artificial Sequence
  chemically treated genomic DNA (Homo sapiens) CpG-island No: 14022
ccgatcgcttcatacaccataaacgaacctacacctaaaaccaaaaataaaacgatcatcaccgtataaaaattctatcaaaacctttaatcgcacgtacgccaaccaatccgcgtaaaaaacgatccctaccctcgtcgaaaaaaatactataataaacgtaataatccttaatccgactacgccaacctaaactcgataaaatctaccattacgcgtcacgatataaacccaaaatcaaccgtaacccgaacgtcgtattactaaccgataactatttttacccgacgttaacactacgcaaacgacgataaatcaaataataaacgcgaactatttaatctcatcaaaacctatacccaaccgatactaacatctacttaaaaatacaactactaaaacgacgcaacgaaaaaaacacgacgtcgacttactaaacatcatcgacgaaaacgtaccgaaaataaccactttaatctaccactaccacatataaactaaaaccgcgtttacccgcaacaaacaaccgcctatttcaaaaaattaaaaacgacgcgtacttttacttattcacaactacgcaataccgatcaatccgtaaaccatcgcccaatatattacgacgaaccgttcaccgcgacgat

SEQ ID NO: 14023 - DNA, 644 bp, Artificial Sequence
  chemically treated genomic DNA (Homo sapiens) CpG-island No: 14023
tcggtcgttttatatattatgggcggatttatatttgaaattaaaggtaaaacgattattatcgtgtagagattttgttaaagtttttggtcgtacgtgcgttagttaattcgcgtggaaggcgatttttgttttcgtcgaaaggagtgttgtaatgaacgtggtgatttttgattcggttgcgttaatttgaattcggtgaagtttgttattgcgcgttacggtatgaatttaaagttagtcgtgattcggacgtcgtgttgttggtcgataattgtttttattcggcgttggtattgcgtaagcggcgatggattaggtagtgagcgcgagttgtttgattttattaaagtttgtatttaatcggtgttggtatttgtttagggatgtaattgttggggcggcgtagcgaagagagtacggcgtcgatttgttgggtattatcgacgaagacgtgtcgaaaatgattattttggtttgttattgttatatatgggttggaatcgcgtttattcgtagtaggtaatcgtttgttttaggggattgaagacggcgcgtatttttatttgtttatagttacgtaatgtcggttaattcgtggattatcgtttagtgtattacggcgaatcgtttatcgcggcggt

SEQ ID NO: 14024 - DNA, 644 bp, Artificial Sequence
  chemically treated genomic DNA (Homo sapiens) CpG-island No: 14024
accgccgcgataaacgattcgccgtaatacactaaacgataatccacgaattaaccgacattacgtaactataaacaaataaaaatacgcgccgtcttcaatcccctaaaacaaacgattacctactacgaataaacgcgattccaacccatatataacaataacaaaccaaaataatcattttcgacacgtcttcgtcgataatacccaacaaatcgacgccgtactctcttcgctacgccgccccaacaattacatccctaaacaaataccaacaccgattaaatacaaactttaataaaatcaaacaactcgcgctcactacctaatccatcgccgcttacgcaataccaacgccgaataaaaacaattatcgaccaacaacacgacgtccgaatcacgactaactttaaattcataccgtaacgcgcaataacaaacttcaccgaattcaaattaacgcaaccgaatcaaaaatcaccacgttcattacaacactcctttcgacgaaaacaaaaatcgccttccacgcgaattaactaacgcacgtacgaccaaaaactttaacaaaatctctacacgataataatcgttttacctttaatttcaaatataaatccgcccataatatataaaacgaccga

SEQ ID NO: 14025 - DNA, 855 bp, Artificial Sequence
  chemically treated genomic DNA (Homo sapiens) CpG-island No: 14025
  unsure (511, 522..523, 533)
ggacgtatatttcgcggtcgtgtgcgatttgtaattaatattttcggtttttagcgacggaaaaaattatattggtttgttttgtagcgggttggtaggcgttttttgcgtcgtattttcggtacgaaggcggcgttaaattgtaattcgttatttattattattttggtgcgcgtttacggacgatttttgtcgtttgttggacgttagtatataggggtgacgggcgttattattgttggaaaacgatagtatcgttatcgcggttttttttcggtgatggcgcgttaggtttcggtattggtaagcggatattcgttagttgcgtcgtcgtcggttgtggtattacgttgtaatcgtaaagtttaacgtcgggtcgttgtattgtggtaatattaggaaaatggagagagcgttttatagtttggttgtaagtcgataatgcgtaattcggtattagtatatttgtcgtggaagagaggttgttcgcgatatagatattcgtttacgncggcgttgatnntattgttgancggcgaatattagaagggtcggaagtttttttagcgtattcggcggcgttttttcgttcgcgcgggttagtagcgatgagtaaatttttttcgtattgcgaggttgtatgcggattaattttgtagtcgtttatcgtacgtcgtgattgagcgtaaatgacgaagtttaacgatgggaattaaatgggcgttgtaaagttttaaggtttttcgggtttaatcgttcggtatttttatgtttcgttatttgttagcgtaggtgaagggatggttatcgatattagattgacgattatattattaattcgagaatgtttgatcg

SEQ ID NO: 14026 - DNA, 855 bp, Artificial Sequence
  chemically treated genomic DNA (Homo sapiens) CpG-island No: 14026
  unsure (323, 333..334, 345)
cgatcaaacattctcgaattaataatataatcgtcaatctaatatcgataaccatcccttcacctacgctaacaaataacgaaacataaaaataccgaacgattaaacccgaaaaaccttaaaactttacaacgcccatttaattcccatcgttaaacttcgtcatttacgctcaatcacgacgtacgataaacgactacaaaattaatccgcatacaacctcgcaatacgaaaaaaatttactcatcgctactaacccgcgcgaacgaaaaaacgccgccgaatacgctaaaaaaacttccgacccttctaatattcgccgntcaacaatannatcaacgccgncgtaaacgaatatctatatcgcgaacaacctctcttccacgacaaatatactaataccgaattacgcattatcgacttacaaccaaactataaaacgctctctccattttcctaatattaccacaatacaacgacccgacgttaaactttacgattacaacgtaataccacaaccgacgacgacgcaactaacgaatatccgcttaccaataccgaaacctaacgcgccatcaccgaaaaaaaaccgcgataacgatactatcgttttccaacaataataacgcccgtcacccctatatactaacgtccaacaaacgacaaaaatcgtccgtaaacgcgcaccaaaataataataaataacgaattacaatttaacgccgccttcgtaccgaaaatacgacgcaaaaaacgcctaccaacccgctacaaaacaaaccaatataattttttccgtcgctaaaaaccgaaaatattaattacaaatcgcacacgaccgcgaaatatacgtcc

SEQ ID NO: 14027 - DNA, 855 bp, Artificial Sequence
  chemically treated genomic DNA (Homo sapiens) CpG-island No: 14027
  unsure (323, 333..334, 345)
cgattaggtattttcgaattaatggtgtggtcgttaatttggtgtcgataattatttttttatttacgttggtaagtggcgaaatataaggatgtcgggcggttaagttcgggaagttttggggttttgtaacgtttatttggtttttatcgttgaatttcgttatttgcgtttagttacggcgtgcgatggacggttataggattgattcgtatgtaatttcgtaatgcgggaagaatttgtttatcgttgttggttcgcgcgggcgaaaaaacgtcgtcggatgcgttggaaaaattttcgatttttttgatgttcgtcgnttagtaatgnngttagcgtcgncgtaagcggatgtttgtatcgcgggtaattttttttttacggtaaatgtgttggtgtcggattacgtattatcggtttgtagttaggttgtaaaacgttttttttatttttttgatgttgttatagtatagcggttcggcgttgggttttgcgattgtagcgtggtgttatagtcgacggcggcgtagttggcggatattcgtttgttagtgtcgaaatttggcgcgttattatcggagaagagtcgcggtggcgatgttgtcgttttttagtaatggtagcgttcgttatttttgtgtgttaacgtttagtaggcgatagaaatcgttcgtgagcgcgtattaaagtggtggtggatggcgagttatagtttgacgtcgttttcgtgtcggaagtgcggcgtaaaaagcgtttgttagttcgttatagggtaggttaatgtgatttttttcgtcgttggaagtcggaaatattggttataaatcgtatacgatcgcgggatatgcgttt

SEQ ID NO: 14028 - DNA, 855 bp, Artificial Sequence
  chemically treated genomic DNA (Homo sapiens) CpG-island No: 14028
  unsure (511, 522..523, 533)
aaacgcatatcccgcgatcgtatacgatttataaccaatatttccgacttccaacgacgaaaaaaatcacattaacctaccctataacgaactaacaaacgctttttacgccgcacttccgacacgaaaacgacgtcaaactataactcgccatccaccaccactttaatacgcgctcacgaacgatttctatcgcctactaaacgttaacacacaaaaataacgaacgctaccattactaaaaaacgacaacatcgccaccgcgactcttctccgataataacgcgccaaatttcgacactaacaaacgaatatccgccaactacgccgccgtcgactataacaccacgctacaatcgcaaaacccaacgccgaaccgctatactataacaacatcaaaaaaataaaaaaaacgttttacaacctaactacaaaccgataatacgtaatccgacaccaacacatttaccgtaaaaaaaaaattacccgcgatacaaacatccgcttacgncgacgctaacnncattactaancgacgaacatcaaaaaaatcgaaaatttttccaacgcatccgacgacgttttttcgcccgcgcgaaccaacaacgataaacaaattcttcccgcattacgaaattacatacgaatcaatcctataaccgtccatcgcacgccgtaactaaacgcaaataacgaaattcaacgataaaaaccaaataaacgttacaaaaccccaaaacttcccgaacttaaccgcccgacatccttatatttcgccacttaccaacgtaaataaaaaaataattatcgacaccaaattaacgaccacaccattaattcgaaaatacctaatcg

SEQ ID NO: 14029 - DNA, 916 bp, Artificial Sequence
  chemically treated genomic DNA (Homo sapiens) CpG-island No: 14029
  unsure (106)
ggttcggttttgatgcgtaggtgtttcgaaataatttgcggtttagaggtttgcggcgcgtatttttttggagaatggtgaataagggcgggcggaaaatggtttngcggaaatgagattgtttgggtaggttaatgagtacggtcgcgggaggggagtaaagtgcgtggttgggacgacgcgcgaaatatgttgttgttttattttaggggcgttattacggtcggttgtagggtatcgggtcggtggttgtagttgtttttattggggatgatttggggataggcgttgatcgcgtagtcggcgggtattgatggtaggtcgttggggatgtgttaggtgatgaggacgtgtcgatgggaatgtgtgaggtggagaaggtaagggatagggatcgtagggaatattggaaggggcgtgtgcgtatttgggatcgagggcgtatggcgtttgatgtatattatagaatgtcgggtttgattgttattgcgcgtgtgtgagtttatggggaggggtcgatcgtcggcgatgttggtttggatcggggtgggggggtttgttttaattggattagtatatcgaggggtgcgtaaagggttggtgggcgatggggcgcgtgggcggttttaagtgaggattagggttcgatggaatggtggcgtcgttaggtagattaggagagagattgtttggagtgtcgttgtttgcgaatgagggttggtattagtacgttagtgggcgcgtaagcgtatttgtgtgaaggaggattcgcgtaaggtgttttgtatatggtgaagcgtgcgatggtggcgtgcgggtatggtgtcgagtttgtcggaacggtatgttatattgttggttgcgttaggagcggatagtgcggtatattgttttgggatggtgcggagagtgaaaa

SEQ ID NO: 14030 - DNA, 916 bp, Artificial Sequence
  chemically treated genomic DNA (Homo sapiens) CpG-island No: 14030
  unsure (811)
ttttcactctccgcaccatcccaaaacaatataccgcactatccgctcctaacgcaaccaacaatataacataccgttccgacaaactcgacaccatacccgcacgccaccatcgcacgcttcaccatatacaaaacaccttacgcgaatcctccttcacacaaatacgcttacgcgcccactaacgtactaataccaaccctcattcgcaaacaacgacactccaaacaatctctctcctaatctacctaacgacgccaccattccatcgaaccctaatcctcacttaaaaccgcccacgcgccccatcgcccaccaaccctttacgcacccctcgatatactaatccaattaaaacaaacccccccaccccgatccaaaccaacatcgccgacgatcgacccctccccataaactcacacacgcgcaataacaatcaaacccgacattctataatatacatcaaacgccatacgccctcgatcccaaatacgcacacgccccttccaatattccctacgatccctatcccttaccttctccacctcacacattcccatcgacacgtcctcatcacctaacacatccccaacgacctaccatcaatacccgccgactacgcgatcaacgcctatccccaaatcatccccaataaaaacaactacaaccaccgacccgataccctacaaccgaccgtaataacgcccctaaaataaaacaacaacatatttcgcgcgtcgtcccaaccacgcactttactcccctcccgcgaccgtactcattaacctacccaaacaatctcatttccgcnaaaccattttccgcccgcccttattcaccattctccaaaaaaatacgcgccgcaaacctctaaaccgcaaattatttcgaaacacctacgcatcaaaaccgaacc

SEQ ID NO: 14031 - DNA, 916 bp, Artificial Sequence
  chemically treated genomic DNA (Homo sapiens) CpG-island No: 14031
  unsure (811)
tttttatttttcgtattattttaaaataatatatcgtattattcgtttttaacgtagttaatagtatagtatatcgtttcggtaaattcggtattatgttcgtacgttattatcgtacgttttattatgtataaaatattttacgcgggtttttttttatataaatacgtttacgcgtttattaacgtgttaatgttagtttttattcgtaaatagcggtattttaaatagttttttttttaatttatttagcggcgttattattttatcgggttttggtttttatttaaggtcgtttacgcgttttatcgtttattaattttttacgtatttttcgatatgttaatttagttggggtaggtttttttatttcggtttaagttaatatcgtcggcggtcggtttttttttataggtttatatacgcgtagtgataattaaattcggtattttgtagtgtgtattaaacgttatacgttttcggttttaggtacgtatacgttttttttaatattttttacggtttttgttttttattttttttattttatatatttttatcggtacgtttttattatttagtatatttttagcgatttattattagtattcgtcggttacgcgattaacgtttgtttttaagttatttttagtagaagtaattataattatcggttcggtattttatagtcggtcgtaatagcgtttttaaagtaaggtaataatatgtttcgcgcgtcgttttagttacgtattttatttttttttcgcggtcgtgtttattagtttatttaagtaattttattttcgtnaaattatttttcgttcgtttttatttattattttttaagggggtgcgcgtcgtaagtttttaaatcgtaggttatttcggagtatttacgtattaaagtcgggtt

SEQ ID NO: 14032 - DNA, 916 bp, Artificial Sequence
  chemically treated genomic DNA (Homo sapiens) CpG-island No: 14032
  unsure (106)
aacccgactttaatacgtaaatactccgaaataacctacgatttaaaaacttacgacgcgcacccccttaaaaaataataaataaaaacgaacgaaaaataatttnacgaaaataaaattacttaaataaactaataaacacgaccgcgaaaaaaaaataaaatacgtaactaaaacgacgcgcgaaacatattattaccttactttaaaaacgctattacgaccgactataaaataccgaaccgataattataattacttctactaaaaataacttaaaaacaaacgttaatcgcgtaaccgacgaatactaataataaatcgctaaaaatatactaaataataaaaacgtaccgataaaaatatataaaataaaaaaaataaaaaacaaaaaccgtaaaaaatattaaaaaaaacgtatacgtacctaaaaccgaaaacgtataacgtttaatacacactacaaaataccgaatttaattatcactacgcgtatataaacctataaaaaaaaaccgaccgccgacgatattaacttaaaccgaaataaaaaaacctaccccaactaaattaacatatcgaaaaatacgtaaaaaattaataaacgataaaacgcgtaaacgaccttaaataaaaaccaaaacccgataaaataataacgccgctaaataaattaaaaaaaaaactatttaaaataccgctatttacgaataaaaactaacattaacacgttaataaacgcgtaaacgtatttatataaaaaaaaacccgcgtaaaatattttatacataataaaacgtacgataataacgtacgaacataataccgaatttaccgaaacgatatactatactattaactacgttaaaaacgaataatacgatatattattttaaaataatacgaaaaataaaaa

SEQ ID NO: 14033 - DNA, 642 bp, Artificial Sequence
  chemically treated genomic DNA (Homo sapiens) CpG-island No: 14033
  unsure (329)
tgttcggcgaggttttagcgaacgcgttatttgtcggaattagttgtaattcgttagtttattattattattgagtacgttaggtaattggttgaggtataacggagtaaattggttagagattgcggtttcggtgatagcgtaaagtcgtgcgatatttttaagttcgttgcgatacgtaataaatttttttatcgtaacggatattcgcggcgcgtttcgcgttaattttcgttcgttaggggttttttagttgatttcgattgcgggcggtttttcgttagtcgttttatcgcggtatacgggtttcgtcgtttattgtttttttnttttttacgttttttttattttttttttttttttttcgttttttcgtttttttttttttttatagtcggatcggcgtacggttacgggtagtggttttatcgttttggggttgacgttttttgcggtgggttatttgtcggtagcgggtttggcgttattttcggtatcgattcgttttatgttagaagttcgtgcgttgattaattggtcggtaacggcgtagcgattattgtcgttgttaagtgggtgaaagattggattataaaaaattggacgatgtgttgaataatcgtgcgtcggatgtaaaacgta

SEQ ID NO: 14034 - DNA, 642 bp, Artificial Sequence
  chemically treated genomic DNA (Homo sapiens) CpG-island No: 14034
  unsure (314)
tacgttttacatccgacgcacgattattcaacacatcgtccaattttttataatccaatctttcacccacttaacaacgacaataatcgctacgccgttaccgaccaattaatcaacgcacgaacttctaacataaaacgaatcgataccgaaaataacgccaaacccgctaccgacaaataacccaccgcaaaaaacgtcaaccccaaaacgataaaaccactacccgtaaccgtacgccgatccgactataaaaaaaaaaaaaaacgaaaaaacgaaaaaaaaaaaaaaaaaataaaaaaaacgtaaaaaanaaaaaaacaataaacgacgaaacccgtataccgcgataaaacgactaacgaaaaaccgcccgcaatcgaaatcaactaaaaaacccctaacgaacgaaaattaacgcgaaacgcgccgcgaatatccgttacgataaaaaaatttattacgtatcgcaacgaacttaaaaatatcgcacgactttacgctatcaccgaaaccgcaatctctaaccaatttactccgttatacctcaaccaattacctaacgtactcaataataataataaactaacgaattacaactaattccgacaaataacgcgttcgctaaaacctcgccgaaca

SEQ ID NO: 14035 - DNA, 642 bp, Artificial Sequence
  chemically treated genomic DNA (Homo sapiens) CpG-island No: 14035
  unsure (314)
tgcgttttgtattcggcgtacgattatttagtatatcgtttagttttttgtggtttagttttttatttatttagtaacgataatggtcgttacgtcgttatcgattagttagttagcgtacgagtttttgatataaagcgggtcgatatcgaggatagcgttagattcgttatcggtaaatggtttatcgtagagagcgttaattttaggacgataaagttattattcgtaatcgtgcgtcggttcggttataggggggaggagaggcggggggacggagaggagagggaggaggtgagggggacgtgggggangaaaggataataagcgacggggttcgtgtatcgcggtgaggcgattggcggggagtcgttcgtagtcgaggttagttggaaggtttttggcgggcgggggttagcgcggaacgcgtcgcggatgttcgttacggtaggggggtttattacgtgtcgtagcggatttgaaggtatcgtacggttttgcgttgttatcgaggtcgtaatttttagttagtttatttcgttatattttagttagttgtttgacgtgtttaatgatagtgatgagttggcgagttatagttgatttcggtagatggcgcgttcgttgaggtttcgtcgggta

SEQ ID NO: 14036 - DNA, 642 bp, Artificial Sequence
  chemically treated genomic DNA (Homo sapiens) CpG-island No: 14036
  unsure (329)
tacccgacgaaacctcaacgaacgcgccatctaccgaaatcaactataactcgccaactcatcactatcattaaacacgtcaaacaactaactaaaatataacgaaataaactaactaaaaattacgacctcgataacaacgcaaaaccgtacgataccttcaaatccgctacgacacgtaataaacccccctaccgtaacgaacatccgcgacgcgttccgcgctaacccccgcccgccaaaaaccttccaactaacctcgactacgaacgactccccgccaatcgcctcaccgcgatacacgaaccccgtcgcttattatcctttcntcccccacgtccccctcacctcctccctctcctctccgtccccccgcctctcctcccccctataaccgaaccgacgcacgattacgaataataactttatcgtcctaaaattaacgctctctacgataaaccatttaccgataacgaatctaacgctatcctcgatatcgacccgctttatatcaaaaactcgtacgctaactaactaatcgataacgacgtaacgaccattatcgttactaaataaataaaaaactaaaccacaaaaaactaaacgatatactaaataatcgtacgccgaatacaaaacgca

SEQ ID NO: 14037 - DNA, 1124 bp, Artificial Sequence
  chemically treated genomic DNA (Homo sapiens) CpG-island No: 14037
  unsure (1082..1083, 1085..)
tggcgaattgaaaggtaaacgtgaaacgttagtttcgggtcgacgtttttttcgttgtgtattcgttatgggtgtaaggacgttgaattagcgtagcgattcggtgggataatgttttgtgtcgggaagtcgaagcgttgtagatattttgtagttagtcgacgtttatcgttcgtattgcgcgtattattattacgtttttcgttgatttagtttttgacgtaagcgaattggattagtatattgcggtggtagtttttcggttgttagttagaatcggtatttgtattttagcgagaaatggtatatcgtttaatatatttgttagcgttagatttttatttatcgtcgggtgtagaggaacggtttgatgttggaatttatttgacgtagtgtttggtggcgcggttaaatttgttttgattgaaattaaagttatcgattagcgtataacggtatcgttttgcggattgatcgatattagcgtcgagtttatttcggtatttgtgttagttattatgtatcgttaatttgacgaatttagattgttgattcgtttgtagaatatcggttattttacgcggcgtcggtttttgtgagtattcgaacggtaaggacgcgtttagcgaacgttttttatatttatgcgacggtcgattcgttcgttagtatcgtcgtcgtttgttgaggattgcgttggtgattgcggtaggtagtagcggattataggttggtagcgttttagcgtatcggtaatttttgttgttattttacgtcgattcgtttatttttataagtatatttgttcgggcgggatagtcgtggcgtatgtcgtagtttatacgttattacgtatcggttgttgcgtcggttgttgattttgcggttgagggtgtaatgcgataacgcgttatagattttcgtttagcgggttatttcgcggtttattcgttagtatgggcgaaaaaatttcgggggaataaagaattagggttatacggggggaattttatacgaggaaaacgtcgttataagggagaggttatatatttttgttttttttagacgaggatataatttanntnnagcgagacgataggtaagaagaagtacgaaattacgat

SEQ ID NO: 14038 - DNA, 1124 bp, Artificial Sequence
  chemically treated genomic DNA (Homo sapiens) CpG-island No: 14038
  unsure (39..40, 42..)
atcgtaatttcgtacttcttcttacctatcgtctcgctnnanntaaattatatcctcgtctaaaaaaaacaaaaatatataacctctcccttataacgacgttttcctcgtataaaattccccccgtataaccctaattctttattcccccgaaattttttcgcccatactaacgaataaaccgcgaaataacccgctaaacgaaaatctataacgcgttatcgcattacaccctcaaccgcaaaatcaacaaccgacgcaacaaccgatacgtaataacgtataaactacgacatacgccacgactatcccgcccgaacaaatatacttataaaaataaacgaatcgacgtaaaataacaacaaaaattaccgatacgctaaaacgctaccaacctataatccgctactacctaccgcaatcaccaacgcaatcctcaacaaacgacgacgatactaacgaacgaatcgaccgtcgcataaatataaaaaacgttcgctaaacgcgtccttaccgttcgaatactcacaaaaaccgacgccgcgtaaaataaccgatattctacaaacgaatcaacaatctaaattcgtcaaattaacgatacataataactaacacaaataccgaaataaactcgacgctaatatcgatcaatccgcaaaacgataccgttatacgctaatcgataactttaatttcaatcaaaacaaatttaaccgcgccaccaaacactacgtcaaataaattccaacatcaaaccgttcctctacacccgacgataaataaaaatctaacgctaacaaatatattaaacgatataccatttctcgctaaaatacaaataccgattctaactaacaaccgaaaaactaccaccgcaatatactaatccaattcgcttacgtcaaaaactaaatcaacgaaaaacgtaataataatacgcgcaatacgaacgataaacgtcgactaactacaaaatatctacaacgcttcgacttcccgacacaaaacattatcccaccgaatcgctacgctaattcaacgtccttacacccataacgaatacacaacgaaaaaaacgtcgacccgaaactaacgtttcacgtttacctttcaattcgcca

SEQ ID NO: 14039 - DNA, 1124 bp, Artificial Sequence
  chemically treated genomic DNA (Homo sapiens) CpG-island No: 14039
  unsure (39..40, 42..)
gtcgtggtttcgtgtttttttttgtttgtcgtttcgttnnanntaagttgtgttttcgtttggagaagataaagatgtgtggttttttttttgtggcggcgtttttttcgtgtggggtttttttcgtgtaattttggttttttattttttcggagttttttcgtttatattggcgaatgggtcgcggaatgattcgttaggcgaaggtttatgacgcgttatcgtattatatttttaatcgtaaagttaatagtcggcgtaatagtcggtacgtaataacgtgtggattacgatatgcgttacggttatttcgttcgggtaaatgtgtttgtgaaagtgggcgagtcggcgtgggataataataaagattatcgatacgttaaggcgttgttaatttatggttcgttgttgtttgtcgtagttattagcgtaatttttagtaagcgacggcgatgttggcggacgggtcgatcgtcgtatgagtatggaaggcgttcgttgggcgcgtttttatcgttcggatatttataaggatcgacgtcgcgtaaagtgatcgatgttttgtaaacgggttagtaatttgggttcgttaggttggcgatgtatggtggttggtataagtgtcgaagtgaattcggcgttggtgtcgattaattcgtaaaacggtgtcgttatgcgttggtcggtggttttgattttaattagagtaagtttaatcgcgttattaggtattgcgttaggtgggttttaatattaaatcgtttttttatattcggcgatggataaaggtttgacgttggtaagtatgttgaacgatgtgttatttttcgttgggatgtaagtgtcggttttgattggtagtcgaagaattattatcgtagtatgttggtttaattcgtttacgttaggggttgggttagcgaaaaacgtggtgatggtacgcgtaatgcgggcgatgggcgtcgattagttgtagaatatttgtaacgtttcggtttttcggtataaaatattgttttatcgaatcgttgcgttggtttagcgtttttatatttatgacgggtatatagcggagaaagcgtcggttcggagttggcgttttacgtttgttttttagttcgtta

SEQ ID NO: 14040 - DNA, 1124 bp, Artificial Sequence
  chemically treated genomic DNA (Homo sapiens) CpG-island No: 14040
  unsure (1082..1083, 1085..)
taacgaactaaaaaacaaacgtaaaacgccaactccgaaccgacgctttctccgctatatacccgtcataaatataaaaacgctaaaccaacgcaacgattcgataaaacaatattttataccgaaaaaccgaaacgttacaaatattctacaactaatcgacgcccatcgcccgcattacgcgtaccatcaccacgtttttcgctaacccaacccctaacgtaaacgaattaaaccaacatactacgataataattcttcgactaccaatcaaaaccgacacttacatcccaacgaaaaataacacatcgttcaacatacttaccaacgtcaaacctttatccatcgccgaatataaaaaaacgatttaatattaaaacccacctaacgcaatacctaataacgcgattaaacttactctaattaaaatcaaaaccaccgaccaacgcataacgacaccgttttacgaattaatcgacaccaacgccgaattcacttcgacacttataccaaccaccatacatcgccaacctaacgaacccaaattactaacccgtttacaaaacatcgatcactttacgcgacgtcgatccttataaatatccgaacgataaaaacgcgcccaacgaacgccttccatactcatacgacgatcgacccgtccgccaacatcgccgtcgcttactaaaaattacgctaataactacgacaaacaacaacgaaccataaattaacaacgccttaacgtatcgataatctttattattatcccacgccgactcgcccactttcacaaacacatttacccgaacgaaataaccgtaacgcatatcgtaatccacacgttattacgtaccgactattacgccgactattaactttacgattaaaaatataatacgataacgcgtcataaaccttcgcctaacgaatcattccgcgacccattcgccaatataaacgaaaaaactccgaaaaaataaaaaaccaaaattacacgaaaaaaaccccacacgaaaaaaacgccgccacaaaaaaaaaaccacacatctttatcttctccaaacgaaaacacaacttanntnnaacgaaacgacaaacaaaaaaaaacacgaaaccacgac

SEQ ID NO: 14041 - DNA, 565 bp, Artificial Sequence
  chemically treated genomic DNA (Homo sapiens) CpG-island No: 14041
cgcgatcgcgcgtttgtttggtagattcgtttgcgggttattttttataaggaatagttcggtacggttaaggttttgcgcggtaaattagttagtttgttaggtaacgtcgggtcgttggttagttttttacgattatttttttggtcgtacgtatacggcgttgggcgttggaaatcgttatttcgttagtagtttagtcgtttgaacgttttggtttagttataggataaggtattttttattacgttagaaacgaatgtcgcgtattgacgcgaagaagacgttttttcgtttgttcggtaaattgcggattttgtatttttattgtagtatataggcgtagcgattttagatatttttcgtcgatagttttatacgcgcggtagaatattgcggtatttatagaatttacgtatcgcgtttaaaggttattgacgtagattattaatatgggtatcgttttgtatcgttgggtaaggttgattaaatattcgtgatatttatttttttttaagcgtacgtgtatcggttgatgtttttattatataatcgagttcggttt

SEQ ID NO: 14042 - DNA, 565 bp, Artificial Sequence
  chemically treated genomic DNA (Homo sapiens) CpG-island No: 14042
aaaccgaactcgattatataataaaaacatcaaccgatacacgtacgcttaaaaaaaaataaatatcacgaatatttaatcaaccttacccaacgatacaaaacgatacccatattaataatctacgtcaataacctttaaacgcgatacgtaaattctataaataccgcaatattctaccgcgcgtataaaactatcgacgaaaaatatctaaaatcgctacgcctatatactacaataaaaatacaaaatccgcaatttaccgaacaaacgaaaaaacgtcttcttcgcgtcaatacgcgacattcgtttctaacgtaataaaaaataccttatcctataactaaaccaaaacgttcaaacgactaaactactaacgaaataacgatttccaacgcccaacgccgtatacgtacgaccaaaaaaataatcgtaaaaaactaaccaacgacccgacgttacctaacaaactaactaatttaccgcgcaaaaccttaaccgtaccgaactattccttataaaaaataacccgcaaacgaatctaccaaacaaacgcgcgatcgcg

SEQ ID NO: 14043 - DNA, 565 bp, Artificial Sequence
  chemically treated genomic DNA (Homo sapiens) CpG-island No: 14043
aggtcgagttcgattgtatagtaagagtattagtcggtatacgtgcgtttaggaaggggtgaatgttacgaatgtttagttaattttatttaacgatgtagggcggtatttatgttaatggtttgcgttagtgatttttggacgcgatgcgtgagttttgtgaatatcgtaatattttgtcgcgcgtgtaaagttgtcggcggaagatatttgggatcgttgcgtttatgtgttgtagtaaaaatgtaggattcgtagtttgtcgggtagacgaaagagcgtttttttcgcgttaatgcgcggtattcgtttttggcgtggtgaaagatgttttattttgtggttgaattagaacgtttaggcggttgaattgttggcggagtggcgatttttagcgtttagcgtcgtatgcgtgcggttaaaaaagtggtcgtaaaaagttgattagcggttcggcgttgtttggtaaattggttgatttatcgcgtaggattttaatcgtatcgagttgttttttgtggaaggtgattcgtaggcggatttgttaagtaggcgcgcgatcgcg

SEQ ID NO: 14044 - DNA, 565 bp, Artificial Sequence
  chemically treated genomic DNA (Homo sapiens) CpG-island No: 14044
cgcgatcgcgcgcctacttaacaaatccgcctacgaatcaccttccacaaaaaacaactcgatacgattaaaatcctacgcgataaatcaaccaatttaccaaacaacgccgaaccgctaatcaactttttacgaccacttttttaaccgcacgcatacgacgctaaacgctaaaaatcgccactccgccaacaattcaaccgcctaaacgttctaattcaaccacaaaataaaacatctttcaccacgccaaaaacgaataccgcgcattaacgcgaaaaaaacgctctttcgtctacccgacaaactacgaatcctacatttttactacaacacataaacgcaacgatcccaaatatcttccgccgacaactttacacgcgcgacaaaatattacgatattcacaaaactcacgcatcgcgtccaaaaatcactaacgcaaaccattaacataaataccgccctacatcgttaaataaaattaactaaacattcgtaacattcaccccttcctaaacgcacgtataccgactaatactcttactatacaatcgaactcgacct

SEQ ID NO: 14045 - DNA, 521 bp, Artificial Sequence
  chemically treated genomic DNA (Homo sapiens) CpG-island No: 14045
  unsure (41)
taaacgcgacgttcgttattcggttcggtttgttttggttntggataatcgggattattcggtttatcgggtaggcggtggtgtagacggtgtatttaatgtagtttcgaagttggtgttatttattgttggttttttgcgcgttgggtaatttttgagcggtatgtaaagtattgacggtataaatatcgtcgtcgtatttcgggcgatgggattaaattcgtttagtatcgaatcgatggtaaataggttttaatggtttgttttgtttgtgacgggcgtagcgttttattagtggttaatcgaattgttgttacggttgcggcgtaaaaaaattttttttatattattatttcgcgtggcggtttgtagtatattaaggtcgagaatcggttttcgatgtcgttacgtttcgttattagttcgttattaaagaaattgtcgttgggagaatcgcgaaacgtggacgtagcgggaatatcggtggattattttatttattttttattttttataaaaat

SEQ ID NO: 14046 - DNA, 521 bp, Artificial Sequence
  chemically treated genomic DNA (Homo sapiens) CpG-island No: 14046
  unsure (481)
atttttataaaaaataaaaaataaataaaataatccaccgatattcccgctacgtccacgtttcgcgattctcccaacgacaatttctttaataacgaactaataacgaaacgtaacgacatcgaaaaccgattctcgaccttaatatactacaaaccgccacgcgaaataataatataaaaaaaatttttttacgccgcaaccgtaacaacaattcgattaaccactaataaaacgctacgcccgtcacaaacaaaacaaaccattaaaacctatttaccatcgattcgatactaaacgaatttaatcccatcgcccgaaatacgacgacgatatttataccgtcaatactttacataccgctcaaaaattacccaacgcgcaaaaaaccaacaataaataacaccaacttcgaaactacattaaatacaccgtctacaccaccgcctacccgataaaccgaataatcccgattatccanaaccaaaacaaaccgaaccgaataacgaacgtcgcgttta

SEQ ID NO: 14047 - DNA, 521 bp, Artificial Sequence
  chemically treated genomic DNA (Homo sapiens) CpG-island No: 14047
  unsure (481)
atttttataggggatggaagatgagtgaggtggtttatcgatattttcgttacgtttacgtttcgcggtttttttagcggtagtttttttagtggcggattggtagcggaacgtaacggtatcgagagtcgattttcggttttgatgtgttataaatcgttacgcggggtgatggtataagggagatttttttgcgtcgtaatcgtggtagtagttcggttaattattgatgagacgttacgttcgttataggtagggtaaattattgaaatttgtttgttatcggttcggtgttgggcggatttgattttatcgttcgggatgcggcggcggtgtttgtgtcgttagtgttttatatgtcgtttaaagattgtttaacgcgtaggaggttaataatgaatgatattagtttcgaaattgtattaagtgtatcgtttgtattatcgtttgttcggtgagtcgggtaatttcggttatttanggttaaaataagtcgggtcggatggcgagcgtcgcgtttg

SEQ ID NO: 14048 - DNA, 521 bp, Artificial Sequence
  chemically treated genomic DNA (Homo sapiens) CpG-island No: 14048
  unsure (41)
caaacgcgacgctcgccatccgacccgacttattttaaccntaaataaccgaaattacccgactcaccgaacaaacgataatacaaacgatacacttaatacaatttcgaaactaatatcattcattattaacctcctacgcgttaaacaatctttaaacgacatataaaacactaacgacacaaacaccgccgccgcatcccgaacgataaaatcaaatccgcccaacaccgaaccgataacaaacaaatttcaataatttaccctacctataacgaacgtaacgtctcatcaataattaaccgaactactaccacgattacgacgcaaaaaaatctcccttataccatcaccccgcgtaacgatttataacacatcaaaaccgaaaatcgactctcgataccgttacgttccgctaccaatccgccactaaaaaaactaccgctaaaaaaaccgcgaaacgtaaacgtaacgaaaatatcgataaaccacctcactcatcttccatcccctataaaaat

SEQ ID NO: 14049 - DNA, 1259 bp, Artificial Sequence
  chemically treated genomic DNA (Homo sapiens) CpG-island No: 14049
gtacgcgtttacggattatcgaaaaacggcggcggttttaaataatttgcggtgtcggattaaagaaatattagattgtcgtattgatagcgtaataattattattatcggtataaatacggttgagattttattcgtagttgatcgatttttggtttgttgttttgggtttggcgtattatgcgaagattcgtgatagcgtagtatggttgttaatcgtattggtacgaaatagttattgtcgttttgtattattgtttcggtatggacgttatcgttttcgttttttgttgcgggattggttcgttcgttagtatcgttttatttagttatgttcgttttgggtaatttcgttatttatcggtacgcgatcgtcggtcgtcggcgtagtaatatatttggttgtatttttgttagaggtacgttttttttttttcgttagtaattaggcgtgtcgtcggcggggttaaatcgagtaattttttagcgttttagaagaacgttggcgtgcgcgcgtttttagtatatggcgagattgattagatcgataattatcgcgttggtttcgtaataaagatgcgcgtttttatcgggaattattgcggttataggttgacgtttatcgaatgagttacgttacgttagtatttagcgttattagcgtatttatcgtcgtttatcgtttagtaggtttttttatgtattgcggtaaaaatggtcgtcggtaaaattattattgttagggttattaggtcgataattaattataggttgcgttgttagcggtgattattatgttatcgtcgattattttttagattatttcgggatatttatcgttagtgcgataattgtttgttagcggaagcgtttatcgtagcgacggcggttttttgttggcgttcgcggcgtttagcgttattttaatcgttttcgcgtcgtagttcgttttttttatcgtttgtattaaatttgtggggaggtattgtttattattagcgtagtacgtttcgttaggttattcgtgtttgagtgacgttcggtacgttttgtagcgtattttgtacgcggtgatatagttggcgtagtttatgtcgtttagtagtaattgttggttgtatcgttatcggcggtcgttgtcggaagcgttttagaaatcgttgttaggttttcgacgggattgatgatttcgttagcggtttagtttttgggtggttatagatgcgttataattcgcgtcggattttcgtgttgttgat

SEQ ID NO: 14050 - DNA, 1259 bp, Artificial Sequence
  chemically treated genomic DNA (Homo sapiens) CpG-island No: 14050
atcaacaacacgaaaatccgacgcgaattataacgcatctataaccacccaaaaactaaaccgctaacgaaatcatcaatcccgtcgaaaacctaacaacgatttctaaaacgcttccgacaacgaccgccgataacgatacaaccaacaattactactaaacgacataaactacgccaactatatcaccgcgtacaaaatacgctacaaaacgtaccgaacgtcactcaaacacgaataacctaacgaaacgtactacgctaataataaacaatacctccccacaaatttaatacaaacgataaaaaaaacgaactacgacgcgaaaacgattaaaataacgctaaacgccgcgaacgccaacaaaaaaccgccgtcgctacgataaacgcttccgctaacaaacaattatcgcactaacgataaatatcccgaaataatctaaaaaataatcgacgataacataataatcaccgctaacaacgcaacctataattaattatcgacctaataaccctaacaataataattttaccgacgaccatttttaccgcaatacataaaaaaacctactaaacgataaacgacgataaatacgctaataacgctaaatactaacgtaacgtaactcattcgataaacgtcaacctataaccgcaataattcccgataaaaacgcgcatctttattacgaaaccaacgcgataattatcgatctaatcaatctcgccatatactaaaaacgcgcgcacgccaacgttcttctaaaacgctaaaaaattactcgatttaaccccgccgacgacacgcctaattactaacgaaaaaaaaaaaacgtacctctaacaaaaatacaaccaaatatattactacgccgacgaccgacgatcgcgtaccgataaataacgaaattacccaaaacgaacataactaaataaaacgatactaacgaacgaaccaatcccgcaacaaaaaacgaaaacgataacgtccataccgaaacaataatacaaaacgacaataactatttcgtaccaatacgattaacaaccatactacgctatcacgaatcttcgcataatacgccaaacccaaaacaacaaaccaaaaatcgatcaactacgaataaaatctcaaccgtatttataccgataataataattattacgctatcaatacgacaatctaatatttctttaatccgacaccgcaaattatttaaaaccgccgccgtttttcgataatccgtaaacgcgtac

SEQ ID NO: 14051 - DNA, 1259 bp, Artificial Sequence
  chemically treated genomic DNA (Homo sapiens) CpG-island No: 14051
attagtagtacgaaggttcggcgcgggttatgacgtatttgtagttatttaaaggttaaatcgttggcggagttattaatttcgtcggaagtttgatagcggtttttgaggcgttttcggtagcgatcgtcgatgacgatgtagttagtagttgttgttgagcggtatgagttgcgttagttgtgttatcgcgtataaaatgcgttgtaaagcgtatcgggcgttatttaggtacgggtaatttggcggagcgtattgcgttggtgatgggtagtgtttttttataagtttagtgtaggcggtggaaaaagcgggttacggcgcggaagcgattgaaatgacgttaaacgtcgcgagcgttagtaagaaatcgtcgtcgttacgataagcgttttcgttggtaggtaattgtcgtattggcggtgggtatttcgggatggtttgggggatgatcggcgataatatgatggttatcgttgataacgtagtttgtggttggttatcggtttgataattttggtagtgatggttttgtcggcggttatttttatcgtagtgtatggaaaagtttgttgaacggtgggcgacgatggatacgttggtggcgttgggtattggcgtggcgtggtttattcgatgagcgttaatttgtggtcgtagtggttttcgatggaagcgcgtatttttattacgaagttagcgcgatgattatcggtttgattaatttcgttatatgttggaagcgcgcgtacgttagcgtttttttaaggcgttggaaagttattcgatttaatttcgtcgacggtacgtttggttattgacgaagggaaaaaagcgtgtttttggtagaagtgtagttaggtatgttgttgcgtcgacgatcggcgatcgcgtgtcggtagatggcgagattatttagggcgaatatggttggatgaagcgatgttgacgggcgaattaatttcgtagtaaaaggcgaaggcgatagcgtttatgtcgggatagtggtataggacggtagtggttgtttcgtgttagtgcggttggtagttatattacgttgttacgaattttcgtatggtgcgttaggtttagagtagtaagttagaaatcggttagttgcggataaaattttagtcgtatttgtgtcggtagtggtggttattgcgttgttagtgcggtaatttggtatttttttggttcggtatcgtagattgtttggaatcgtcgtcgtttttcggtggttcgtggacgcgtat

SEQ ID NO: 14052 - DNA, 1259 bp, Artificial Sequence
  chemically treated genomic DNA (Homo sapiens) CpG-island No: 14052
atacgcgtccacgaaccaccgaaaaacgacgacgattccaaacaatctacgataccgaaccaaaaaaataccaaattaccgcactaacaacgcaataaccaccactaccgacacaaatacgactaaaattttatccgcaactaaccgatttctaacttactactctaaacctaacgcaccatacgaaaattcgtaacaacgtaatataactaccaaccgcactaacacgaaacaaccactaccgtcctataccactatcccgacataaacgctatcgccttcgccttttactacgaaattaattcgcccgtcaacatcgcttcatccaaccatattcgccctaaataatctcgccatctaccgacacgcgatcgccgatcgtcgacgcaacaacatacctaactacacttctaccaaaaacacgcttttttcccttcgtcaataaccaaacgtaccgtcgacgaaattaaatcgaataactttccaacgccttaaaaaaacgctaacgtacgcgcgcttccaacatataacgaaattaatcaaaccgataatcatcgcgctaacttcgtaataaaaatacgcgcttccatcgaaaaccactacgaccacaaattaacgctcatcgaataaaccacgccacgccaatacccaacgccaccaacgtatccatcgtcgcccaccgttcaacaaacttttccatacactacgataaaaataaccgccgacaaaaccatcactaccaaaattatcaaaccgataaccaaccacaaactacgttatcaacgataaccatcatattatcgccgatcatcccccaaaccatcccgaaatacccaccgccaatacgacaattacctaccaacgaaaacgcttatcgtaacgacgacgatttcttactaacgctcgcgacgtttaacgtcatttcaatcgcttccgcgccgtaacccgctttttccaccgcctacactaaacttataaaaaaacactacccatcaccaacgcaatacgctccgccaaattacccgtacctaaataacgcccgatacgctttacaacgcattttatacgcgataacacaactaacgcaactcataccgctcaacaacaactactaactacatcgtcatcgacgatcgctaccgaaaacgcctcaaaaaccgctatcaaacttccgacgaaattaataactccgccaacgatttaacctttaaataactacaaatacgtcataacccgcgccgaaccttcgtactactaat

SEQ ID NO: 14053 - DNA, 781 bp, Artificial Sequence
  chemically treated genomic DNA (Homo sapiens) CpG-island No: 14053
gcgtgtacgtgtgttagtttaggtagagggagcgtttcggcggaggagttaaggaagagggggagggagaaacggttagaatttcggttcgggcgttttcgtcggtcgcggaggagttgtagttttaataggttcgtagaacgcgcgttcgttttttgtggttgagtcgtttttttcgcgggagcggttggcggagagatttcggttataggtttcgcgttgagagttttttagaggcggtttttttcggtttttttttttttttggagttttagtcgtcggcggttttttcggggcgaggtagagggcgtttcgggttttcgttttagtattatttcggggatagttttcgcgtcgtatcgggttttatcgggttagtattgtagcggcggatagcggcggtcgggcgggtttttcgtatttttcgttttggtttcgcgcggttgttaaggatcgtttttcgtttcgcgggtcgtttttaacgttagtatcgcggcggcggatagtttttttcgcggtatcgcgaatcgcgaataaagtcgcgggtttggggtttttagcgcgttaggggtggcgtgaggtcgtatcgatcgggggattttagttttttttaagaggtgttatcggcgagttaggcgggggtttagtatagtcgcgcgtttcggtttgggttcgtcgttcgtcgaggtttggtcgtgtaatggcggggttagttaagagtgggtaagaggtagagggggaaataggtatagaacggttcggtttcgttaggcgggttggg

SEQ ID NO: 14054 - DNA, 781 bp, Artificial Sequence
  chemically treated genomic DNA (Homo sapiens) CpG-island No: 14054
cccaacccgcctaacgaaaccgaaccgttctatacctatttccccctctacctcttacccactcttaactaaccccgccattacacgaccaaacctcgacgaacgacgaacccaaaccgaaacgcgcgactatactaaacccccgcctaactcgccgataacacctcttaaaaaaaactaaaatcccccgatcgatacgacctcacgccacccctaacgcgctaaaaaccccaaacccgcgactttattcgcgattcgcgataccgcgaaaaaaactatccgccgccgcgatactaacgttaaaaacgacccgcgaaacgaaaaacgatccttaacaaccgcgcgaaaccaaaacgaaaaatacgaaaaacccgcccgaccgccgctatccgccgctacaatactaacccgataaaacccgatacgacgcgaaaactatccccgaaataatactaaaacgaaaacccgaaacgccctctacctcgccccgaaaaaaccgccgacgactaaaactccaaaaaaaaaaaaaaaccgaaaaaaaccgcctctaaaaaactctcaacgcgaaacctataaccgaaatctctccgccaaccgctcccgcgaaaaaaacgactcaaccacaaaaaacgaacgcgcgttctacgaacctattaaaactacaactcctccgcgaccgacgaaaacgcccgaaccgaaattctaaccgtttctccctccccctcttccttaactcctccgccgaaacgctccctctacctaaactaacacacgtacacgc

SEQ ID NO: 14055 - DNA, 781 bp, Artificial Sequence
  chemically treated genomic DNA (Homo sapiens) CpG-island No: 14055
tttagttcgtttagcggagtcggatcgttttgtgtttgtttttttttttattttttgtttatttttagttggtttcgttattgtacggttaggtttcggcgggcggcggatttaagtcgagacgcgcggttgtgttaggttttcgtttagttcgtcggtgatattttttgggagaagttgaaatttttcgatcgatgcggttttacgttatttttagcgcgttgggggttttagattcgcggttttgttcgcggttcgcggtgtcgcggagagagttgttcgtcgtcgcggtgttagcgttgggagcggttcgcggggcgagggacggtttttagtagtcgcgcggaattagggcggagggtgcgaggagttcgttcggtcgtcgttgttcgtcgttgtagtgttgattcgatgggattcggtgcggcgcgggagttgttttcgagatggtgttggagcgagagttcgaggcgttttttgtttcgtttcggaagagtcgtcggcggttgaggttttagggagggggagaggtcggaggaagtcgtttttaggaagtttttagcgcggggtttgtggtcggggttttttcgttaatcgttttcgcggagggggcggtttagttatagggagcgagcgcgcgttttacgaatttgttggagttgtagttttttcgcggtcgacgagggcgttcgggtcgaggttttggtcgttttttttttttttttttttttgattttttcgtcgaggcgttttttttgtttgggttagtatacgtgtacgt

SEQ ID NO: 14056 - DNA, 781 bp, Artificial Sequence
  chemically treated genomic DNA (Homo sapiens) CpG-island No: 14056
acgtacacgtatactaacccaaacaaaaaaaacgcctcgacgaaaaaatcaaaaaaaaaaaaaaaaaaaaaacgaccaaaacctcgacccgaacgccctcgtcgaccgcgaaaaaactacaactccaacaaattcgtaaaacgcgcgctcgctccctataactaaaccgccccctccgcgaaaacgattaacgaaaaaaccccgaccacaaaccccgcgctaaaaacttcctaaaaacgacttcctccgacctctccccctccctaaaacctcaaccgccgacgactcttccgaaacgaaacaaaaaacgcctcgaactctcgctccaacaccatctcgaaaacaactcccgcgccgcaccgaatcccatcgaatcaacactacaacgacgaacaacgacgaccgaacgaactcctcgcaccctccgccctaattccgcgcgactactaaaaaccgtccctcgccccgcgaaccgctcccaacgctaacaccgcgacgacgaacaactctctccgcgacaccgcgaaccgcgaacaaaaccgcgaatctaaaacccccaacgcgctaaaaataacgtaaaaccgcatcgatcgaaaaatttcaacttctcccaaaaaatatcaccgacgaactaaacgaaaacctaacacaaccgcgcgtctcgacttaaatccgccgcccgccgaaacctaaccgtacaataacgaaaccaactaaaaataaacaaaaaataaaaaaaaaaacaaacacaaaacgatccgactccgctaaacgaactaaa

SEQ ID NO: 14057 - DNA, 667 bp, Artificial Sequence
  chemically treated genomic DNA (Homo sapiens) CpG-island No: 14057
cggaaagtggatttcggtttcgatttttttttacgggtttcgattttcgttgttaagataggtcgtggcgttcgtttttatttttacggttttttacgaagttaagtgtggagttcggatcgtttttttttttcggattttcggggttagcggcggcggtcgattggtcgggtcgttgcggattcgggggcggttttttttgtcgttgtcgttgttttttttttatttttcgtttgaatagttttaggaagttgtcgtcgttggcgaataagtttacgtcgttcgatatcgggttcgaattcgcgttcgatattttttcgttttcgttttcgggcgacgttttcgatttcgatttagtttaacggttttcgttatcgttatcgttcgcggggttcggagtttttcggttttgaggtttcgttcgtttttttcgggtagttattttgtcgttaggtgtcgcgtaaaggatttcgggaaggtcgtttcggtttcgcgtttggcgttcgattcgtttcgtttcgaataatgtatgtcgggaagagcggttaggttttttagcgttcgtagcgggggcggggcgaatgagggaattaattcgaaggggcggggttagggggaggagttttcgtttcgcgggtttttttgtttcgttttttttttttttttt

SEQ ID NO: 14058 - DNA, 667 bp, Artificial Sequence
  chemically treated genomic DNA (Homo sapiens) CpG-island No: 14058
aaaaaaaaaaaaaaaaacgaaacaaaaaaacccgcgaaacgaaaactcctccccctaaccccgccccttcgaattaattccctcattcgccccgcccccgctacgaacgctaaaaaacctaaccgctcttcccgacatacattattcgaaacgaaacgaatcgaacgccaaacgcgaaaccgaaacgaccttcccgaaatcctttacgcgacacctaacgacaaaataactacccgaaaaaaacgaacgaaacctcaaaaccgaaaaactccgaaccccgcgaacgataacgataacgaaaaccgttaaactaaatcgaaatcgaaaacgtcgcccgaaaacgaaaacgaaaaaatatcgaacgcgaattcgaacccgatatcgaacgacgtaaacttattcgccaacgacgacaacttcctaaaactattcaaacgaaaaataaaaaaaaaacaacgacaacgacaaaaaaaaccgcccccgaatccgcaacgacccgaccaatcgaccgccgccgctaaccccgaaaatccgaaaaaaaaaaacgatccgaactccacacttaacttcgtaaaaaaccgtaaaaataaaaacgaacgccacgacctatcttaacaacgaaaatcgaaacccgtaaaaaaaaatcgaaaccgaaatccactttccg

SEQ ID NO: 14059 - DNA, 667 bp, Artificial Sequence
  chemically treated genomic DNA (Homo sapiens) CpG-island No: 14059
aaaagaaaaaaaaaaaacgaaataaaaaaattcgcgagacgggggtttttttttttagtttcgttttttcgggttggtttttttattcgtttcgttttcgttgcgggcgttggagggtttgatcgtttttttcggtatgtattgttcgggacgaggcgagtcgggcgttaagcgcggggtcggagcggttttttcggagttttttgcgcggtatttggcgataaaatggttgttcgagggagacgggcggagttttagggtcgggaggtttcgggtttcgcgggcggtggcggtggcgggagtcgttgggttgagtcgggatcggggacgtcgttcgagagcggggacgaggaggtgtcgggcgcgggttcgagttcggtgtcgggcggcgtgaatttgttcgttaacgacggtagttttttggagttgtttaagcggaagatggaggaggagtagcggtagcggtaggaggagtcgttttcgggttcgtagcgattcgattagtcggtcgtcgtcgttggtttcggggattcgaagaggaagggcggttcgggttttatatttagtttcgtaaggagtcgtgggggtgggggcgggcgttacggtttgttttggtagcgggagtcggggttcgtgaagggggatcgggatcgaagtttatttttcg

SEQ ID NO: 14060 - DNA, 667 bp, Artificial Sequence
  chemically treated genomic DNA (Homo sapiens) CpG-island No: 14060
cgaaaaataaacttcgatcccgatcccccttcacgaaccccgactcccgctaccaaaacaaaccgtaacgcccgcccccacccccacgactccttacgaaactaaatataaaacccgaaccgcccttcctcttcgaatccccgaaaccaacgacgacgaccgactaatcgaatcgctacgaacccgaaaacgactcctcctaccgctaccgctactcctcctccatcttccgcttaaacaactccaaaaaactaccgtcgttaacgaacaaattcacgccgcccgacaccgaactcgaacccgcgcccgacacctcctcgtccccgctctcgaacgacgtccccgatcccgactcaacccaacgactcccgccaccgccaccgcccgcgaaacccgaaacctcccgaccctaaaactccgcccgtctccctcgaacaaccattttatcgccaaataccgcgcaaaaaactccgaaaaaaccgctccgaccccgcgcttaacgcccgactcgcctcgtcccgaacaatacataccgaaaaaaacgatcaaaccctccaacgcccgcaacgaaaacgaaacgaataaaaaaaccaacccgaaaaaacgaaactaaaaaaaaaaacccccgtctcgcgaatttttttatttcgttttttttttttctttt

SEQ ID NO: 14061 - DNA, 645 bp, Artificial Sequence
  chemically treated genomic DNA (Homo sapiens) CpG-island No: 14061
ggttttcggttttcggtttcggcgtattttttattattgggtagggcgcgcgtacgcggcgtagcgcgcgtagtttttaggtgatatggttagatacgaggtcgcggagcgcgtggtatattcgcgataggacgtggagtacgaggcgggcgtttaggtaggagtagatttcgagtagtagtttcgggggaaggtttagaaggttcggtttatttacggtcgaaattttggacgcggttcgaggtttcgaagcgttcggggacgcggcgggtgtggatagttgcgaggggcgcgagaacgttagttcggattttggcggattgagaacgcgggttacgtaggttttggtttgcgcgtttgggtttgtttttgattttgggttcgagttatcgttttaggtgcgggaattatcgtatcgttttaggggaagttttattgcgatcgggtgggcgttgtcggtttcgcgttttgttttttaggtagtacgagggtattttcggcgttgtttgatgacgtttatgcgtttatcggaagcgacgaagttagatattggtttaatatagaatatcgtttcgtttatagggttttttgtaattgcgtcggttttaggttggaaaatgtaggtttttgtttttgcgtttttta

SEQ ID NO: 14062 - DNA, 645 bp, Artificial Sequence
  chemically treated genomic DNA (Homo sapiens) CpG-island No: 14062
taaaaaacgcaaaaacaaaaacctacattttccaacctaaaaccgacgcaattacaaaaaaccctataaacgaaacgatattctatattaaaccaatatctaacttcgtcgcttccgataaacgcataaacgtcatcaaacaacgccgaaaataccctcgtactacctaaaaaacaaaacgcgaaaccgacaacgcccacccgatcgcaataaaacttcccctaaaacgatacgataattcccgcacctaaaacgataactcgaacccaaaatcaaaaacaaacccaaacgcgcaaaccaaaacctacgtaacccgcgttctcaatccgccaaaatccgaactaacgttctcgcgcccctcgcaactatccacacccgccgcgtccccgaacgcttcgaaacctcgaaccgcgtccaaaatttcgaccgtaaataaaccgaaccttctaaaccttcccccgaaactactactcgaaatctactcctacctaaacgcccgcctcgtactccacgtcctatcgcgaatataccacgcgctccgcgacctcgtatctaaccatatcacctaaaaactacgcgcgctacgccgcgtacgcgcgccctacccaataataaaaaatacgccgaaaccgaaaaccgaaaacc

SEQ ID NO: 14063 - DNA, 645 bp, Artificial Sequence
  chemically treated genomic DNA (Homo sapiens) CpG-island No: 14063
taaaaagcgtagaaataggaatttgtattttttagtttaaggtcgacgtagttgtaagagattttgtaagcggggcgatgttttgtattaagttagtgtttgatttcgtcgttttcggtgggcgtataaacgttattagatagcgtcggaagtgttttcgtgttgtttaggagataagacgcgaggtcggtagcgtttattcggtcgtaatggagttttttttagggcggtgcgatgattttcgtatttgggacgatgattcggatttagagttagagatagatttagacgcgtaggttaaggtttacgtggttcgcgtttttagttcgttaaaattcgggttggcgttttcgcgtttttcgtagttatttatattcgtcgcgttttcgagcgtttcggagtttcgggtcgcgtttagggtttcggtcgtaagtgagtcgggttttttgagttttttttcggagttgttgttcgagatttgtttttatttggacgttcgtttcgtgttttacgttttgtcgcgggtgtgttacgcgtttcgcgatttcgtgtttgattatgttatttggaggttacgcgcgttacgtcgcgtacgcgcgttttatttagtggtggaaggtgcgtcggggtcgggggtcggggatt

SEQ ID NO: 14064 - DNA, 645 bp, Artificial Sequence
  chemically treated genomic DNA (Homo sapiens) CpG-island No: 14064
aatccccgacccccgaccccgacgcaccttccaccactaaataaaacgcgcgtacgcgacgtaacgcgcgtaacctccaaataacataatcaaacacgaaatcgcgaaacgcgtaacacacccgcgacaaaacgtaaaacacgaaacgaacgtccaaataaaaacaaatctcgaacaacaactccgaaaaaaaactcaaaaaacccgactcacttacgaccgaaaccctaaacgcgacccgaaactccgaaacgctcgaaaacgcgacgaatataaataactacgaaaaacgcgaaaacgccaacccgaattttaacgaactaaaaacgcgaaccacgtaaaccttaacctacgcgtctaaatctatctctaactctaaatccgaatcatcgtcccaaatacgaaaatcatcgcaccgccctaaaaaaaactccattacgaccgaataaacgctaccgacctcgcgtcttatctcctaaacaacacgaaaacacttccgacgctatctaataacgtttatacgcccaccgaaaacgacgaaatcaaacactaacttaatacaaaacatcgccccgcttacaaaatctcttacaactacgtcgaccttaaactaaaaaatacaaattcctatttctacgcttttta

SEQ ID NO: 14065 - DNA, 1227 bp, Artificial Sequence
  chemically treated genomic DNA (Homo sapiens) CpG-island No: 14065
gcgttagagagggcgacgggggttcgggaagtttgatagggtttttgcgtatagttgtcggttggttgttattcgttcgcgttagttttcgagaacgcgcgattaggtatttagttcggttatcgtagcggagagttcgtcgttcgttgtagcgaggttcggagcggtttcgtagggattttttttagatcgtttgggtcgttcggatgtgtattaaaatggaatagtttttttattacgacgatttatatatagttacgggatacggtcgggtttttggtggtttttttttatacgattataaatttttgaaatcgagtttggcggttaatttggtcgatttttatcggagttttaaagcgtttggggttcgcggattcggtttagagggcggcggtggcggtagttatttttttggttagggttcggatatcggcgcgttttttaagttcgttttttcggagttggaacgtttgattgtttttaatagtaacggcgtgattacgacgacgtttatattttcgggatagtatttttattttcgcgggggtggtagcggtggaggtgtagggggcgtagggggcggcgttatcgaggagtaggagggtttcgtcgacggttttgttaaagttttggacgatttgtataagatgaattacgtgatattttttaacgtgtttttgggcgttatcggggggttttcggttgggttcgggggcgtttacgtcggttcggagttatttttcgtttatattaattttagtagttattttttagtttttgcgttttcgggaggcgtcggggttgtcgtcgggatcgggagttcgtattcgacgattattattagttattttttatacgcgtcgtttttcgtcggtggttattcggcgtagttgggtttgggtcgcggcgtttttatttttaaggaggaatcgtagatcgtgtcggaggcgcgtagtcgggacgttacgtcgtcggtgttttttattaatatggaagattaagagcgtattaaagtggagcgtaagcggttgcggaatcggttggcggttattaagtgtcggaagcggaagttggagcgtatcgcgcgtttggaggataaggtgaagacgtttaaggtcgagaacgcggggttgtcgagtatcgtcggtttttttcgggagtaggtggtttagtttaaatagaaggttatgatttacgttagtaacggttgttagttgttgtttg

SEQ ID NO: 14066 - DNA, 1227 bp, Artificial Sequence
  chemically treated genomic DNA (Homo sapiens) CpG-island No: 14066
caaacaacaactaacaaccgttactaacgtaaatcataaccttctatttaaactaaaccacctactcccgaaaaaaaccgacgatactcgacaaccccgcgttctcgaccttaaacgtcttcaccttatcctccaaacgcgcgatacgctccaacttccgcttccgacacttaataaccgccaaccgattccgcaaccgcttacgctccactttaatacgctcttaatcttccatattaataaaaaacaccgacgacgtaacgtcccgactacgcgcctccgacacgatctacgattcctccttaaaaataaaaacgccgcgacccaaacccaactacgccgaataaccaccgacgaaaaacgacgcgtataaaaaataactaataataatcgtcgaatacgaactcccgatcccgacgacaaccccgacgcctcccgaaaacgcaaaaactaaaaaataactactaaaattaatataaacgaaaaataactccgaaccgacgtaaacgcccccgaacccaaccgaaaaccccccgataacgcccaaaaacacgttaaaaaatatcacgtaattcatcttatacaaatcgtccaaaactttaacaaaaccgtcgacgaaaccctcctactcctcgataacgccgccccctacgccccctacacctccaccgctaccacccccgcgaaaataaaaatactatcccgaaaatataaacgtcgtcgtaatcacgccgttactattaaaaacaatcaaacgttccaactccgaaaaaacgaacttaaaaaacgcgccgatatccgaaccctaaccaaaaaaataactaccgccaccgccgccctctaaaccgaatccgcgaaccccaaacgctttaaaactccgataaaaatcgaccaaattaaccgccaaactcgatttcaaaaatttataatcgtataaaaaaaaaccaccaaaaacccgaccgtatcccgtaactatatataaatcgtcgtaataaaaaaactattccattttaatacacatccgaacgacccaaacgatctaaaaaaaatccctacgaaaccgctccgaacctcgctacaacgaacgacgaactctccgctacgataaccgaactaaatacctaatcgcgcgttctcgaaaactaacgcgaacgaataacaaccaaccgacaactatacgcaaaaaccctatcaaacttcccgaacccccgtcgccctctctaacgc

SEQ ID NO: 14067 - DNA, 1227 bp, Artificial Sequence
  chemically treated genomic DNA (Homo sapiens) CpG-island No: 14067
taagtagtagttgatagtcgttgttgacgtgggttatgattttttgtttgagttgggttatttgttttcggaggaggtcggcggtattcgatagtttcgcgttttcggttttgagcgtttttattttgttttttaggcgcgcgatgcgttttagttttcgttttcggtatttggtggtcgttagtcggtttcgtagtcgtttgcgttttattttgatgcgtttttggttttttatgttgatgggggatatcggcggcgtggcgtttcggttgcgcgttttcggtacggtttgcggtttttttttgaaggtggaggcgtcgcggtttaagtttagttgcgtcgggtggttatcggcgaagggcggcgcgtgtgggaggtagttgatggtggtcgtcgggtacgagttttcggtttcgacggtagtttcggcgtttttcgaggacgtagaggttggggagtagttgttgaggttggtgtaaacgggaggtggtttcgggtcggcgtagacgttttcgggtttagtcgggggtttttcggtagcgtttagggatacgttggggggtgttacgtggtttattttgtgtagatcgtttagggttttgataaagtcgtcggcgaagtttttttgtttttcggtgacgtcgttttttgcgttttttgtatttttatcgttgttattttcgcgggggtaaaagtattgtttcgggggtgtaggcgtcgtcgtgattacgtcgttgttgttggggataattaggcgttttagtttcgaagaggcgagtttgagagacgcgtcggtgttcgagttttgattagaaaagtagttgtcgttatcgtcgttttttgggtcgggttcgcgagttttaggcgttttgagatttcggtaggggtcggttaggttgatcgttaggttcggttttaggagtttgtagtcgtgtagagagaggttattaggggttcggtcgtatttcgtagttgtgtatgagtcgtcgtggtagaagggttgttttattttagtgtatattcgggcggtttaggcggtttggggagggtttttgcggggtcgtttcgggtttcgttgtagcgagcggcgagtttttcgttgcggtgatcggattgggtgtttggtcgcgcgttttcgggggttggcgcgggcgggtagtagttagtcggtagttgtgcgtaaaagttttgttaggtttttcgagttttcgtcgttttttttggcgt

SEQ ID NO: 14068 - DNA, 1227 bp, Artificial Sequence
  chemically treated genomic DNA (Homo sapiens) CpG-island No: 14068
acgccaaaaaaaacgacgaaaactcgaaaaacctaacaaaacttttacgcacaactaccgactaactactacccgcccgcgccaacccccgaaaacgcgcgaccaaacacccaatccgatcaccgcaacgaaaaactcgccgctcgctacaacgaaacccgaaacgaccccgcaaaaaccctccccaaaccgcctaaaccgcccgaatatacactaaaataaaacaacccttctaccacgacgactcatacacaactacgaaatacgaccgaacccctaataacctctctctacacgactacaaactcctaaaaccgaacctaacgatcaacctaaccgacccctaccgaaatctcaaaacgcctaaaactcgcgaacccgacccaaaaaacgacgataacgacaactacttttctaatcaaaactcgaacaccgacgcgtctctcaaactcgcctcttcgaaactaaaacgcctaattatccccaacaacaacgacgtaatcacgacgacgcctacacccccgaaacaatacttttacccccgcgaaaataacaacgataaaaatacaaaaaacgcaaaaaacgacgtcaccgaaaaacaaaaaaacttcgccgacgactttatcaaaaccctaaacgatctacacaaaataaaccacgtaacaccccccaacgtatccctaaacgctaccgaaaaacccccgactaaacccgaaaacgtctacgccgacccgaaaccacctcccgtttacaccaacctcaacaactactccccaacctctacgtcctcgaaaaacgccgaaactaccgtcgaaaccgaaaactcgtacccgacgaccaccatcaactacctcccacacgcgccgcccttcgccgataaccacccgacgcaactaaacttaaaccgcgacgcctccaccttcaaaaaaaaaccgcaaaccgtaccgaaaacgcgcaaccgaaacgccacgccgccgatatcccccatcaacataaaaaaccaaaaacgcatcaaaataaaacgcaaacgactacgaaaccgactaacgaccaccaaataccgaaaacgaaaactaaaacgcatcgcgcgcctaaaaaacaaaataaaaacgctcaaaaccgaaaacgcgaaactatcgaataccgccgacctcctccgaaaacaaataacccaactcaaacaaaaaatcataacccacgtcaacaacgactatcaactactactta

SEQ ID NO: 14069 - DNA, 669 bp, Artificial Sequence
  chemically treated genomic DNA (Homo sapiens) CpG-island No: 14069
cgcggattcgcggtttttcgggaaagcgtagtcggaaagttattcgcggcggttttttgcgcgttttgttgtgtaagttcggcgttgttagcggacggagaagttgttggtttgttcgatagtttagttcggtggcggttcggggcggattttatggttcgcggcgaacgcggggttagagttggcgtgggcgagtttttgcgcgttttttttcgcggggatttagttcgtttgttttttttcgttcgttggttttttcgatgtttgttgcgtttttggtcgtcgttgttttttcgtcgttttttatttttcggagtcgtcgtttaagtcgaggaggagagaatgatcgaggtgttgtggtcggttgtttttaacgggacggacgttgtttttttggtcggttcgggttcgttttgggggaatagtacggtcgtttttattgtcgtcgttttttcgtcgtttaaatgcgttttgattaagacgggtttttagttttattatttgtcggttgtttatattttggtatttattatcggttttttgggtaatagcgtggttatttggatgttcgttttttatatgaagttttggagcggtattttcgtgtatatgtttaatttggttttggtcgattttttgtacgtgttgattttgttagttttgattttt

SEQ ID NO: 14070 - DNA, 669 bp, Artificial Sequence
  chemically treated genomic DNA (Homo sapiens) CpG-island No: 14070
aaaaatcaaaactaacaaaatcaacacgtacaaaaaatcgaccaaaaccaaattaaacatatacacgaaaataccgctccaaaacttcatataaaaaacgaacatccaaataaccacgctattacccaaaaaaccgataataaataccaaaatataaacaaccgacaaataataaaactaaaaacccgtcttaatcaaaacgcatttaaacgacgaaaaaacgacgacaataaaaacgaccgtactattcccccaaaacgaacccgaaccgaccaaaaaaacaacgtccgtcccgttaaaaacaaccgaccacaacacctcgatcattctctcctcctcgacttaaacgacgactccgaaaaataaaaaacgacgaaaaaacaacgacgaccaaaaacgcaacaaacatcgaaaaaaccaacgaacgaaaaaaaacaaacgaactaaatccccgcgaaaaaaaacgcgcaaaaactcgcccacgccaactctaaccccgcgttcgccgcgaaccataaaatccgccccgaaccgccaccgaactaaactatcgaacaaaccaacaacttctccgtccgctaacaacgccgaacttacacaacaaaacgcgcaaaaaaccgccgcgaataactttccgactacgctttcccgaaaaaccgcgaatccgcg

SEQ ID NO: 14071 - DNA, 669 bp, Artificial Sequence
  chemically treated genomic DNA (Homo sapiens) CpG-island No: 14071
gaagattagggttggtagagttagtacgtataagaagtcggttagagttaaattgaatatgtatacggagatgtcgttttagggttttatgtggaagacgaatatttagatggttacgttgttgtttaggaagtcgatgatgaatattaagatgtagatagtcggtaggtagtaaaattggaagttcgttttggttaaggcgtatttgaacgacgaggagacggcggtagtggaggcgatcgtgttgtttttttaggacgaattcggatcggttaggaaggtagcgttcgtttcgttggggatagtcggttatagtatttcggttattttttttttttcgatttaggcggcggtttcgaggggtaggaggcggcgagagggtagcggcggttaggggcgtagtaagtatcggaaaagttagcgagcggaagggagtaggcgaattggattttcgcgggagggggcgcgtaggggttcgtttacgttagttttggtttcgcgttcgtcgcgggttatgaaattcgtttcgggtcgttatcgaattgggttatcgggtaagttagtaattttttcgttcgttggtaacgtcgagtttatataatagggcgcgtagggaatcgtcgcggataatttttcgattgcgttttttcgaggggtcgcgggttcgcg

SEQ ID NO: 14072 - DNA, 669 bp, Artificial Sequence
  chemically treated genomic DNA (Homo sapiens) CpG-island No: 14072
cgcgaacccgcgacccctcgaaaaaacgcaatcgaaaaattatccgcgacgattccctacgcgccctattatataaactcgacgttaccaacgaacgaaaaaattactaacttacccgataacccaattcgataacgacccgaaacgaatttcataacccgcgacgaacgcgaaaccaaaactaacgtaaacgaacccctacgcgccccctcccgcgaaaatccaattcgcctactcccttccgctcgctaacttttccgatacttactacgcccctaaccgccgctaccctctcgccgcctcctacccctcgaaaccgccgcctaaatcgaaaaaaaaaaaataaccgaaatactataaccgactatccccaacgaaacgaacgctaccttcctaaccgatccgaattcgtcctaaaaaaacaacacgatcgcctccactaccgccgtctcctcgtcgttcaaatacgccttaaccaaaacgaacttccaattttactacctaccgactatctacatcttaatattcatcatcgacttcctaaacaacaacgtaaccatctaaatattcgtcttccacataaaaccctaaaacgacatctccgtatacatattcaatttaactctaaccgacttcttatacgtactaactctaccaaccctaatcttc

SEQ ID NO: 14073 - DNA, 1096 bp, Artificial Sequence
  chemically treated genomic DNA (Homo sapiens) CpG-island No: 14073
gtggcgggattattggcgaagcgacgttcgattttattttttagtttcgtttgatttcggtattttggggataagcggtatcgatagcgacggttcgttttggagttcgattattacgaagttcgtattaaacgcgttattattgagattcgcgttacgttatgttggttgtcgattattcgaaatttggtcgtaatcgatggttaatatgggtagtattagtatggtagatgtcgtttatatcgagtttcgtcgttagtaagcgtgatgtaggtgttgacggattattatatttattggagttgtgttgattttgtacggttttttacgttagattaaaacgtttaggtatttgcgtagtcgattcgcgttattgacgttggttttgttttgcgcgaaacgttaaaaagttggcgttcggttgcggaaagcgattttgtttgcggtagatagcgataacgtgttttagttgtatacggtcgaagagatcgtgttttttgtttttgcgtttagtaacgtcgtaagcgcggaggggcggttttttgttagttatagcgtagacggtttattttatttttaattacgtttaagtgatgcgttcgttagtggttaacgtgggtattcgggtgaagttggtaaaagtcgcgaagttacggcgttagtggttggggagaggtcgtaaagtatagacgtcggtatggtgtatattcgtgtgttatgatgagggtggtttattaatcggcggtaaatttcgcgtcggtatcgtcgtaggcgatgtcggtcgattaatgagattatatagtttatagtcggtattatttgcgtttacgtacgaatttgattgtttagaaatgcggatacgttagcgggatattaacggattgtaggggagcgtatggtttatttgtcgttagtcggtggcgattatattggttgtatcggtagatttgtcgcgcgacggaattttgttattattttacgttcggaaaattttgtttcgtattatacggattttttgtataagttagcgaatttttaggtatttatcgattttaatcgtttcgtttagcgattaggtatcgttagatcgagcgta

SEQ ID NO: 14074 - DNA, 1096 bp, Artificial Sequence
  chemically treated genomic DNA (Homo sapiens) CpG-island No: 14074
tacgctcgatctaacgatacctaatcgctaaacgaaacgattaaaatcgataaatacctaaaaattcgctaacttatacaaaaaatccgtataatacgaaacaaaattttccgaacgtaaaataataacaaaattccgtcgcgcgacaaatctaccgatacaaccaatataatcgccaccgactaacgacaaataaaccatacgctcccctacaatccgttaatatcccgctaacgtatccgcatttctaaacaatcaaattcgtacgtaaacgcaaataataccgactataaactatataatctcattaatcgaccgacatcgcctacgacgataccgacgcgaaatttaccgccgattaataaaccaccctcatcataacacacgaatatacaccataccgacgtctatactttacgacctctccccaaccactaacgccgtaacttcgcgacttttaccaacttcacccgaatacccacgttaaccactaacgaacgcatcacttaaacgtaattaaaaataaaataaaccgtctacgctataactaacaaaaaaccgcccctccgcgcttacgacgttactaaacgcaaaaacaaaaaacacgatctcttcgaccgtatacaactaaaacacgttatcgctatctaccgcaaacaaaatcgctttccgcaaccgaacgccaactttttaacgtttcgcgcaaaacaaaaccaacgtcaataacgcgaatcgactacgcaaatacctaaacgttttaatctaacgtaaaaaaccgtacaaaatcaacacaactccaataaatataataatccgtcaacacctacatcacgcttactaacgacgaaactcgatataaacgacatctaccatactaatactacccatattaaccatcgattacgaccaaatttcgaataatcgacaaccaacataacgtaacgcgaatctcaataataacgcgtttaatacgaacttcgtaataatcgaactccaaaacgaaccgtcgctatcgataccgcttatccccaaaataccgaaatcaaacgaaactaaaaaataaaatcgaacgtcgcttcgccaataatcccgccac

SEQ ID NO: 14075 - DNA, 1096 bp, Artificial Sequence
  chemically treated genomic DNA (Homo sapiens) CpG-island No: 14075
tacgttcgatttaacggtgtttggtcgttgaacgaagcgattaaaatcggtaaatatttgaaggttcgttggtttatgtagaagattcgtgtggtgcggagtaaggtttttcgggcgtgaagtgatggtagagtttcgtcgcgcgataggtttatcgatgtaattaatatgatcgttatcgattggcggtaaatgggttatacgtttttttgtaattcgttgatatttcgttggcgtattcgtatttttggataattaagttcgtacgtaggcgtagatggtatcgattataggttgtgtggttttattggtcgatcggtatcgtttacggcggtgtcggcgcggaatttgtcgtcggttgatgggttatttttattatggtatacgggtgtatattatgtcggcgtttgtgttttgcgatttttttttagttattggcgtcgtaatttcgcgatttttgttagttttattcggatgtttacgttggttattagcggacgtattatttggacgtggttgaagatgagataaatcgtttgcgttataattggtaggaagtcgttttttcgcgtttacggcgttgttgggcgtagaggtagaaaatacgattttttcgatcgtatgtaattggaatacgttatcgttatttgtcgtaggtaaagtcgtttttcgtagtcggacgttagttttttgacgtttcgcgtagggtaaagttagcgttaatgacgcggatcggttacgtaaatatttgggcgttttggtttgacgtgggaagtcgtgtaggattagtatagttttagtgaatatggtggttcgttagtatttgtattacgtttattggcggcggggttcggtgtagacggtatttattatgttgatgttgtttatattgattatcggttacggttaaatttcgagtgatcgataattagtataacgtggcgcgagttttaataatggcgcgtttggtgcgaatttcgtggtaatcgaattttagagcgagtcgtcgttatcgatgtcgtttatttttagaatgtcgaaattaagcggaattgggagataaaatcgagcgtcgtttcgttaatgatttcgttat

SEQ ID NO: 14076 - DNA, 1096 bp, Artificial Sequence
  chemically treated genomic DNA (Homo sapiens) CpG-island No: 14076
ataacgaaatcattaacgaaacgacgctcgattttatctcccaattccgcttaatttcgacattctaaaaataaacgacatcgataacgacgactcgctctaaaattcgattaccacgaaattcgcaccaaacgcgccattattaaaactcgcgccacgttatactaattatcgatcactcgaaatttaaccgtaaccgataatcaatataaacaacatcaacataataaataccgtctacaccgaaccccgccgccaataaacgtaatacaaatactaacgaaccaccatattcactaaaactatactaatcctacacgacttcccacgtcaaaccaaaacgcccaaatatttacgtaaccgatccgcgtcattaacgctaactttaccctacgcgaaacgtcaaaaaactaacgtccgactacgaaaaacgactttacctacgacaaataacgataacgtattccaattacatacgatcgaaaaaatcgtattttctacctctacgcccaacaacgccgtaaacgcgaaaaaacgacttcctaccaattataacgcaaacgatttatctcatcttcaaccacgtccaaataatacgtccgctaataaccaacgtaaacatccgaataaaactaacaaaaatcgcgaaattacgacgccaataactaaaaaaaaatcgcaaaacacaaacgccgacataatatacacccgtataccataataaaaataacccatcaaccgacgacaaattccgcgccgacaccgccgtaaacgataccgatcgaccaataaaaccacacaacctataatcgataccatctacgcctacgtacgaacttaattatccaaaaatacgaatacgccaacgaaatatcaacgaattacaaaaaaacgtataacccatttaccgccaatcgataacgatcatattaattacatcgataaacctatcgcgcgacgaaactctaccatcacttcacgcccgaaaaaccttactccgcaccacacgaatcttctacataaaccaacgaaccttcaaatatttaccgattttaatcgcttcgttcaacgaccaaacaccgttaaatcgaacgta

SEQ ID NO: 14077 - DNA, 554 bp, Artificial Sequence
  chemically treated genomic DNA (Homo sapiens) CpG-island No: 14077
ttagagttattattagttttcgaaatttttcggaggagcgtttcgttattatttgtacggcgaagcggcgcgtaaacgaatttcgaacgttagtttttgcgtttgcgtgtcgcggtttcgtttggtttcgtttcgttggcgttcgtcgggtttttttttcgtcgaggtttgtggtttgtggagtcgaatttttttgttattagtgttcggttagtaggggcgttagtttgggcgtttgcgcggacggcgggcgtcgttattatggtagtattcgttggaggtttaggtaagcgtcgagcgcgcggtttttgtttggaggtggggcgttttgagaggtttcgtcggtcgtattttttttttgcgggttttcgcggttttttttgttagggatttgggagcgcgtcgcgtagaatcgggcggttgggtttggagttcgttttgtattcggggcgcgttcgcgatcgtttggtaaggattttggtttgtcgggtgggttttaaggtataggcgttaggggaggtcgagaatggtagggttagtgttttttgaggttt

SEQ ID NO: 14078 - DNA, 554 bp, Artificial Sequence
  chemically treated genomic DNA (Homo sapiens) CpG-island No: 14078
aaacctcaaaaaacactaaccctaccattctcgacctcccctaacgcctataccttaaaacccacccgacaaaccaaaatccttaccaaacgatcgcgaacgcgccccgaatacaaaacgaactccaaacccaaccgcccgattctacgcgacgcgctcccaaatccctaacaaaaaaaaccgcgaaaacccgcaaaaaaaaaatacgaccgacgaaacctctcaaaacgccccacctccaaacaaaaaccgcgcgctcgacgcttacctaaacctccaacgaatactaccataataacgacgcccgccgtccgcgcaaacgcccaaactaacgcccctactaaccgaacactaataacaaaaaaattcgactccacaaaccacaaacctcgacgaaaaaaaaacccgacgaacgccaacgaaacgaaaccaaacgaaaccgcgacacgcaaacgcaaaaactaacgttcgaaattcgtttacgcgccgcttcgccgtacaaataataacgaaacgctcctccgaaaaatttcgaaaactaataataactctaa

SEQ ID NO: 14079 - DNA, 554 bp, Artificial Sequence
  chemically treated genomic DNA (Homo sapiens) CpG-island No: 14079
agattttaaaagatattgattttgttattttcgattttttttaacgtttgtgttttagagtttattcggtaaattaaggtttttgttaggcgatcgcgggcgcgtttcgagtgtagagcgggttttaagtttagtcgttcggttttgcgcggcgcgtttttaggtttttagtaaggaagatcgcgggagttcgtaaagggagggtacggtcggcggagttttttaaagcgttttatttttaggtagaggtcgcgcgttcggcgtttatttgggtttttagcggatgttgttatggtgacgacgttcgtcgttcgcgtaggcgtttaggttggcgtttttgttaatcgggtattggtggtagggaaattcgattttataaattataggtttcggcgggggaagagttcggcgggcgttagcgaagcggaattaaacggagtcgcggtacgtaggcgtaaaggttggcgttcgaggttcgtttacgcgtcgtttcgtcgtgtaggtggtggcgaagcgttttttcgaaaggtttcggaagttggtggtagttttga

SEQ ID NO: 14080 - DNA, 554 bp, Artificial Sequence
  chemically treated genomic DNA (Homo sapiens) CpG-island No: 14080
tcaaaactaccaccaacttccgaaacctttcgaaaaaacgcttcgccaccacctacacgacgaaacgacgcgtaaacgaacctcgaacgccaacctttacgcctacgtaccgcgactccgtttaattccgcttcgctaacgcccgccgaactcttcccccgccgaaacctataatttataaaatcgaatttccctaccaccaatacccgattaacaaaaacgccaacctaaacgcctacgcgaacgacgaacgtcgtcaccataacaacatccgctaaaaacccaaataaacgccgaacgcgcgacctctacctaaaaataaaacgctttaaaaaactccgccgaccgtaccctccctttacgaactcccgcgatcttccttactaaaaacctaaaaacgcgccgcgcaaaaccgaacgactaaacttaaaacccgctctacactcgaaacgcgcccgcgatcgcctaacaaaaaccttaatttaccgaataaactctaaaacacaaacgttaaaaaaaatcgaaaataacaaaatcaatatcttttaaaatct

SEQ ID NO: 14081 - DNA, 1236 bp, Artificial Sequence
  chemically treated genomic DNA (Homo sapiens) CpG-island No: 14081
tttcgtcgtttcgattttcgtaaggggttagtttggtgtcgttttcgtttttttgttattttattcggtaggggttttcgttttcgttacgttttttgaagttgtggttcgcgcgtttttttaggattttttcgcgtcggagaggttcgtaggatcgtcgagtttatatttcgttttcgttcgggtttcgttttttcgcgtcgttttggtacgtttcggttacgttttttcggacgcgtttggtacgcgtcgggttttttcgttcgttttagtggttcggtcgcggcgattttatttcggcggcgcgtttttcgagtttggtacggtttagttcgtttttttcgaagtcgcgcgttcgcgttcgcgttttttagtcggtggagttcgtagttttttttgtggttcgcggtagtttttcgttcgttcggttcgcgttcgttatggttcgttcgcgtcgtgtttcgtatcgtttcggcgtcgggggttttttcgggggtcgcggtcgtttttcgcggtttttcgtggtgcgcgtcgttcgttcgcgtttttggtttgttagttttcgaggttcgtagttttcgcggattcgggttcgttcggttttttttatggtgagtttttcgttttttttttagagttttttacggtttcgtttttttagtttttatttcgggtttacgtttttgttcgtagttttcgtcgtttcggggtgttttttgtggttcgaagggtggtttcgttcggggtcgggttttttcgtggagtattcggtggttcgcgtcgcgtttttttttttgttgcgcgttcgggtcggggtggggggttgggggacgggggcggggcgggtttatattattgttgatttcgcggttcgatttaaacgcgggttgggggcggtagataggtagtcggtacgttcgtttgttttttttattggagagttgttcgtttttcgggtaggaaatttggaaatgggggcggttttgggggatagcggcgagggaggggttcgcgttttgtattagcgtttttagatgtcgtattcgtgggcgtttttttttggcggtcgtttcgtgttcgtggagtgcgtatttagaatacgcgttcgcgtttatatgtgggatgttttgatggattgtcgtgagtttagattttaaacgtaaatatttagtttcgtaggtattttgggttgtatacgttttttcggatttaaaagatgtatatgttttttagaaa

SEQ ID NO: 14082 - DNA, 1236 bp, Artificial Sequence
  chemically treated genomic DNA (Homo sapiens) CpG-island No: 14082
tttctaaaaaacatatacatcttttaaatccgaaaaaacgtatacaacccaaaatacctacgaaactaaatatttacgtttaaaatctaaactcacgacaatccatcaaaacatcccacatataaacgcgaacgcgtattctaaatacgcactccacgaacacgaaacgaccgccaaaaaaaaacgcccacgaatacgacatctaaaaacgctaatacaaaacgcgaacccctccctcgccgctatcccccaaaaccgcccccatttccaaatttcctacccgaaaaacgaacaactctccaataaaaaaaacaaacgaacgtaccgactacctatctaccgcccccaacccgcgtttaaatcgaaccgcgaaatcaacaataatataaacccgccccgcccccgtcccccaaccccccaccccgacccgaacgcgcaacaaaaaaaaaaacgcgacgcgaaccaccgaatactccacgaaaaaacccgaccccgaacgaaaccacccttcgaaccacaaaaaacaccccgaaacgacgaaaactacgaacaaaaacgtaaacccgaaataaaaactaaaaaaacgaaaccgtaaaaaactctaaaaaaaaaacgaaaaactcaccataaaaaaaaccgaacgaacccgaatccgcgaaaactacgaacctcgaaaactaacaaaccaaaaacgcgaacgaacgacgcgcaccacgaaaaaccgcgaaaaacgaccgcgacccccgaaaaaacccccgacgccgaaacgatacgaaacacgacgcgaacgaaccataacgaacgcgaaccgaacgaacgaaaaactaccgcgaaccacaaaaaaaactacgaactccaccgactaaaaaacgcgaacgcgaacgcgcgacttcgaaaaaaacgaactaaaccgtaccaaactcgaaaaacgcgccgccgaaataaaatcgccgcgaccgaaccactaaaacgaacgaaaaaacccgacgcgtaccaaacgcgtccgaaaaaacgtaaccgaaacgtaccaaaacgacgcgaaaaaacgaaacccgaacgaaaacgaaatataaactcgacgatcctacgaacctctccgacgcgaaaaaatcctaaaaaaacgcgcgaaccacaacttcaaaaaacgtaacgaaaacgaaaacccctaccgaataaaataacaaaaaaacgaaaacgacaccaaactaaccccttacgaaaatcgaaacgacgaaa

SEQ ID NO: 14083 - DNA, 1236 bp, Artificial Sequence
  chemically treated genomic DNA (Homo sapiens) CpG-island No: 14083
tttttgaaaagtatgtgtattttttgggttcggagaagcgtgtgtagtttaaagtatttgcgaagttgaatgtttacgtttaaggtttgggtttacggtagtttattaaagtattttatatgtgggcgcgggcgcgtattttaggtgcgtattttacgggtacggagcggtcgttaggggagaacgtttacgggtgcgatatttgggggcgttggtataaagcgcgggtttttttttcgtcgttgttttttaaaatcgtttttatttttaggttttttgttcggagagcgagtaattttttaataggaaaaataagcgagcgtgtcggttgtttgtttgtcgtttttagttcgcgtttaaatcgggtcgcggagttagtagtaatatgagttcgtttcgttttcgttttttaattttttatttcggttcgaacgcgtaataaaggggagagcgcggcgcgaattatcgggtgttttacgggggaattcggtttcgggcgggattatttttcgggttataggggatatttcggagcggcgggggttgcggataaaggcgtgagttcgggataggggttgggggggcggggtcgtggaaggttttggaaaaagggcggggggtttattatgggaggggtcgagcgggttcggattcgcggaggttgcgggtttcgggggttggtaggttaggagcgcgagcggacggcgcgtattacgaggggtcgcggagggcggtcgcgattttcgagggggttttcggcgtcggagcggtacggggtacggcgcggacggattatggcgggcgcgggtcgagcgggcggggagttgtcgcgggttataaggggggttgcgggttttatcgattgaggggcgcgggcgcgggcgcgcggtttcgggggagacgggttgagtcgtattaagttcgggggacgcgtcgtcggagtggggtcgtcgcggtcgaattattgaggcgagcgggggagttcggcgcgtattaagcgcgttcgagggggcgtggtcggagcgtattaaggcggcgcgggggagcggggttcgggcgggagcggagtgtgggttcggcggttttgcgggttttttcggcgcgggggagttttgggaagacgcgcgagttataattttagggggcgtggcgggaacgggagtttttatcgaatggggtggtagaagaacgaaggcgatattaagttggttttttgcgggggtcgggacggcggga

SEQ ID NO: 14084 - DNA, 1236 bp, Artificial Sequence
  chemically treated genomic DNA (Homo sapiens) CpG-island No: 14084
tcccgccgtcccgacccccgcaaaaaaccaacttaatatcgccttcgttcttctaccaccccattcgataaaaactcccgttcccgccacgccccctaaaattataactcgcgcgtcttcccaaaactcccccgcgccgaaaaaacccgcaaaaccgccgaacccacactccgctcccgcccgaaccccgctcccccgcgccgccttaatacgctccgaccacgccccctcgaacgcgcttaatacgcgccgaactcccccgctcgcctcaataattcgaccgcgacgaccccactccgacgacgcgtcccccgaacttaatacgactcaacccgtctcccccgaaaccgcgcgcccgcgcccgcgcccctcaatcgataaaacccgcaaccccccttataacccgcgacaactccccgcccgctcgacccgcgcccgccataatccgtccgcgccgtaccccgtaccgctccgacgccgaaaaccccctcgaaaatcgcgaccgccctccgcgacccctcgtaatacgcgccgtccgctcgcgctcctaacctaccaacccccgaaacccgcaacctccgcgaatccgaacccgctcgacccctcccataataaaccccccgccctttttccaaaaccttccacgaccccgcccccccaacccctatcccgaactcacgcctttatccgcaacccccgccgctccgaaatatcccctataacccgaaaaataatcccgcccgaaaccgaattcccccgtaaaacacccgataattcgcgccgcgctctcccctttattacgcgttcgaaccgaaataaaaaattaaaaaacgaaaacgaaacgaactcatattactactaactccgcgacccgatttaaacgcgaactaaaaacgacaaacaaacaaccgacacgctcgcttatttttcctattaaaaaattactcgctctccgaacaaaaaacctaaaaataaaaacgattttaaaaaacaacgacgaaaaaaaaacccgcgctttataccaacgcccccaaatatcgcacccgtaaacgttctcccctaacgaccgctccgtacccgtaaaatacgcacctaaaatacgcgcccgcgcccacatataaaatactttaataaactaccgtaaacccaaaccttaaacgtaaacattcaacttcgcaaatactttaaactacacacgcttctccgaacccaaaaaatacacatacttttcaaaaa

SEQ ID NO: 14085 - DNA, 1035 bp, Artificial Sequence
  chemically treated genomic DNA (Homo sapiens) CpG-island No: 14085
atttttatatattattttttttttattcggacggtagtcgaatagggataaaatttatggcgtatagttagtttttttcgcggagtacgttttgtgttgttttagtcgttggggttttttatttcgggttatagttttttggcgtttttcgggtcgaggtagtcgggtcgaggagtgtcggtgtggttcggttacggggcggggtcggcgggagtttcggtcgtcgtcgtcgtcgttgttgttttcgtttgttttttgggtcgttcgttcgttcgtcgttgggtgcgttgtacgcggggggtagtcgtggtgtagaggtttatgtagcggcggcggcggcggcggttgttgttgttgtcgtcgcggaggtagatagatcgggcgttgttatcgtcgttttttttcggttttatgtcgtcgtcgttgtcgttttttttttttcggcgaggggcggggggtttcggttcggggtgggtattatttttcgtagcgtcgtttttttttttgtttttcgttcgggcgttggagtcggcgagggtattcgtcgttttttaggagtgtatttttcgcgcgttttgtcggagcgagggggcgggcgtgggcggacgtcggggtagcggggatttcgcgcggttgtaagaggagggggtttttttaaggatgttcggcggtttttcgtttttaggtgcgagttgagtttgatcgggagcgagcggcgcgtcgttatgtcggcgtgacgggcgttttcggttgttcgcgcgggttttcgcgttgttttacgtcgcgtcgtgtcggtatcgggttgtaggatgggttgtatttaaagtattatttgtaaggcgcggattcggcgcgagaatatcgtggtgtacgatgtgtgcgttattatcgattagtgttttacgcgtatcgaggagatttcgtttatcgttttgcgttataagattttttattttaaagttttcgttcgcgtggttatgttttttatttttcgttacgagatttgggtggtgggttggatttaggcgtgtaatt

SEQ ID NO: 14086 - DNA, 1035 bp, Artificial Sequence
  chemically treated genomic DNA (Homo sapiens) CpG-island No: 14086
aattacacgcctaaatccaacccaccacccaaatctcgtaacgaaaaataaaaaacataaccacgcgaacgaaaactttaaaataaaaaatcttataacgcaaaacgataaacgaaatctcctcgatacgcgtaaaacactaatcgataataacgcacacatcgtacaccacgatattctcgcgccgaatccgcgccttacaaataatactttaaatacaacccatcctacaacccgataccgacacgacgcgacgtaaaacaacgcgaaaacccgcgcgaacaaccgaaaacgcccgtcacgccgacataacgacgcgccgctcgctcccgatcaaactcaactcgcacctaaaaacgaaaaaccgccgaacatccttaaaaaaaccccctcctcttacaaccgcgcgaaatccccgctaccccgacgtccgcccacgcccgccccctcgctccgacaaaacgcgcgaaaaatacactcctaaaaaacgacgaataccctcgccgactccaacgcccgaacgaaaaacaaaaaaaaaaacgacgctacgaaaaataatacccaccccgaaccgaaaccccccgcccctcgccgaaaaaaaaaaaacgacaacgacgacgacataaaaccgaaaaaaaacgacgataacaacgcccgatctatctacctccgcgacgacaacaacaacaaccgccgccgccgccgccgctacataaacctctacaccacgactaccccccgcgtacaacgcacccaacgacgaacgaacgaacgacccaaaaaacaaacgaaaacaacaacgacgacgacgacgaccgaaactcccgccgaccccgccccgtaaccgaaccacaccgacactcctcgacccgactacctcgacccgaaaaacgccaaaaaactataacccgaaataaaaaaccccaacgactaaaacaacacaaaacgtactccgcgaaaaaaactaactatacgccataaattttatccctattcgactaccgtccgaataaaaaaaaaataatatataaaaat

SEQ ID NO: 14087 - DNA, 1035 bp, Artificial Sequence
  chemically treated genomic DNA (Homo sapiens) CpG-island No: 14087
gattgtacgtttgaatttagtttattatttaggtttcgtggcgggggatggggggtatgattacgcgggcggaggttttgaagtagggggttttgtagcgtaggacgatgggcgaggttttttcgatgcgcgtggggtattggtcgatggtggcgtatatatcgtatattacgatgttttcgcgtcggattcgcgttttgtaggtgatgttttggatatagtttattttgtagttcggtgtcggtacggcgcggcgtggggtagcgcgggggttcgcgcgggtagtcgggggcgttcgttacgtcggtatggcgacgcgtcgttcgttttcggttagatttagttcgtatttaggagcggggagtcgtcgggtatttttggggaagttttttttttttgtagtcgcgcggggttttcgttgtttcgacgttcgtttacgttcgttttttcgtttcggtagggcgcgcggagggtgtatttttaggaggcggcgggtgttttcgtcggttttagcgttcgggcggagggtagggaggggagcggcgttgcgaggaatggtgtttatttcgggtcggagtttttcgtttttcgtcggagaggaggaggcggtagcggcggcggtatggagtcgggggagggcggcggtggtagcgttcggtttgtttgttttcgcggcggtagtagtagtagtcgtcgtcgtcgtcgtcgttgtatgaatttttgtattacggttgtttttcgcgtgtagcgtatttagcggcgggcgagcgggcggtttaagaggtaggcggaggtagtagcggcggcggcggcgatcggagttttcgtcggtttcgtttcgtagtcggattatatcgatatttttcggttcggttgtttcggttcggggggcgttaggaggttgtggttcggggtggagagttttaacggttggagtagtataggacgtgtttcgcggaggaaattggttgtacgttatgagttttgtttttattcggttgtcgttcgggtggggggggggtaatgtgtaagggt

SEQ ID NO: 14088 - DNA, 1035 bp, Artificial Sequence
  chemically treated genomic DNA (Homo sapiens) CpG-island No: 14088
acccttacacattaccccccccccacccgaacgacaaccgaataaaaacaaaactcataacgtacaaccaatttcctccgcgaaacacgtcctatactactccaaccgttaaaactctccaccccgaaccacaacctcctaacgccccccgaaccgaaacaaccgaaccgaaaaatatcgatataatccgactacgaaacgaaaccgacgaaaactccgatcgccgccgccgccgctactacctccgcctacctcttaaaccgcccgctcgcccgccgctaaatacgctacacgcgaaaaacaaccgtaatacaaaaattcatacaacgacgacgacgacgacgactactactactaccgccgcgaaaacaaacaaaccgaacgctaccaccgccgccctcccccgactccataccgccgccgctaccgcctcctcctctccgacgaaaaacgaaaaactccgacccgaaataaacaccattcctcgcaacgccgctcccctccctaccctccgcccgaacgctaaaaccgacgaaaacacccgccgcctcctaaaaatacaccctccgcgcgccctaccgaaacgaaaaaacgaacgtaaacgaacgtcgaaacaacgaaaaccccgcgcgactacaaaaaaaaaaaacttccccaaaaatacccgacgactccccgctcctaaatacgaactaaatctaaccgaaaacgaacgacgcgtcgccataccgacgtaacgaacgcccccgactacccgcgcgaacccccgcgctaccccacgccgcgccgtaccgacaccgaactacaaaataaactatatccaaaacatcacctacaaaacgcgaatccgacgcgaaaacatcgtaatatacgatatatacgccaccatcgaccaataccccacgcgcatcgaaaaaacctcgcccatcgtcctacgctacaaaaccccctacttcaaaacctccgcccgcgtaatcataccccccatcccccgccacgaaacctaaataataaactaaattcaaacgtacaatc

SEQ ID NO: 14089 - DNA, 725 bp, Artificial Sequence
  chemically treated genomic DNA (Homo sapiens) CpG-island No: 14089
ttcgttcgtcgcgtattatataggttgtgtagatattttttcgcgttatttttttttttttttcgcgggtcgtttaggttgtagttttgtttgtttcgaagattttttcgttttagcgtttttgtttcgttttttcgcgttcgttttttttcggagcgcgtatttatttaggcggtaaagttgtgattatttgggcgcgggtgattggcgtttcgttcgtttcgcgttcggcgtagataatttttcgcggttcggtttcgtcgcgtttcgggttcgcgtttttagggatttcgcggttttttagtttttaatttcggcggcgcgtcgggtagcgtttcggtggcggcggcggtcgcggtggtagcgaaggcggcggcggcggcggtagtggtagtggtcgttgtagttttatatttcgtcgttaaattggaggagcgacggaagttagattttaggaggtgagcgttcggtttcggtagttgtcgggagggtcgatggggtttttcgttttaaggcggaggcgggcgcgggttcgggggtcgatttcgtagggcgcgtaggcggttttagcgcgtttttgggagggagagagaggttaattgcgggtcgggtattttttgagttgggcgcgggcggtgtgtggaggttgttttcgcggaaaagtatttttttttttttttagggtttagaggaagagtttgggtggtttgttttttttttattgt

SEQ ID NO: 14090 - DNA, 725 bp, Artificial Sequence
  chemically treated genomic DNA (Homo sapiens) CpG-island No: 14090
acaataaaaaaaaaacaaaccacccaaactcttcctctaaaccctaaaaaaaaaaaaaaatacttttccgcgaaaacaacctccacacaccgcccgcgcccaactcaaaaaatacccgacccgcaattaacctctctctccctcccaaaaacgcgctaaaaccgcctacgcgccctacgaaatcgacccccgaacccgcgcccgcctccgccttaaaacgaaaaaccccatcgaccctcccgacaactaccgaaaccgaacgctcacctcctaaaatctaacttccgtcgctcctccaatttaacgacgaaatataaaactacaacgaccactaccactaccgccgccgccgccgccttcgctaccaccgcgaccgccgccgccaccgaaacgctacccgacgcgccgccgaaattaaaaactaaaaaaccgcgaaatccctaaaaacgcgaacccgaaacgcgacgaaaccgaaccgcgaaaaattatctacgccgaacgcgaaacgaacgaaacgccaatcacccgcgcccaaataatcacaactttaccgcctaaataaatacgcgctccgaaaaaaaacgaacgcgaaaaaacgaaacaaaaacgctaaaacgaaaaaatcttcgaaacaaacaaaactacaacctaaacgacccgcgaaaaaaaaaaaaaaataacgcgaaaaaatatctacacaacctatataatacgcgacgaacgaa

SEQ ID NO: 14091 - DNA, 725 bp, Artificial Sequence
  chemically treated genomic DNA (Homo sapiens) CpG-island No: 14091
gtagtgagggagaagtagattatttaaattttttttttaaattttaagaaggaaaaaaaatattttttcgcggaagtagtttttatatatcgttcgcgtttagtttaggggatgttcggttcgtaattgattttttttttttttttaggagcgcgttgaggtcgtttgcgcgttttacggaatcggttttcgggttcgcgttcgttttcgttttggagcgagggattttatcgattttttcggtagttgtcggggtcgggcgtttattttttggggtttggttttcgtcgtttttttagtttggcggcggagtgtggggttgtagcggttattgttattgtcgtcgtcgtcgtcgttttcgttgttatcgcggtcgtcgtcgttatcgaagcgttgttcggcgcgtcgtcggggttggaggttggggggtcgcggaatttttggaggcgcgagttcgggacgcggcggggtcgagtcgcgggaagttgtttgcgtcgggcgcggagcgagcggggcgttagttattcgcgtttaagtagttataattttgtcgtttgggtgggtgcgcgtttcggagagaggcgagcgcgggagagcggggtaaaggcgttggggcgggagggttttcggagtaggtaggattgtaatttgaacggttcgcgaggaaaggggaaaggtggcgcggggggatgtttatatagtttgtgtggtgcgcggcgagcgag

SEQ ID NO: 14092 - DNA, 725 bp, Artificial Sequence
  chemically treated genomic DNA (Homo sapiens) CpG-island No: 14092
ctcgctcgccgcgcaccacacaaactatataaacatccccccgcgccacctttcccctttcctcgcgaaccgttcaaattacaatcctacctactccgaaaaccctcccgccccaacgcctttaccccgctctcccgcgctcgcctctctccgaaacgcgcacccacccaaacgacaaaattataactacttaaacgcgaataactaacgccccgctcgctccgcgcccgacgcaaacaacttcccgcgactcgaccccgccgcgtcccgaactcgcgcctccaaaaattccgcgaccccccaacctccaaccccgacgacgcgccgaacaacgcttcgataacgacgacgaccgcgataacaacgaaaacgacgacgacgacgacaataacaataaccgctacaaccccacactccgccgccaaactaaaaaaacgacgaaaaccaaaccccaaaaaataaacgcccgaccccgacaactaccgaaaaaatcgataaaatccctcgctccaaaacgaaaacgaacgcgaacccgaaaaccgattccgtaaaacgcgcaaacgacctcaacgcgctcctaaaaaaaaaaaaaaaatcaattacgaaccgaacatcccctaaactaaacgcgaacgatatataaaaactacttccgcgaaaaaatattttttttccttcttaaaatttaaaaaaaaaatttaaataatctacttctccctcactac

SEQ ID NO: 14093 - DNA, 547 bp, Artificial Sequence
  chemically treated genomic DNA (Homo sapiens) CpG-island No: 14093
tatcgtattaaaacgtttagagattgagttatagagaggggtgtggtcggtattttagtttcgtttttgtcggagtagtcgaaggttttattggcgtttttacgttttagttgcgtttagtagtcgcggcgtaattggataaaagttcgtggagggggcgggattttaggggggtttttacgattagttaatatttaggagggcgggatagaaaggtgtagatttacgattcgattggtttcgggtttagttgggaggcgggacgaattattggttgggggaaatttacgaggggacgcggtcgaggagggtcgttgtttattcgggggcgtgggagtgaggtattagatttagtttatttggtttcgacgtttttgttttcggaattcgggtgttgcggattgaggtttcggtttttaacggtgggatcggtgttttcgggatgagatttggcgttttttcggggttttggtgggatcggtgtttttaggatgagatttagggttttttcggggttttcgggatttttatttaatattcggtatta

SEQ ID NO: 14094 - DNA, 547 bp, Artificial Sequence
  chemically treated genomic DNA (Homo sapiens) CpG-island No: 14094
taataccgaatattaaataaaaatcccgaaaaccccgaaaaaaccctaaatctcatcctaaaaacaccgatcccaccaaaaccccgaaaaaacgccaaatctcatcccgaaaacaccgatcccaccgttaaaaaccgaaacctcaatccgcaacacccgaattccgaaaacaaaaacgtcgaaaccaaataaactaaatctaatacctcactcccacgcccccgaataaacaacgaccctcctcgaccgcgtcccctcgtaaatttcccccaaccaataattcgtcccgcctcccaactaaacccgaaaccaatcgaatcgtaaatctacacctttctatcccgccctcctaaatattaactaatcgtaaaaacccccctaaaatcccgccccctccacgaacttttatccaattacgccgcgactactaaacgcaactaaaacgtaaaaacgccaataaaaccttcgactactccgacaaaaacgaaactaaaataccgaccacacccctctctataactcaatctctaaacgttttaatacgata

SEQ ID NO: 14095 - DNA, 547 bp, Artificial Sequence
  chemically treated genomic DNA (Homo sapiens) CpG-island No: 14095
taatatcggatattaggtgaagatttcgaaagtttcgaggaaattttaaattttattttgaggatatcgattttattaaagtttcgaggaaacgttaaattttatttcgaggatatcgattttatcgttaggaatcgggattttaattcgtagtattcggatttcgagaatagaggcgtcggggttaaatgggttgaatttggtattttatttttacgttttcgggtggatagcgatttttttcggtcgcgttttttcgtgggttttttttaattaataattcgtttcgttttttagttgagttcgaagttaatcgggtcgtagatttgtatttttttatttcgtttttttgggtattgattaatcgtagaaatttttttgggatttcgttttttttacgggtttttatttaattacgtcgcggttattaagcgtagttgaagcgtgaaggcgttaatgaggttttcggttatttcggtaggggcggaattaaaatgtcggttatatttttttttgtgatttagtttttgagcgttttaatacgatg

SEQ ID NO: 14096 - DNA, 547 bp, Artificial Sequence
  chemically treated genomic DNA (Homo sapiens) CpG-island No: 14096
catcgtattaaaacgctcaaaaactaaatcacaaaaaaaaatataaccgacattttaattccgcccctaccgaaataaccgaaaacctcattaacgccttcacgcttcaactacgcttaataaccgcgacgtaattaaataaaaacccgtaaaaaaaacgaaatcccaaaaaaatttctacgattaatcaatacccaaaaaaacgaaataaaaaaatacaaatctacgacccgattaacttcgaactcaactaaaaaacgaaacgaattattaattaaaaaaaacccacgaaaaaacgcgaccgaaaaaaatcgctatccacccgaaaacgtaaaaataaaataccaaattcaacccatttaaccccgacgcctctattctcgaaatccgaatactacgaattaaaatcccgattcctaacgataaaatcgatatcctcgaaataaaatttaacgtttcctcgaaactttaataaaatcgatatcctcaaaataaaatttaaaatttcctcgaaactttcgaaatcttcacctaatatccgatatta

SEQ ID NO: 14097 - DNA, 706 bp, Artificial Sequence
  chemically treated genomic DNA (Homo sapiens) CpG-island No: 14097
gcgtttatttttatttgtcgcgtcgtcgggagtcgcgaggaggcggagttcggtcgtcgtagttaatgagcgacgtcggcgttggtagttgttgttataaagggttgggggcggcggcggcgcggtttagagcgcggagcgcgtagcgcgggtcggagggagggagggagggtgggcgaggggagaggatttgaatatacgggatcggataggatcgatcgaggggcggcggcgaaaggtagagcgtcgcgatttttgtcgggaagcgtaattttttcgggtttcgcggggtcgcgtagggggcgtttttaatttcgcgttcgttttttttttttattttttgtcgttcgtaggttatttcggggttcggttattcgcgcgcgtattttcgggttcgggttcgtttttggttttcgagggagtcgtcgtttttatcgttatatttgtagcggtcgtattagaggtcgttcgggcgggattttagcgtgagtatcgggcgtttttttaggagtgtattattttcggagttttttttaatacggatcgcgttcgtcgggtatataagaatggttattgtaggtatttttttgtcgtcgaaagggaatcgggacggggaggagttgggtttaggtttcgcggagattgggcgggtgcggcgggggggggtaggattaggtttagttaggttcgggttgggggggtagga

SEQ ID NO: 14098 - DNA, 706 bp, Artificial Sequence
  chemically treated genomic DNA (Homo sapiens) CpG-island No: 14098
tcctacccccccaacccgaacctaactaaacctaatcctacccccccccgccgcacccgcccaatctccgcgaaacctaaacccaactcctccccgtcccgattccctttcgacgacaaaaaaatacctacaataaccattcttatatacccgacgaacgcgatccgtattaaaaaaaactccgaaaataatacactcctaaaaaaacgcccgatactcacgctaaaatcccgcccgaacgacctctaatacgaccgctacaaatataacgataaaaacgacgactccctcgaaaaccaaaaacgaacccgaacccgaaaatacgcgcgcgaataaccgaaccccgaaataacctacgaacgacaaaaaataaaaaaaaaaaacgaacgcgaaattaaaaacgccccctacgcgaccccgcgaaacccgaaaaaattacgcttcccgacaaaaatcgcgacgctctacctttcgccgccgcccctcgatcgatcctatccgatcccgtatattcaaatcctctcccctcgcccaccctccctccctccctccgacccgcgctacgcgctccgcgctctaaaccgcgccgccgccgcccccaaccctttataacaacaactaccaacgccgacgtcgctcattaactacgacgaccgaactccgcctcctcgcgactcccgacgacgcgacaaataaaaataaacgc

SEQ ID NO: 14099 - DNA, 706 bp, Artificial Sequence
  chemically treated genomic DNA (Homo sapiens) CpG-island No: 14099
ttttatttttttaattcgggtttagttaggtttggttttattttttttcgtcgtattcgtttaattttcgcggagtttgggtttaattttttttcgtttcgattttttttcggcgataggggaatatttatagtgattatttttgtgtgttcggcgggcgcggttcgtgttgaggggggtttcgggggtggtgtatttttaggggggcgttcgatgtttacgttggggtttcgttcgggcggtttttggtgcggtcgttgtagatgtggcgatgaaggcggcggttttttcgagggttagggacgggttcgaattcggggatgcgcgcgcggatggtcgggtttcggggtggtttgcgggcggtaggggatggaaagagggagcgggcgcggggttgaggacgttttttgcgcggtttcgcggggttcggggaggttgcgtttttcgatagagatcgcggcgttttgtttttcgtcgtcgtttttcggtcggttttgttcggtttcgtgtgtttaagtttttttttttcgtttatttttttttttttttttcggttcgcgttgcgcgtttcgcgttttggatcgcgtcgtcgtcgtttttagttttttatagtagtagttgttagcgtcggcgtcgtttattggttgcggcgatcgagtttcgttttttcgcggttttcgacggcgcggtaggtggaagtgagcgt

SEQ ID NO: 14100 - DNA, 706 bp, Artificial Sequence
  chemically treated genomic DNA (Homo sapiens) CpG-island No: 14100
acgctcacttccacctaccgcgccgtcgaaaaccgcgaaaaaacgaaactcgatcgccgcaaccaataaacgacgccgacgctaacaactactactataaaaaactaaaaacgacgacgacgcgatccaaaacgcgaaacgcgcaacgcgaaccgaaaaaaaaaaaaaaaaataaacgaaaaaaaaaaacttaaacacacgaaaccgaacaaaaccgaccgaaaaacgacgacgaaaaacaaaacgccgcgatctctatcgaaaaacgcaacctccccgaaccccgcgaaaccgcgcaaaaaacgtcctcaaccccgcgcccgctccctctttccatcccctaccgcccgcaaaccaccccgaaacccgaccatccgcgcgcgcatccccgaattcgaacccgtccctaaccctcgaaaaaaccgccgccttcatcgccacatctacaacgaccgcaccaaaaaccgcccgaacgaaaccccaacgtaaacatcgaacgcccccctaaaaatacaccacccccgaaacccccctcaacacgaaccgcgcccgccgaacacacaaaaataatcactataaatattcccctatcgccgaaaaaaaatcgaaacgaaaaaaaattaaacccaaactccgcgaaaattaaacgaatacgacgaaaaaaaataaaaccaaacctaactaaacccgaattaaaaaaataaaa

SEQ ID NO: 14101 - DNA, 818 bp, Artificial Sequence
  chemically treated genomic DNA (Homo sapiens) CpG-island No: 14101
  unsure (412)
gggagattgcgagtttcgagcgaaacgttggttttacgttcgttcggggagtcgtcgcgattcgttttttttaggtttgggtatcgtcgtggtgcgtgtcggttatgatcgtttcgggatttgcgcgacggcggttcgaggaggtttggcgggcggcggcgagaggttgtgtttagtttgtgtttaattagggagtgcgggttgtgttcgagtttggtagtaatgcgtaaataaatttacggtaattttttcgttttttcggcgttgtttcggttcgcgtcgttagcgcgcgtcgagcgcgggtttgtttttttcgcgttcgtcgtcggtcgtttagttttcgtttcggtcgttcgtattttcgttgtttcgttcgtttcgtcggcgcgggtttttttatttatcgtttttnacgcgggcggtcggttattacgtttcgcgcggttcgttcggatcgtggtttttcgagagtaaggtaagggcgatgcgcggggatattagcggttttttcgttcgacgcggtttagggaagtttttggcgtggttgtttttcgcggggtcgggggggaggtttcgggagttaggcgagtcggcgggcgggaggggtcgtttggcgtttcggggttataagttgtttaatttgatttcggtgcgggtcggtgggggcgcggtcgggttggcggcgcggaaaggggttggaggtacggcggggtcgggcgatcgggcgggtaaggggagggtttcgaggaatttttttttttttagaggcgttttttagttttggtcgcggtttcgcggagtagcggttttttggttgg

SEQ ID NO: 14102 - DNA, 818 bp, Artificial Sequence
  chemically treated genomic DNA (Homo sapiens) CpG-island No: 14102
  unsure (407)
ccaaccaaaaaaccgctactccgcgaaaccgcgaccaaaactaaaaaacgcctctaaaaaaaaaaaaattcctcgaaaccctccccttacccgcccgatcgcccgaccccgccgtacctccaacccctttccgcgccgccaacccgaccgcgcccccaccgacccgcaccgaaatcaaattaaacaacttataaccccgaaacgccaaacgacccctcccgcccgccgactcgcctaactcccgaaacctcccccccgaccccgcgaaaaacaaccacgccaaaaacttccctaaaccgcgtcgaacgaaaaaaccgctaatatccccgcgcatcgcccttaccttactctcgaaaaaccacgatccgaacgaaccgcgcgaaacgtaataaccgaccgcccgcgtnaaaaacgataaataaaaaaacccgcgccgacgaaacgaacgaaacaacgaaaatacgaacgaccgaaacgaaaactaaacgaccgacgacgaacgcgaaaaaaacaaacccgcgctcgacgcgcgctaacgacgcgaaccgaaacaacgccgaaaaaacgaaaaaattaccgtaaatttatttacgcattactaccaaactcgaacacaacccgcactccctaattaaacacaaactaaacacaacctctcgccgccgcccgccaaacctcctcgaaccgccgtcgcgcaaatcccgaaacgatcataaccgacacgcaccacgacgatacccaaacctaaaaaaaacgaatcgcgacgactccccgaacgaacgtaaaaccaacgtttcgctcgaaactcgcaatctccc

SEQ ID NO: 14103 - DNA, 818 bp, Artificial Sequence
  chemically treated genomic DNA (Homo sapiens) CpG-island No: 14103
  unsure (407)
ttagttagggagtcgttgtttcgcggggtcgcggttaggattggaaggcgtttttggggaagagaaagtttttcggggttttttttttgttcgttcggtcgttcggtttcgtcgtgtttttagttttttttcgcgtcgttagttcggtcgcgtttttatcggttcgtatcgaggttaggttaggtaatttgtgatttcggggcgttaggcggtttttttcgttcgtcggttcgtttggttttcggggtttttttttcggtttcgcggaaaatagttacgttagaaatttttttgggtcgcgtcgggcggggaagtcgttggtgttttcgcgtatcgtttttattttgttttcgagaggttacgattcgggcgggtcgcgcggggcgtggtagtcgatcgttcgcgtnaggggcggtaggtgagggagttcgcgtcggcggggcgggcggggtagcgggggtgcgagcggtcggggcgggggttgggcggtcggcggcgggcgcgaggagagtagattcgcgttcggcgcgcgttggcggcgcgggtcggggtagcgtcgagggggcggaggagttatcgtgggtttgtttacgtattgttgttaggttcgagtatagttcgtattttttgattggatataaattgggtatagtttttcgtcgtcgttcgttaggttttttcgagtcgtcgtcgcgtagatttcggagcgattatagtcgatacgtattacggcggtgtttaggtttggaggggacgagtcgcggcggtttttcgggcgggcgtgaagttaacgtttcgttcggggttcgtagtttttt

SEQ ID NO: 14104 - DNA, 818 bp, Artificial Sequence
  chemically treated genomic DNA (Homo sapiens) CpG-island No: 14104
  unsure (412)
aaaaaactacgaaccccgaacgaaacgttaacttcacgcccgcccgaaaaaccgccgcgactcgtcccctccaaacctaaacaccgccgtaatacgtatcgactataatcgctccgaaatctacgcgacgacgactcgaaaaaacctaacgaacgacgacgaaaaactatacccaatttatatccaatcaaaaaatacgaactatactcgaacctaacaacaatacgtaaacaaacccacgataactcctccgccccctcgacgctaccccgacccgcgccgccaacgcgcgccgaacgcgaatctactctcctcgcgcccgccgccgaccgcccaacccccgccccgaccgctcgcacccccgctaccccgcccgccccgccgacgcgaactccctcacctaccgcccctnacgcgaacgatcgactaccacgccccgcgcgacccgcccgaatcgtaacctctcgaaaacaaaataaaaacgatacgcgaaaacaccaacgacttccccgcccgacgcgacccaaaaaaatttctaacgtaactattttccgcgaaaccgaaaaaaaaaccccgaaaaccaaacgaaccgacgaacgaaaaaaaccgcctaacgccccgaaatcacaaattacctaacctaacctcgatacgaaccgataaaaacgcgaccgaactaacgacgcgaaaaaaaactaaaaacacgacgaaaccgaacgaccgaacgaacaaaaaaaaaaccccgaaaaactttctcttccccaaaaacgccttccaatcctaaccgcgaccccgcgaaacaacgactccctaactaa

SEQ ID NO: 14105 - DNA, 1020 bp, Artificial Sequence
  chemically treated genomic DNA (Homo sapiens) CpG-island No: 14105
gtaggtgtacgttgcggtttttagggcgatagtttcggaaaaggcgtattttcggttgtgggtttttcgggggcggggcgtaggggcggggcggggcgaggggttcgtagaggtttcgggttggtcgagtcgggagggaggagtattagtattagtatagttttcgttttttgcgcgtagtagtgtttagtaattcgagcggaggcggtcgttgtagttcggcgttgaatgggttggcggcgttcggtttcgttttgttcgcggtcggttttcgcgtttgtttttttttcgttcgggtttttgtcggtcgtcgttagttttcgtttcgattgtgaatgaaaggcgggcgtcgtcgagggttggttgggaacgtcgtagcgacgtcggtttttcgagaggcgcgcgtttcgtcgagatgtacggtaaggagggtttcgcgttcgggttcgggttcgcgggggcgatttcgtaaattttttcggcgcggattattgtttttttgtacggttttggcgcggggttaggtcgttgatttggtgttcggcggggttgttgcggtcgttttgtgcgcgcgcgtttgcgttgcgaggataaagatttttcgggtcggggattttggggttttttttaggttcggcgcgtgtcggtgttgggcggtggtttttcggggggcggaggtttaggggaaagcgggtttttcggagtcgagtagatcgggagtgttggaggaggtggtcgtgtggtagtatttgcggaattaataaaagcggtttgtgtttgggagttttttgtgggaagtcggtttagggttgagggagacgttcgcggtcggtcgtttgcgcggttcggagaaggcgggaggcggcgcggcgcgagaggttcggggagtagttagtggtcgagtttcgtttcgttcgtttgaatggattcggtttttgtttgtttttgtcgtttcgcggatttaggtttattaatttttagatttttttttcgtagtgatgaagggaggagacgttgttg

SEQ ID NO: 14106 - DNA, 1020 bp, Artificial Sequence
  chemically treated genomic DNA (Homo sapiens) CpG-island No: 14106
caacaacgtctcctcccttcatcactacgaaaaaaaaatctaaaaattaataaacctaaatccgcgaaacgacaaaaacaaacaaaaaccgaatccattcaaacgaacgaaacgaaactcgaccactaactactccccgaacctctcgcgccgcgccgcctcccgccttctccgaaccgcgcaaacgaccgaccgcgaacgtctccctcaaccctaaaccgacttcccacaaaaaactcccaaacacaaaccgcttttattaattccgcaaatactaccacacgaccacctcctccaacactcccgatctactcgactccgaaaaacccgctttcccctaaacctccgccccccgaaaaaccaccgcccaacaccgacacgcgccgaacctaaaaaaaaccccaaaatccccgacccgaaaaatctttatcctcgcaacgcaaacgcgcgcgcacaaaacgaccgcaacaaccccgccgaacaccaaatcaacgacctaaccccgcgccaaaaccgtacaaaaaaacaataatccgcgccgaaaaaatttacgaaatcgcccccgcgaacccgaacccgaacgcgaaaccctccttaccgtacatctcgacgaaacgcgcgcctctcgaaaaaccgacgtcgctacgacgttcccaaccaaccctcgacgacgcccgcctttcattcacaatcgaaacgaaaactaacgacgaccgacaaaaacccgaacgaaaaaaaaacaaacgcgaaaaccgaccgcgaacaaaacgaaaccgaacgccgccaacccattcaacgccgaactacaacgaccgcctccgctcgaattactaaacactactacgcgcaaaaaacgaaaactatactaatactaatactcctccctcccgactcgaccaacccgaaacctctacgaacccctcgccccgccccgcccctacgccccgcccccgaaaaacccacaaccgaaaatacgccttttccgaaactatcgccctaaaaaccgcaacgtacacctac

SEQ ID NO: 14107 - DNA, 1020 bp, Artificial Sequence
  chemically treated genomic DNA (Homo sapiens) CpG-island No: 14107
tagtagcgttttttttttttattattgcggagggaaaatttggaagttggtgaatttggattcgcggggcggtaggggtaggtagaggtcgagtttatttaggcgggcgagacgagattcggttattggttgtttttcgggtttttcgcgtcgcgtcgtttttcgtttttttcgagtcgcgtagacgatcggtcgcgggcgttttttttagttttggatcggttttttatagaaaatttttaggtataaatcgtttttgttaatttcgtaaatgttgttatacgattattttttttagtattttcggtttgttcggtttcgggagattcgtttttttttgagttttcgtttttcgaaggattatcgtttagtatcggtacgcgtcgggtttggagaggattttagggttttcggttcgagggatttttgttttcgtagcgtagacgcgcgcgtatagagcgatcgtaatagtttcgtcgggtattaggttagcggtttggtttcgcgttagggtcgtgtagggggataatggttcgcgtcggggaagtttgcggagtcgttttcgcgggttcgggttcgggcgcggagttttttttatcgtatatttcggcggggcgcgcgtttttcgagaggtcggcgtcgttgcggcgtttttagttagttttcggcggcgttcgttttttatttatagtcggggcggggattggcggcggtcgataggggttcgggcggggagggagtagacgcgggggtcggtcgcgggtaggacggagtcgggcgtcgttagtttatttagcgtcgggttgtagcggtcgttttcgttcgggttgttgggtattgttgcgcgtagggggcgggggttatgttaatattaatgtttttttttttcggttcggttaattcgaggtttttgcgagtttttcgtttcgtttcgtttttgcgtttcgttttcgagaaatttatagtcggagatgcgtttttttcgaggttgtcgttttaagggtcgtagcgtgtatttgt

SEQ ID NO: 14108 - DNA, 1020 bp, Artificial Sequence
  chemically treated genomic DNA (Homo sapiens) CpG-island No: 14108
acaaatacacgctacgacccttaaaacgacaacctcgaaaaaaacgcatctccgactataaatttctcgaaaacgaaacgcaaaaacgaaacgaaacgaaaaactcgcaaaaacctcgaattaaccgaaccgaaaaaaaaaaacattaatattaacataacccccgccccctacgcgcaacaatacccaacaacccgaacgaaaacgaccgctacaacccgacgctaaataaactaacgacgcccgactccgtcctacccgcgaccgacccccgcgtctactccctccccgcccgaacccctatcgaccgccgccaatccccgccccgactataaataaaaaacgaacgccgccgaaaactaactaaaaacgccgcaacgacgccgacctctcgaaaaacgcgcgccccgccgaaatatacgataaaaaaaactccgcgcccgaacccgaacccgcgaaaacgactccgcaaacttccccgacgcgaaccattatccccctacacgaccctaacgcgaaaccaaaccgctaacctaatacccgacgaaactattacgatcgctctatacgcgcgcgtctacgctacgaaaacaaaaatccctcgaaccgaaaaccctaaaatcctctccaaacccgacgcgtaccgatactaaacgataatccttcgaaaaacgaaaactcaaaaaaaaacgaatctcccgaaaccgaacaaaccgaaaatactaaaaaaaataatcgtataacaacatttacgaaattaacaaaaacgatttatacctaaaaattttctataaaaaaccgatccaaaactaaaaaaaacgcccgcgaccgatcgtctacgcgactcgaaaaaaacgaaaaacgacgcgacgcgaaaaacccgaaaaacaaccaataaccgaatctcgtctcgcccgcctaaataaactcgacctctacctacccctaccgccccgcgaatccaaattcaccaacttccaaattttccctccgcaataataaaaaaaaaaaacgctacta

SEQ ID NO: 14109 - DNA, 615 bp, Artificial Sequence
  chemically treated genomic DNA (Homo sapiens) CpG-island No: 14109
tttcgtggtagtcggtgcgttgtgtggggcggagaggggttcggggtgggtttcggggcgcgggttaaggggagcgagttcggttcgcggttttagcgtttttcggtcggcgcggaaggggtgaggttgggcgttcgcgcgagtttcgagaaaaggaaagataaaaagttttggcggttaggggtttttcgggcgtttatttcgaaatttttttcgtcgttttttgtttgaaatatgtcgagttcggtacggttttgtcgttttattttttgttgcggtttttatttcgagttgggtttagttaatttgttgtgatagttgtcggtagtcgttttttcgtttcgtgatatttcgtaggttttagaatcgcggcgtcgcgggtatagatttcgggtttagagcgcgcggtttttttttttgcggtcgtcgttttttgaaagtggttgcgcgggtgtgaagaatttgtttaatgcgttttgtaggatttattgtttttttttcggtcgcggtgcgacgatggtcgaggagtttagtttttcgttttttgtttttttttttttttttttttttttttttttttttttgttttttcgtttattcgtcgtagttttatag

SEQ ID NO: 14110 - DNA, 615 bp, Artificial Sequence
  chemically treated genomic DNA (Homo sapiens) CpG-island No: 14110
ctataaaactacgacgaataaacgaaaaaacaaaaaaaaaaaaaaaaaaaaaaaaaaaaaaaaaaaaacaaaaaacgaaaaactaaactcctcgaccatcgtcgcaccgcgaccgaaaaaaaaacaataaatcctacaaaacgcattaaacaaattcttcacacccgcgcaaccactttcaaaaaacgacgaccgcaaaaaaaaaaaccgcgcgctctaaacccgaaatctatacccgcgacgccgcgattctaaaacctacgaaatatcacgaaacgaaaaaacgactaccgacaactatcacaacaaattaactaaacccaactcgaaataaaaaccgcaacaaaaaataaaacgacaaaaccgtaccgaactcgacatatttcaaacaaaaaacgacgaaaaaaatttcgaaataaacgcccgaaaaacccctaaccgccaaaactttttatctttccttttctcgaaactcgcgcgaacgcccaacctcaccccttccgcgccgaccgaaaaacgctaaaaccgcgaaccgaactcgctccccttaacccgcgccccgaaacccaccccgaacccctctccgccccacacaacgcaccgactaccacgaaa

SEQ ID NO: 14111 - DNA, 615 bp, Artificial Sequence
  chemically treated genomic DNA (Homo sapiens) CpG-island No: 14111
ttgtggggttgcggcgggtgggcggagagataggagaggaaaagagaaaagggaagagaaggaaggggtagggggcgagaagttgggtttttcgattatcgtcgtatcgcggtcgaaagagggatagtggattttataaagcgtattgagtaagttttttatattcgcgtagttatttttaggaaacggcggtcgtagaggaaagggtcgcgcgttttggattcggagtttgtgttcgcggcgtcgcgattttgaaatttgcgggatgttacggggcggaggggcggttgtcgatagttgttataataaattagttgagtttagttcgaggtggaaatcgtagtaggaagtgggacgatagagtcgtatcgggttcggtatattttaggtaagagacggcgaaaagagtttcgagataaacgttcgggaagtttttggtcgttaaaattttttgtttttttttttttcgaagttcgcgcggacgtttagttttatttttttcgcgtcggtcggggagcgttgaagtcgcgggtcgggttcgttttttttggttcgcgtttcgaaatttatttcgggttttttttcgttttatatagcgtatcgattgttacgagg

SEQ ID NO: 14112 - DNA, 615 bp, Artificial Sequence
  chemically treated genomic DNA (Homo sapiens) CpG-island No: 14112
cctcgtaacaatcgatacgctatataaaacgaaaaaaaacccgaaataaatttcgaaacgcgaaccaaaaaaaacgaacccgacccgcgacttcaacgctccccgaccgacgcgaaaaaaataaaactaaacgtccgcgcgaacttcgaaaaaaaaaaaaacaaaaaattttaacgaccaaaaacttcccgaacgtttatctcgaaactcttttcgccgtctcttacctaaaatataccgaacccgatacgactctatcgtcccacttcctactacgatttccacctcgaactaaactcaactaatttattataacaactatcgacaaccgcccctccgccccgtaacatcccgcaaatttcaaaatcgcgacgccgcgaacacaaactccgaatccaaaacgcgcgaccctttcctctacgaccgccgtttcctaaaaataactacgcgaatataaaaaacttactcaatacgctttataaaatccactatccctctttcgaccgcgatacgacgataatcgaaaaacccaacttctcgccccctaccccttccttctcttcccttttctcttttcctctcctatctctccgcccacccgccgcaaccccacaa

SEQ ID NO: 14113 - DNA, 852 bp, Artificial Sequence
  chemically treated genomic DNA (Homo sapiens) CpG-island No: 14113
gttcgtttttcgggttcgggttttttacgtttagtttcggttttttcggttttcgcggatttttttttcgggtttaatgcgttagttggtttcgtagggtcggaaaagcgcgtttttcggtagtttggcgtcgtcgggaaggtgcgcgtagttcgttcggtagtttcgggatggcgtgagggtcgttttttcggttagttttagcggatttttgtcgttagtaggtcgtttttttttcgcgggttttcgggagcgggttttggcgttagcgcgatttttcgggtttcggcgaatcgagggagcgtttttttttttcgtttgacgggcgtcgatttcgttttgcggtgtcgcggtcgtcgagttttcgacgcgtttttaggtttcgggttcgcgttaggaggttttttcgggttttcgtcggtcggttagcgttcgtaaagttcggcgttttttatagcgggcgggtaaggggcgggagtttacggtttcgcgttttgcggtttcgagcggagcggcgtttcgcgggttcgtttcgtcgtttgttttggttgcggttcgcggtttcgttgtttatcgtttatcgttcgatttcgttcgttagttttcgtttgcgttcgtcgcgttcgttttttatttgcgacgcgtttcggtttttagcgtatcgttttggatcggttgtgtatatcggaagttacgttttcggttcggtttcgttttcgtttcgggcggacgcggggaggttgcggatttcgcgtttagagcggatttttttttcgtattagaggggagggggcgtttcggagtttttttttttgggattttgggtttttaagcgggacggtcggggcggag

SEQ ID NO: 14114 - DNA, 852 bp, Artificial Sequence
  chemically treated genomic DNA (Homo sapiens) CpG-island No: 14114
ctccgccccgaccgtcccgcttaaaaacccaaaatcccaaaaaaaaaaactccgaaacgccccctcccctctaatacgaaaaaaaaatccgctctaaacgcgaaatccgcaacctccccgcgtccgcccgaaacgaaaacgaaaccgaaccgaaaacgtaacttccgatatacacaaccgatccaaaacgatacgctaaaaaccgaaacgcgtcgcaaataaaaaacgaacgcgacgaacgcaaacgaaaactaacgaacgaaatcgaacgataaacgataaacaacgaaaccgcgaaccgcaaccaaaacaaacgacgaaacgaacccgcgaaacgccgctccgctcgaaaccgcaaaacgcgaaaccgtaaactcccgccccttacccgcccgctataaaaaacgccgaactttacgaacgctaaccgaccgacgaaaacccgaaaaaacctcctaacgcgaacccgaaacctaaaaacgcgtcgaaaactcgacgaccgcgacaccgcaaaacgaaatcgacgcccgtcaaacgaaaaaaaaaaacgctccctcgattcgccgaaacccgaaaaatcgcgctaacgccaaaacccgctcccgaaaacccgcgaaaaaaaaacgacctactaacgacaaaaatccgctaaaactaaccgaaaaaacgaccctcacgccatcccgaaactaccgaacgaactacgcgcaccttcccgacgacgccaaactaccgaaaaacgcgcttttccgaccctacgaaaccaactaacgcattaaacccgaaaaaaaaatccgcgaaaaccgaaaaaaccgaaactaaacgtaaaaaacccgaacccgaaaaacgaac

SEQ ID NO: 14115 - DNA, 852 bp, Artificial Sequence
  chemically treated genomic DNA (Homo sapiens) CpG-island No: 14115
tttcgtttcggtcgtttcgtttgggggtttagggttttaggagaggaggtttcggggcgtttttttttttttaatgcgagaggagagttcgttttaggcgcgggattcgtaattttttcgcgttcgttcgaggcgggggcggggtcggatcggagacgtaattttcggtgtatatagtcggtttaaggcggtgcgttgggggtcggggcgcgtcgtaggtgaggagcgggcgcggcgggcgtaggcgggggttggcgggcggggtcgggcggtgggcggtgggtagcggggtcgcgggtcgtagttagggtagacggcgagacgggttcgcggggcgtcgtttcgttcggggtcgtagggcgcggggtcgtgggttttcgttttttgttcgttcgttgtggaggacgtcgggttttgcgggcgttggtcggtcgacggaagttcggaggggttttttggcgcgaattcgggatttgggggcgcgtcggagattcggcggtcgcggtatcgtagggcggggtcggcgttcgttaggcggggaaaggggacgttttttcggttcgtcggggttcgggaggtcgcgttggcgttaggattcgttttcggaagttcgcggagggagggcggtttgttggcggtaggggttcgttggggttagtcggggaggcggtttttacgttatttcggggttgtcgggcgggttgcgcgtattttttcggcggcgttaggttgtcgaggaacgcgttttttcggttttgcggagttagttggcgtattgggttcgaggggagggttcgcggggatcgggagggtcggggttgagcgtggaggattcgagttcgagggacgagt

SEQ ID NO: 14116 - DNA, 852 bp, Artificial Sequence
  chemically treated genomic DNA (Homo sapiens) CpG-island No: 14116
actcgtccctcgaactcgaatcctccacgctcaaccccgaccctcccgatccccgcgaaccctcccctcgaacccaatacgccaactaactccgcaaaaccgaaaaaacgcgttcctcgacaacctaacgccgccgaaaaaatacgcgcaacccgcccgacaaccccgaaataacgtaaaaaccgcctccccgactaaccccaacgaacccctaccgccaacaaaccgccctccctccgcgaacttccgaaaacgaatcctaacgccaacgcgacctcccgaaccccgacgaaccgaaaaaacgtcccctttccccgcctaacgaacgccgaccccgccctacgataccgcgaccgccgaatctccgacgcgcccccaaatcccgaattcgcgccaaaaaacccctccgaacttccgtcgaccgaccaacgcccgcaaaacccgacgtcctccacaacgaacgaacaaaaaacgaaaacccacgaccccgcgccctacgaccccgaacgaaacgacgccccgcgaacccgtctcgccgtctaccctaactacgacccgcgaccccgctacccaccgcccaccgcccgaccccgcccgccaacccccgcctacgcccgccgcgcccgctcctcacctacgacgcgccccgacccccaacgcaccgccttaaaccgactatatacaccgaaaattacgtctccgatccgaccccgcccccgcctcgaacgaacgcgaaaaaattacgaatcccgcgcctaaaacgaactctcctctcgcattaaaaaaaaaaaaacgccccgaaacctcctctcctaaaaccctaaacccccaaacgaaacgaccgaaacgaaa

SEQ ID NO: 14117 - DNA, 585 bp, Artificial Sequence
  chemically treated genomic DNA (Homo sapiens) CpG-island No: 14117
ggtttcgttagtagagggtacggtttcggtttcgttgtagtttcgggatttatcgaggtttttaggtttttacgttcgttttcgagcgcgttttcgttttcgcgttacgtgacgtggtcgcggaatttgagttgcggggtttaagtcgagttaaattcgttgtaggtggtcgcggcgggtgtaattataaaggttaattcgaaggagtcggggaggttcgtggagtcgatgtttttttttttaagttaggtcggttttcgttatttttttagtattcgtcgtttcggtttttttgagcgcgtgtatgaggtttttcgcgtggggaagtttcggtgattatgtaggggagaagagtgaggaagtttttggtgtttgggacgaggttagcgttgtcggcgcgttgttttagcgtttattatattttggtgcgggtcgacgggttttgggttttggtgggagtttcggttttcggttaaggtttggtcgggagcgttacgaattttcgcgtcgtttcgcgagagtttaagttaaagaatatggcgacgtttaatttgttaaaggtaagatttttattttagtttgggt

SEQ ID NO: 14118 - DNA, 585 bp, Artificial Sequence
  chemically treated genomic DNA (Homo sapiens) CpG-island No: 14118
acccaaactaaaataaaaatcttacctttaacaaattaaacgtcgccatattctttaacttaaactctcgcgaaacgacgcgaaaattcgtaacgctcccgaccaaaccttaaccgaaaaccgaaactcccaccaaaacccaaaacccgtcgacccgcaccaaaatataataaacgctaaaacaacgcgccgacaacgctaacctcgtcccaaacaccaaaaacttcctcactcttctcccctacataatcaccgaaacttccccacgcgaaaaacctcatacacgcgctcaaaaaaaccgaaacgacgaatactaaaaaaataacgaaaaccgacctaacttaaaaaaaaaaacatcgactccacgaacctccccgactccttcgaattaacctttataattacacccgccgcgaccacctacaacgaatttaactcgacttaaaccccgcaactcaaattccgcgaccacgtcacgtaacgcgaaaacgaaaacgcgctcgaaaacgaacgtaaaaacctaaaaacctcgataaatcccgaaactacaacgaaaccgaaaccgtaccctctactaacgaaacc

SEQ ID NO: 14119 - DNA, 585 bp, Artificial Sequence
  chemically treated genomic DNA (Homo sapiens) CpG-island No: 14119
atttaagttggagtgagggttttatttttaatagattagacgtcgttatgttttttaatttggattttcgcgagacgacgcgagaattcgtggcgttttcggttaggttttgatcggaggtcggagtttttattagggtttagggttcgtcggttcgtattagggtgtggtgggcgttggagtagcgcgtcgatagcgttgatttcgttttaagtattaggagtttttttattttttttttttatatggttatcggagtttttttacgcgaaagattttatgtacgcgtttaggaagatcggaacggcgaatgttgagaaggtaacgggagtcgatttgatttggaagaggaagtatcgattttacgagttttttcgattttttcggattagtttttgtggttgtattcgtcgcggttatttgtaacgaatttagttcggtttaggtttcgtagtttaggtttcgcggttacgttacgtgacgcgagggcggggacgcgttcgggagcgagcgtgggagtttggaagtttcggtgggtttcgaggttgtagcgaggtcgggatcgtgttttttgttggcgggatt

SEQ ID NO: 14120 - DNA, 585 bp, Artificial Sequence
  chemically treated genomic DNA (Homo sapiens) CpG-island No: 14120
aatcccgccaacaaaaaacacgatcccgacctcgctacaacctcgaaacccaccgaaacttccaaactcccacgctcgctcccgaacgcgtccccgccctcgcgtcacgtaacgtaaccgcgaaacctaaactacgaaacctaaaccgaactaaattcgttacaaataaccgcgacgaatacaaccacaaaaactaatccgaaaaaatcgaaaaaactcgtaaaatcgatacttcctcttccaaatcaaatcgactcccgttaccttctcaacattcgccgttccgatcttcctaaacgcgtacataaaatctttcgcgtaaaaaaactccgataaccatataaaaaaaaaaaataaaaaaactcctaatacttaaaacgaaatcaacgctatcgacgcgctactccaacgcccaccacaccctaatacgaaccgacgaaccctaaaccctaataaaaactccgacctccgatcaaaacctaaccgaaaacgccacgaattctcgcgtcgtctcgcgaaaatccaaattaaaaaacataacgacgtctaatctattaaaaataaaaccctcactccaacttaaat

SEQ ID NO: 14121 - DNA, 525 bp, Artificial Sequence
  chemically treated genomic DNA (Homo sapiens) CpG-island No: 14121
ttttatttcggttgtttttcgcgcgttttatttttcgtttttgtcggattcgtttttttgcgttgggtttagcgcgtcgttagggaaggggtcggagtttgggagttcgtttcgtcgtcgttcgtttttcgttcgtaggtttattcgtagcggttacgtgaaggatcgagcgtcgcgcgttaggcggggttttcgttagtacgaggagggtagagttcgttgcggttgtcgtttcgacgttcgcgtattttcgttcgtcgcgttcgtcgtcgcgatgttcggggtcggtttagtcgcggtggtgagttgtttgcgttcgtagttcggcgaggagtcgtagatttatgaggtaaggaggattttttggttgtgttcggagggcgttcggacggtagcgttttttgttttttcgttgtttttttggtgtcgggcgttttcgggatttttagggagaaagcgaattcgttggaagttacggtcggttgtagagaatgagggtttttgggggttagcgggattaggaat

SEQ ID NO: 14122 - DNA, 525 bp, Artificial Sequence
  chemically treated genomic DNA (Homo sapiens) CpG-island No: 14122
attcctaatcccgctaacccccaaaaaccctcattctctacaaccgaccgtaacttccaacgaattcgctttctccctaaaaatcccgaaaacgcccgacaccaaaaaaacaacgaaaaaacaaaaaacgctaccgtccgaacgccctccgaacacaaccaaaaaatcctccttacctcataaatctacgactcctcgccgaactacgaacgcaaacaactcaccaccgcgactaaaccgaccccgaacatcgcgacgacgaacgcgacgaacgaaaatacgcgaacgtcgaaacgacaaccgcaacgaactctaccctcctcgtactaacgaaaaccccgcctaacgcgcgacgctcgatccttcacgtaaccgctacgaataaacctacgaacgaaaaacgaacgacgacgaaacgaactcccaaactccgaccccttccctaacgacgcgctaaacccaacgcaaaaaaacgaatccgacaaaaacgaaaaataaaacgcgcgaaaaacaaccgaaataaaa

SEQ ID NO: 14123 - DNA, 525 bp, Artificial Sequence
  chemically treated genomic DNA (Homo sapiens) CpG-island No: 14123
gtttttagtttcgttgatttttaagggtttttattttttgtagtcggtcgtggtttttagcgggttcgttttttttttgggagtttcggaggcgttcggtattaggagggtaacgaaggggtaggaggcgttgtcgttcgggcgtttttcgagtatagttaggaagttttttttattttatgggtttgcggtttttcgtcgggttgcgggcgtaggtagtttattatcgcggttaggtcggtttcggatatcgcggcggcgggcgcggcgagcggggatgcgcgggcgtcggggcggtagtcgtaacggattttgtttttttcgtgttagcggaggtttcgtttggcgcgcggcgttcggttttttacgtgatcgttgcgggtgggtttgcgggcggaggacgggcgacggcggggcgggtttttaggtttcggttttttttttggcggcgcgttgggtttagcgtagggaagcggattcggtagggacggggagtgggacgcgcgaggggtagtcggggtaaga

SEQ ID NO: 14124 - DNA, 525 bp, Artificial Sequence
  chemically treated genomic DNA (Homo sapiens) CpG-island No: 14124
tcttaccccgactacccctcgcgcgtcccactccccgtccctaccgaatccgcttccctacgctaaacccaacgcgccgccaaaaaaaaaaccgaaacctaaaaacccgccccgccgtcgcccgtcctccgcccgcaaacccacccgcaacgatcacgtaaaaaaccgaacgccgcgcgccaaacgaaacctccgctaacacgaaaaaaacaaaatccgttacgactaccgccccgacgcccgcgcatccccgctcgccgcgcccgccgccgcgatatccgaaaccgacctaaccgcgataataaactacctacgcccgcaacccgacgaaaaaccgcaaacccataaaataaaaaaaacttcctaactatactcgaaaaacgcccgaacgacaacgcctcctaccccttcgttaccctcctaataccgaacgcctccgaaactcccaaaaaaaaaacgaacccgctaaaaaccacgaccgactacaaaaaataaaaacccttaaaaatcaacgaaactaaaaac

SEQ ID NO: 14125 - DNA, 719 bp, Artificial Sequence
  chemically treated genomic DNA (Homo sapiens) CpG-island No: 14125
aatgcgaaagtgaggggcgtgtgtgtagcgtgggcgcgtggaggcgtgtaaatggtcgggtgagtcgcgtgtgtgtatatgcggggcgtgcgatgcgatgcgtattcggagtggtcgggcgggtaagggcgtttagcgtgcgcggttgttcggtattcgttcgtgtgtaagcgcggcgcgtatggtgtaggagcgcggagtgcgtgagttttggggtttcgggtttagggttgagatgtggggttgcgtgcgttcgcgattagggtgcgatttcggtcgcgtacgggggtcggcggggtgcgtatttattcgggtttcgcggaggggtcgtcgtttcggttgggttttagttgtcggttcgtttttcgtagcgttacgtatttgcgtttagttcggtcgtcgcggtaacgtatatttttgtagtgtcgtcgggttttcgttttcgaggagcgcgggcgagtcgggggttcggcgggtcggggcggcggatcggagtgcgtcgtagttcgggtacgtttttaggagttcgtcgcgtttttttcgcgttcgttcgtttgttcgttcgtttttttttgaatttaaagtgataagttcgagcgttgtttttgtttttggggttcgagtcggagatttttaagcgcgttcgggatttagggacgttttgagtgtaattttaatttttcgtttttacgtttggggataggggtgggtggggacgt

SEQ ID NO: 14126 - DNA, 719 bp, Artificial Sequence
  chemically treated genomic DNA (Homo sapiens) CpG-island No: 14126
acgtccccacccacccctatccccaaacgtaaaaacgaaaaattaaaattacactcaaaacgtccctaaatcccgaacgcgcttaaaaatctccgactcgaaccccaaaaacaaaaacaacgctcgaacttatcactttaaattcaaaaaaaaacgaacgaacaaacgaacgaacgcgaaaaaaacgcgacgaactcctaaaaacgtacccgaactacgacgcactccgatccgccgccccgacccgccgaacccccgactcgcccgcgctcctcgaaaacgaaaacccgacgacactacaaaaatatacgttaccgcgacgaccgaactaaacgcaaatacgtaacgctacgaaaaacgaaccgacaactaaaacccaaccgaaacgacgacccctccgcgaaacccgaataaatacgcaccccgccgacccccgtacgcgaccgaaatcgcaccctaatcgcgaacgcacgcaaccccacatctcaaccctaaacccgaaaccccaaaactcacgcactccgcgctcctacaccatacgcgccgcgcttacacacgaacgaataccgaacaaccgcgcacgctaaacgcccttacccgcccgaccactccgaatacgcatcgcatcgcacgccccgcatatacacacacgcgactcacccgaccatttacacgcctccacgcgcccacgctacacacacgcccctcactttcgcatt

SEQ ID NO: 14127 - DNA, 719 bp, Artificial Sequence
  chemically treated genomic DNA (Homo sapiens) CpG-island No: 14127
acgtttttatttatttttgtttttaggcgtgggagcgaggggttggggttgtatttagggcgtttttggatttcggacgcgtttggggattttcggttcggattttaggagtagagatagcgttcgagtttgttattttaaatttaagagggagcgggcgggtaagcgggcgagcgcgagggaggcgcggcgggtttttgggagcgtgttcggattgcggcgtatttcggttcgtcgtttcggttcgtcgagttttcggttcgttcgcgtttttcggaggcgggagttcggcgatattgtaggggtgtgcgttgtcgcggcggtcgggttaggcgtaggtgcgtggcgttgcgggaggcgggtcggtagttggagtttagtcggagcggcggttttttcgcggagttcgggtgagtacgtatttcgtcgattttcgtgcgcggtcgggatcgtattttgatcgcggacgtacgtagttttatattttagttttgggttcgggattttagagtttacgtatttcgcgtttttgtattatgcgcgtcgcgtttgtatacgaacgaatgtcgggtaatcgcgtacgttgggcgtttttattcgttcggttatttcgagtgcgtatcgtatcgtacgtttcgtatgtgtatatacgcggtttattcggttatttatacgtttttacgcgtttacgttgtatatacgttttttattttcgtatt

SEQ ID NO: 14128 - DNA, 719 bp, Artificial Sequence
  chemically treated genomic DNA (Homo sapiens) CpG-island No: 14128
aatacgaaaataaaaaacgtatatacaacgtaaacgcgtaaaaacgtataaataaccgaataaaccgcgtatatacacatacgaaacgtacgatacgatacgcactcgaaataaccgaacgaataaaaacgcccaacgtacgcgattacccgacattcgttcgtatacaaacgcgacgcgcataatacaaaaacgcgaaatacgtaaactctaaaatcccgaacccaaaactaaaatataaaactacgtacgtccgcgatcaaaatacgatcccgaccgcgcacgaaaatcgacgaaatacgtactcacccgaactccgcgaaaaaaccgccgctccgactaaactccaactaccgacccgcctcccgcaacgccacgcacctacgcctaacccgaccgccgcgacaacgcacacccctacaatatcgccgaactcccgcctccgaaaaacgcgaacgaaccgaaaactcgacgaaccgaaacgacgaaccgaaatacgccgcaatccgaacacgctcccaaaaacccgccgcgcctccctcgcgctcgcccgcttacccgcccgctccctcttaaatttaaaataacaaactcgaacgctatctctactcctaaaatccgaaccgaaaatccccaaacgcgtccgaaatccaaaaacgccctaaatacaaccccaacccctcgctcccacgcctaaaaacaaaaataaataaaaacgt

SEQ ID NO: 14129 - DNA, 700 bp, Artificial Sequence
  chemically treated genomic DNA (Homo sapiens) CpG-island No: 14129
acgggaggcggagtgcgagagtaaggaataaggaaagttttcgttttatacgtcgcggttttttgtagagttgagttatatttagtacgatggggataatttgggttttcgattttgatagatttgggttcgaatttttagggatttcgcgcgaggcgttttagttagtttttttatttgtaaaatgggttcgagagtaagaatgaggtagttcgtaggcggacgttgcggaggggcgttcgggggttgtagtcgggggcgggttcgggggcgggtttagtcggtcgagttttcgcgcgagggggaggggcgtcgttcgttgcgtcgcgtcgcgtatcgcgtatagttcgtcgttgttttttttagtcgttattcgcggagttcgcgtcgtttttgcgcgcgcgatttttatataagcgtttttcgtagcggtgtcggcgtacgtttattcgtttcgattcgtcgcgggaagaggatcgtgcggagcgcggcggatatttattttttcgtcgtcgttagttttcgtcgtcgtttttatcgttgttgtttttattgatagagaatagttgcggttttcgtgtaatcgaatttgttgtagtttcggtttcgttttacggattttttattggtttagatagtttaatttttttcgttattgggtagtgtttttcgttatttttcgtttttaggttttggattt

SEQ ID NO: 14130 - DNA, 700 bp, Artificial Sequence
  chemically treated genomic DNA (Homo sapiens) CpG-island No: 14130
aaatccaaaacctaaaaacgaaaaataacgaaaaacactacccaataacgaaaaaaattaaactatctaaaccaataaaaaatccgtaaaacgaaaccgaaactacaacaaattcgattacacgaaaaccgcaactattctctatcaataaaaacaacaacgataaaaacgacgacgaaaactaacgacgacgaaaaaataaatatccgccgcgctccgcacgatcctcttcccgcgacgaatcgaaacgaataaacgtacgccgacaccgctacgaaaaacgcttatataaaaatcgcgcgcgcaaaaacgacgcgaactccgcgaataacgactaaaaaaaacaacgacgaactatacgcgatacgcgacgcgacgcaacgaacgacgcccctccccctcgcgcgaaaactcgaccgactaaacccgcccccgaacccgcccccgactacaacccccgaacgcccctccgcaacgtccgcctacgaactacctcattcttactctcgaacccattttacaaataaaaaaactaactaaaacgcctcgcgcgaaatccctaaaaattcgaacccaaatctatcaaaatcgaaaacccaaattatccccatcgtactaaatataactcaactctacaaaaaaccgcgacgtataaaacgaaaactttccttattccttactctcgcactccgcctcccgt

SEQ ID NO: 14131 - DNA, 700 bp, Artificial Sequence
  chemically treated genomic DNA (Homo sapiens) CpG-island No: 14131
gagtttagagtttaggggcgaggagtgacggagaatattgtttaataacgggaggggttgggttgtttgggttaataggaagttcgtaaggcggggtcgggattgtagtaagttcggttgtacggagatcgtagttgttttttgttagtggaggtagtagcggtagaggcggcggcgaggattggcgacggcgaggaggtgagtgttcgtcgcgtttcgtacggtttttttttcgcggcgggtcggagcgggtggacgtgcgtcggtatcgttgcgagggacgtttatgtaagggtcgcgcgcgtaaaggcggcgcgggtttcgcgagtgacggttggaggagatagcgacgggttgtgcgcggtgcgcgacgcgacgtagcggacggcgtttttttttttcgcgcgggggttcggtcggttggattcgttttcggattcgttttcggttgtagttttcgagcgttttttcgtagcgttcgtttgcgggttgttttatttttgttttcgggtttattttgtagatggagaaattgattaaagcgtttcgcgcgaggtttttgagggttcgaatttaagtttgttaggatcgggagtttaagttgtttttatcgtattggatgtggtttagttttgtaggaagtcgcggcgtgtaaggcgagggttttttttgttttttgttttcgtatttcgtttttcgt

SEQ ID NO: 14132 - DNA, 700 bp, Artificial Sequence
  chemically treated genomic DNA (Homo sapiens) CpG-island No: 14132
acgaaaaacgaaatacgaaaacaaaaaacaaaaaaaaccctcgccttacacgccgcgacttcctacaaaactaaaccacatccaatacgataaaaacaacttaaactcccgatcctaacaaacttaaattcgaaccctcaaaaacctcgcgcgaaacgctttaatcaatttctccatctacaaaataaacccgaaaacaaaaataaaacaacccgcaaacgaacgctacgaaaaaacgctcgaaaactacaaccgaaaacgaatccgaaaacgaatccaaccgaccgaacccccgcgcgaaaaaaaaaaacgccgtccgctacgtcgcgtcgcgcaccgcgcacaacccgtcgctatctcctccaaccgtcactcgcgaaacccgcgccgcctttacgcgcgcgacccttacataaacgtccctcgcaacgataccgacgcacgtccacccgctccgacccgccgcgaaaaaaaaaccgtacgaaacgcgacgaacactcacctcctcgccgtcgccaatcctcgccgccgcctctaccgctactacctccactaacaaaaaacaactacgatctccgtacaaccgaacttactacaatcccgaccccgccttacgaacttcctattaacccaaacaacccaacccctcccgttattaaacaatattctccgtcactcctcgcccctaaactctaaactc

SEQ ID NO: 14133 - DNA, 727 bp, Artificial Sequence
  chemically treated genomic DNA (Homo sapiens) CpG-island No: 14133
  unsure (224)
gtagtttgttattacgttaagatgttagcgattttgcgcgttgttattttattgcgttaaatcgtcgtttagttgtaatatatagcggttagtttgagtatttagttgatcgttatcggtttttgaacgttcgtgtttttcgatatgacgtatttatatattgtttgtcgatttttgagaatgtagtgaatttgtatattgcggtttatttagacggtcgtgtnaacgatgggttaaatagcgagttggttgcgggtaatgttgttgatatagttttcgtttttcgggcgataaattgatgggtttttcggatttataatagggggattattgatgggatcgggtgtattcgttggcgttacgtcgttttatttattggttagattttagtttttttcgttattttttttttttttagttagcgtgtagacgtaagttttagtttcgatagtttcggtggttagcgcgaagttatttgtagaattatcgttaattttaatgagtttaatatcgttgatcgtttgtgtatcgacgtcgttaatgttattaattcgaacgcgagtgtttttttgggtatcgttttttacgtttattttagcggtgggcgaattatcgtcgtttagcgtcgcgttgaacgttattaggttattgttttcggtatagttgtcgttaacggttagtatatttaagaaaaatttttttcgttatttatttgaatcggtcgtta

SEQ ID NO: 14134 - DNA, 727 bp, Artificial Sequence
  chemically treated genomic DNA (Homo sapiens) CpG-island No: 14134
  unsure (504)
taacgaccgattcaaataaataacgaaaaaaatttttcttaaatatactaaccgttaacgacaactataccgaaaacaataacctaataacgttcaacgcgacgctaaacgacgataattcgcccaccgctaaaataaacgtaaaaaacgatacccaaaaaaacactcgcgttcgaattaataacattaacgacgtcgatacacaaacgatcaacgatattaaactcattaaaattaacgataattctacaaataacttcgcgctaaccaccgaaactatcgaaactaaaacttacgtctacacgctaactaaaaaaaaaaaaaataacgaaaaaaactaaaatctaaccaataaataaaacgacgtaacgccaacgaatacacccgatcccatcaataatccccctattataaatccgaaaaacccatcaatttatcgcccgaaaaacgaaaactatatcaacaacattacccgcaaccaactcgctatttaacccatcgttnacacgaccgtctaaataaaccgcaatatacaaattcactacattctcaaaaatcgacaaacaatatataaatacgtcatatcgaaaaacacgaacgttcaaaaaccgataacgatcaactaaatactcaaactaaccgctatatattacaactaaacgacgatttaacgcaataaaataacaacgcgcaaaatcgctaacatcttaacgtaataacaaactac

SEQ ID NO: 14135 - DNA, 727 bp, Artificial Sequence
  chemically treated genomic DNA (Homo sapiens) CpG-island No: 14135
  unsure (504)
tggcggtcggtttaaatgaatagcgaagggggttttttttgaatgtattgatcgttaacggtaattgtgtcggaaataatggtttgatgacgtttaacgcgacgttgggcggcgataattcgtttatcgttaagatgaacgtgaaaggcgatatttaagggaatattcgcgttcgggttgataatattggcggcgtcggtgtataaacggttaacggtattgaatttattgaggttggcggtaattttgtaggtaatttcgcgttgattatcggaattgtcgaagttggggtttacgtttatacgttggttaaagggaaggggaatgacgagaaaaattgggatttgattagtaaatgggacggcgtaacgttagcggatatattcgattttattaataatttttttgttgtggattcgggaggtttattagtttatcgttcggagggcggaagttatattagtaatattgttcgtagttaattcgttgtttaatttatcgttnatacgatcgtttgggtgagtcgtagtatatagatttattgtatttttaggggtcggtaagtagtatgtggatgcgttatgtcggagggtacgaacgtttaagggtcggtgacggttagttaaatatttaggttaatcgttatgtattgtagttaggcggcgatttggcgtagtggagtagtaacgcgtaggatcgttggtattttggcgtgatggtaggttat

SEQ ID NO: 14136 - DNA, 727 bp, Artificial Sequence
  chemically treated genomic DNA (Homo sapiens) CpG-island No: 14136
  unsure (224)
ataacctaccatcacgccaaaataccaacgatcctacgcgttactactccactacgccaaatcgccgcctaactacaatacataacgattaacctaaatatttaactaaccgtcaccgacccttaaacgttcgtaccctccgacataacgcatccacatactacttaccgacccctaaaaatacaataaatctatatactacgactcacccaaacgatcgtatnaacgataaattaaacaacgaattaactacgaacaatattactaatataacttccgccctccgaacgataaactaataaacctcccgaatccacaacaaaaaaattattaataaaatcgaatatatccgctaacgttacgccgtcccatttactaatcaaatcccaatttttctcgtcattccccttccctttaaccaacgtataaacgtaaaccccaacttcgacaattccgataatcaacgcgaaattacctacaaaattaccgccaacctcaataaattcaataccgttaaccgtttatacaccgacgccgccaatattatcaacccgaacgcgaatattcccttaaatatcgcctttcacgttcatcttaacgataaacgaattatcgccgcccaacgtcgcgttaaacgtcatcaaaccattatttccgacacaattaccgttaacgatcaatacattcaaaaaaaacccccttcgctattcatttaaaccgaccgcca

SEQ ID NO: 14137 - DNA, 880 bp, Artificial Sequence
  chemically treated genomic DNA (Homo sapiens) CpG-island No: 14137
atattgttcgcggttatcggggaggttttgtttggaagtttttgtttgtcgcgggcgcggttaggcgggttttatgagggggattttttcggtaatcgagtttttcggtttgggtcgcggggttacggtagtgattgcgtttatacgcggtagtcggggaaggggcgaggggtcggttaggggtcgcggggttagttttcgggcgcgggttaggcggggtcgcgtttgtagttcgttttcggagttgtaggtggggttgtgcggttgtttgtttttaggaagttttatgtgttttcgtcggtcgcgtcggtttttaggatatagtgcggatcggtcgggcgttaaaggcgttgacgtaattgcgggcggcgtagggtaggggtagttagggagtagcggcggtagagatagggttgggcgggcgtcgtttgcggagagtatcgggaggcgggttttgcgtggaggtcgcgcgtagtagcggcgacgattttatttgggtcgcgggggatagcgtagggttatggaggaggcggtcgtagtttcggtaagggcgattagcgcgcgtacgaattcgcggtttggatttttcgggcgattcgggttcggtatacgggggttgcgggagtcgagtcgtattatcgcgtttggggtttcggggaatagggtcgcgcgtttgtcgggtttattgcgtttgttagtcgggttttttatttcgttcgagttcgagcgttggcggaacggttgttttcgtttcgggtcgttttacgttaagatttttgcgttcgggttttttgttttcgttttagtcgttgaattttatatttgcgtttttttattcgaggtttttttttttgtttggcgttcggtttgtgggtttttt

SEQ ID NO: 14138 - DNA, 880 bp, Artificial Sequence
  chemically treated genomic DNA (Homo sapiens) CpG-island No: 14138
aaaaaacccacaaaccgaacgccaaacaaaaaaaaaaacctcgaataaaaaaacgcaaatataaaattcaacgactaaaacgaaaacaaaaaacccgaacgcaaaaatcttaacgtaaaacgacccgaaacgaaaacaaccgttccgccaacgctcgaactcgaacgaaataaaaaacccgactaacaaacgcaataaacccgacaaacgcgcgaccctattccccgaaaccccaaacgcgataatacgactcgactcccgcaacccccgtataccgaacccgaatcgcccgaaaaatccaaaccgcgaattcgtacgcgcgctaatcgcccttaccgaaactacgaccgcctcctccataaccctacgctatcccccgcgacccaaataaaatcgtcgccgctactacgcgcgacctccacgcaaaacccgcctcccgatactctccgcaaacgacgcccgcccaaccctatctctaccgccgctactccctaactacccctaccctacgccgcccgcaattacgtcaacgcctttaacgcccgaccgatccgcactatatcctaaaaaccgacgcgaccgacgaaaacacataaaacttcctaaaaacaaacaaccgcacaaccccacctacaactccgaaaacgaactacaaacgcgaccccgcctaacccgcgcccgaaaactaaccccgcgacccctaaccgacccctcgccccttccccgactaccgcgtataaacgcaatcactaccgtaaccccgcgacccaaaccgaaaaactcgattaccgaaaaaatccccctcataaaacccgcctaaccgcgcccgcgacaaacaaaaacttccaaacaaaacctccccgataaccgcgaacaatat

SEQ ID NO: 14139 - DNA, 880 bp, Artificial Sequence
  chemically treated genomic DNA (Homo sapiens) CpG-island No: 14139
gagggatttataggtcgagcgttaagtagagaaaagagtttcgggtggggggacgtagatgtagggtttagcggttggggcgggggtaggaagttcggacgtaagaattttggcgtggggcggttcggggcggggataatcgtttcgttagcgttcgggttcgagcggagtggggggttcggttggtaagcgtagtaggttcggtagacgcgcggttttgtttttcggagttttaggcgcggtagtacggttcggttttcgtagttttcgtgtgtcgggttcgggtcgttcggggaatttaggtcgcgagttcgtgcgcgcgttggtcgtttttatcggagttgcggtcgttttttttatggttttgcgttgtttttcgcggtttagataaagtcgtcgtcgttgttgcgcgcggtttttacgtagggttcgtttttcggtgtttttcgtaggcggcgttcgtttagttttgtttttgtcgtcgttgttttttgattgtttttgttttgcgtcgttcgtagttgcgttaacgtttttagcgttcggtcggttcgtattgtattttgggagtcggcgcggtcgacgaaggtatatgaggttttttggaggtaggtagtcgtatagttttatttgtagtttcggaggcgaattgtaggcgcgatttcgtttggttcgcgttcgggagttgatttcgcgatttttggtcgatttttcgtttttttttcgattgtcgcgtgtgggcgtagttattgtcgtggtttcgcgatttaggtcgagggattcggttatcgaaagagttttttttataagattcgtttggtcgcgttcgcggtaagtaggggtttttaggtagggttttttcggtgatcgcgggtagtgt

SEQ ID NO: 14140 - DNA, 880 bp, Artificial Sequence
  chemically treated genomic DNA (Homo sapiens) CpG-island No: 14140
acactacccgcgatcaccgaaaaaaccctacctaaaaacccctacttaccgcgaacgcgaccaaacgaatcttataaaaaaaactctttcgataaccgaatccctcgacctaaatcgcgaaaccacgacaataactacgcccacacgcgacaatcgaaaaaaaaacgaaaaatcgaccaaaaatcgcgaaatcaactcccgaacgcgaaccaaacgaaatcgcgcctacaattcgcctccgaaactacaaataaaactatacgactacctacctccaaaaaacctcatataccttcgtcgaccgcgccgactcccaaaatacaatacgaaccgaccgaacgctaaaaacgttaacgcaactacgaacgacgcaaaacaaaaacaatcaaaaaacaacgacgacaaaaacaaaactaaacgaacgccgcctacgaaaaacaccgaaaaacgaaccctacgtaaaaaccgcgcgcaacaacgacgacgactttatctaaaccgcgaaaaacaacgcaaaaccataaaaaaaacgaccgcaactccgataaaaacgaccaacgcgcgcacgaactcgcgacctaaattccccgaacgacccgaacccgacacacgaaaactacgaaaaccgaaccgtactaccgcgcctaaaactccgaaaaacaaaaccgcgcgtctaccgaacctactacgcttaccaaccgaaccccccactccgctcgaacccgaacgctaacgaaacgattatccccgccccgaaccgccccacgccaaaattcttacgtccgaacttcctacccccgccccaaccgctaaaccctacatctacgtccccccacccgaaactcttttctctacttaacgctcgacctataaatccctc

SEQ ID NO: 14141 - DNA, 788 bp, Artificial Sequence
  chemically treated genomic DNA (Homo sapiens) CpG-island No: 14141
  unsure (325, 374, 384, 780)
gtcgcgagtttatggtgcgggcgaggcgagggcgattgacggcgtgggtttggagggcggcggtataggtattcgcgttgggatcgcgggtacgatcggcgtgagcgcgtttagttttagtgtttggcgttcgcgtttcggtttagtttaatggttgcgtttttcgcgttatcgcgttacgttgtttatttagggttgcggggagcgtttgttatgatttattagatagcgacgaggttgcgattcggcggttggttttttttttttttttttttttaggcgttttcgtttttacgttcgtagcgtacgtttcgcgcgatatcgnttcggggatcgcggcgagtggggaggagtagcgtcgtcgtcgcgtgttncgggtttcgngtattgttttgcggttgcggcgtattttagttttgttgtcgcggggtgtttgtgggtcggggaggggacgcggcgtttaggttggcgcgtggttgttgtggcggggcgggtgtggggcgtcggcgaggggttcggttggtgtcgttgcggttgggttgcggttggggcgcgcgttttttttgttgcggcggtttcgggggagtggcgggttgtttttgcgtttgcggggtatgagtttttttgtggggggtaagtcgatcgtgttgtatggggtggtttggtcggttgtttttgtttttggtgttcggcgtttcgaatgttatgttttttggaattttggttgggtgggtagtttggagtgttagttgtaggatggggtgagcgttcgttgtagtnatttggtt

SEQ ID NO: 14142 - DNA, 788 bp, Artificial Sequence
  chemically treated genomic DNA (Homo sapiens) CpG-island No: 14142
  unsure (9, 405, 415, 464)
aaccaaatnactacaacgaacgctcaccccatcctacaactaacactccaaactacccacccaaccaaaattccaaaaaacataacattcgaaacgccgaacaccaaaaacaaaaacaaccgaccaaaccaccccatacaacacgatcgacttaccccccacaaaaaaactcataccccgcaaacgcaaaaacaacccgccactcccccgaaaccgccgcaacaaaaaaaacgcgcgccccaaccgcaacccaaccgcaacgacaccaaccgaacccctcgccgacgccccacacccgccccgccacaacaaccacgcgccaacctaaacgccgcgtcccctccccgacccacaaacaccccgcgacaacaaaactaaaatacgccgcaaccgcaaaacaatacncgaaacccgnaacacgcgacgacgacgctactcctccccactcgccgcgatccccgaancgatatcgcgcgaaacgtacgctacgaacgtaaaaacgaaaacgcctaaaaaaaaaaaaaaaaaaaaaaccaaccgccgaatcgcaacctcgtcgctatctaataaatcataacaaacgctccccgcaaccctaaataaacaacgtaacgcgataacgcgaaaaacgcaaccattaaactaaaccgaaacgcgaacgccaaacactaaaactaaacgcgctcacgccgatcgtacccgcgatcccaacgcgaatacctataccgccgccctccaaacccacgccgtcaatcgccctcgcctcgcccgcaccataaactcgcgac

SEQ ID NO: 14143 - DNA, 788 bp, Artificial Sequence
  chemically treated genomic DNA (Homo sapiens) CpG-island No: 14143
  unsure (9, 405, 415, 464)
aattagatnattgtaacgaacgtttattttattttatagttagtattttaaattatttatttaattaagattttaaagagtatgatattcgaggcgtcgaatattagaaataagaatagtcggttaaattattttatatagtacgatcggtttattttttatagaagagtttatatttcgtaaacgtaaaagtaattcgttattttttcgaaatcgtcgtagtaaaggaagcgcgcgttttagtcgtagtttagtcgtaacgatattagtcgaatttttcgtcggcgttttatattcgtttcgttatagtagttacgcgttagtttgagcgtcgcgtttttttttcgatttataggtatttcgcggtaataaggttgaggtacgtcgtagtcgtaggataatgtncggagttcgngatacgcggcggcggcgttgtttttttttattcgtcgcggttttcgagncggtgtcgcgcggggcgtgcgttacggacgtggaggcgggggcgtttggggggggaggggaggggaggattagtcgtcgagtcgtagtttcgtcgttgtttggtgagttatggtaggcgtttttcgtagttttggatggatagcgtagcgcggtggcgcggggggcgtagttattgggttgggtcggggcgcgagcgttaggtattagagttgagcgcgtttacgtcgatcgtattcgcggttttagcgcgggtgtttgtgtcgtcgttttttaagtttacgtcgttagtcgttttcgtttcgttcgtattatgaattcgcggt

SEQ ID NO: 14144 - DNA, 788 bp, Artificial Sequence
  chemically treated genomic DNA (Homo sapiens) CpG-island No: 14144
  unsure (325, 374, 384, 780)
accgcgaattcataatacgaacgaaacgaaaacgactaacgacgtaaacttaaaaaacgacgacacaaacacccgcgctaaaaccgcgaatacgatcgacgtaaacgcgctcaactctaatacctaacgctcgcgccccgacccaacccaataactacgccccccgcgccaccgcgctacgctatccatccaaaactacgaaaaacgcctaccataactcaccaaacaacgacgaaactacgactcgacgactaatcctcccctcccctccccccccaaacgcccccgcctccacgtccgtaacgcacgccccgcgcgacaccgnctcgaaaaccgcgacgaataaaaaaaaacaacgccgccgccgcgtatcncgaactccgnacattatcctacgactacgacgtacctcaaccttattaccgcgaaatacctataaatcgaaaaaaaaacgcgacgctcaaactaacgcgtaactactataacgaaacgaatataaaacgccgacgaaaaattcgactaatatcgttacgactaaactacgactaaaacgcgcgcttcctttactacgacgatttcgaaaaaataacgaattacttttacgtttacgaaatataaactcttctataaaaaataaaccgatcgtactatataaaataatttaaccgactattcttatttctaatattcgacgcctcgaatatcatactctttaaaatcttaattaaataaataatttaaaatactaactataaaataaaataaacgttcgttacaatnatctaatt

SEQ ID NO: 14145 - DNA, 508 bp, Artificial Sequence
  chemically treated genomic DNA (Homo sapiens) CpG-island No: 14145
cgtggtcggggcgtattgcgcgtcgacggcggggggtcgaagggtacgtagtgtcggcgttatggcggttttcgcgtacggttttgtttgggggtcgttgcggtttggtattttcggtttgtgttgtcgtcggtcgtttttgggtttgtacgcgcgtatgcggcggttgttcgggtcggaggtgtttgggcggagcgtggttgcggttagcggatcgggcgtttggggtattgattattattgtttggagttgttgcggtgagcgagtacgattttttttggcgcggcgggaagcggggtttcggggtgggagcggttgcgtttcgcgtttggtttgacgtttgagcgagcggatcggcgtttttttcgtgtttttttgggtgtgcgttttagtgggcgtcgggtgcgggtgtgcggaggtagcgggtttataggaatatttatatgggttataaaattatggtaaaattttttcgattgtttacgtttgtcgttttatttgaatttt

SEQ ID NO: 14146 - DNA, 508 bp, Artificial Sequence
  chemically treated genomic DNA (Homo sapiens) CpG-island No: 14146
aaaattcaaataaaacgacaaacgtaaacaatcgaaaaaattttaccataattttataacccatataaatattcctataaacccgctacctccgcacacccgcacccgacgcccactaaaacgcacacccaaaaaaacacgaaaaaaacgccgatccgctcgctcaaacgtcaaaccaaacgcgaaacgcaaccgctcccaccccgaaaccccgcttcccgccgcgccaaaaaaaatcgtactcgctcaccgcaacaactccaaacaataataatcaataccccaaacgcccgatccgctaaccgcaaccacgctccgcccaaacacctccgacccgaacaaccgccgcatacgcgcgtacaaacccaaaaacgaccgacgacaacacaaaccgaaaataccaaaccgcaacgacccccaaacaaaaccgtacgcgaaaaccgccataacgccgacactacgtacccttcgaccccccgccgtcgacgcgcaatacgccccgaccacg

SEQ ID NO: 14147 - DNA, 508 bp, Artificial Sequence
  chemically treated genomic DNA (Homo sapiens) CpG-island No: 14147
aaggtttagataaggcgataagcgtgggtagtcgaaggaattttgttataattttgtgatttatgtgaatgtttttgtgggttcgttgttttcgtatattcgtattcgacgtttattagaacgtatatttagaggggtacgaggaaggcgtcggttcgttcgtttaaacgttaggttagacgcgaggcgtagtcgtttttatttcgggatttcgtttttcgtcgcgttagggaaggtcgtgttcgtttatcgtagtagttttaggtagtagtggttagtgttttaggcgttcggttcgttggtcgtagttacgtttcgtttagatattttcggttcgggtagtcgtcgtatgcgcgcgtatagatttagaggcggtcggcggtagtataggtcggggatgttaagtcgtaacggtttttagatagagtcgtgcgcggaggtcgttatgacgtcggtattgcgtgtttttcgatttttcgtcgtcggcgcgtagtacgtttcggttacg

SEQ ID NO: 14148 - DNA, 508 bp, Artificial Sequence
  chemically treated genomic DNA (Homo sapiens) CpG-island No: 14148
cgtaaccgaaacgtactacgcgccgacgacgaaaaatcgaaaaacacgcaataccgacgtcataacgacctccgcgcacgactctatctaaaaaccgttacgacttaacatccccgacctatactaccgccgaccgcctctaaatctatacgcgcgcatacgacgactacccgaaccgaaaatatctaaacgaaacgtaactacgaccaacgaaccgaacgcctaaaacactaaccactactacctaaaactactacgataaacgaacacgaccttccctaacgcgacgaaaaacgaaatcccgaaataaaaacgactacgcctcgcgtctaacctaacgtttaaacgaacgaaccgacgccttcctcgtacccctctaaatatacgttctaataaacgtcgaatacgaatatacgaaaacaacgaacccacaaaaacattcacataaatcacaaaattataacaaaattccttcgactacccacgcttatcgccttatctaaacctt

SEQ ID NO: 14149 - DNA, 995 bp, Artificial Sequence
  chemically treated genomic DNA (Homo sapiens) CpG-island No: 14149
ttttaacgcgtcgcggagcgcgtttcgattttatatatggataagtttcgttcgcggtcggtttgagtgggtgtggttttcgttaaaggtttcgtttttagagcgcgtcgcgaggggcgcgaggggcggggcgagggaattggtaagaaagggcggggagcgaggggtgtgggtgtgttcgtgttcgcgcgttcgcgttcggagtgtggacgggggcgcgtcgtgcgcgcgtaggggagaggttagtttaggtagtcgttgtcgggttcgattggaggggcgggggagttatttgcgagcggttgcgttggcggttagttcgtttatcgcgtttggatcgcgtcggttgcgcggggttgcggatagtatatattttggaagtttcggcggggaacgggtagagttcgcgttttgcgttcgcgattaggaggatcggattttcgttttcgttgtcgtcgtcgtcgtcgttcgcggtcgtcggggtaggtgaagttcgggtgggtggttcgtcggtttttgacgggtcgggaggggagacgcgaaatttttcgggcgttttttttcgcggtttcggagtcgtcgtagcgtcgggaggtgtcgtcgtcgcgggcggtggcggtcgacgttatgttggggtttgtgagaaacggggcgttttcggtcgtttttttcgcgtcggggtcggttcgcgggttagttgtcgtcgtcgtttcgttagttcgggagcgagtcgcgttcgttcgtaggacgtcgtcgtcgtcgcggggggacgggggtcgtcgggtagggttcggtttacgggtttgcggggcgggggtcggcggacgcgggaaggagtttcgaggtcgggcgagaagttgtggggtttgaggacgggggttttggatacggtcgggggcgttttagggtcgcgataaatttttggtcgaaaagtttgtagggtttgcgtgtcggggattttatgatttgaattatatatttgtatgttatttggg

SEQ ID NO: 14150 - DNA, 995 bp, Artificial Sequence
  chemically treated genomic DNA (Homo sapiens) CpG-island No: 14150
cccaaataacatacaaatatataattcaaatcataaaatccccgacacgcaaaccctacaaacttttcgaccaaaaatttatcgcgaccctaaaacgcccccgaccgtatccaaaacccccgtcctcaaaccccacaacttctcgcccgacctcgaaactccttcccgcgtccgccgacccccgccccgcaaacccgtaaaccgaaccctacccgacgacccccgtccccccgcgacgacgacgacgtcctacgaacgaacgcgactcgctcccgaactaacgaaacgacgacgacaactaacccgcgaaccgaccccgacgcgaaaaaaacgaccgaaaacgccccgtttctcacaaaccccaacataacgtcgaccgccaccgcccgcgacgacgacacctcccgacgctacgacgactccgaaaccgcgaaaaaaaacgcccgaaaaatttcgcgtctcccctcccgacccgtcaaaaaccgacgaaccacccacccgaacttcacctaccccgacgaccgcgaacgacgacgacgacgacaacgaaaacgaaaatccgatcctcctaatcgcgaacgcaaaacgcgaactctacccgttccccgccgaaacttccaaaatatatactatccgcaaccccgcgcaaccgacgcgatccaaacgcgataaacgaactaaccgccaacgcaaccgctcgcaaataactcccccgcccctccaatcgaacccgacaacgactacctaaactaacctctcccctacgcgcgcacgacgcgcccccgtccacactccgaacgcgaacgcgcgaacacgaacacacccacacccctcgctccccgccctttcttaccaattccctcgccccgcccctcgcgcccctcgcgacgcgctctaaaaacgaaacctttaacgaaaaccacacccactcaaaccgaccgcgaacgaaacttatccatatataaaatcgaaacgcgctccgcgacgcgttaaaa

SEQ ID NO: 14151 - DNA, 995 bp, Artificial Sequence
  chemically treated genomic DNA (Homo sapiens) CpG-island No: 14151
tttaagtgatatataaatatgtagtttaggttataaggttttcgatacgtagattttgtaaatttttcggttagaaatttgtcgcgattttgagacgttttcggtcgtgtttaggattttcgtttttaggttttataatttttcgttcggtttcggggttttttttcgcgttcgtcggttttcgtttcgtagattcgtggatcggattttattcggcggttttcgttttttcgcggcggcggcggcgttttacgggcgggcgcggttcgttttcgggttggcgggacggcggcggtaattggttcgcgggtcggtttcggcgcgaggggagcggtcgggagcgtttcgttttttatagattttaatatggcgtcggtcgttatcgttcgcgacgacgatatttttcggcgttgcgacggtttcgggatcgcgggaggaagcgttcggaaagtttcgcgttttttttttcggttcgttaggagtcggcggattatttattcgggttttatttatttcgacggtcgcgggcggcggcggcggcgatagcgaaggcgaaggttcgatttttttggtcgcggacgtagggcgcggattttgttcgtttttcgtcggggtttttagggtgtgtgttgttcgtagtttcgcgtagtcggcgcgatttagacgcggtgggcgggttggtcgttagcgtagtcgttcgtaggtgattttttcgtttttttagtcgaattcgataacggttgtttgggttggttttttttttgcgcgcgtacggcgcgttttcgtttatatttcgggcgcgagcgcgcgggtacgagtatatttatatttttcgtttttcgtttttttttgttagttttttcgtttcgtttttcgcgtttttcgcgacgcgttttaggggcggggtttttggcggaggttatatttatttaggtcggtcgcgggcggagtttgtttatgtgtgaggtcgggacgcgtttcgcgacgcgttgagg

SEQ ID NO: 14152 - DNA, 995 bp, Artificial Sequence
  chemically treated genomic DNA (Homo sapiens) CpG-island No: 14152
cctcaacgcgtcgcgaaacgcgtcccgacctcacacataaacaaactccgcccgcgaccgacctaaataaatataacctccgccaaaaaccccgcccctaaaacgcgtcgcgaaaaacgcgaaaaacgaaacgaaaaaactaacaaaaaaaaacgaaaaacgaaaaatataaatatactcgtacccgcgcgctcgcgcccgaaatataaacgaaaacgcgccgtacgcgcgcaaaaaaaaaaccaacccaaacaaccgttatcgaattcgactaaaaaaacgaaaaaatcacctacgaacgactacgctaacgaccaacccgcccaccgcgtctaaatcgcgccgactacgcgaaactacgaacaacacacaccctaaaaaccccgacgaaaaacgaacaaaatccgcgccctacgtccgcgaccaaaaaaatcgaaccttcgccttcgctatcgccgccgccgccgcccgcgaccgtcgaaataaataaaacccgaataaataatccgccgactcctaacgaaccgaaaaaaaaaacgcgaaactttccgaacgcttcctcccgcgatcccgaaaccgtcgcaacgccgaaaaatatcgtcgtcgcgaacgataacgaccgacgccatattaaaatctataaaaaacgaaacgctcccgaccgctcccctcgcgccgaaaccgacccgcgaaccaattaccgccgccgtcccgccaacccgaaaacgaaccgcgcccgcccgtaaaacgccgccgccgccgcgaaaaaacgaaaaccgccgaataaaatccgatccacgaatctacgaaacgaaaaccgacgaacgcgaaaaaaaaccccgaaaccgaacgaaaaattataaaacctaaaaacgaaaatcctaaacacgaccgaaaacgtctcaaaatcgcgacaaatttctaaccgaaaaatttacaaaatctacgtatcgaaaaccttataacctaaactacatatttatatatcacttaaa

SEQ ID NO: 14153 - DNA, 825 bp, Artificial Sequence
  chemically treated genomic DNA (Homo sapiens) CpG-island No: 14153
cggcggatcggggtaaggaaagggtcgaatagttattatgttattttggggtcgtttttttgattggttcgagtttttttagttcgagtcgcggcgttttaaggaagggggcggagtttttatgttgcgttattatttttttcgatatttcgtcggtgttttttaatttagttatttataagtttatttcgagaggttttgtgtgacgttacgatacgttttcgttaatcgcggcggcgaggggcgggattttacggtttttttatcgtttttattttgtgttttttcgaattttttttgtttttttttttttttttcgttttttttttttttagttcggttttaaaagacgcgttgtttaatgaataatagggtcgatttagagtggcggtcgcgtttattaattcgcggacggcgagggcggagcgttcgtaacgagtttttgacgtcgggcggcgtgtgacgtagtcgggttttttgcgcgttgcgttcgaagcggcggtcggtggtaggggtggtagcggcggcggcgacggtttcgtgggggtcgcgcgttgttttgtgagcggcgggtggtagtaggggatttttgatatttttttttttttatcgaatcgcggtaagtcgggagttcgagttgtagcggtcgagatcggtaggttttttttttttttcgggcgggcggacgcgcggggcgttttagggttttttcgtttcgaagtttagcgtcgttgcgcgtattttttggtttgagagaggggcggtgttgaggattcgggggttcggagttcgggaggttcggttttggaggttttgggagagaat

SEQ ID NO: 14154 - DNA, 825 bp, Artificial Sequence
  chemically treated genomic DNA (Homo sapiens) CpG-island No: 14154
attctctcccaaaacctccaaaaccgaacctcccgaactccgaacccccgaatcctcaacaccgcccctctctcaaaccaaaaaatacgcgcaacgacgctaaacttcgaaacgaaaaaaccctaaaacgccccgcgcgtccgcccgcccgaaaaaaaaaaaaaacctaccgatctcgaccgctacaactcgaactcccgacttaccgcgattcgataaaaaaaaaaaaatatcaaaaatcccctactaccacccgccgctcacaaaacaacgcgcgacccccacgaaaccgtcgccgccgccgctaccacccctaccaccgaccgccgcttcgaacgcaacgcgcaaaaaacccgactacgtcacacgccgcccgacgtcaaaaactcgttacgaacgctccgccctcgccgtccgcgaattaataaacgcgaccgccactctaaatcgaccctattattcattaaacaacgcgtcttttaaaaccgaactaaaaaaaaaaaaaacgaaaaaaaaaaaaaaaaacaaaaaaaattcgaaaaaacacaaaataaaaacgataaaaaaaccgtaaaatcccgcccctcgccgccgcgattaacgaaaacgtatcgtaacgtcacacaaaacctctcgaaataaacttataaataactaaattaaaaaacaccgacgaaatatcgaaaaaaataataacgcaacataaaaactccgcccccttccttaaaacgccgcgactcgaactaaaaaaactcgaaccaatcaaaaaaacgaccccaaaataacataataactattcgaccctttccttaccccgatccgccg

SEQ ID NO: 14155 - DNA, 825 bp, Artificial Sequence
  chemically treated genomic DNA (Homo sapiens) CpG-island No: 14155
atttttttttagggtttttaaagtcgggtttttcgggtttcgggttttcgggtttttagtatcgttttttttttaggttagaaggtgcgcgtagcggcgttagatttcgaagcggagaggttttgagacgtttcgcgcgttcgttcgttcggaaggggggagaaatttgtcggtttcggtcgttgtagttcgggttttcgatttatcgcggttcggtggggaaggggaagtgttaggagttttttgttgttattcgtcgtttatagagtagcgcgcggtttttacgaaatcgtcgtcgtcgtcgttattatttttgttatcgatcgtcgtttcgggcgtagcgcgtagagggttcgattgcgttatacgtcgttcggcgttagaggttcgttgcggacgtttcgttttcgtcgttcgcgaattggtggacgcggtcgttattttgggtcgattttgttatttattgggtaacgcgttttttgaaatcgaattgaagggggaaggggcgagagggaagaggaggggtagaaggagttcggggaggtatagggtaggagcggtgagagggtcgtggagtttcgtttttcgtcgtcgcggttggcgggagcgtgtcgtgacgttatatagggtttttcgaagtgggtttgtgaatggttagattgggaagtatcggcggggtgtcgggaagggtggtgacgtaatatagagatttcgtttttttttttggagcgtcgcgattcgggttgagggagttcgggttaattagagggacggttttagaatggtatggtaattattcgattttttttttgtttcggttcgtcg

SEQ ID NO: 14156 - DNA, 825 bp, Artificial Sequence
  chemically treated genomic DNA (Homo sapiens) CpG-island No: 14156
cgacgaaccgaaacaaaaaaaaaatcgaataattaccataccattctaaaaccgtccctctaattaacccgaactccctcaacccgaatcgcgacgctccaaaaaaaaaaacgaaatctctatattacgtcaccacccttcccgacaccccgccgatacttcccaatctaaccattcacaaacccacttcgaaaaaccctatataacgtcacgacacgctcccgccaaccgcgacgacgaaaaacgaaactccacgaccctctcaccgctcctaccctatacctccccgaactccttctacccctcctcttccctctcgccccttcccccttcaattcgatttcaaaaaacgcgttacccaataaataacaaaatcgacccaaaataacgaccgcgtccaccaattcgcgaacgacgaaaacgaaacgtccgcaacgaacctctaacgccgaacgacgtataacgcaatcgaaccctctacgcgctacgcccgaaacgacgatcgataacaaaaataataacgacgacgacgacgatttcgtaaaaaccgcgcgctactctataaacgacgaataacaacaaaaaactcctaacacttccccttccccaccgaaccgcgataaatcgaaaacccgaactacaacgaccgaaaccgacaaatttctccccccttccgaacgaacgaacgcgcgaaacgtctcaaaacctctccgcttcgaaatctaacgccgctacgcgcaccttctaacctaaaaaaaaaacgatactaaaaacccgaaaacccgaaacccgaaaaacccgactttaaaaaccctaaaaaaaaat

SEQ ID NO: 14157 - DNA, 614 bp, Artificial Sequence
  chemically treated genomic DNA (Homo sapiens) CpG-island No: 14157
cgcggggtcggtgagtttttttcgttcggcgcggttatttttttgaagattcgataaggacgggggcgggggtttttttcgattagcgggtcgggcgtattcggaaagtagaggtcggggggtgtttggttagtatgcggtttttattcgtttcgtttatttgaatacgtcggggtcgatagcgtcgttcgtcgtttgcgttagttcgtatagttttattttttcggtgtttagtattttttttcgtcgtagcgttagtttttgtcgggtcgtttttagtttcgggggcgttatcgatttcggtttaggttttacgttttgcgtcgttattttcgcggttcgcggaaaggtgcgtttcgtttcgtcgcgttttttagcggttgcgtttattattttttttttgtagcgttaacgtttggtttttcgggttgttttggcgggaggggcgggagcgcggggacggggtcgttttcgcggtgttttgaagtttaatagttattgggcgtttacggtgtgttgagcggcgttttaggagtcgggagtggtatggcggatcgtaggtttggatttggcgatttgggtttttttgatagattgtattggtcgtgttcgtt

SEQ ID NO: 14158 - DNA, 614 bp, Artificial Sequence
  chemically treated genomic DNA (Homo sapiens) CpG-island No: 14158
aacgaacacgaccaatacaatctatcaaaaaaacccaaatcgccaaatccaaacctacgatccgccataccactcccgactcctaaaacgccgctcaacacaccgtaaacgcccaataactattaaacttcaaaacaccgcgaaaacgaccccgtccccgcgctcccgcccctcccgccaaaacaacccgaaaaaccaaacgttaacgctacaaaaaaaaaataataaacgcaaccgctaaaaaacgcgacgaaacgaaacgcacctttccgcgaaccgcgaaaataacgacgcaaaacgtaaaacctaaaccgaaatcgataacgcccccgaaactaaaaacgacccgacaaaaactaacgctacgacgaaaaaaaatactaaacaccgaaaaaataaaactatacgaactaacgcaaacgacgaacgacgctatcgaccccgacgtattcaaataaacgaaacgaataaaaaccgcatactaaccaaacaccccccgacctctactttccgaatacgcccgacccgctaatcgaaaaaaacccccgcccccgtccttatcgaatcttcaaaaaaataaccgcgccgaacgaaaaaaactcaccgaccccgcg

SEQ ID NO: 14159 - DNA, 614 bp, Artificial Sequence
  chemically treated genomic DNA (Homo sapiens) CpG-island No: 14159
agcgagtacgattaatgtagtttattagggaggtttagatcgttaagtttaagtttgcggttcgttatgttattttcggtttttagagcgtcgtttagtatatcgtgagcgtttaataattgttgggttttaaggtatcgcggaggcggtttcgttttcgcgttttcgtttttttcgttagggtagttcgggaggttagacgttgacgttgtagggagagggtggtgggcgtagtcgttagggggcgcggcggggcggagcgtattttttcgcgggtcgcggggatggcggcgtagggcgtagggtttgggtcggggtcggtggcgttttcggggttggaggcggttcggtagaagttggcgttgcggcggaagaaggtgttgagtatcgaggagatggagttgtacgagttggcgtaggcggcgggcggcgttatcgatttcgacgtgtttaagtgagcggggcgggtgggggtcgtatgttagttagatatttttcgatttttgtttttcgggtacgttcggttcgttggtcgggaggagttttcgttttcgtttttgtcgggtttttagggaggtggtcgcgtcgggcggagagggtttatcggtttcgcg

SEQ ID NO: 14160 - DNA, 614 bp, Artificial Sequence
  chemically treated genomic DNA (Homo sapiens) CpG-island No: 14160
cgcgaaaccgataaaccctctccgcccgacgcgaccacctccctaaaaacccgacaaaaacgaaaacgaaaactcctcccgaccaacgaaccgaacgtacccgaaaaacaaaaatcgaaaaatatctaactaacatacgacccccacccgccccgctcacttaaacacgtcgaaatcgataacgccgcccgccgcctacgccaactcgtacaactccatctcctcgatactcaacaccttcttccgccgcaacgccaacttctaccgaaccgcctccaaccccgaaaacgccaccgaccccgacccaaaccctacgccctacgccgccatccccgcgacccgcgaaaaaatacgctccgccccgccgcgccccctaacgactacgcccaccaccctctccctacaacgtcaacgtctaacctcccgaactaccctaacgaaaaaaacgaaaacgcgaaaacgaaaccgcctccgcgataccttaaaacccaacaattattaaacgctcacgatatactaaacgacgctctaaaaaccgaaaataacataacgaaccgcaaacttaaacttaacgatctaaacctccctaataaactacattaatcgtactcgct

SEQ ID NO: 14161 - DNA, 620 bp, Artificial Sequence
  chemically treated genomic DNA (Homo sapiens) CpG-island No: 14161
tttacgtcggttggcgaggggttttcgttcggtttattcggatttcgggtagtttcgcgtgtttttcgcgttttcgtttttggagagtattcggatttagagttaaagttcgaagttaggaattcgtttatcgttagtttcgttagcgttttttgcggcgtcgtttatttgttatgatattagttcgtagttggcgttttattttcggttttagaatgtcgcgcggttacgtattttcgtcgtttaggtttcgtttcgttattcgtttcgtcgcgttacgtttagtcgagtggttttacggtttttcgatcgtagcgttcgcgttttcgggcgggaggggcgttcgcgtgttcggtgcgggtagtttcggtggggtttagatgcgtttttcgttcggcgttcggtttcgtaggacgcggcgacgtcggtgttcgttttggggaagagagattaggagtttcgtcgcgttcgtagtttattcggcgtttcgagggtatgcgtttgcgagaacgttaggttgcgacggcggggtttttatgtaaagagtttttataaattaataataaaaagtagagggtttaggagaaagcgtaaatggcggtgggaatcgtattgatgtt

SEQ ID NO: 14162 - DNA, 620 bp, Artificial Sequence
  chemically treated genomic DNA (Homo sapiens) CpG-island No: 14162
aacatcaatacgattcccaccgccatttacgctttctcctaaaccctctactttttattattaatttataaaaactctttacataaaaaccccgccgtcgcaacctaacgttctcgcaaacgcataccctcgaaacgccgaataaactacgaacgcgacgaaactcctaatctctcttccccaaaacgaacaccgacgtcgccgcgtcctacgaaaccgaacgccgaacgaaaaacgcatctaaaccccaccgaaactacccgcaccgaacacgcgaacgcccctcccgcccgaaaacgcgaacgctacgatcgaaaaaccgtaaaaccactcgactaaacgtaacgcgacgaaacgaataacgaaacgaaacctaaacgacgaaaatacgtaaccgcgcgacattctaaaaccgaaaataaaacgccaactacgaactaatatcataacaaataaacgacgccgcaaaaaacgctaacgaaactaacgataaacgaattcctaacttcgaactttaactctaaatccgaatactctccaaaaacgaaaacgcgaaaaacacgcgaaactacccgaaatccgaataaaccgaacgaaaacccctcgccaaccgacgtaaa

SEQ ID NO: 14163 - DNA, 620 bp, Artificial Sequence
  chemically treated genomic DNA (Homo sapiens) CpG-island No: 14163
aatattagtgcggtttttatcgttatttgcgtttttttttggattttttgttttttattgttgatttgtgggagttttttgtataggggtttcgtcgtcgtagtttggcgttttcgtaggcgtatgttttcggaacgtcgggtgggttgcgggcgcgacgggatttttggttttttttttttaggacggatatcggcgtcgtcgcgttttacgaagtcgggcgtcgagcgggaggcgtatttgggttttatcggggttgttcgtatcgagtacgcgaacgtttttttcgttcggaggcgcgggcgttgcggtcggagaatcgtagagttattcggttgggcgtggcgcggcggggcgggtaacggggcgggatttgggcgacggaagtgcgtagtcgcgcggtattttggggtcggaagtggggcgttagttgcgggttggtgttatggtaggtgggcggcgtcgtaggaggcgttggcggagttgacggtggacgagtttttagtttcgggttttgattttaagttcgaatattttttagaagcggagacgcgggaggtacgcgaggttgttcggagttcggatgagtcgggcgggagtttttcgttagtcggcgtaaa

SEQ ID NO: 14164 - DNA, 620 bp, Artificial Sequence
  chemically treated genomic DNA (Homo sapiens) CpG-island No: 14164
tttacgccgactaacgaaaaactcccgcccgactcatccgaactccgaacaacctcgcgtacctcccgcgtctccgcttctaaaaaatattcgaacttaaaatcaaaacccgaaactaaaaactcgtccaccgtcaactccgccaacgcctcctacgacgccgcccacctaccataacaccaacccgcaactaacgccccacttccgaccccaaaataccgcgcgactacgcacttccgtcgcccaaatcccgccccgttacccgccccgccgcgccacgcccaaccgaataactctacgattctccgaccgcaacgcccgcgcctccgaacgaaaaaaacgttcgcgtactcgatacgaacaaccccgataaaacccaaatacgcctcccgctcgacgcccgacttcgtaaaacgcgacgacgccgatatccgtcctaaaaaaaaaaaaccaaaaatcccgtcgcgcccgcaacccacccgacgttccgaaaacatacgcctacgaaaacgccaaactacgacgacgaaacccctatacaaaaaactcccacaaatcaacaataaaaaacaaaaaatccaaaaaaaaacgcaaataacgataaaaaccgcactaatatt

SEQ ID NO: 14165 - DNA, 591 bp, Artificial Sequence
  chemically treated genomic DNA (Homo sapiens) CpG-island No: 14165
agtcgatagtcggagattcgcggtggtatgttagtgaattggttatattacggtaaatattttacggcgggtagtatttcgtatgtaggttcgttaggcgacggttatttgatacgtcgacggtagttatgttgcgttcggcgtcgcgttgtagtttcgatcgttttagtttgttcgttgtggtcgtcggcgattagttcgggattttttcgtaggggcggggcggttgttggaggcgggcggggcgggagggggcgtttaaagttcggcgattaatttcgggtacgttcgttaacgttattttttcgcggttcggattacgttgagttagcgagggcggtcggaggagtttttggggagtcgcggggaggattcggtatttggggggagggatttttcgggttttaggggaaaggatcgggaagttatttcgacgttttcgaattttcgaggatacgttgtttggggcgtagatttttcgagggttgggacggcgacgagggtttgagggttcgatttttgttttagtttgttgagtttagtttttgggaacgcggtagggttcgaagggaggaggtaggcgtagaggtt

SEQ ID NO: 14166 - DNA, 591 bp, Artificial Sequence
  chemically treated genomic DNA (Homo sapiens) CpG-island No: 14166
aacctctacgcctacctcctcccttcgaaccctaccgcgttcccaaaaactaaactcaacaaactaaaacaaaaatcgaaccctcaaaccctcgtcgccgtcccaaccctcgaaaaatctacgccccaaacaacgtatcctcgaaaattcgaaaacgtcgaaataacttcccgatcctttcccctaaaacccgaaaaatccctccccccaaataccgaatcctccccgcgactccccaaaaactcctccgaccgccctcgctaactcaacgtaatccgaaccgcgaaaaaataacgttaacgaacgtacccgaaattaatcgccgaactttaaacgccccctcccgccccgcccgcctccaacaaccgccccgcccctacgaaaaaatcccgaactaatcgccgacgaccacaacgaacaaactaaaacgatcgaaactacaacgcgacgccgaacgcaacataactaccgtcgacgtatcaaataaccgtcgcctaacgaacctacatacgaaatactacccgccgtaaaatatttaccgtaatataaccaattcactaacataccaccgcgaatctccgactatcgact

SEQ ID NO: 14167 - DNA, 591 bp, Artificial Sequence
  chemically treated genomic DNA (Homo sapiens) CpG-island No: 14167
agtttttgcgtttgtttttttttttcggattttgtcgcgtttttagaggttggatttagtaagttggaataggaatcgaatttttaggttttcgtcgtcgttttagttttcgaggaatttgcgttttaggtaacgtgttttcggaggttcgggagcgtcggagtgatttttcgatttttttttttgggattcgagggatttttttttttaagtgtcgggtttttttcgcggttttttaggggttttttcggtcgttttcgttgatttagcgtaattcgagtcgcggaggggtggcgttggcggacgtgttcggggttaatcgtcgagttttgaacgttttttttcgtttcgttcgtttttagtagtcgtttcgtttttgcgagagagtttcgggttggtcgtcggcggttatagcggataggttggagcgatcgaggttgtagcgcggcgtcgggcgtagtatgattgtcgtcggcgtgttaggtagtcgtcgtttggcgggtttgtatacgggatgttgttcgtcgtgaaatgtttgtcgtggtatgattaatttattgatatattatcgcgagttttcggttgtcggtt

SEQ ID NO: 14168 - DNA, 591 bp, Artificial Sequence
  chemically treated genomic DNA (Homo sapiens) CpG-island No: 14168
aaccgacaaccgaaaactcgcgataatatatcaataaattaatcataccacgacaaacatttcacgacgaacaacatcccgtatacaaacccgccaaacgacgactacctaacacgccgacgacaatcatactacgcccgacgccgcgctacaacctcgatcgctccaacctatccgctataaccgccgacgaccaacccgaaactctctcgcaaaaacgaaacgactactaaaaacgaacgaaacgaaaaaaaacgttcaaaactcgacgattaaccccgaacacgtccgccaacgccacccctccgcgactcgaattacgctaaatcaacgaaaacgaccgaaaaaacccctaaaaaaccgcgaaaaaaacccgacacttaaaaaaaaaaatccctcgaatcccaaaaaaaaaaatcgaaaaatcactccgacgctcccgaacctccgaaaacacgttacctaaaacgcaaattcctcgaaaactaaaacgacgacgaaaacctaaaaattcgattcctattccaacttactaaatccaacctctaaaaacgcgacaaaatccgaaaaaaaaaaacaaacgcaaaaact

SEQ ID NO: 14169 - DNA, 503 bp, Artificial Sequence
  chemically treated genomic DNA (Homo sapiens) CpG-island No: 14169
tcgaggtcggagaaagggcgagattgtcgttttttcgggtttttagtttgtagaagggcgtagtatttatcgagtgcgcggcgtaggcgagtagtatcggtagtagtagttgttgtagcggcggcgataggtggggacgtatggtgttcgtacgtttttcgagggcgtttcgacgttcgtttgttcgtgttttttgttcgttcgggagtttagcgtttcgtatgggtttcgggtttcggtcgatcgttgcgtttcgaggagttatggttgagttattcgatttgcggcgggtttcgggattgttttttttcggattaggtggtcgcgcgcgttaagtcgttcgttttattgattaggacgcggttttgcggcgcgttttttttattcggtagggattggcgcggggtcggcgcggaggttggtaggggaggaggtagagggagggcgcggggattcggagtcggttttcgtaggttgggtttaagttggaggaggttaggaga

SEQ ID NO: 14170 - DNA, 503 bp, Artificial Sequence
  chemically treated genomic DNA (Homo sapiens) CpG-island No: 14170
tctcctaacctcctccaacttaaacccaacctacgaaaaccgactccgaatccccgcgccctccctctacctcctcccctaccaacctccgcgccgaccccgcgccaatccctaccgaataaaaaaaacgcgccgcaaaaccgcgtcctaatcaataaaacgaacgacttaacgcgcgcgaccacctaatccgaaaaaaaacaatcccgaaacccgccgcaaatcgaataactcaaccataactcctcgaaacgcaacgatcgaccgaaacccgaaacccatacgaaacgctaaactcccgaacgaacaaaaaacacgaacaaacgaacgtcgaaacgccctcgaaaaacgtacgaacaccatacgtccccacctatcgccgccgctacaacaactactactaccgatactactcgcctacgccgcgcactcgataaatactacgcccttctacaaactaaaaacccgaaaaaacgacaatctcgccctttctccgacctcga

SEQ ID NO: 14171 - DNA, 503 bp, Artificial Sequence
  chemically treated genomic DNA (Homo sapiens) CpG-island No: 14171
ttttttggttttttttagtttgggtttagtttgcgggagtcgatttcgggttttcgcgttttttttttgtttttttttttgttagttttcgcgtcgatttcgcgttagtttttgtcgggtggaggaggcgcgtcgtaaagtcgcgttttgattaatggggcgggcggtttagcgcgcgcggttatttggttcgaggaggagtagtttcggggttcgtcgtaggtcgggtgatttagttatggtttttcggggcgtagcggtcggtcggagttcgggatttatgcggggcgttgagttttcgagcgggtagagggtacgggtaggcggacgtcggggcgttttcggggaacgtgcgggtattatgcgtttttatttgtcgtcgtcgttgtagtagttattattgtcggtgttgttcgtttgcgtcgcgtattcggtgagtattgcgtttttttgtaggttggggattcgagggagcgatagtttcgtttttttttcggtttcgg

SEQ ID NO: 14172 - DNA, 503 bp, Artificial Sequence
  chemically treated genomic DNA (Homo sapiens) CpG-island No: 14172
ccgaaaccgaaaaaaaaacgaaactatcgctccctcgaatccccaacctacaaaaaaacgcaatactcaccgaatacgcgacgcaaacgaacaacaccgacaataataactactacaacgacgacgacaaataaaaacgcataatacccgcacgttccccgaaaacgccccgacgtccgcctacccgtaccctctacccgctcgaaaactcaacgccccgcataaatcccgaactccgaccgaccgctacgccccgaaaaaccataactaaatcacccgacctacgacgaaccccgaaactactcctcctcgaaccaaataaccgcgcgcgctaaaccgcccgccccattaatcaaaacgcgactttacgacgcgcctcctccacccgacaaaaactaacgcgaaatcgacgcgaaaactaacaaaaaaaaaaacaaaaaaaaaacgcgaaaacccgaaatcgactcccgcaaactaaacccaaactaaaaaaaaccaaaaaa

SEQ ID NO: 14173 - DNA, 611 bp, Artificial Sequence
  chemically treated genomic DNA (Homo sapiens) CpG-island No: 14173
gttcgtatttcggtagttgtggatgcggcggttcgtgttaggcggtagcgttgggtagggttgcggttcgtcgtcgaagttgagttatacgggtagtacgacgcgcggattgcgattgtagaagatgatttgggagggttcgcgcgagtttatcgagcgtagtacgggtcgcggtcgttcggtttttatttttttttcggcgtttagttttttcgggtcggattttttcggggtcggatttttcggcgttcgattttttttcgtcgttttttttagggtcgtatttttcgacgtttgtttttttcgcgtttatttcggtttcgttttagtttttcgtttttcggggtatttttttcgcgatttagattattcgggtcggacgtcgcgggattcgcgggtcggacgcggggcggagttgcgtgcgcgttttcgagtcgattttcgtagttttcgcgcgcgttcggtagaggatggaacgcgttcgcggaaatagtcggtcggaggttgtgcgcgtgcgtagaaggattttttagtatcgtaggtcgttgtaacggaggcgaggttaggttaattcgttattgtatttttattataaaattttttttcgtttt

SEQ ID NO: 14174 - DNA, 611 bp, Artificial Sequence
  chemically treated genomic DNA (Homo sapiens) CpG-island No: 14174
aaaacgaaaaaaaattttataataaaaatacaataacgaattaacctaacctcgcctccgttacaacgacctacgatactaaaaaatccttctacgcacgcgcacaacctccgaccgactatttccgcgaacgcgttccatcctctaccgaacgcgcgcgaaaactacgaaaatcgactcgaaaacgcgcacgcaactccgccccgcgtccgacccgcgaatcccgcgacgtccgacccgaataatctaaatcgcgaaaaaaataccccgaaaaacgaaaaactaaaacgaaaccgaaataaacgcgaaaaaaacaaacgtcgaaaaatacgaccctaaaaaaaacgacgaaaaaaaatcgaacgccgaaaaatccgaccccgaaaaaatccgacccgaaaaaactaaacgccgaaaaaaaaataaaaaccgaacgaccgcgacccgtactacgctcgataaactcgcgcgaaccctcccaaatcatcttctacaatcgcaatccgcgcgtcgtactacccgtataactcaacttcgacgacgaaccgcaaccctacccaacgctaccgcctaacacgaaccgccgcatccacaactaccgaaatacgaac

SEQ ID NO: 14175 - DNA, 611 bp, Artificial Sequence
  chemically treated genomic DNA (Homo sapiens) CpG-island No: 14175
ggggcgaaaaaaaattttatagtggaaatatagtaacgagttggtttagtttcgttttcgttataacggtttacggtgttggaggatttttttgcgtacgcgtatagttttcggtcggttattttcgcgagcgcgttttattttttatcgagcgcgcgcgaagattacggaggtcgattcgggagcgcgtacgtagtttcgtttcgcgttcgattcgcggatttcgcggcgttcggttcgggtggtttggatcgcggagggaatgtttcggagggcggagaattgggacgaggtcgaggtaggcgcggaggaggtaggcgtcgaagagtacggttttgaagaagacggcggggaggagtcgggcgtcgaggagttcggtttcggaagagttcggttcggaggaattgggcgtcgaggaggagatggaggtcgggcggtcgcggttcgtgttgcgttcggtgaattcgcgcgagtttttttaggttattttttgtaatcgtagttcgcgcgtcgtgttgttcgtatggtttaatttcgacggcgagtcgtagttttatttaacgttgtcgtttggtacgggtcgtcgtatttatagttatcgaggtacgggt

SEQ ID NO: 14176 - DNA, 611 bp, Artificial Sequence
  chemically treated genomic DNA (Homo sapiens) CpG-island No: 14176
acccgtacctcgataactataaatacgacgacccgtaccaaacgacaacgttaaataaaactacgactcgccgtcgaaattaaaccatacgaacaacacgacgcgcgaactacgattacaaaaaataacctaaaaaaactcgcgcgaattcaccgaacgcaacacgaaccgcgaccgcccgacctccatctcctcctcgacgcccaattcctccgaaccgaactcttccgaaaccgaactcctcgacgcccgactcctccccgccgtcttcttcaaaaccgtactcttcgacgcctacctcctccgcgcctacctcgacctcgtcccaattctccgccctccgaaacattccctccgcgatccaaaccacccgaaccgaacgccgcgaaatccgcgaatcgaacgcgaaacgaaactacgtacgcgctcccgaatcgacctccgtaatcttcgcgcgcgctcgataaaaaataaaacgcgctcgcgaaaataaccgaccgaaaactatacgcgtacgcaaaaaaatcctccaacaccgtaaaccgttataacgaaaacgaaactaaaccaactcgttactatatttccactataaaattttttttcgcccc

SEQ ID NO: 14177 - DNA, 592 bp, Artificial Sequence
  chemically treated genomic DNA (Homo sapiens) CpG-island No: 14177
tattatattcggtacgatttttgtacggattatatttaacgttttttttattttttgtatcggtttttttaatatttttgtatcgtcgttgtttgttatattatttttttttttaatcgtttttttaatttatttttatcggtttttatttttttttattcgttatattttttcgtagtttattttttttagtttcgagttttttttttttttttatcgtttattattatcgttttttatcgttcgcggggcggagcgcgaaggagggcggcggagagaagagatacggacgtgtcgaggaggatgagcggaggagtggcgggtgtggcggcgagaagaacgggaaggagagggagaggggcgtgaagagcggtggggggagtgatggtggaggtcggaggagggtgtgagaggatgggcggtataagagaggggcggggtaagggtgcggtatcgagaggaggggcgacgcgcgggtgaaagtggaggggtagtgagtagcggtgacgagtgggggggagggaggtcgggtagtagtagagcgcgggtggttgggggaagtgttgttggagatagggtgttaaggtgttag

SEQ ID NO: 14178 - DNA, 592 bp, Artificial Sequence
  chemically treated genomic DNA (Homo sapiens) CpG-island No: 14178
ctaacaccttaacaccctatctccaacaacacttcccccaaccacccgcgctctactactacccgacctccctcccccccactcgtcaccgctactcactacccctccactttcacccgcgcgtcgcccctcctctcgataccgcacccttaccccgcccctctcttataccgcccatcctctcacaccctcctccgacctccaccatcactccccccaccgctcttcacgcccctctccctctccttcccgttcttctcgccgccacacccgccactcctccgctcatcctcctcgacacgtccgtatctcttctctccgccgccctccttcgcgctccgccccgcgaacgataaaaaacgataataataaacgataaaaaaaaaaaaaaaactcgaaactaaaaaaaataaactacgaaaaaatataacgaataaaaaaaaataaaaaccgataaaaataaattaaaaaaacgattaaaaaaaaaaataatataacaaacaacgacgatacaaaaatattaaaaaaaccgatacaaaaaataaaaaaaacgttaaatataatccgtacaaaaatcgtaccgaatataata

SEQ ID NO: 14179 - DNA, 592 bp, Artificial Sequence
  chemically treated genomic DNA (Homo sapiens) CpG-island No: 14179
ttaatattttgatattttgtttttaataatattttttttagttattcgcgttttgttgttgttcgattttttttttttttattcgttatcgttgtttattgtttttttatttttattcgcgcgtcgttttttttttcgatgtcgtatttttatttcgttttttttttatgtcgtttatttttttatattttttttcgatttttattattattttttttatcgttttttacgtttttttttttttttttttcgtttttttcgtcgttatattcgttattttttcgtttatttttttcgatacgttcgtgtttttttttttcgtcgttttttttcgcgtttcgtttcgcgagcgatggggagcggtgatgataggcggtgaggagggaagagaggttcgggattggaggggataggttgcgaaagaatgtggcgagtaaggagagatgggggtcgatgagggtgggttagaagaacgattgaggagaggagtgatgtaataggtagcgacgatataggggtgttgagaggatcggtgtaaagggtggagagggcgttgaatgtggttcgtgtaggggtcgtgtcgggtgtggtg

SEQ ID NO: 14180 - DNA, 592 bp, Artificial Sequence
  chemically treated genomic DNA (Homo sapiens) CpG-island No: 14180
caccacacccgacacgacccctacacgaaccacattcaacgccctctccaccctttacaccgatcctctcaacacccctatatcgtcgctacctattacatcactcctctcctcaatcgttcttctaacccaccctcatcgacccccatctctccttactcgccacattctttcgcaacctatcccctccaatcccgaacctctcttccctcctcaccgcctatcatcaccgctccccatcgctcgcgaaacgaaacgcgaaaaaaaacgacgaaaaaaaaaaacacgaacgtatcgaaaaaaataaacgaaaaaataacgaatataacgacgaaaaaaacgaaaaaaaaaaaaaaaaaaacgtaaaaaacgataaaaaaaataataataaaaatcgaaaaaaaatataaaaaaataaacgacataaaaaaaaaacgaaataaaaatacgacatcgaaaaaaaaaacgacgcgcgaataaaaataaaaaaacaataaacaacgataacgaataaaaaaaaaaaaaatcgaacaacaacaaaacgcgaataactaaaaaaaatattattaaaaacaaaatatcaaaatattaa

SEQ ID NO: 14181 - DNA, 879 bp, Artificial Sequence
  chemically treated genomic DNA (Homo sapiens) CpG-island No: 14181
cggacgaagggggcgcggggaaggggatattaatcggggacggtagggtttggttttatcgtttgttttttagcgacgtcgtttcggaaaatagcgtaggcgggtcgcgcggttcgggtgtagttcgggtttcggggtaggtaggcggggatttttaggacgtttcgggcggacggcggatattaggtttagtcgcgtttttgtttttgttttttagtttgcgttcgtgtttgtatttgcgcggggtagtcgtcggggtatagcgggtagtttcgaggcgatttcgcgttatcgcgttgtcggtatcgcgttggagatttttttcgttgaggtttagtacggtcgatagtggtcgatatagcggatagttaggcgtagcgtttcgattttggttaggttttggttcgcggcgttacggacggcggtagaaagcggcgtattcgtgtagggcgcgggttagcgtgcgtatgtttagttttattcgtttattggcgttttgtttttgttcgttgtttaggcgttgttgcgcgcgtcgagtttatttacggagggggcgcggggtttcggagggtgtttggtcgcgcggggttcgttacggggttgtcggttggggtgttgttttatgagtttggggacgagacgagggagcggtcgtagtttttgtcggagggcggcggtcgtcgagttgggttttaggtcgtagagagtatttaggattcggagagcggcgggtataggggttgggttatggtagcggcggcgcgtttgggggtcggcggtcggcggtcgttttatgtcgagttcgaggtgtgaagtggttttttttaggtcgtattagtatattaaagtgggttcggggtttggagggggcggagtttg

SEQ ID NO: 14182 - DNA, 879 bp, Artificial Sequence
  chemically treated genomic DNA (Homo sapiens) CpG-island No: 14182
caaactccgccccctccaaaccccgaacccactttaatatactaatacgacctaaaaaaaaccacttcacacctcgaactcgacataaaacgaccgccgaccgccgacccccaaacgcgccgccgctaccataacccaacccctatacccgccgctctccgaatcctaaatactctctacgacctaaaacccaactcgacgaccgccgccctccgacaaaaactacgaccgctccctcgtctcgtccccaaactcataaaacaacaccccaaccgacaaccccgtaacgaaccccgcgcgaccaaacaccctccgaaaccccgcgccccctccgtaaataaactcgacgcgcgcaacaacgcctaaacaacgaacaaaaacaaaacgccaataaacgaataaaactaaacatacgcacgctaacccgcgccctacacgaatacgccgctttctaccgccgtccgtaacgccgcgaaccaaaacctaaccaaaatcgaaacgctacgcctaactatccgctatatcgaccactatcgaccgtactaaacctcaacgaaaaaaatctccaacgcgataccgacaacgcgataacgcgaaatcgcctcgaaactacccgctataccccgacgactaccccgcgcaaatacaaacacgaacgcaaactaaaaaacaaaaacaaaaacgcgactaaacctaatatccgccgtccgcccgaaacgtcctaaaaatccccgcctacctaccccgaaacccgaactacacccgaaccgcgcgacccgcctacgctattttccgaaacgacgtcgctaaaaaacaaacgataaaaccaaaccctaccgtccccgattaatatccccttccccgcgcccccttcgtccg

SEQ ID NO: 14183 - DNA, 879 bp, Artificial Sequence
  chemically treated genomic DNA (Homo sapiens) CpG-island No: 14183
taggtttcgttttttttaagtttcgagtttattttgatgtgttgatgcggtttggaaggggttattttatatttcgggttcggtataaagcggtcgtcggtcgtcggtttttagacgcgtcgtcgttgttatggtttagtttttgtgttcgtcgtttttcgagttttggatgttttttgcggtttggggtttaattcggcggtcgtcgtttttcgataaggattgcggtcgttttttcgtttcgtttttagatttatggggtagtattttagtcgatagtttcgtggcgagtttcgcgcggttaggtatttttcgggatttcgcgtttttttcgtaggtaggttcggcgcgcgtagtagcgtttgggtagcgggtagaggtagagcgttagtgagcgggtgaaattgggtatgcgtacgttggttcgcgttttgtacgagtgcgtcgttttttatcgtcgttcgtggcgtcgcgggttagagtttgattaagatcgagacgttgcgtttggttattcgttatatcggttattgtcggtcgtgttaggttttagcgaggagagtttttagcgcggtgtcggtagcgcggtgacgcggggtcgtttcggggttgttcgttgtgtttcgacgattgtttcgcgtagatgtagatacggacgtaggttgaggggtaggggtaggggcgcggttgggtttggtattcgtcgttcgttcggggcgttttggggattttcgtttgtttgtttcggagttcgagttgtattcgagtcgcgcgattcgtttgcgttgtttttcgaggcggcgtcgttgaagggtaggcgatggagttaagttttatcgttttcggttagtgttttttttttcgcgtttttttcgttcg

SEQ ID NO: 14184 - DNA, 879 bp, Artificial Sequence
  chemically treated genomic DNA (Homo sapiens) CpG-island No: 14184
cgaacgaaaaaaacgcgaaaaaaaaaacactaaccgaaaacgataaaacttaactccatcgcctacccttcaacgacgccgcctcgaaaaacaacgcaaacgaatcgcgcgactcgaatacaactcgaactccgaaacaaacaaacgaaaatccccaaaacgccccgaacgaacgacgaataccaaacccaaccgcgcccctacccctacccctcaacctacgtccgtatctacatctacgcgaaacaatcgtcgaaacacaacgaacaaccccgaaacgaccccgcgtcaccgcgctaccgacaccgcgctaaaaactctcctcgctaaaacctaacacgaccgacaataaccgatataacgaataaccaaacgcaacgtctcgatcttaatcaaactctaacccgcgacgccacgaacgacgataaaaaacgacgcactcgtacaaaacgcgaaccaacgtacgcatacccaatttcacccgctcactaacgctctacctctacccgctacccaaacgctactacgcgcgccgaacctacctacgaaaaaaacgcgaaatcccgaaaaatacctaaccgcgcgaaactcgccacgaaactatcgactaaaatactaccccataaatctaaaaacgaaacgaaaaaacgaccgcaatccttatcgaaaaacgacgaccgccgaattaaaccccaaaccgcaaaaaacatccaaaactcgaaaaacgacgaacacaaaaactaaaccataacaacgacgacgcgtctaaaaaccgacgaccgacgaccgctttataccgaacccgaaatataaaataaccccttccaaaccgcatcaacacatcaaaataaactcgaaacttaaaaaaaacgaaaccta

SEQ ID NO: 14185 - DNA, 554 bp, Artificial Sequence
  chemically treated genomic DNA (Homo sapiens) CpG-island No: 14185
gggaagttgatcggaaggttcgggtgcgggacgtgtgtattttacggcgttcgggagttgtttcggtgtcgattcgcgagtttttcggcgtgtttcgcgttttttcgtaattattttcggggcgggtttcgggggcggtgtttcggcgagggagcgtggcggcgagttgtttgggggggttggcgacggtagttcgagggcgcgtaaggtttgaggtttagtataggtgggtttcgcggcggttcggttttagtatttgtcggtatttgtagttcgtttagattcggcgttcgggcgtttcgcgttgtatttgttcgtcgcgtgattggaggatcgagtttttatattttttttatgtggttgtggtgggggtatagtaatgttttgtgcgtcgtagcgtttttgtggggatgtggtcggggggcgtcgggaagcgttattgttgtgagttacgggtttgtcggttagggattcgtttcggggttagtgagttatttttgcgatgcggttttacggggcgagagggggtgtttgggtgtttttatagatttttt

SEQ ID NO: 14186 - DNA, 554 bp, Artificial Sequence
  chemically treated genomic DNA (Homo sapiens) CpG-island No: 14186
aaaaaatctataaaaacacccaaacaccccctctcgccccgtaaaaccgcatcgcaaaaataactcactaaccccgaaacgaatccctaaccgacaaacccgtaactcacaacaataacgcttcccgacgccccccgaccacatccccacaaaaacgctacgacgcacaaaacattactatacccccaccacaaccacataaaaaaaatataaaaactcgatcctccaatcacgcgacgaacaaatacaacgcgaaacgcccgaacgccgaatctaaacgaactacaaataccgacaaatactaaaaccgaaccgccgcgaaacccacctatactaaacctcaaaccttacgcgccctcgaactaccgtcgccaacccccccaaacaactcgccgccacgctccctcgccgaaacaccgcccccgaaacccgccccgaaaataattacgaaaaaacgcgaaacacgccgaaaaactcgcgaatcgacaccgaaacaactcccgaacgccgtaaaatacacacgtcccgcacccgaaccttccgatcaacttccc

SEQ ID NO: 14187 - DNA, 554 bp, Artificial Sequence
  chemically treated genomic DNA (Homo sapiens) CpG-island No: 14187
aggaggtttgtgaaagtatttaggtattttttttcgtttcgtggaatcgtatcgtaaaggtagtttattggtttcggggcgggtttttggtcgataaattcgtaatttatagtagtgacgtttttcgacgtttttcggttatatttttataggaacgttacggcgtatagggtattattgtgtttttattataattatataaagaaaatgtgggggttcggttttttagttacgcggcgagtaagtgtagcgcgggacgttcgagcgtcgggtttaggcgggttgtaggtgtcggtaagtgttggggtcgggtcgtcgcggaatttatttgtgttgggttttaggttttgcgcgttttcgggttgtcgtcgttaatttttttaaatagttcgtcgttacgttttttcgtcggggtatcgttttcggaattcgtttcggaagtagttgcgggagggcgcggagtacgtcgggaagttcgcgggtcggtatcgggatagttttcgggcgtcgtggaatgtatacgtttcgtattcggatttttcggttagtttttt

SEQ ID NO: 14188 - DNA, 554 bp, Artificial Sequence
  chemically treated genomic DNA (Homo sapiens) CpG-island No: 14188
aaaaaactaaccgaaaaatccgaatacgaaacgtatacattccacgacgcccgaaaactatcccgataccgacccgcgaacttcccgacgtactccgcgccctcccgcaactacttccgaaacgaattccgaaaacgataccccgacgaaaaaacgtaacgacgaactatttaaaaaaattaacgacgacaacccgaaaacgcgcaaaacctaaaacccaacacaaataaattccgcgacgacccgaccccaacacttaccgacacctacaacccgcctaaacccgacgctcgaacgtcccgcgctacacttactcgccgcgtaactaaaaaaccgaacccccacattttctttatataattataataaaaacacaataataccctatacgccgtaacgttcctataaaaatataaccgaaaaacgtcgaaaaacgtcactactataaattacgaatttatcgaccaaaaacccgccccgaaaccaataaactacctttacgatacgattccacgaaacgaaaaaaaatacctaaatactttcacaaacctcct

SEQ ID NO: 14189 - DNA, 742 bp, Artificial Sequence
  chemically treated genomic DNA (Homo sapiens) CpG-island No: 14189
ttttcgcgttgtttttcggcgttttcggcgcgagaggattttatttttcgacgtgtttcgggatcggaggcggagggtcgcgtaggcgtcgggtttcgggtcgagtcgggggttgggggttcgaggcgttttcgcggtcgtggacgagcgttcgtgcggtttggttcgggttatgttcgcgtgaggatttcgtcgttgtcgtcgttttcgtttcggttttggttttttgttcggtagcgtcgcgtattatgggttttatttttagtcgtcgtatcgcgggggtggaggatatcgatatttaggcgaattcggtttatcgttatttttcgaagttcggtgagcgttcggttttaggcgcggattgttaggtacgcgttggaacgcggattcggcggcgcgggggcggggattcggggcggggcgtttgttcggtttttttcgggtatcgttgttatatcgagttttcgcgcggttttacggtttcgatttgtaggcgtggttgggagttcggatgaatttgttcgagtcgtatttggcgttgttattgttcggtttgggtgacgttggggtagttttttcgtatcgagtattttagtttcgtttttgtaatagtggtgagtttttgggggaattcgtaggttgggcggggtgttgatcgtaggttcggtcgatcgattttgttagaaattttcgtgtacgagttcgatttcgtatcgatggtatagttgttttttgtgtgaag

SEQ ID NO: 14190 - DNA, 742 bp, Artificial Sequence
  chemically treated genomic DNA (Homo sapiens) CpG-island No: 14190
cttcacacaaaaaacaactataccatcgatacgaaatcgaactcgtacacgaaaatttctaacaaaatcgatcgaccgaacctacgatcaacaccccgcccaacctacgaattcccccaaaaactcaccactattacaaaaacgaaactaaaatactcgatacgaaaaaactaccccaacgtcacccaaaccgaacaataacaacgccaaatacgactcgaacaaattcatccgaactcccaaccacgcctacaaatcgaaaccgtaaaaccgcgcgaaaactcgatataacaacgatacccgaaaaaaaccgaacaaacgccccgccccgaatccccgcccccgcgccgccgaatccgcgttccaacgcgtacctaacaatccgcgcctaaaaccgaacgctcaccgaacttcgaaaaataacgataaaccgaattcgcctaaatatcgatatcctccacccccgcgatacgacgactaaaaataaaacccataatacgcgacgctaccgaacaaaaaaccaaaaccgaaacgaaaacgacgacaacgacgaaatcctcacgcgaacataacccgaaccaaaccgcacgaacgctcgtccacgaccgcgaaaacgcctcgaacccccaacccccgactcgacccgaaacccgacgcctacgcgaccctccgcctccgatcccgaaacacgtcgaaaaataaaatcctctcgcgccgaaaacgccgaaaaacaacgcgaaaa

SEQ ID NO: 14191 - DNA, 742 bp, Artificial Sequence
  chemically treated genomic DNA (Homo sapiens) CpG-island No: 14191
ttttatatagaaaatagttatattatcgatacgaaatcgagttcgtatacgagagtttttagtagaatcgatcggtcggatttgcgattagtatttcgtttagtttacgggtttttttaagagtttattattgttgtaaggacggagttgaggtgttcggtgcgaaggaattgttttaacgttatttaagtcgagtagtagtagcgttaggtacggttcgagtaggtttattcgagtttttagttacgtttatagatcggagtcgtggggtcgcgcgaaggttcggtgtagtaacgatgttcggagggggtcgagtaagcgtttcgtttcgagttttcgttttcgcgtcgtcgggttcgcgttttagcgcgtgtttagtagttcgcgtttggggtcgggcgtttatcggatttcggagggtagcgataggtcgagttcgtttggatgtcgatgttttttattttcgcgatgcggcggttgagaatggagtttatggtgcgcggcgttgtcgggtagagggttagggtcggaacgggagcggcgatagcggcggggtttttacgcggatatggttcggattaggtcgtacggacgttcgtttacggtcgcggaggcgtttcgagtttttaattttcggttcggttcggggttcgacgtttacgcggtttttcgttttcggtttcggggtacgtcgggaaatggagttttttcgcgtcgaaggcgtcgggaagtagcgcgggaa

SEQ ID NO: 14192 - DNA, 742 bp, Artificial Sequence
  chemically treated genomic DNA (Homo sapiens) CpG-island No: 14192
ttcccgcgctacttcccgacgccttcgacgcgaaaaaactccatttcccgacgtaccccgaaaccgaaaacgaaaaaccgcgtaaacgtcgaaccccgaaccgaaccgaaaattaaaaactcgaaacgcctccgcgaccgtaaacgaacgtccgtacgacctaatccgaaccatatccgcgtaaaaaccccgccgctatcgccgctcccgttccgaccctaaccctctacccgacaacgccgcgcaccataaactccattctcaaccgccgcatcgcgaaaataaaaaacatcgacatccaaacgaactcgacctatcgctaccctccgaaatccgataaacgcccgaccccaaacgcgaactactaaacacgcgctaaaacgcgaacccgacgacgcgaaaacgaaaactcgaaacgaaacgcttactcgaccccctccgaacatcgttactacaccgaaccttcgcgcgaccccacgactccgatctataaacgtaactaaaaactcgaataaacctactcgaaccgtacctaacgctactactactcgacttaaataacgttaaaacaattccttcgcaccgaacacctcaactccgtccttacaacaataataaactcttaaaaaaacccgtaaactaaacgaaatactaatcgcaaatccgaccgatcgattctactaaaaactctcgtatacgaactcgatttcgtatcgataatataactattttctatataaaa

SEQ ID NO: 14193 - DNA, 871 bp, Artificial Sequence
  chemically treated genomic DNA (Homo sapiens) CpG-island No: 14193
agttcgtcgaaacgtatttgtatttgtaagggagcgcgggttatagttcggggtcgacggacgttttcgttcggttcgtcgcgtcggtatttttcgttcgcgttttcgttcgtttttattagtatcgagaagcgtatggggatgcggtcgaagagttgtttagggttggcggcgtatagtatggcgtggtacgagtgttttagttcggttttagcgtatcgtttttattcggttgatttgttttagtttcggaatcgtcgtcgtcgatattttggtattgatttcgttttcgtcgttgttatttaagagtatgtcgagttcgttttcgtcgtgtttcgttaattcgcggcgtcgcgttttcgggttcggttttttcgttaatcgtcggcgcgtttcgggatcgagtttttcgtaggtttcggtgcgtcgtcgagaggtgttgcgggcgtgtgtaaaggagtgcggtgcgcgttagtcgttatttaatagtcgtatatttttggcggcggttcgttttcgacgtgagagtttagacgattggtcggtgtcgtggtggtttaaggttgatattgtgggcgacgaatattttttttggcgttttaaagcggatagtcgaaatattttgcggtttttttattttcgatggcgtcgatttttttgcgtttattcgtttttttttaggaggtcgattcggttcgtatggtttcgtttattcgtaatggtatttttggtacgattatacgagttagagatgtttcggagttttgtttcgttagcgttatcggatttaagttcggagggagatggttttcgtttgttatgtacgatagttgtttcgatttagttattttgttggtaggttcgatttagg

SEQ ID NO: 14194 - DNA, 871 bp, Artificial Sequence
  chemically treated genomic DNA (Homo sapiens) CpG-island No: 14194
cctaaatcgaacctaccaacaaaataactaaatcgaaacaactatcgtacataacaaacgaaaaccatctccctccgaacttaaatccgataacgctaacgaaacaaaactccgaaacatctctaactcgtataatcgtaccaaaaataccattacgaataaacgaaaccatacgaaccgaatcgacctcctaaaaaaaaacgaataaacgcaaaaaaatcgacgccatcgaaaataaaaaaaccgcaaaatatttcgactatccgctttaaaacgccaaaaaaaatattcgtcgcccacaatatcaaccttaaaccaccacgacaccgaccaatcgtctaaactctcacgtcgaaaacgaaccgccgccaaaaatatacgactattaaataacgactaacgcgcaccgcactcctttacacacgcccgcaacacctctcgacgacgcaccgaaacctacgaaaaactcgatcccgaaacgcgccgacgattaacgaaaaaaccgaacccgaaaacgcgacgccgcgaattaacgaaacacgacgaaaacgaactcgacatactcttaaataacaacgacgaaaacgaaatcaataccaaaatatcgacgacgacgattccgaaactaaaacaaatcaaccgaataaaaacgatacgctaaaaccgaactaaaacactcgtaccacgccatactatacgccgccaaccctaaacaactcttcgaccgcatccccatacgcttctcgatactaataaaaacgaacgaaaacgcgaacgaaaaataccgacgcgacgaaccgaacgaaaacgtccgtcgaccccgaactataacccgcgctcccttacaaatacaaatacgtttcgacgaact

SEQ ID NO: 14195 - DNA, 871 bp, Artificial Sequence
  chemically treated genomic DNA (Homo sapiens) CpG-island No: 14195
tttggatcgagtttgttagtagggtggttaggtcgggatagttgtcgtgtatggtaggcgaaggttattttttttcgggtttgggttcggtggcgttggcggagtaaggtttcggggtatttttggttcgtgtggtcgtgttaagggtgttattgcggatggacggggttatgcgggtcgggtcggttttttggggagaaacgggtgggcgtaaggggatcggcgttatcgagggtggagaaatcgtaggatatttcggttgttcgttttggggcgttaaggaagatgttcgtcgtttataatgttaattttgagttattacggtatcgattagtcgtttaggtttttacgtcggaggcgggtcgtcgttaagggtgtgcgattattgggtgacggttgacgcgtatcgtatttttttgtatacgttcgtagtatttttcgacgacgtatcggggtttgcgaggggttcggtttcggggcgcgtcggcgattggcgggggaatcggattcgggggcgcggcgtcgcggattggcgaggtacggcgggggcgggttcggtatgtttttaagtggtagcggcggggacggggttagtgttaagatgtcgacggcggcggtttcggagttgaagtagattagtcgggtggaggcgatgcgttagggtcgggttggagtattcgtgttacgttatgttgtacgtcgttaattttgggtagtttttcggtcgtatttttatgcgtttttcggtgttggtgaggacgggcgagggcgcgggcgagaggtgtcggcgcggcgggtcgggcgggggcgttcgtcgatttcgggttgtgattcgcgtttttttgtagatgtagatgcgtttcgacgggtt

SEQ ID NO: 14196 - DNA, 871 bp, Artificial Sequence
  chemically treated genomic DNA (Homo sapiens) CpG-island No: 14196
aacccgtcgaaacgcatctacatctacaaaaaaacgcgaatcacaacccgaaatcgacgaacgcccccgcccgacccgccgcgccgacacctctcgcccgcgccctcgcccgtcctcaccaacaccgaaaaacgcataaaaatacgaccgaaaaactacccaaaattaacgacgtacaacataacgtaacacgaatactccaacccgaccctaacgcatcgcctccacccgactaatctacttcaactccgaaaccgccgccgtcgacatcttaacactaaccccgtccccgccgctaccacttaaaaacataccgaacccgcccccgccgtacctcgccaatccgcgacgccgcgcccccgaatccgattcccccgccaatcgccgacgcgccccgaaaccgaacccctcgcaaaccccgatacgtcgtcgaaaaatactacgaacgtatacaaaaaaatacgatacgcgtcaaccgtcacccaataatcgcacacccttaacgacgacccgcctccgacgtaaaaacctaaacgactaatcgataccgtaataactcaaaattaacattataaacgacgaacatcttccttaacgccccaaaacgaacaaccgaaatatcctacgatttctccaccctcgataacgccgatccccttacgcccacccgtttctccccaaaaaaccgacccgacccgcataaccccgtccatccgcaataacacccttaacacgaccacacgaaccaaaaataccccgaaaccttactccgccaacgccaccgaacccaaacccgaaaaaaaataaccttcgcctaccatacacgacaactatcccgacctaaccaccctactaacaaactcgatccaaa

SEQ ID NO: 14197 - DNA, 551 bp, Artificial Sequence
  chemically treated genomic DNA (Homo sapiens) CpG-island No: 14197
  unsure (54, 436)
ttacggttgtcggtaaatttggaatattttcggcggcgcgttttgtcgttgatncgatattaatcgttgcgggcgttgcggtttttcggtcggcgaatattggatttattgagttattgggtagggttttgtcgtcgttgttgattcggttgttttttttttttttttttttttttcggtgttcgtttcggtgggcgttcggggcgtttattttcgcggttttgttttttcgttttcgtcgtttttttttttttttcgtttcgtgtcgtttttttttttttgttcggggtttttcgttcgtttttttgtatttttcgtttcgtcggttttttttttttttttttttttttttcgtttttttttttttttcgtcgcgtttttcgtgtttcgttttcggcgggtttttttttgtttcgtgcgcgtttttcgtgtgttnggggttttgtgttttcgtcggtgggggttttcgtcgtgcgttttagagttaaaaataaaaaaaataattatttttttattttatttttttagtagttaagtgtggttataagata

SEQ ID NO: 14198 - DNA, 551 bp, Artificial Sequence
  chemically treated genomic DNA (Homo sapiens) CpG-island No: 14198
  unsure (116, 498)
tatcttataaccacacttaactactaaaaaaataaaataaaaaaataattattttttttatttttaactctaaaacgcacgacgaaaacccccaccgacgaaaacacaaaaccccnaacacacgaaaaacgcgcacgaaacaaaaaaaaacccgccgaaaacgaaacacgaaaaacgcgacgaaaaaaaaaaaaaaacgaaaaaaaaaaaaaaaaaaaaaaaaaaccgacgaaacgaaaaatacaaaaaaacgaacgaaaaaccccgaacaaaaaaaaaaaaacgacacgaaacgaaaaaaaaaaaaaaacgacgaaaacgaaaaaacaaaaccgcgaaaataaacgccccgaacgcccaccgaaacgaacaccgaaaaaaaaaaaaaaaaaaaaaaaacaaccgaatcaacaacgacgacaaaaccctacccaataactcaataaatccaatattcgccgaccgaaaaaccgcaacgcccgcaacgattaatatcgnatcaacgacaaaacgcgccgccgaaaatattccaaatttaccgacaaccgtaa

SEQ ID NO: 14199 - DNA, 551 bp, Artificial Sequence
  chemically treated genomic DNA (Homo sapiens) CpG-island No: 14199
  unsure (116, 498)
tgttttatagttatatttagttgttggaggggtggaataggaaagtgattattttttttgtttttggttttggggcgtacggcgagagtttttatcgacggaggtataagattttngatatacggagggcgcgtacgaagtagggaaaggttcgtcgaagacgaaatacggggggcgcgacgaaaagggggggaaaacgggaaagagagaggggggggggaggaatcggcgggacggggggtgtaaagggacgagcgaagggtttcggataggggggagagggcggtacggaacgagggggaagaggggacggcggaggcggagggatagaatcgcggaaataaacgtttcgggcgtttatcggggcgggtatcggaagggggaggggaaggaagagggtaatcggattaataacggcgataaagttttgtttagtgatttagtaagtttaatattcgtcggtcggggggtcgtagcgttcgtagcggttgatatcgngttagcggtaggacgcgtcgtcgggggtgttttaggtttgtcggtagtcgtag

SEQ ID NO: 14200 - DNA, 551 bp, Artificial Sequence
  chemically treated genomic DNA (Homo sapiens) CpG-island No: 14200
  unsure (54, 436)
ctacgactaccgacaaacctaaaacacccccgacgacgcgtcctaccgctaacncgatatcaaccgctacgaacgctacgaccccccgaccgacgaatattaaacttactaaatcactaaacaaaactttatcgccgttattaatccgattaccctcttccttcccctcccccttccgatacccgccccgataaacgcccgaaacgtttatttccgcgattctatccctccgcctccgccgtcccctcttccccctcgttccgtaccgccctctcccccctatccgaaacccttcgctcgtccctttacaccccccgtcccgccgattcctcccccccccctctctctttcccgttttcccccccttttcgtcgcgccccccgtatttcgtcttcgacgaacctttccctacttcgtacgcgccctccgtatatcnaaaatcttatacctccgtcgataaaaactctcgccgtacgccccaaaaccaaaaacaaaaaaaataatcactttcctattccacccctccaacaactaaatataactataaaaca

SEQ ID NO: 14201 - DNA, 533 bp, Artificial Sequence
  chemically treated genomic DNA (Homo sapiens) CpG-island No: 14201
  unsure (36..37, 41, 43..44, 52, 58, 72, 77, 134)
agcgcgtgttcggcgacgaacggtagtttgcgtttnncgtntnntatttttncgtcgngatcgttggttttnttttntagttcgtcgggttttttttgggcggtgcggttcggtcggcgcggttcgggtttggnttcgcgttcgttcgtgggtggttggttttggttgtttgtggttggcgcgcggtggttttcgcgtttttttcgtttgtttcgcgcggggtggtgcggcgtttcgttggtgcggcgcgggtttcgcgcgggtttttggttggtcgtcgggcgcggcgtcgttgtcgttttggcggtgtgtttcgtttgttttcggcggggggtgtttcggcggtggcgttggttgtcgggttttttttgtttcgttggtttcgggttgcgtttcgcgttcggttgtggcgcgtttgtcgcgggttttcgcgtcggggcggcgttggtgcggtttcggggcgttttgcgttcgtgcgcgtgtgtggtagaaaataaaaaaaagaatataaatttgatttaattatagttaaa

SEQ ID NO: 14202 - DNA, 533 bp, Artificial Sequence
  chemically treated genomic DNA (Homo sapiens) CpG-island No: 14202
  unsure (400, 457, 462, 476, 482, 490..491, 493, 497..)
tttaactataattaaatcaaatttatattcttttttttattttctaccacacacgcgcacgaacgcaaaacgccccgaaaccgcaccaacgccgccccgacgcgaaaacccgcgacaaacgcgccacaaccgaacgcgaaacgcaacccgaaaccaacgaaacaaaaaaaacccgacaaccaacgccaccgccgaaacaccccccgccgaaaacaaacgaaacacaccgccaaaacgacaacgacgccgcgcccgacgaccaaccaaaaacccgcgcgaaacccgcgccgcaccaacgaaacgccgcaccaccccgcgcgaaacaaacgaaaaaaacgcgaaaaccaccgcgcgccaaccacaaacaaccaaaaccaaccacccacgaacgaacgcgaanccaaacccgaaccgcgccgaccgaaccgcaccgcccaaaaaaaacccgacgaactanaaaanaaaaccaacgatcncgacgnaaaaatannanacgnnaaacgcaaactaccgttcgtcgccgaacacgcgct

SEQ ID NO: 14203 - DNA, 533 bp, Artificial Sequence
  chemically treated genomic DNA (Homo sapiens) CpG-island No: 14203
  unsure (400, 457, 462, 476, 482, 490..491, 493, 497..)
tttaattataattaaattaagtttgtgtttttttttttattttttattatatacgcgtacgagcgtagggcgtttcggggtcgtattagcgtcgtttcggcgcggaggttcgcgataaacgcgttataatcgaacgcggggcgtagttcgagattagcggaatagaaagggttcgataattagcgttatcgtcgagatatttttcgtcgggagtagacggagtatatcgttagggcggtaacggcgtcgcgttcgacgattaattagaggttcgcgcgagattcgcgtcgtattagcggaacgtcgtattatttcgcgcggagtaaacgaggggggcgcgaggattatcgcgcgttagttataggtaattagagttagttatttacgggcgggcgcgggnttagattcgagtcgcgtcggtcggatcgtatcgtttaggagagattcggcgagttgnggagngaagttagcgattncggcgngggaatanngngcgnngaacgtaaattgtcgttcgtcgtcgggtacgcgtt

SEQ ID NO: 14204 - DNA, 533 bp, Artificial Sequence
  chemically treated genomic DNA (Homo sapiens) CpG-island No: 14204
  unsure (36..37, 41, 43..44, 52, 58, 72, 77, 134)
aacgcgtacccgacgacgaacgacaatttacgttcnncgcncnntattcccncgccgnaatcgctaacttcnctccncaactcgccgaatctctcctaaacgatacgatccgaccgacgcgactcgaatctaancccgcgcccgcccgtaaataactaactctaattacctataactaacgcgcgataatcctcgcgcccccctcgtttactccgcgcgaaataatacgacgttccgctaatacgacgcgaatctcgcgcgaacctctaattaatcgtcgaacgcgacgccgttaccgccctaacgatatactccgtctactcccgacgaaaaatatctcgacgataacgctaattatcgaaccctttctattccgctaatctcgaactacgccccgcgttcgattataacgcgtttatcgcgaacctccgcgccgaaacgacgctaatacgaccccgaaacgccctacgctcgtacgcgtatataataaaaaataaaaaaaaaaacacaaacttaatttaattataattaaa

SEQ ID NO: 14205 - DNA, 755 bp, Artificial Sequence
  chemically treated genomic DNA (Homo sapiens) CpG-island No: 14205
cgaggaaatttaaattttcgggcgcgcgtaggtcgacgggattcgaggaggaggggtaggacgaaggggtcgcgcgcgttacgtcgggcgcgtcgtcgttgttcgagttcggtattggtgggaacgcggcgcgtttttgaggtttagttacgtttcgttcgcggggtaggcgggtatttttacgcgcgcgggtatgagtcgtggtaggagtgcgcggcggtagcggtggtcgttttttggggtttggggtgtgtttatttgtataagcgggcgcgcgtcgttcgggttgggtggattcggcgggatttgattgtttcgttgtttagaggcggagaagaagaggtagcgagtggacgtgattgttttatttcgggtaaaagggatagaattagaggtggggagtttgggtagtcggcgattcgcgaagatttgaggtgtcgtagcggtattcggagtagcgtcgggtttttttcggggtgtagtcgtcgtcgggggaagggcgttataggtcgggaagattttttttttttgtgtttagtagtggggtttatcggagggcggttcgtgggtcgggttttatcgcggcgtttcgggattgtggggttaggttgcgttgggtggacgtttatttcgttaattttcggaggtttttgggggttttcgtgcgtttcggggttgtagagatttaggggaggcgtttgtgaggttcggatttgtttcggggcgaagggtatgtggcgagatagagttttgta

SEQ ID NO: 14206 - DNA, 755 bp, Artificial Sequence
  chemically treated genomic DNA (Homo sapiens) CpG-island No: 14206
tacaaaactctatctcgccacatacccttcgccccgaaacaaatccgaacctcacaaacgcctcccctaaatctctacaaccccgaaacgcacgaaaacccccaaaaacctccgaaaattaacgaaataaacgtccacccaacgcaacctaaccccacaatcccgaaacgccgcgataaaacccgacccacgaaccgccctccgataaaccccactactaaacacaaaaaaaaaaaatcttcccgacctataacgcccttcccccgacgacgactacaccccgaaaaaaacccgacgctactccgaataccgctacgacacctcaaatcttcgcgaatcgccgactacccaaactccccacctctaattctatcccttttacccgaaataaaacaatcacgtccactcgctacctcttcttctccgcctctaaacaacgaaacaatcaaatcccgccgaatccacccaacccgaacgacgcgcgcccgcttatacaaataaacacaccccaaaccccaaaaaacgaccaccgctaccgccgcgcactcctaccacgactcatacccgcgcgcgtaaaaatacccgcctaccccgcgaacgaaacgtaactaaacctcaaaaacgcgccgcgttcccaccaataccgaactcgaacaacgacgacgcgcccgacgtaacgcgcgcgaccccttcgtcctacccctcctcctcgaatcccgtcgacctacgcgcgcccgaaaatttaaatttcctcg

SEQ ID NO: 14207 - DNA, 755 bp, Artificial Sequence
  chemically treated genomic DNA (Homo sapiens) CpG-island No: 14207
tgtagggttttgtttcgttatatatttttcgtttcggggtaggttcgggttttataggcgttttttttggatttttgtagtttcggggcgtacgaagatttttagggattttcgaaggttggcgaggtgggcgtttatttaacgtagtttgattttatagtttcggagcgtcgcggtgaggttcggtttacgggtcgtttttcggtggattttattattggatataaagggaggaggttttttcggtttgtggcgtttttttttcgacggcggttgtatttcggagggagttcggcgttatttcggatgtcgttgcggtattttaagttttcgcgggtcgtcgattgtttagattttttatttttggttttattttttttgttcgggatagagtagttacgtttattcgttattttttttttttcgtttttggatagcggagtagttaaatttcgtcggatttatttagttcggacggcgcgcgttcgtttatgtaaataaatatattttaagttttaaggggcggttatcgttgtcgtcgcgtatttttgttacggtttatgttcgcgcgcgtagaagtgttcgtttatttcgcggacggggcgtggttaagttttagggacgcgtcgcgtttttattaatgtcggattcgggtagcggcggcgcgttcgacgtggcgcgcgcgattttttcgttttgtttttttttttcgggtttcgtcggtttgcgcgcgttcgggagtttgaattttttcg

SEQ ID NO: 14208 - DNA, 755 bp, Artificial Sequence
  chemically treated genomic DNA (Homo sapiens) CpG-island No: 14208
cgaaaaaattcaaactcccgaacgcgcgcaaaccgacgaaacccgaaaaaaaaaaacaaaacgaaaaaatcgcgcgcgccacgtcgaacgcgccgccgctacccgaatccgacattaataaaaacgcgacgcgtccctaaaacttaaccacgccccgtccgcgaaataaacgaacacttctacgcgcgcgaacataaaccgtaacaaaaatacgcgacgacaacgataaccgccccttaaaacttaaaatatatttatttacataaacgaacgcgcgccgtccgaactaaataaatccgacgaaatttaactactccgctatccaaaaacgaaaaaaaaaaaataacgaataaacgtaactactctatcccgaacaaaaaaaataaaaccaaaaataaaaaatctaaacaatcgacgacccgcgaaaacttaaaataccgcaacgacatccgaaataacgccgaactccctccgaaatacaaccgccgtcgaaaaaaaaacgccacaaaccgaaaaaacctcctccctttatatccaataataaaatccaccgaaaaacgacccgtaaaccgaacctcaccgcgacgctccgaaactataaaatcaaactacgttaaataaacgcccacctcgccaaccttcgaaaatccctaaaaatcttcgtacgccccgaaactacaaaaatccaaaaaaaacgcctataaaacccgaacctaccccgaaacgaaaaatatataacgaaacaaaaccctaca

SEQ ID NO: 14209 - DNA, 521 bp, Artificial Sequence
  chemically treated genomic DNA (Homo sapiens) CpG-island No: 14209
  unsure (173)
tcgcggtatttatgttatttatttttacgggttttatacggtttgtgagtttgtttatcgcgtttttttttttataaaatcgcgttatcggtttttagcggcggtaattttttttaacgcgtcgttatatgcgttcggagcgggttataaattcgttatattgcgcgcgttancgcgttgtaatagcgcgttttttgacgtttagtatggcgcgcgaattacgttattgtattagtttgttatatcgtcgtttatagcggtcgttatatagtcgttattagttcgcgtttataatgcgtttatatttcgcgtatttttaagcgagcgttataagtagtcggttataacggatttgtttgtatatacgcgttggaaacgcgcgtcgatttaattatcgttgttattatcgcggtttgaacgagcggcggttttaagtatttttgtaaattcgcgttttttagatatttcgttttatattttcgatgcgtaagtaatcgttatgatacgcgttttttagttta

SEQ ID NO: 14210 - DNA, 521 bp, Artificial Sequence
  chemically treated genomic DNA (Homo sapiens) CpG-island No: 14210
  unsure (349)
taaactaaaaaacgcgtatcataacgattacttacgcatcgaaaatataaaacgaaatatctaaaaaacgcgaatttacaaaaatacttaaaaccgccgctcgttcaaaccgcgataataacaacgataattaaatcgacgcgcgtttccaacgcgtatatacaaacaaatccgttataaccgactacttataacgctcgcttaaaaatacgcgaaatataaacgcattataaacgcgaactaataacgactatataacgaccgctataaacgacgatataacaaactaatacaataacgtaattcgcgcgccatactaaacgtcaaaaaacgcgctattacaacgcgntaacgcgcgcaatataacgaatttataacccgctccgaacgcatataacgacgcgttaaaaaaaattaccgccgctaaaaaccgataacgcgattttataaaaaaaaaaacgcgataaacaaactcacaaaccgtataaaacccgtaaaaataaataacataaataccgcga

SEQ ID NO: 14211 - DNA, 521 bp, Artificial Sequence
  chemically treated genomic DNA (Homo sapiens) CpG-island No: 14211
  unsure (349)
tgaattaaaaaacgcgtattatggcggttgtttacgtatcggggatgtaagacgaggtatttggagggcgcggatttatagagatgtttgagatcgtcgttcgtttaagtcgcggtggtaatagcgatagttggatcggcgcgcgtttttagcgcgtgtgtataagtaggttcgttatgatcgattgtttgtagcgttcgtttgagagtgcgcggagtataggcgtattgtgagcgcgggttgatagcgattgtataacggtcgttgtaggcggcggtgtgatagattgatatagtggcgtggttcgcgcgttatgttagacgttaggaagcgcgttgttatagcgcgntaacgcgcgtagtatagcgggtttatggttcgtttcgggcgtatatagcggcgcgttgaggaggattatcgtcgttgagggtcggtagcgcggttttgtggaggagaaagcgcggtaaataggtttataagtcgtgtgaagttcgtgggggtaagtgatatgggtgtcgcgg

SEQ ID NO: 14212 - DNA, 521 bp, Artificial Sequence
  chemically treated genomic DNA (Homo sapiens) CpG-island No: 14212
  unsure (173)
ccgcgacacccatatcacttacccccacgaacttcacacgacttataaacctatttaccgcgctttctcctccacaaaaccgcgctaccgaccctcaacgacgataatcctcctcaacgcgccgctatatacgcccgaaacgaaccataaacccgctatactacgcgcgttancgcgctataacaacgcgcttcctaacgtctaacataacgcgcgaaccacgccactatatcaatctatcacaccgccgcctacaacgaccgttatacaatcgctatcaacccgcgctcacaatacgcctatactccgcgcactctcaaacgaacgctacaaacaatcgatcataacgaacctacttatacacacgcgctaaaaacgcgcgccgatccaactatcgctattaccaccgcgacttaaacgaacgacgatctcaaacatctctataaatccgcgccctccaaatacctcgtcttacatccccgatacgtaaacaaccgccataatacgcgttttttaattca

SEQ ID NO: 14213 - DNA, 1027 bp, Artificial Sequence
  chemically treated genomic DNA (Homo sapiens) CpG-island No: 14213
cgttatcggataacggcgacgtagggtatcggtagtacgtcgcgtatcgagcgtcgcgttgatttttttttgttagtttataatgttgtcgcgttgtaatattcgtcggtgttcggggttattagcgtttgtttaagacgttgttgttgttcgttattttttgttagtacggtagtttgttgcggatttagttttagtttgcggaatagttgtaggtttttattttttttcggattcgggcgtggttatagtttgtaatcgtagaaaatcgagtttgcgtttgttataaagtatatcgtttgagtttgtcgtttatttgttcgcgttcggtaaaaaggcgtacgtacgaggttggtattaagattcgcgcggatcggattggggtaaataaaagtaagggtatcggttttttttatttttagtttagcgggcgttttttttaaatttttaaacgagacggcgtggtggggtttatttttttttcgcgggggcgattttacggttaacggttaaatgcgataaatcgtatttcgtcgttaaattcgtttacgttttataatcgttcgtaaatgcgttaatcgtcggttatcgttgtagtaaaacgttattgtttatcgttttttacgcggcggtatacgcggcgcgaatatagtttgtttttaagacgtcgcgtatacgatgtttttttgtatataagtatcgtattagcggttgacgttcgtttagcgtttatgttgattcgttgaaatataatcgcgttcgtgtatatcggtcgtgatatacgcgacgcgtttcgatcgtattagttttcgatatatacgtcgtttttacgtttcgatgtgataacgacgtacggtcggaaatttgtcggttttttatgttagttattatcgtatcgatcgacgtttagttatgtttcgatcggaatttatcgttggcgtaattatcgtcgtggcgttataacgtcggcgtgtagtttttcgttttttattattatgatacgcggtatattattttattatagttt

SEQ ID NO: 14214 - DNA, 1027 bp, Artificial Sequence
  chemically treated genomic DNA (Homo sapiens) CpG-island No: 14214
aaactataataaaataatataccgcgtatcataataataaaaaacgaaaaactacacgccgacgttataacgccacgacgataattacgccaacgataaattccgatcgaaacataactaaacgtcgatcgatacgataataactaacataaaaaaccgacaaatttccgaccgtacgtcgttatcacatcgaaacgtaaaaacgacgtatatatcgaaaactaatacgatcgaaacgcgtcgcgtatatcacgaccgatatacacgaacgcgattatatttcaacgaatcaacataaacgctaaacgaacgtcaaccgctaatacgatacttatatacaaaaaaacatcgtatacgcgacgtcttaaaaacaaactatattcgcgccgcgtataccgccgcgtaaaaaacgataaacaataacgttttactacaacgataaccgacgattaacgcatttacgaacgattataaaacgtaaacgaatttaacgacgaaatacgatttatcgcatttaaccgttaaccgtaaaatcgcccccgcgaaaaaaaaataaaccccaccacgccgtctcgtttaaaaatttaaaaaaaacgcccgctaaactaaaaataaaaaaaaccgatacccttacttttatttaccccaatccgatccgcgcgaatcttaataccaacctcgtacgtacgcctttttaccgaacgcgaacaaataaacgacaaactcaaacgatatactttataacaaacgcaaactcgattttctacgattacaaactataaccacgcccgaatccgaaaaaaaataaaaacctacaactattccgcaaactaaaactaaatccgcaacaaactaccgtactaacaaaaaataacgaacaacaacaacgtcttaaacaaacgctaataaccccgaacaccgacgaatattacaacgcgacaacattataaactaacaaaaaaaaatcaacgcgacgctcgatacgcgacgtactaccgataccctacgtcgccgttatccgataacg

SEQ ID NO: 14215 - DNA, 1027 bp, Artificial Sequence
  chemically treated genomic DNA (Homo sapiens) CpG-island No: 14215
aaattgtgatgaaataatgtatcgcgtattatggtggtgaggagcggaaaattatacgtcggcgttataacgttacggcgatgattgcgttagcgatggatttcggtcgggatatagttagacgtcggtcgatacgatggtggttgatataagaggtcggtaggttttcgatcgtacgtcgttattatatcgaggcgtgaggacgacgtatgtgtcgagagttagtgcggtcggggcgcgtcgcgtgtgttacgatcggtgtgtacgaacgcgattgtattttagcggattaatatgagcgttagacgaacgttagtcgttggtacgatgtttgtatatagagaagtatcgtgtgcgcggcgttttaaaagtaggttgtattcgcgtcgcgtatgtcgtcgcgtagagagcggtaaatagtggcgttttgttgtagcggtggtcggcggttggcgtatttacggacgattatggggcgtaagcggatttagcggcgaagtgcggtttatcgtatttggtcgttagtcgtggagtcgttttcgcggggaaagggtgggttttattacgtcgtttcgtttaaaggtttaaagggagcgttcgttgggttagagatggggaaggtcgatgtttttgtttttatttgttttagttcggttcgcgcggattttgatgttaatttcgtacgtgcgtttttttgtcgggcgcgagtagatgaacgatagatttaggcgatgtgttttatggtaggcgtaaattcgattttttacggttgtaaattgtgattacgttcgaattcggaagaagataaagatttgtaattgtttcgtaaattggggttaaattcgtagtaaattgtcgtgttggtaggggataacgaataatagtaacgttttgaataggcgttgatgatttcggatatcgacgaatattataacgcggtagtattatgagttggtaggagaaaattaacgcggcgttcgatgcgcggcgtgttgtcgatgttttgcgtcgtcgttattcggtggcg

SEQ ID NO: 14216 - DNA, 1027 bp, Artificial Sequence
  chemically treated genomic DNA (Homo sapiens) CpG-island No: 14216
cgccaccgaataacgacgacgcaaaacatcgacaacacgccgcgcatcgaacgccgcgttaattttctcctaccaactcataatactaccgcgttataatattcgtcgatatccgaaatcatcaacgcctattcaaaacgttactattattcgttatcccctaccaacacgacaatttactacgaatttaaccccaatttacgaaacaattacaaatctttatcttcttccgaattcgaacgtaatcacaatttacaaccgtaaaaaatcgaatttacgcctaccataaaacacatcgcctaaatctatcgttcatctactcgcgcccgacaaaaaaacgcacgtacgaaattaacatcaaaatccgcgcgaaccgaactaaaacaaataaaaacaaaaacatcgaccttccccatctctaacccaacgaacgctccctttaaacctttaaacgaaacgacgtaataaaacccaccctttccccgcgaaaacgactccacgactaacgaccaaatacgataaaccgcacttcgccgctaaatccgcttacgccccataatcgtccgtaaatacgccaaccgccgaccaccgctacaacaaaacgccactatttaccgctctctacgcgacgacatacgcgacgcgaatacaacctacttttaaaacgccgcgcacacgatacttctctatatacaaacatcgtaccaacgactaacgttcgtctaacgctcatattaatccgctaaaatacaatcgcgttcgtacacaccgatcgtaacacacgcgacgcgccccgaccgcactaactctcgacacatacgtcgtcctcacgcctcgatataataacgacgtacgatcgaaaacctaccgacctcttatatcaaccaccatcgtatcgaccgacgtctaactatatcccgaccgaaatccatcgctaacgcaatcatcgccgtaacgttataacgccgacgtataattttccgctcctcaccaccataatacgcgatacattatttcatcacaattt

SEQ ID NO: 14217 - DNA, 837 bp, Artificial Sequence
  chemically treated genomic DNA (Homo sapiens) CpG-island No: 14217
ggcgtaattaaacgaattcgcgtcggtttttttagggtttttcggggtttcgtttcgttttagcgggtttcggcggggttgggaaatcggttgaggttcgttttacggtggggaggagcgacgggaggcggaagtttttcggttcgggtttcgttttcgtattcgttttcgtttcgtcgcgattttttattcgtcgttaatttatgtgcgttggtgacgttatcgcgtttattagttcggaagtgcgcgtggcggcggtggcggttgcggtaatagcggggtcggtaagcgggcgcgcgtcgtttagaggggtagagttggtggcgtgagttgttgtttttttttttttgttgtgggttagaggcgttatcgcgttcggttttcgaggaagacgggagcgggacgtggcgagaggtttttttagtagtgggtaaaatagtttcgacgcggaggtcgtgttttcgttacgttttcggcgatcgtaggcgcggattttttggttttttttagtattttttttttcgcgcggacggtttcgagacgtttttttattgggttttgtcgttagtattcggcgtggggggtgagacgcgtttttttagggttggggttttttagagcgtttttttaagtcgaggcggaggtgcgaggaaattgagtgggttttttcgttttacgtggtttgtcgggaagcgcggtttttttattcgttttcgtggaatggaatggtttttttttgtaggtttatatcggggttattcgagagttgttgcggtttttttatgggtaggattttcgtttggggagaacgaggatgtgatatgtagaagggaaggt

SEQ ID NO: 14218 - DNA, 837 bp, Artificial Sequence
  chemically treated genomic DNA (Homo sapiens) CpG-island No: 14218
accttcccttctacatatcacatcctcgttctccccaaacgaaaatcctacccataaaaaaaccgcaacaactctcgaataaccccgatataaacctacaaaaaaaaaccattccattccacgaaaacgaataaaaaaaccgcgcttcccgacaaaccacgtaaaacgaaaaaacccactcaatttcctcgcacctccgcctcgacttaaaaaaacgctctaaaaaaccccaaccctaaaaaaacgcgtctcaccccccacgccgaatactaacgacaaaacccaataaaaaaacgtctcgaaaccgtccgcgcgaaaaaaaaaatactaaaaaaaaccaaaaaatccgcgcctacgatcgccgaaaacgtaacgaaaacacgacctccgcgtcgaaactattttacccactactaaaaaaacctctcgccacgtcccgctcccgtcttcctcgaaaaccgaacgcgataacgcctctaacccacaacaaaaaaaaaaaaacaacaactcacgccaccaactctacccctctaaacgacgcgcgcccgcttaccgaccccgctattaccgcaaccgccaccgccgccacgcgcacttccgaactaataaacgcgataacgtcaccaacgcacataaattaacgacgaataaaaaatcgcgacgaaacgaaaacgaatacgaaaacgaaacccgaaccgaaaaacttccgcctcccgtcgctcctccccaccgtaaaacgaacctcaaccgatttcccaaccccgccgaaacccgctaaaacgaaacgaaaccccgaaaaaccctaaaaaaaccgacgcgaattcgtttaattacgcc

SEQ ID NO: 14219 - DNA, 837 bp, Artificial Sequence
  chemically treated genomic DNA (Homo sapiens) CpG-island No: 14219
gtttttttttttatatattatattttcgttttttttaaacgggggttttgtttataaggaggtcgtagtagttttcgagtgatttcggtgtaaatttgtagagaaaaattattttattttacggaagcgggtggaggagtcgcgtttttcggtaggttacgtggggcggaaagatttatttagttttttcgtattttcgtttcgatttaggaaaacgttttggggaattttagttttgaaaaggcgcgttttattttttacgtcgggtgttggcgataaggtttagtgaaaaagcgtttcggggtcgttcgcgcggaggggaaagtgttgagggaagttaaggaattcgcgtttgcggtcgtcggaaacgtggcggggatacgattttcgcgtcggggttattttgtttattgttgaggaggtttttcgttacgtttcgttttcgtttttttcgaggatcgggcgcggtggcgtttttggtttatagtaggaaggaaggggtagtaatttacgttattaattttgtttttttgagcggcgcgcgttcgtttatcggtttcgttgttgtcgtagtcgttatcgtcgttacgcgtattttcgggttggtgaacgcggtgacgttattaacgtatatgggttggcggcgaatgggaagtcgcggcggggcgagggcgagtgcgggggcggggttcggatcgaagggttttcgtttttcgtcgtttttttttatcgtgaggcgaattttagtcggttttttagtttcgtcgaggttcgttggggcgaagcggagtttcggggggttttgaggaaatcggcgcgggttcgtttaattacgtt

SEQ ID NO: 14220 - DNA, 837 bp, Artificial Sequence
  chemically treated genomic DNA (Homo sapiens) CpG-island No: 14220
aacgtaattaaacgaacccgcgccgatttcctcaaaaccccccgaaactccgcttcgccccaacgaacctcgacgaaactaaaaaaccgactaaaattcgcctcacgataaaaaaaaacgacgaaaaacgaaaacccttcgatccgaaccccgcccccgcactcgccctcgccccgccgcgacttcccattcgccgccaacccatatacgttaataacgtcaccgcgttcaccaacccgaaaatacgcgtaacgacgataacgactacgacaacaacgaaaccgataaacgaacgcgcgccgctcaaaaaaacaaaattaataacgtaaattactaccccttccttcctactataaaccaaaaacgccaccgcgcccgatcctcgaaaaaaacgaaaacgaaacgtaacgaaaaacctcctcaacaataaacaaaataaccccgacgcgaaaatcgtatccccgccacgtttccgacgaccgcaaacgcgaattccttaacttccctcaacactttcccctccgcgcgaacgaccccgaaacgctttttcactaaaccttatcgccaacacccgacgtaaaaaataaaacgcgccttttcaaaactaaaattccccaaaacgttttcctaaatcgaaacgaaaatacgaaaaaactaaataaatctttccgccccacgtaacctaccgaaaaacgcgactcctccacccgcttccgtaaaataaaataatttttctctacaaatttacaccgaaatcactcgaaaactactacgacctccttataaacaaaacccccgtttaaaaaaaacgaaaatataatatataaaaaaaaaaac

SEQ ID NO: 14221 - DNA, 562 bp, Artificial Sequence
  chemically treated genomic DNA (Homo sapiens) CpG-island No: 14221
aaagcgtcgcgattttatcgttggtcgagggtcgacgtgaagtagtttttcggtgcggttttgttgggttggttcgttaggtttggcgtttttacgttcgttttttaggtttagttgtatcgttagcggtttcgagtttcgttttattttcgattatagggaattatttcgggcggttattaggtaggagcggtaggtggttgtttatgttgtgcgtagcgttttgttgatttttttcgtcggttatgtttgtttattcgtaaaggaggttgggatagggcggtgtcgaagatttcgagggagggttcgtgtcgcgcggttgtcgcgtatcggggttatagcgttttttggcggttttaggggagtagacggcggcgcgtatttaagtttgaaagtgatggtttaggcgggagggataattataggtttgcgtttcgtttcggggatagaacgttaacgtcgttttttgttatttacggttgagtgttcggcgtatacgttgtagagtttttattttgttttagtttttagtatgatttatttaattttgatattttgtata

SEQ ID NO: 14222 - DNA, 562 bp, Artificial Sequence
  chemically treated genomic DNA (Homo sapiens) CpG-island No: 14222
tatacaaaatatcaaaattaaataaatcatactaaaaactaaaacaaaataaaaactctacaacgtatacgccgaacactcaaccgtaaataacaaaaaacgacgttaacgttctatccccgaaacgaaacgcaaacctataattatccctcccgcctaaaccatcactttcaaacttaaatacgcgccgccgtctactcccctaaaaccgccaaaaaacgctataaccccgatacgcgacaaccgcgcgacacgaaccctccctcgaaatcttcgacaccgccctatcccaacctcctttacgaataaacaaacataaccgacgaaaaaaatcaacaaaacgctacgcacaacataaacaaccacctaccgctcctacctaataaccgcccgaaataattccctataatcgaaaataaaacgaaactcgaaaccgctaacgatacaactaaacctaaaaaacgaacgtaaaaacgccaaacctaacgaaccaacccaacaaaaccgcaccgaaaaactacttcacgtcgaccctcgaccaacgataaaatcgcgacgcttt

SEQ ID NO: 14223 - DNA, 562 bp, Artificial Sequence
  chemically treated genomic DNA (Homo sapiens) CpG-island No: 14223
tatgtaaaatattaggattaaataagttatgttaagggttggaataaagtgagggttttgtagcgtgtacgtcgggtatttagtcgtggatggtaggggacggcgttggcgttttgttttcgggacggagcgtaggtttgtaattgtttttttcgtttaggttattatttttaggtttgggtacgcgtcgtcgtttgtttttttggggtcgttagggggcgttgtggtttcggtgcgcggtagtcgcgcgatacggattttttttcggagttttcggtatcgttttgttttagttttttttgcgggtaaatagatatggtcggcgaaggagattagtaggacgttgcgtataatatgggtaattatttgtcgtttttgtttggtaatcgttcggagtagttttttgtagtcgggagtggggcgaggttcggagtcgttagcggtgtagttgggtttgggaggcgggcgtgggggcgttaagtttggcgagttagtttagtagggtcgtatcggaaagttgttttacgtcggttttcggttagcgatggagtcgcggcgtttt

SEQ ID NO: 14224 - DNA, 562 bp, Artificial Sequence
  chemically treated genomic DNA (Homo sapiens) CpG-island No: 14224
aaaacgccgcgactccatcgctaaccgaaaaccgacgtaaaacaactttccgatacgaccctactaaactaactcgccaaacttaacgcccccacgcccgcctcccaaacccaactacaccgctaacgactccgaacctcgccccactcccgactacaaaaaactactccgaacgattaccaaacaaaaacgacaaataattacccatattatacgcaacgtcctactaatctccttcgccgaccatatctatttacccgcaaaaaaaactaaaacaaaacgataccgaaaactccgaaaaaaaatccgtatcgcgcgactaccgcgcaccgaaaccacaacgccccctaacgaccccaaaaaaacaaacgacgacgcgtacccaaacctaaaaataataacctaaacgaaaaaaacaattacaaacctacgctccgtcccgaaaacaaaacgccaacgccgtcccctaccatccacgactaaatacccgacgtacacgctacaaaaccctcactttattccaacccttaacataacttatttaatcctaatattttacata

SEQ ID NO: 14225 - DNA, 617 bp, Artificial Sequence
  chemically treated genomic DNA (Homo sapiens) CpG-island No: 14225
cgaaaatcggcggttcgtcgttggtgtagcgtacgtcggaggtgtttttttggatgagcgtttggacgaaagtaagcgattgttcgagcgcgtaagtgtttttggaataagtgtttaggattcgcgcgtttagcgttacgttgggtagtaggttgggattattgttgatttggtttagggcgtagagtatcgtttttagtttgtggatttcgtttttttttttgatgtcgtcgtagggtatttcgttgggatttttggcgtgtacggggaatagtttttcgagggtgacgtttttttcgattcggattgagtgtaaggcgtatattttttggtcgcgcgtcgtcgtcgttagcgcgtataggagtatttttagtacgtagggggattttttagagtcgtacgacgatgcggtggggtgggtgggtgggttttcgcgggtgtgagttggcggtttttttgttggggcgtatcgtggggtgtttggtgtttgttgggggtggggggcggtttcgcgtgtttcgcgcgtggtagcgtcgcgttgggtcgcgttttttttggatcgtttcgatagcgcgggtttttcgtaggcgggtagggatagtattgggagatatatt

SEQ ID NO: 14226 - DNA, 617 bp, Artificial Sequence
  chemically treated genomic DNA (Homo sapiens) CpG-island No: 14226
aatatatctcccaatactatccctacccgcctacgaaaaacccgcgctatcgaaacgatccaaaaaaaacgcgacccaacgcgacgctaccacgcgcgaaacacgcgaaaccgccccccacccccaacaaacaccaaacaccccacgatacgccccaacaaaaaaaccgccaactcacacccgcgaaaacccacccacccaccccaccgcatcgtcgtacgactctaaaaaatccccctacgtactaaaaatactcctatacgcgctaacgacgacgacgcgcgaccaaaaaatatacgccttacactcaatccgaatcgaaaaaaacgtcaccctcgaaaaactattccccgtacacgccaaaaatcccaacgaaataccctacgacgacatcaaaaaaaaaaacgaaatccacaaactaaaaacgatactctacgccctaaaccaaatcaacaataatcccaacctactacccaacgtaacgctaaacgcgcgaatcctaaacacttattccaaaaacacttacgcgctcgaacaatcgcttactttcgtccaaacgctcatccaaaaaaacacctccgacgtacgctacaccaacgacgaaccgccgattttcg

SEQ ID NO: 14227 - DNA, 617 bp, Artificial Sequence
  chemically treated genomic DNA (Homo sapiens) CpG-island No: 14227
ggtatattttttaatgttatttttattcgtttgcgggggattcgcgttgtcgaggcgatttagggagaacgcggtttagcgcgacgttgttacgcgcggggtacgcgaggtcgttttttatttttaataaatattaaatattttacgatgcgttttaatagagaagtcgttagtttatattcgcggaaatttatttatttattttatcgtatcgtcgtgcgattttagaggatttttttgcgtgttggaggtgtttttgtgcgcgttggcggcggcggcgcgcggttaggagatgtacgttttgtatttaattcggatcgagggggacgttattttcggggggttgtttttcgtgtacgttaagggttttagcggagtgttttgcggcgatattaagagggaaaacgggatttataggttggaagcgatgttttacgttttggattagattaatagtgattttaatttattgtttaacgtgacgttgggcgcgcggattttggatatttgttttagggatatttacgcgttcgaatagtcgtttattttcgtttaggcgtttatttagaaggatattttcgacgtgcgttgtattaacggcgaatcgtcggttttcg

SEQ ID NO: 14228 - DNA, 617 bp, Artificial Sequence
  chemically treated genomic DNA (Homo sapiens) CpG-island No: 14228
cgaaaaccgacgattcgccgttaatacaacgcacgtcgaaaatatccttctaaataaacgcctaaacgaaaataaacgactattcgaacgcgtaaatatccctaaaacaaatatccaaaatccgcgcgcccaacgtcacgttaaacaataaattaaaatcactattaatctaatccaaaacgtaaaacatcgcttccaacctataaatcccgttttccctcttaatatcgccgcaaaacactccgctaaaacccttaacgtacacgaaaaacaaccccccgaaaataacgtccccctcgatccgaattaaatacaaaacgtacatctcctaaccgcgcgccgccgccgccaacgcgcacaaaaacacctccaacacgcaaaaaaatcctctaaaatcgcacgacgatacgataaaataaataaataaatttccgcgaatataaactaacgacttctctattaaaacgcatcgtaaaatatttaatatttattaaaaataaaaaacgacctcgcgtaccccgcgcgtaacaacgtcgcgctaaaccgcgttctccctaaatcgcctcgacaacgcgaatcccccgcaaacgaataaaaataacattaaaaaatatacc

SEQ ID NO: 14229 - DNA, 621 bp, Artificial Sequence
  chemically treated genomic DNA (Homo sapiens) CpG-island No: 14229
aattaattcgattattgatatgcgtaggcggttattatttttatttcgtaattacgtcgttttttttttcgtttttagttttaacgttcgataattttcgttacgggtaatttaatgtattcgttttaatatatcgttcgttgataaattacgtcgcgtttaaaattcgttggtttattattacgcgttcgaatataattacggtattcgaaatatacggttgttttaaaaagacgaggtgcgatataattttcggttcgattaaaatcgtcgtttttataaatagggtgtcggaaaaaaaaaacgtgttggtacgtataagtcgaggattataataatacgttcgtcgttttattatattcgttttcgtattagtaaggacggatacgtaatatataatacgtgcgtttttaataacgttttacgcggtgatacgaaaagattacgtgcgcgtatttattataaatatatgcgttttacgcgaaaatataatattcgcggcgcgtatatatatatttgcgtcgtcgttcgatattttacgtttcggcgggatacgaatatatacgaattacggggatcgcgaataatatatatacgtattatttttgatatataataata

SEQ ID NO: 14230 - DNA, 621 bp, Artificial Sequence
  chemically treated genomic DNA (Homo sapiens) CpG-island No: 14230
tattattatatatcaaaaataatacgtatatatattattcgcgatccccgtaattcgtatatattcgtatcccgccgaaacgtaaaatatcgaacgacgacgcaaatatatatatacgcgccgcgaatattatattttcgcgtaaaacgcatatatttataataaatacgcgcacgtaatcttttcgtatcaccgcgtaaaacgttattaaaaacgcacgtattatatattacgtatccgtccttactaatacgaaaacgaatataataaaacgacgaacgtattattataatcctcgacttatacgtaccaacacgttttttttttccgacaccctatttataaaaacgacgattttaatcgaaccgaaaattatatcgcacctcgtctttttaaaacaaccgtatatttcgaataccgtaattatattcgaacgcgtaataataaaccaacgaattttaaacgcgacgtaatttatcaacgaacgatatattaaaacgaatacattaaattacccgtaacgaaaattatcgaacgttaaaactaaaaacgaaaaaaaaaacgacgtaattacgaaataaaaataataaccgcctacgcatatcaataatcgaattaatt

SEQ ID NO: 14231 - DNA, 621 bp, Artificial Sequence
  chemically treated genomic DNA (Homo sapiens) CpG-island No: 14231
tgttgttgtatgttagagatggtgcgtatatatgttattcgcgattttcgtagttcgtatgtattcgtatttcgtcgaggcgtagggtatcgggcggcggcgtagatatatgtgtacgcgtcgcgggtattgtattttcgcgtgaggcgtatatgtttgtggtgagtgcgcgtacgtggttttttcgtgttatcgcgtggggcgttgttaggggcgtacgtgttgtatattgcgtgttcgtttttgttggtgcgaggacgaatgtggtgaggcggcgggcgtgttgttgtagttttcggtttgtacgtgttagtacgtttttttttttcgatattttgtttatgggggcggcgattttggtcgggtcgggagttgtgtcgtatttcgtttttttggggtagtcgtgtgtttcgggtgtcgtggttgtattcgggcgcgtggtaataagttagcggattttaaacgcggcgtgatttgttagcgagcggtgtgttgaggcgggtgtattgaattattcgtggcggggattgtcgggcgttagaattagaggcggaaggagaggcggcgtggttacggggtgaggatagtggtcgtttgcgtatgttagtggtcgagttggtt

SEQ ID NO: 14232 - DNA, 621 bp, Artificial Sequence
  chemically treated genomic DNA (Homo sapiens) CpG-island No: 14232
aaccaactcgaccactaacatacgcaaacgaccactatcctcaccccgtaaccacgccgcctctccttccgcctctaattctaacgcccgacaatccccgccacgaataattcaatacacccgcctcaacacaccgctcgctaacaaatcacgccgcgtttaaaatccgctaacttattaccacgcgcccgaatacaaccacgacacccgaaacacacgactaccccaaaaaaacgaaatacgacacaactcccgacccgaccaaaatcgccgcccccataaacaaaatatcgaaaaaaaaaaacgtactaacacgtacaaaccgaaaactacaacaacacgcccgccgcctcaccacattcgtcctcgcaccaacaaaaacgaacacgcaatatacaacacgtacgcccctaacaacgccccacgcgataacacgaaaaaaccacgtacgcgcactcaccacaaacatatacgcctcacgcgaaaatacaatacccgcgacgcgtacacatatatctacgccgccgcccgataccctacgcctcgacgaaatacgaatacatacgaactacgaaaatcgcgaataacatatatacgcaccatctctaacatacaacaaca

SEQ ID NO: 14233 - DNA, 658 bp, Artificial Sequence
  chemically treated genomic DNA (Homo sapiens) CpG-island No: 14233
aaattcgcgggtattcgcgcggatatcggcgatatcgcgtttaatttcgggaaaagcgggttaatcggggggtaaatgggcgtattgcggcggtattgtcgggaacgcgggagattttcggtgtgaaaggcggggtcgttttaaatggggggtaaagggggaaataggcggaatttcgcgttgaattcggattattggcgggagttggcgggaaagggggtggaattcggggataacgggggggatcggcgtgaacgtcgggggaattcggttaaatttcggggaatgtttggcgaatcggggggtgattggcgtgaatgtcgggggatttgcgggaaattttcggggaatatggcgggaaattgcggggaaatttcgggaaatttcgggggagttcgcggggaattacgggagggatattgggtggaaacgcggcggggaaatcggggcgtaaatttttgcgagatttcgcggggtaaatttcgggtaaaatttcggggcgattaagcgcgagaaaatcgggggagatttcggggttaaatttgggcgcggataagacgggggagatatatcgcggcgaaattggggggggaaaatagagcgggtttcggaagttgattgtcgttcgaatcgtttttagagattttcgatacgaata

SEQ ID NO: 14234 - DNA, 658 bp, Artificial Sequence
  chemically treated genomic DNA (Homo sapiens) CpG-island No: 14234
tattcgtatcgaaaatctctaaaaacgattcgaacgacaatcaacttccgaaacccgctctattttccccccccaatttcgccgcgatatatctcccccgtcttatccgcgcccaaatttaaccccgaaatctcccccgattttctcgcgcttaatcgccccgaaattttacccgaaatttaccccgcgaaatctcgcaaaaatttacgccccgatttccccgccgcgtttccacccaatatccctcccgtaattccccgcgaactcccccgaaatttcccgaaatttccccgcaatttcccgccatattccccgaaaatttcccgcaaatcccccgacattcacgccaatcaccccccgattcgccaaacattccccgaaatttaaccgaattcccccgacgttcacgccgatcccccccgttatccccgaattccaccccctttcccgccaactcccgccaataatccgaattcaacgcgaaattccgcctatttccccctttaccccccatttaaaacgaccccgcctttcacaccgaaaatctcccgcgttcccgacaataccgccgcaatacgcccatttaccccccgattaacccgcttttcccgaaattaaacgcgatatcgccgatatccgcgcgaatacccgcgaattt

SEQ ID NO: 14235 - DNA, 658 bp, Artificial Sequence
  chemically treated genomic DNA (Homo sapiens) CpG-island No: 14235
tgttcgtgtcgggaatttttagaggcgattcgaacggtaattaattttcggggttcgttttattttttttttttaatttcgtcgcggtatgtttttttcgttttgttcgcgtttaagtttagtttcgaaatttttttcggttttttcgcgtttgatcgtttcgggattttgttcggaatttgtttcgcgaaatttcgtagaaatttacgtttcgattttttcgtcgcgtttttatttagtatttttttcgtaatttttcgcgaattttttcgaaatttttcgaaattttttcgtaatttttcgttatatttttcgggaatttttcgtaaatttttcggtatttacgttaattatttttcgattcgttaggtatttttcgggatttggtcggattttttcgacgtttacgtcgatttttttcgttgttttcgaattttattttttttttcgttaattttcgttaatggttcggatttaacgcgagatttcgtttatttttttttttgttttttatttggggcggtttcgttttttatatcgagagtttttcgcgttttcggtaatatcgtcgtaatgcgtttatttatttttcgattggttcgtttttttcgggattaggcgcgatgtcgtcggtattcgcgcggatgttcgcgagttt

SEQ ID NO: 14236 - DNA, 658 bp, Artificial Sequence
  chemically treated genomic DNA (Homo sapiens) CpG-island No: 14236
aaactcgcgaacatccgcgcgaataccgacgacatcgcgcctaatcccgaaaaaaacgaaccaatcgaaaaataaataaacgcattacgacgatattaccgaaaacgcgaaaaactctcgatataaaaaacgaaaccgccccaaataaaaaacaaaaaaaaaaataaacgaaatctcgcgttaaatccgaaccattaacgaaaattaacgaaaaaaaaaataaaattcgaaaacaacgaaaaaaatcgacgtaaacgtcgaaaaaatccgaccaaatcccgaaaaatacctaacgaatcgaaaaataattaacgtaaataccgaaaaatttacgaaaaattcccgaaaaatataacgaaaaattacgaaaaaatttcgaaaaatttcgaaaaaattcgcgaaaaattacgaaaaaaatactaaataaaaacgcgacgaaaaaatcgaaacgtaaatttctacgaaatttcgcgaaacaaattccgaacaaaatcccgaaacgatcaaacgcgaaaaaaccgaaaaaaatttcgaaactaaacttaaacgcgaacaaaacgaaaaaaacataccgcgacgaaattaaaaaaaaaaaataaaacgaaccccgaaaattaattaccgttcgaatcgcctctaaaaattcccgacacgaaca

SEQ ID NO: 14237 - DNA, 640 bp, Artificial Sequence
  chemically treated genomic DNA (Homo sapiens) CpG-island No: 14237
gattacgcgatattttcgcgttgcgcgggtagatagatttcgacgttttatggttattcgttgatatcgttatatcgggtacgtgtacgtattatgtgtgtgtatgcgagatcgtaacgtcgaatttagtacgtttatacgcgtagatcggcgtatttttatgtaggagatgttcgcgtattagttacgaggtattttacgagtgttcggtgtatgagtagtagttcgtgtatagatttattcgttgcgttagacgtttttacgtgtcgcgtagtacgtatagagtcgttgtggaagatcgattatcggatattaagtttcgtcgtatagtgattattaggacgcgtagggtaagcgtagtttattcgattagtaacgtcgtacgttcggtgaggcgtcgtgttatcggtaataacgacgattatgaggtaatgtgagattgacgatagatattgagcggtcgatttggaacgttcgtttttagaaacgagttcgttggcgtacgagagcgacgttcgtagtcgaggtcggttggtagaagtcggggatatgatatagttcgggaaagggtgagtttagtcgttaggcgtagaaggagtagaatttttgtgcgtaagtatatgttttaggtaagatatat

SEQ ID NO: 14238 - DNA, 640 bp, Artificial Sequence
  chemically treated genomic DNA (Homo sapiens) CpG-island No: 14238
atatatcttacctaaaacatatacttacgcacaaaaattctactccttctacgcctaacgactaaactcaccctttcccgaactatatcatatccccgacttctaccaaccgacctcgactacgaacgtcgctctcgtacgccaacgaactcgtttctaaaaacgaacgttccaaatcgaccgctcaatatctatcgtcaatctcacattacctcataatcgtcgttattaccgataacacgacgcctcaccgaacgtacgacgttactaatcgaataaactacgcttaccctacgcgtcctaataatcactatacgacgaaacttaatatccgataatcgatcttccacaacgactctatacgtactacgcgacacgtaaaaacgtctaacgcaacgaataaatctatacacgaactactactcatacaccgaacactcgtaaaatacctcgtaactaatacgcgaacatctcctacataaaaatacgccgatctacgcgtataaacgtactaaattcgacgttacgatctcgcatacacacacataatacgtacacgtacccgatataacgatatcaacgaataaccataaaacgtcgaaatctatctacccgcgcaacgcgaaaatatcgcgtaatc

SEQ ID NO: 14239 - DNA, 640 bp, Artificial Sequence
  chemically treated genomic DNA (Homo sapiens) CpG-island No: 14239
atatgttttgtttggagtatgtatttgcgtataaagattttgttttttttacgtttagcggttagatttattttttttcggattatattatgttttcggtttttattaatcgatttcgattgcgggcgtcgttttcgtgcgttaacgggttcgtttttgggaacgaacgttttaaatcggtcgtttagtatttatcgttagttttatattattttatggtcgtcgttattgtcgataatacggcgttttatcgagcgtacggcgttgttggtcgagtgggttacgtttgttttacgcgttttggtggttattgtgcggcgggatttggtgttcggtggtcgattttttatagcggttttgtacgtgttgcgcggtacgtgggggcgtttagcgtaacgagtaggtttgtgtacgagttattgtttatatatcgaatattcgtagaatgtttcgtggttagtgcgcggatattttttatatgagagtgcgtcgatttgcgcgtgtgagcgtgttgagttcgacgttgcggtttcgtatgtatatatataatacgtatacgtgttcggtgtggcggtgttagcgagtagttataggacgtcggagtttatttgttcgcgtagcgcgagggtgtcgcgtggtt

SEQ ID NO: 14240 - DNA, 640 bp, Artificial Sequence
  chemically treated genomic DNA (Homo sapiens) CpG-island No: 14240
aaccacgcgacaccctcgcgctacgcgaacaaataaactccgacgtcctataactactcgctaacaccgccacaccgaacacgtatacgtattatatatatacatacgaaaccgcaacgtcgaactcaacacgctcacacgcgcaaatcgacgcactctcatataaaaaatatccgcgcactaaccacgaaacattctacgaatattcgatatataaacaataactcgtacacaaacctactcgttacgctaaacgcccccacgtaccgcgcaacacgtacaaaaccgctataaaaaatcgaccaccgaacaccaaatcccgccgcacaataaccaccaaaacgcgtaaaacaaacgtaacccactcgaccaacaacgccgtacgctcgataaaacgccgtattatcgacaataacgacgaccataaaataatataaaactaacgataaatactaaacgaccgatttaaaacgttcgttcccaaaaacgaacccgttaacgcacgaaaacgacgcccgcaatcgaaatcgattaataaaaaccgaaaacataatataatccgaaaaaaaataaatctaaccgctaaacgtaaaaaaaacaaaatctttatacgcaaatacatactccaaacaaaacatat

SEQ ID NO: 14241 - DNA, 553 bp, Artificial Sequence
  chemically treated genomic DNA (Homo sapiens) CpG-island No: 14241
cggggaaacgtttttttttttatcgaagtcggtcgcggtacgtcgtttttttattggagtttgcggtttcggcggtttcgatcgtatttcgtagttagttaaattttattatgcgtacgcgtacgcggcgaagtcggcgtttcgggttgggttgggaagtgttcgcgttagtcgagggtttcgcgttttttataggaggcggggtacggagggggcggggcgatcgcgaggtttcgttttgtttttggcggcgttgggttatgcggaggtttacgtgagtagattgttcgttggtttacgggtcggggcgcgtaggcgtacggcggggttgggtggagggcggaggtggtaaaagggtgaaggcggaggagggagtgtttgggaataggcgtatacgtttggcgcggtgtttcgtagttgtttgcgggtggggtcgtcgtttttttttgtagacgaaagttgttgacgggaaaattacgcgggaggggaacgtttaggttttggttttttttttttaaaggtcgcgggaatatagggttggggaattttggta

SEQ ID NO: 14242 - DNA, 553 bp, Artificial Sequence
  chemically treated genomic DNA (Homo sapiens) CpG-island No: 14242
taccaaaattccccaaccctatattcccgcgacctttaaaaaaaaaaaaccaaaacctaaacgttcccctcccgcgtaattttcccgtcaacaactttcgtctacaaaaaaaaacgacgaccccacccgcaaacaactacgaaacaccgcgccaaacgtatacgcctattcccaaacactccctcctccgccttcacccttttaccacctccgccctccacccaaccccgccgtacgcctacgcgccccgacccgtaaaccaacgaacaatctactcacgtaaacctccgcataacccaacgccgccaaaaacaaaacgaaacctcgcgatcgccccgccccctccgtaccccgcctcctataaaaaacgcgaaaccctcgactaacgcgaacacttcccaacccaacccgaaacgccgacttcgccgcgtacgcgtacgcataataaaatttaactaactacgaaatacgatcgaaaccgccgaaaccgcaaactccaataaaaaaacgacgtaccgcgaccgacttcgataaaaaaaaaaacgtttccccg

SEQ ID NO: 14243 - DNA, 553 bp, Artificial Sequence
  chemically treated genomic DNA (Homo sapiens) CpG-island No: 14243
tgttaggattttttagttttatgttttcgcggtttttgaggggaaagggttagggtttagacgtttttttttcgcgtggttttttcgttagtagttttcgtttgtaagggaaagcggcggttttattcgtagatagttgcgaggtatcgcgttaagcgtatgcgtttgtttttaggtattttttttttcgtttttatttttttgttattttcgttttttatttagtttcgtcgtgcgtttgcgcgtttcggttcgtgggttagcgggtagtttatttacgtgggttttcgtatggtttagcgtcgttaagggtaaggcggagtttcgcgatcgtttcgtttttttcgtgtttcgttttttgtagggagcgcgggattttcggttggcgcgggtattttttagtttagttcggggcgtcggtttcgtcgcgtgcgcgtgcgtatggtggggtttggttggttgcgggatgcggtcgaggtcgtcgaggtcgtaaattttagtgggaaggcggcgtgtcgcggtcggtttcggtggaggagggggcgttttttcg

SEQ ID NO: 14244 - DNA, 553 bp, Artificial Sequence
  chemically treated genomic DNA (Homo sapiens) CpG-island No: 14244
cgaaaaaacgccccctcctccaccgaaaccgaccgcgacacgccgccttcccactaaaatttacgacctcgacgacctcgaccgcatcccgcaaccaaccaaaccccaccatacgcacgcgcacgcgacgaaaccgacgccccgaactaaactaaaaaatacccgcgccaaccgaaaatcccgcgctccctacaaaaaacgaaacacgaaaaaaacgaaacgatcgcgaaactccgccttacccttaacgacgctaaaccatacgaaaacccacgtaaataaactacccgctaacccacgaaccgaaacgcgcaaacgcacgacgaaactaaataaaaaacgaaaataacaaaaaaataaaaacgaaaaaaaaaatacctaaaaacaaacgcatacgcttaacgcgatacctcgcaactatctacgaataaaaccgccgctttcccttacaaacgaaaactactaacgaaaaaaccacgcgaaaaaaaaacgtctaaaccctaaccctttcccctcaaaaaccgcgaaaacataaaactaaaaaatcctaaca

SEQ ID NO: 14245 - DNA, 577 bp, Artificial Sequence
  chemically treated genomic DNA (Homo sapiens) CpG-island No: 14245
  unsure (398)
gcgacgatcgtagcggacgagatttcgttgtttgtatttcgattttggtataatttttatagttttatattttttgggtttcgcgtgtagatttttaaggatacgtatcgttttttttatatttttttttagacgtatattttttttattttcggatagcgatacgtttttattcgtagagttatattcgtcgttacgttttaattatatacgattttttcgcgtacgagtgttattacgtgcgtcgtcgtatatatttttatttcgtattgttttttattttacgagttacgttatagcgtagtttacgtttgtttacgttagcggatttcgcgatatcgttattacgcgacgtttttatttttatttttacgagtttatgttcgacgacgagatangacggatttttttcgttagattaggtttcgacgtagtcgttacgttaataattttttttttagtttttttttagtcgtagtattattcgcgcgtttttttcgtttcggttatcggttcgtaagtgtttatttaattttttgtttttattatttttttaattatttaaggttaatattgt

SEQ ID NO: 14246 - DNA, 577 bp, Artificial Sequence
  chemically treated genomic DNA (Homo sapiens) CpG-island No: 14246
  unsure (180)
acaatattaaccttaaataattaaaaaaataataaaaacaaaaaattaaataaacacttacgaaccgataaccgaaacgaaaaaaacgcgcgaataatactacgactaaaaaaaaactaaaaaaaaaattattaacgtaacgactacgtcgaaacctaatctaacgaaaaaaatccgtcntatctcgtcgtcgaacataaactcgtaaaaataaaaataaaaacgtcgcgtaataacgatatcgcgaaatccgctaacgtaaacaaacgtaaactacgctataacgtaactcgtaaaataaaaaacaatacgaaataaaaatatatacgacgacgcacgtaataacactcgtacgcgaaaaaatcgtatataattaaaacgtaacgacgaatataactctacgaataaaaacgtatcgctatccgaaaataaaaaaaatatacgtctaaaaaaaaatataaaaaaaacgatacgtatccttaaaaatctacacgcgaaacccaaaaaatataaaactataaaaattataccaaaatcgaaatacaaacaacgaaatctcgtccgctacgatcgtcgc

SEQ ID NO: 14247 - DNA, 577 bp, Artificial Sequence
  chemically treated genomic DNA (Homo sapiens) CpG-island No: 14247
  unsure (180)
ataatgttggttttgagtaattaggaaaataataaaggtaaggagttgggtgaatatttacgaatcgatggtcggggcgagagaggcgcgcgagtggtgttgcggttggagaggggttggagggagagttattgacgtgacggttgcgtcgggatttagtttggcggaagaaattcgttntgtttcgtcgtcgagtatggattcgtggagatgaaaatgaggacgtcgcgtggtggcgatgtcgcggagttcgttagcgtgggtagacgtggattgcgttgtggcgtggttcgtggggtgaggaataatacgaaatggagatatgtgcggcgacgtacgtggtgatattcgtgcgcggaggagtcgtgtgtgattggggcgtaacggcgggtgtagttttgcggatgggagcgtgtcgttgttcggggatgagggaggtgtgcgtttgagagggggtgtgagaaaggcggtgcgtgtttttaaaggtttatacgcggagtttagagagtgtggggttgtgaaggttatgttagagtcgaggtgtaggtagcggggtttcgttcgttgcggtcgtcgt

SEQ ID NO: 14248 - DNA, 577 bp, Artificial Sequence
  chemically treated genomic DNA (Homo sapiens) CpG-island No: 14248
  unsure (398)
acgacgaccgcaacgaacgaaaccccgctacctacacctcgactctaacataaccttcacaaccccacactctctaaactccgcgtataaacctttaaaaacacgcaccgcctttctcacaccccctctcaaacgcacacctccctcatccccgaacaacgacacgctcccatccgcaaaactacacccgccgttacgccccaatcacacacgactcctccgcgcacgaatatcaccacgtacgtcgccgcacatatctccatttcgtattattcctcaccccacgaaccacgccacaacgcaatccacgtctacccacgctaacgaactccgcgacatcgccaccacgcgacgtcctcattttcatctccacgaatccatactcgacgacgaaacanaacgaatttcttccgccaaactaaatcccgacgcaaccgtcacgtcaataactctccctccaacccctctccaaccgcaacaccactcgcgcgcctctctcgccccgaccatcgattcgtaaatattcacccaactccttacctttattattttcctaattactcaaaaccaacattat

SEQ ID NO: 14249 - DNA, 505 bp, Artificial Sequence
  chemically treated genomic DNA (Homo sapiens) CpG-island No: 14249
ttgaaaagcggttttcgatagggcgcggcgggaattcgagtcgggagtagggttacgagttaaagcggcgggggcgggaggatgcgcgggcggcggacggggcgtttttttttcgtttgattttgggcggagcggggttcgaggttgttggagtcgttcgttgattcgttttgcgttttcgtcgcggatatcggagttgcggtcgtttttcgttgttttttaggtgagttcgcggggcgttgtttcggggcgtcgggtgtcgcgggaacggcgttcgcggcgtatagggagggtcggggaggtcgggaggtagcgagttgtcggggacgtcgcgggaaggtcgggtcgggtagtcggcgttatggagggtaggcgggttggagttgggcgcgagatgtagttgtttcgcgtcgtttttaagtcgttcgtaggttagtggaggagcgcgtttgtcgggtttgttcggggttgggcgggtgggggtgttttgtttttcggttttttt

SEQ ID NO: 14250 - DNA, 505 bp, Artificial Sequence
  chemically treated genomic DNA (Homo sapiens) CpG-island No: 14250
aaaaaaaccgaaaaacaaaacacccccacccgcccaaccccgaacaaacccgacaaacgcgctcctccactaacctacgaacgacttaaaaacgacgcgaaacaactacatctcgcgcccaactccaacccgcctaccctccataacgccgactacccgacccgaccttcccgcgacgtccccgacaactcgctacctcccgacctccccgaccctccctatacgccgcgaacgccgttcccgcgacacccgacgccccgaaacaacgccccgcgaactcacctaaaaaacaacgaaaaacgaccgcaactccgatatccgcgacgaaaacgcaaaacgaatcaacgaacgactccaacaacctcgaaccccgctccgcccaaaatcaaacgaaaaaaaaacgccccgtccgccgcccgcgcatcctcccgcccccgccgctttaactcgtaaccctactcccgactcgaattcccgccgcgccctatcgaaaaccgcttttcaa

SEQ ID NO: 14251 - DNA, 505 bp, Artificial Sequence
  chemically treated genomic DNA (Homo sapiens) CpG-island No: 14251
agggggatcgaggagtagagtatttttattcgtttagtttcgggtaggttcggtaggcgcgtttttttattgatttgcgggcggtttgggggcggcgcggaatagttgtatttcgcgtttagttttagttcgtttgttttttatggcgtcgattgttcggttcggttttttcgcggcgttttcgatagttcgttgtttttcggttttttcggttttttttgtgcgtcgcgggcgtcgttttcgcgatattcgacgtttcggggtagcgtttcgcgggtttatttgggggatagcggggagcggtcgtagtttcggtgttcgcggcgagggcgtagggcgagttagcgagcgattttagtagtttcgagtttcgtttcgtttagagttagacgggaggagagcgtttcgttcgtcgttcgcgtattttttcgttttcgtcgttttaattcgtgattttattttcggttcgggttttcgtcgcgttttgtcgggggtcgttttttag

SEQ ID NO: 14252 - DNA, 505 bp, Artificial Sequence
  chemically treated genomic DNA (Homo sapiens) CpG-island No: 14252
ctaaaaaacgacccccgacaaaacgcgacgaaaacccgaaccgaaaataaaatcacgaattaaaacgacgaaaacgaaaaaatacgcgaacgacgaacgaaacgctctcctcccgtctaactctaaacgaaacgaaactcgaaactactaaaatcgctcgctaactcgccctacgccctcgccgcgaacaccgaaactacgaccgctccccgctatcccccaaataaacccgcgaaacgctaccccgaaacgtcgaatatcgcgaaaacgacgcccgcgacgcacaaaaaaaaccgaaaaaaccgaaaaacaacgaactatcgaaaacgccgcgaaaaaaccgaaccgaacaatcgacgccataaaaaacaaacgaactaaaactaaacgcgaaatacaactattccgcgccgcccccaaaccgcccgcaaatcaataaaaaaacgcgcctaccgaacctacccgaaactaaacgaataaaaatactctactcctcgatccccct

SEQ ID NO: 14253 - DNA, 541 bp, Artificial Sequence
  chemically treated genomic DNA (Homo sapiens) CpG-island No: 14253
ttcggaataggaaatatcgtttacggtcgatttatttcgttttcgtcgtaacgcgttcgtcgaagttggagttttgtaaagcggggttttttttttttattttttttgtcggtcgcgtggtgcgcgtagatttcggttcgagagtaggcgtcgtagtcgtggagtgcggcgggtagttttcgggcggttgaaaggcggttttgtgtgtattttgtaggatgcggcgcgtggttaggcgttttcgtttcgtttttaaggggttgtttcgtttcgtttcgtttcgtcgttttttatcggggatcggagtttttttagttggggttttaggggatttattttacgttttagcggattagttttttcgcgttttcggagaagggggtcggcgacgcggaggcggggtgggggtcgtaggggatggaatcgaggcgcgcgcgagaagagtcgaggaagtaagtagttttaaaagggggcggcggtggggtttttagggaggcgtggggtacgttaagggcgtcgtggggtattgatttgtggtgcg

SEQ ID NO: 14254 - DNA, 541 bp, Artificial Sequence
  chemically treated genomic DNA (Homo sapiens) CpG-island No: 14254
cgcaccacaaatcaataccccacgacgcccttaacgtaccccacgcctccctaaaaaccccaccgccgcccccttttaaaactacttacttcctcgactcttctcgcgcgcgcctcgattccatcccctacgacccccaccccgcctccgcgtcgccgacccccttctccgaaaacgcgaaaaaactaatccgctaaaacgtaaaataaatcccctaaaaccccaactaaaaaaactccgatccccgataaaaaacgacgaaacgaaacgaaacgaaacaaccccttaaaaacgaaacgaaaacgcctaaccacgcgccgcatcctacaaaatacacacaaaaccgcctttcaaccgcccgaaaactacccgccgcactccacgactacgacgcctactctcgaaccgaaatctacgcgcaccacgcgaccgacaaaaaaaataaaaaaaaaaaaccccgctttacaaaactccaacttcgacgaacgcgttacgacgaaaacgaaataaatcgaccgtaaacgatatttcctattccgaa

SEQ ID NO: 14255 - DNA, 541 bp, Artificial Sequence
  chemically treated genomic DNA (Homo sapiens) CpG-island No: 14255
cgtattataggttagtgttttacggcgtttttggcgtgttttacgtttttttgggggttttatcgtcgtttttttttgggattgtttattttttcggtttttttcgcgcgcgtttcggttttattttttacggtttttatttcgttttcgcgtcgtcgattttttttttcgggagcgcggggaggttggttcgttgaagcgtggaataagttttttaggattttaattggggaagtttcggttttcggtaggaggcggcggggcggggcggggcggggtagttttttgggggcggggcgggagcgtttggttacgcgtcgtattttgtagggtgtatatagagtcgttttttagtcgttcgagaattgttcgtcgtattttacgattgcggcgtttgttttcgggtcggggtttgcgcgtattacgcggtcggtagaaagggtaagagaagggaatttcgttttgtagggttttaatttcggcggacgcgttacggcgagggcgaaatgagtcggtcgtgaacggtgttttttgtttcgaa

SEQ ID NO: 14256 - DNA, 541 bp, Artificial Sequence
  chemically treated genomic DNA (Homo sapiens) CpG-island No: 14256
ttcgaaacaaaaaacaccgttcacgaccgactcatttcgccctcgccgtaacgcgtccgccgaaattaaaaccctacaaaacgaaattcccttctcttaccctttctaccgaccgcgtaatacgcgcaaaccccgacccgaaaacaaacgccgcaatcgtaaaatacgacgaacaattctcgaacgactaaaaaacgactctatatacaccctacaaaatacgacgcgtaaccaaacgctcccgccccgcccccaaaaaactaccccgccccgccccgccccgccgcctcctaccgaaaaccgaaacttccccaattaaaatcctaaaaaacttattccacgcttcaacgaaccaacctccccgcgctcccgaaaaaaaaaatcgacgacgcgaaaacgaaataaaaaccgtaaaaaataaaaccgaaacgcgcgcgaaaaaaaccgaaaaaataaacaatcccaaaaaaaaacgacgataaaacccccaaaaaaacgtaaaacacgccaaaaacgccgtaaaacactaacctataatacg

SEQ ID NO: 14257 - DNA, 528 bp, Artificial Sequence
  chemically treated genomic DNA (Homo sapiens) CpG-island No: 14257
ttgtttagcgttgagtgagttcgtagacgattgatttgtgttgatcgtttgtgtgtgcgtgtttggttaggttttcgtatgcggttcgttttcgagcgtgtgtggcgtttcgggtcgcggaaggttttttgtattgaattttatagttcgagcggtagcgttacgaaatttattgggcgtgttatgggttgtttgtaagagatatggtagagggtcgggtgggtttatcgtagatataattggtttcgatttttattcggataggatttgcgtggcgtaatcgttacggtaacggtaagtgtaatgataatcgttcgtaaaggttttgcgaatttgttttgtgtaagtttatcggtaaaggttgcgcgttacggagtgtatatggttttttaagtgggacgggtattcgcgcgcgcgtgtgtttgcgtgtgtgtacgcgtattcgtttgtggcgtgttacgtgttttggtttgttaagaattttttatagagagtgtgtttgggggaagttatatatattagagtttt

SEQ ID NO: 14258 - DNA, 528 bp, Artificial Sequence
  chemically treated genomic DNA (Homo sapiens) CpG-island No: 14258
aaaactctaatatatataacttcccccaaacacactctctataaaaaattcttaacaaaccaaaacacgtaacacgccacaaacgaatacgcgtacacacacgcaaacacacgcgcgcgcgaatacccgtcccacttaaaaaaccatatacactccgtaacgcgcaacctttaccgataaacttacacaaaacaaattcgcaaaacctttacgaacgattatcattacacttaccgttaccgtaacgattacgccacgcaaatcctatccgaataaaaatcgaaaccaattatatctacgataaacccacccgaccctctaccatatctcttacaaacaacccataacacgcccaataaatttcgtaacgctaccgctcgaactataaaattcaatacaaaaaaccttccgcgacccgaaacgccacacacgctcgaaaacgaaccgcatacgaaaacctaaccaaacacgcacacacaaacgatcaacacaaatcaatcgtctacgaactcactcaacgctaaacaa

SEQ ID NO: 14259 - DNA, 528 bp, Artificial Sequence
  chemically treated genomic DNA (Homo sapiens) CpG-island No: 14259
agagttttgatgtgtgtggttttttttaggtatattttttatgaggaatttttagtaaattagggtacgtagtacgttataggcgagtacgcgtgtatatacgtaggtatacgcgcgcgcgggtgttcgttttatttgaaaggttatgtgtatttcgtggcgcgtagtttttatcggtaagtttgtataagatagattcgtagggtttttgcgggcgattattattatatttgtcgttatcgtgacggttacgttacgtaaattttgttcgaatgggaatcgagattagttgtgtttacggtgggtttattcgattttttattatgttttttatagatagtttatggtacgtttagtgagtttcgtgacgttatcgttcgggttatgaagtttagtgtagaaggtttttcgcgattcgaagcgttatatacgttcggaggcgggtcgtatgcgagggtttagttaggtacgtatatataggcggttagtataagttaatcgtttacggatttatttagcgttaggtaa

SEQ ID NO: 14260 - DNA, 528 bp, Artificial Sequence
  chemically treated genomic DNA (Homo sapiens) CpG-island No: 14260
ttacctaacgctaaataaatccgtaaacgattaacttatactaaccgcctatatatacgtacctaactaaaccctcgcatacgacccgcctccgaacgtatataacgcttcgaatcgcgaaaaaccttctacactaaacttcataacccgaacgataacgtcacgaaactcactaaacgtaccataaactatctataaaaaacataataaaaaatcgaataaacccaccgtaaacacaactaatctcgattcccattcgaacaaaatttacgtaacgtaaccgtcacgataacgacaaatataataataatcgcccgcaaaaaccctacgaatctatcttatacaaacttaccgataaaaactacgcgccacgaaatacacataacctttcaaataaaacgaacacccgcgcgcgcgtatacctacgtatatacacgcgtactcgcctataacgtactacgtaccctaatttactaaaaattcctcataaaaaatatacctaaaaaaaaccacacacatcaaaactct

SEQ ID NO: 14261 - DNA, 563 bp, Artificial Sequence
  chemically treated genomic DNA (Homo sapiens) CpG-island No: 14261
cgttcgagcggggtaaagattcgtttaggttgtttttataggcgagcgcggggcgggtttggttgggggcggtgtcgcgcggtttcgttcgtttataaggagttgttcgttattcgggtgttgattttagttttcgcgttcgacgaggtggatttggttgtttatcgagtttcggcgtttgtcgttttaattgggtttggatttgtatcgttaaggaggggggaagagaaggaagaggcgggcgaggaaggcgagtttagttagcggttgttgcggggatcgtagttttagttgtagtttcgaagaatttttcgttacggtttcggtggagcgtttgggtacgggatggagtgaaagagcgagtgtttttttaagcgggggtgggagggggttaggttgtgtagaggagagagatagcgagaagaagtcgcggttggttattgcgaatttgggattcgattgggagggatcgtttattcgggggaaatggattttttattacggttgattagcgttttgattttgttgttttttggtttgtggtatttaggattaatagcgat

SEQ ID NO: 14262 - DNA, 563 bp, Artificial Sequence
  chemically treated genomic DNA (Homo sapiens) CpG-island No: 14262
atcgctattaatcctaaataccacaaaccaaaaaacaacaaaatcaaaacgctaatcaaccgtaataaaaaatccatttcccccgaataaacgatccctcccaatcgaatcccaaattcgcaataaccaaccgcgacttcttctcgctatctctctcctctacacaacctaaccccctcccacccccgcttaaaaaaacactcgctctttcactccatcccgtacccaaacgctccaccgaaaccgtaacgaaaaattcttcgaaactacaactaaaactacgatccccgcaacaaccgctaactaaactcgccttcctcgcccgcctcttccttctcttcccccctccttaacgatacaaatccaaacccaattaaaacgacaaacgccgaaactcgataaacaaccaaatccacctcgtcgaacgcgaaaactaaaatcaacacccgaataacgaacaactccttataaacgaacgaaaccgcgcgacaccgcccccaaccaaacccgccccgcgctcgcctataaaaacaacctaaacgaatctttaccccgctcgaacg

SEQ ID NO: 14263 - DNA, 563 bp, Artificial Sequence
  chemically treated genomic DNA (Homo sapiens) CpG-island No: 14263
gtcgttgttaattttaaatgttataagttagagaatagtaaagttaaaacgttggttagtcgtggtaaagaatttatttttttcgagtgagcggttttttttaatcgaattttaaattcgtagtagttagtcgcggttttttttcgttgttttttttttttgtatagtttgatttttttttattttcgtttggagaggtattcgtttttttattttatttcgtgtttagacgttttatcgaaatcgtggcgggggatttttcggagttgtagttggggttacggttttcgtaatagtcgttagttggattcgtttttttcgttcgttttttttttttttttttttttttttaacggtgtaaatttaaatttaattagaacgataggcgtcggagttcggtggatagttaaatttatttcgtcgggcgcgagagttggaattagtattcgggtggcggatagttttttataggcgagcggggtcgcgcggtatcgtttttagttaggttcgtttcgcgttcgtttataagagtagtttgggcgggtttttgtttcgttcgggcg

SEQ ID NO: 14264 - DNA, 563 bp, Artificial Sequence
  chemically treated genomic DNA (Homo sapiens) CpG-island No: 14264
cgcccgaacgaaacaaaaacccgcccaaactactcttataaacgaacgcgaaacgaacctaactaaaaacgataccgcgcgaccccgctcgcctataaaaaactatccgccacccgaatactaattccaactctcgcgcccgacgaaataaatttaactatccaccgaactccgacgcctatcgttctaattaaatttaaatttacaccgttaaaaaaaaaaaaaaaaaaaaaaaaaacgaacgaaaaaaacgaatccaactaacgactattacgaaaaccgtaaccccaactacaactccgaaaaatcccccgccacgatttcgataaaacgtctaaacacgaaataaaataaaaaaacgaatacctctccaaacgaaaataaaaaaaaatcaaactatacaaaaaaaaaaaacaacgaaaaaaaaccgcgactaactactacgaatttaaaattcgattaaaaaaaaccgctcactcgaaaaaaataaattctttaccacgactaaccaacgttttaactttactattctctaacttataacatttaaaattaacaacgac

SEQ ID NO: 14265 - DNA, 558 bp, Artificial Sequence
  chemically treated genomic DNA (Homo sapiens) CpG-island No: 14265
  unsure (16, 23..24, 36, 49, 85, 140, 184)
cgcgttcgcgcgtttncgcggtnntttcgcgggttntcggtcgtcggtntcggtttcggtcgcgtcgtcgttcgcgggttcggtntcggttcgggttcggggtttcgcgcgttcgtcgtcgcgcgtcgcgtcgttcgttntcggtcggcgcggttcgttttcgtcggcgttcggggtcggcgtngttcgtcgcgcggggcggcggcggggtcgttcgttcgtaagtcggcgattttcgtcggtaagcgtcgtcgcgtacggtaattcgttacgcggagaagagatacgtaggcgtttatcgataatagcgttacgatgattcgtattttatgttttttcgtttatgtttttttgttacgtgtatttgcgttttcgcgtttacgtattttttgtgcgggtttaagcgtatttgttgattgttcgtacggttggcgtgatattgcgtttagtgattatcgtttatggcgaataagtttgattcgtcgattggtgatatcgtggtgtttgagtaaattgtagttatgtttatagttgatcgaggagtggaggattttttgt

SEQ ID NO: 14266 - DNA, 558 bp, Artificial Sequence
  chemically treated genomic DNA (Homo sapiens) CpG-island No: 14266
  unsure (375, 419, 474, 510, 523, 535..536, 543)
acaaaaaatcctccactcctcgatcaactataaacataactacaatttactcaaacaccacgatatcaccaatcgacgaatcaaacttattcgccataaacgataatcactaaacgcaatatcacgccaaccgtacgaacaatcaacaaatacgcttaaacccgcacaaaaaatacgtaaacgcgaaaacgcaaatacacgtaacaaaaaaacataaacgaaaaaacataaaatacgaatcatcgtaacgctattatcgataaacgcctacgtatctcttctccgcgtaacgaattaccgtacgcgacgacgcttaccgacgaaaatcgccgacttacgaacgaacgaccccgccgccgccccgcgcgacgaacnacgccgaccccgaacgccgacgaaaacgaaccgcgccgaccganaacgaacgacgcgacgcgcgacgacgaacgcgcgaaaccccgaacccgaaccganaccgaacccgcgaacgacgacgcgaccgaaaccganaccgacgaccganaacccgcgaaannaccgcgnaaacgcgcgaacgcg

SEQ ID NO: 14267 - DNA, 558 bp, Artificial Sequence
  chemically treated genomic DNA (Homo sapiens) CpG-island No: 14267
  unsure (375, 419, 474, 510, 523, 535..536, 543)
ataagggattttttatttttcggttagttatggatataattgtaatttatttagatattacggtattattagtcgacggattagatttgttcgttataggcggtagttattgaacgtagtgttacgttaatcgtacgagtagttagtaggtgcgtttgagttcgtataagaggtgcgtagacgcggaagcgtagatgtacgtggtagaggaatataagcgagagagtatggaatacgagttatcgtagcgttgttgtcggtagacgtttgcgtgtttttttttcgcgtggcgggttgtcgtgcgcggcggcgtttgtcggcgggggtcgtcggtttgcgggcgggcggtttcgtcgtcgtttcgcgcggcgggtngcgtcggtttcgggcgtcggcgggggcgggtcgcgtcggtcggnggcgggcggcgcggcgcgcggcggcgggcgcgcggggtttcgggttcgggtcggngtcgggttcgcgggcggcggcgcggtcggggtcggngtcggcggtcggnggttcgcggggnngtcgcgngggcgcgcgggcgcg

SEQ ID NO: 14268 - DNA, 558 bp, Artificial Sequence
  chemically treated genomic DNA (Homo sapiens) CpG-island No: 14268
  unsure (16, 23..24, 36, 49, 85, 140, 184)
cgcgcccgcgcgcccncgcgacnnccccgcgaaccnccgaccgccgacnccgaccccgaccgcgccgccgcccgcgaacccgacnccgacccgaacccgaaaccccgcgcgcccgccgccgcgcgccgcgccgcccgccnccgaccgacgcgacccgcccccgccgacgcccgaaaccgacgcnacccgccgcgcgaaacgacgacgaaaccgcccgcccgcaaaccgacgacccccgccgacaaacgccgccgcgcacgacaacccgccacgcgaaaaaaaaacacgcaaacgtctaccgacaacaacgctacgataactcgtattccatactctctcgcttatattcctctaccacgtacatctacgcttccgcgtctacgcacctcttatacgaactcaaacgcacctactaactactcgtacgattaacgtaacactacgttcaataactaccgcctataacgaacaaatctaatccgtcgactaataataccgtaatatctaaataaattacaattatatccataactaaccgaaaaataaaaaatcccttat

SEQ ID NO: 14269 - DNA, 1061 bp, Artificial Sequence
  chemically treated genomic DNA (Homo sapiens) CpG-island No: 14269
ggggttaggtaggacgtcggagtataggagcgggcgtagatgtagcgattgtaggcggttggtcgcgttttttgtttcggttttattgtttgtcgaaaatgttgagggtagtaagtttggggaaggtttggtagcggtcgttagtcgtagtaagtgcgttataatagagtttgtaattttagcgcggttcggttcggttttggcgtttttttcgttcgtgttttttttttttcgttttcgtatcgtacgtcgtatcgaattagatagaatttttttgaggtgtatatcgtgaggtgtatatttttaaatggggagggggcggcggagggcgacgaagcgaacgtttgtaaggtttataattaggttcgtaggttaggcgatatcggtgcgcgtcgcgtcgtttttattttatagattttttttttagaaggtaattatatcgaaatttacgttcgcgttttttttttagagcgtagcgttcgggttagggattaagtttcgcggcgttcggttcgcgtttttcgtcgatcgggcgttttttgatcgttattacgaaagtagcgtaggagataaagttcgggattcgggtttagagttttcggcgtagcgtaaagttcgcgttttttcgttagttcgtcgtcgcgtttcgtcgggtagtcgagggtttcgtacgtcgcgtttttggttcgcgttgtttcggtcgtagtcgtcgggaatatttttcgttttttttcgttttttttttcgcgttttgcgttcgtcgtcgtcggtatcgtcgattttttcgcgtcgttggcgtcgggtgttcgcgtttttaattggttcgcgcgcggtcgtttcgcgtcgtagttaatcggtagtcgcggtgggggcggcgtttacgggttaggtcgttaaaggcgaggcgattgttgataaattcgttttcgagcgttgttttggtcgtggtcgtggcggttgtcgtttcgtcggaggatttgagggtcggttggttcggttattttgtttatttttgtgtttttttcggatataagttttagtagttttcgtcgttttggata

SEQ ID NO: 14270 - DNA, 1061 bp, Artificial Sequence
  chemically treated genomic DNA (Homo sapiens) CpG-island No: 14270
tatccaaaacgacgaaaactactaaaacttatatccgaaaaaaacacaaaaataaacaaaataaccgaaccaaccgaccctcaaatcctccgacgaaacgacaaccgccacgaccacgaccaaaacaacgctcgaaaacgaatttatcaacaatcgcctcgcctttaacgacctaacccgtaaacgccgcccccaccgcgactaccgattaactacgacgcgaaacgaccgcgcgcgaaccaattaaaaacgcgaacacccgacgccaacgacgcgaaaaaatcgacgataccgacgacgacgaacgcaaaacgcgaaaaaaaaaacgaaaaaaaacgaaaaatattcccgacgactacgaccgaaacaacgcgaaccaaaaacgcgacgtacgaaaccctcgactacccgacgaaacgcgacgacgaactaacgaaaaaacgcgaactttacgctacgccgaaaactctaaacccgaatcccgaactttatctcctacgctactttcgtaataacgatcaaaaaacgcccgatcgacgaaaaacgcgaaccgaacgccgcgaaacttaatccctaacccgaacgctacgctctaaaaaaaaaacgcgaacgtaaatttcgatataattaccttctaaaaaaaaaatctataaaataaaaacgacgcgacgcgcaccgatatcgcctaacctacgaacctaattataaaccttacaaacgttcgcttcgtcgccctccgccgccccctccccatttaaaaatatacacctcacgatatacacctcaaaaaaattctatctaattcgatacgacgtacgatacgaaaacgaaaaaaaaaaaacacgaacgaaaaaaacgccaaaaccgaaccgaaccgcgctaaaattacaaactctattataacgcacttactacgactaacgaccgctaccaaaccttccccaaacttactaccctcaacattttcgacaaacaataaaaccgaaacaaaaaacgcgaccaaccgcctacaatcgctacatctacgcccgctcctatactccgacgtcctacctaacccc

SEQ ID NO: 14271 - DNA, 1061 bp, Artificial Sequence
  chemically treated genomic DNA (Homo sapiens) CpG-island No: 14271
tgtttaggacggcgggagttgttaaggtttgtgttcggaaggagtatagggatgggtagggtggtcgggttagtcggtttttaaatttttcgacgaagcggtagtcgttacgattacggttagagtagcgttcggaggcgagtttgttaataatcgtttcgtttttggcggtttgattcgtaggcgtcgtttttatcgcggttgtcgattggttgcggcgcggagcgatcgcgcgcggattaattgggaacgcgggtattcggcgttagcggcgcggggaggtcggcggtgtcggcggcggcgggcgtagagcgcgaggggaggagcgggaggaggcggaggatgttttcggcggttgcggtcggggtagcgcgggttagaggcgcggcgtgcggagttttcggttgttcggcggagcgcggcggcgggttggcgggaaggcgcgggttttgcgttgcgtcggggattttgaattcgagtttcgggttttgttttttgcgttgttttcgtggtgacggttagggggcgttcggtcggcgaagggcgcgggtcggacgtcgcggggtttggtttttggttcggacgttgcgttttgaagggaaggcgcggacgtgagtttcggtgtgattgttttttgaggggagggtttgtgggatgaaggcggcgcggcgcgtatcggtgtcgtttagtttgcggatttagttgtagattttgtaggcgttcgtttcgtcgtttttcgtcgttttttttttatttagagatgtgtattttacggtgtgtattttagagaagttttgtttgattcggtgcggcgtgcggtacgggagcgggagggagggagtacgggcggagagagcgttagagtcgggtcgagtcgcgttggagttataaattttattgtgacgtatttattacgattgacggtcgttgttagattttttttagatttgttgtttttagtattttcggtaaataatggggtcggagtagggaacgcggttagtcgtttgtaatcgttgtatttgcgttcgtttttgtgtttcggcgttttatttaatttt

SEQ ID NO: 14272 - DNA, 1061 bp, Artificial Sequence
  chemically treated genomic DNA (Homo sapiens) CpG-island No: 14272
aaaattaaataaaacgccgaaacacaaaaacgaacgcaaatacaacgattacaaacgactaaccgcgttccctactccgaccccattatttaccgaaaatactaaaaacaacaaatctaaaaaaaatctaacaacgaccgtcaatcgtaataaatacgtcacaataaaatttataactccaacgcgactcgacccgactctaacgctctctccgcccgtactccctccctcccgctcccgtaccgcacgccgcaccgaatcaaacaaaacttctctaaaatacacaccgtaaaatacacatctctaaataaaaaaaaaacgacgaaaaacgacgaaacgaacgcctacaaaatctacaactaaatccgcaaactaaacgacaccgatacgcgccgcgccgccttcatcccacaaaccctcccctcaaaaaacaatcacaccgaaactcacgtccgcgccttcccttcaaaacgcaacgtccgaaccaaaaaccaaaccccgcgacgtccgacccgcgcccttcgccgaccgaacgccccctaaccgtcaccacgaaaacaacgcaaaaaacaaaacccgaaactcgaattcaaaatccccgacgcaacgcaaaacccgcgccttcccgccaacccgccgccgcgctccgccgaacaaccgaaaactccgcacgccgcgcctctaacccgcgctaccccgaccgcaaccgccgaaaacatcctccgcctcctcccgctcctcccctcgcgctctacgcccgccgccgccgacaccgccgacctccccgcgccgctaacgccgaatacccgcgttcccaattaatccgcgcgcgatcgctccgcgccgcaaccaatcgacaaccgcgataaaaacgacgcctacgaatcaaaccgccaaaaacgaaacgattattaacaaactcgcctccgaacgctactctaaccgtaatcgtaacgactaccgcttcgtcgaaaaatttaaaaaccgactaacccgaccaccctacccatccctatactccttccgaacacaaaccttaacaactcccgccgtcctaaaca

SEQ ID NO: 14273 - DNA, 1465 bp, Artificial Sequence
  chemically treated genomic DNA (Homo sapiens) CpG-island No: 14273
tcgtgtttcgttagttaaattattatcgtagtttcgtaaatttttcgtaataggtttacgcgttttaaaaaattaagatacgaaatatttttatattgcgcggtcgttattttgagggcgtcggagtcggcggcgagattttttagttgggcgtatagttcgatattacgagtaggtttttagttttcgggtcggcgtcgaaaggtacgcgttgtttttttttttgttcggatttacgattttttattaggttcgcgcgtagtatttcgttttaagtcgtatttcggttaagagtttgtaggtttcgcgtgaacgatttttttttaaagagaatttgttcgagagggaattcgatttatacggatttttatttttcgtcggcgataagcggcgtcgatgtaagcgttttcgttcgtacgtgtacgggaagcgggtagtaggtggtgtcgttcgggttttagcgttagttttttttcggtgttaggttcgcgtttcgggatttggaggtatttattttgcgttttttagttcgagagttagagttagatatttgggggaataagggttaagaaagggcgtcgaggcggtggcggcgggaacgtagcgaatcgaatatcgcgatgatgcgatcgtagtgtggtagggttcgtagggtggttgtaagaattaagtggtggtagtggcggcggcggcggcggcggcggcggcggcggcggcggcggtagcggtagcggcgttggacgtagagttttaataaattgtagattaggcggttgcgcggagcgaagtgaaatttgcgcggttttgtagtttagttttggttggcggtttcgtttttacgtttaattattgcggatttcgttttcgttaggtttcgtttcggcgcgcgggttggtaagtttcgtttttttcggcgtcgcggtcgtcggcgcgtgtaggttcggataggtaaaggcgggggttgtttcgttgggttgtttttcgcgcgcgtcgtcgtttttggcgtgtttatcggagtaattttgtttgttggcggttatgtgcgcgtttattttttatttcgaagtgtattttagtttttcgtttatttattttaattcggcggcggtcgcggcgtgcgcggtatagagggggcgtttcggttatagttttcgttggttcggtcggcggtgtgaagtttcgggaggcgttttgcgtttttattgtgttttgagtttttaagtcgttttggggtaggcgcggggattgggttggttttcgcgaaggcgcggggcgaggtttttgagtttttttttttttgagggtttttggcgtcgggcgggacgcggattagtaggttgcgtatttttttcgttcgggtttttcgcgggatttaggtattttttttttgttatttcgtaggggttttttagtttttttttcgcgtttagtcgttttaagagatagaggtcgtgggggtaggacg

SEQ ID NO: 14274 - DNA, 1465 bp, Artificial Sequence
  chemically treated genomic DNA (Homo sapiens) CpG-island No: 14274
cgtcctacccccacgacctctatctcttaaaacgactaaacgcgaaaaaaaaactaaaaaacccctacgaaataacaaaaaaaaaatacctaaatcccgcgaaaaacccgaacgaaaaaaatacgcaacctactaatccgcgtcccgcccgacgccaaaaaccctcaaaaaaaaaaaaactcaaaaacctcgccccgcgccttcgcgaaaaccaacccaatccccgcgcctaccccaaaacgacttaaaaactcaaaacacaataaaaacgcaaaacgcctcccgaaacttcacaccgccgaccgaaccaacgaaaactataaccgaaacgccccctctataccgcgcacgccgcgaccgccgccgaattaaaataaataaacgaaaaactaaaatacacttcgaaataaaaaataaacgcgcacataaccgccaacaaacaaaattactccgataaacacgccaaaaacgacgacgcgcgcgaaaaacaacccaacgaaacaacccccgcctttacctatccgaacctacacgcgccgacgaccgcgacgccgaaaaaaacgaaacttaccaacccgcgcgccgaaacgaaacctaacgaaaacgaaatccgcaataattaaacgtaaaaacgaaaccgccaaccaaaactaaactacaaaaccgcgcaaatttcacttcgctccgcgcaaccgcctaatctacaatttattaaaactctacgtccaacgccgctaccgctaccgccgccgccgccgccgccgccgccgccgccgccgccgccactaccaccacttaattcttacaaccaccctacgaaccctaccacactacgatcgcatcatcgcgatattcgattcgctacgttcccgccgccaccgcctcgacgccctttcttaacccttattcccccaaatatctaactctaactctcgaactaaaaaacgcaaaataaatacctccaaatcccgaaacgcgaacctaacaccgaaaaaaaactaacgctaaaacccgaacgacaccacctactacccgcttcccgtacacgtacgaacgaaaacgcttacatcgacgccgcttatcgccgacgaaaaataaaaatccgtataaatcgaattccctctcgaacaaattctctttaaaaaaaaatcgttcacgcgaaacctacaaactcttaaccgaaatacgacttaaaacgaaatactacgcgcgaacctaataaaaaatcgtaaatccgaacaaaaaaaaaaacaacgcgtacctttcgacgccgacccgaaaactaaaaacctactcgtaatatcgaactatacgcccaactaaaaaatctcgccgccgactccgacgccctcaaaataacgaccgcgcaatataaaaatatttcgtatcttaattttttaaaacgcgtaaacctattacgaaaaatttacgaaactacgataataatttaactaacgaaacacga

SEQ ID NO: 14275 - DNA, 1465 bp, Artificial Sequence
  chemically treated genomic DNA (Homo sapiens) CpG-island No: 14275
cgttttgtttttacggtttttgttttttagggcgattgggcgcggaagaaaagttggagagtttttgcggggtggtaggaggagggtgtttgagtttcgcgagaggttcgggcgaggaagatgcgtagtttgttgattcgcgtttcgttcggcgttagggatttttagagggaggagagtttaaagatttcgtttcgcgttttcgcgaggattaatttagttttcgcgtttgttttagagcggtttagaaatttagggtatagtgagagcgtagggcgtttttcgaggttttatatcgtcggtcgggttagcggaggttgtgatcggagcgttttttttgtgtcgcgtacgtcgcggtcgtcgtcgggttggggtaggtgagcgggaggttagggtatatttcggggtgggggatgggcgcgtatatggtcgttagtaggtagagttatttcggtaaatacgttagggacggcggcgcgcgcgggaggtaatttagcggggtaattttcgtttttatttgttcgagtttgtacgcgtcggcggtcgcggcgtcgaggggggcggagtttgttagttcgcgcgtcggggcgggatttagcgggggcggggttcgtagtgattgggcgtaggagcggggtcgttagttagagttgggttgtagggtcgcgtaggttttatttcgtttcgcgtagtcgtttggtttgtagtttgttggagttttgcgtttagcgtcgttgtcgttgtcgtcgtcgtcgtcgtcgtcgtcgtcgtcgtcgtcgtcgttattattattatttgatttttgtagttattttgcgaattttgttatattgcgatcgtattatcgcggtattcggttcgttgcgttttcgtcgttatcgtttcggcgtttttttttggtttttgtttttttaaatgtttgattttgattttcggattgagaaacgtaaggtaaatatttttaaatttcggggcgcgggtttggtatcgaaggaagattagcgttggagttcgaacggtattatttattgttcgtttttcgtgtacgtgcgagcggagacgtttgtatcggcgtcgtttgtcgtcggcgggaggtggggattcgtgtggatcgggttttttttcgggtaggttttttttaaagaaaagtcgtttacgcggaatttgtaggtttttggtcgaagtgcggtttgggacgggatgttgcgcgcgggtttggtgaagggtcgtaggttcgggtaggaggagaggtagcgcgtgtttttcggcgtcggttcgggagttgaggatttgttcgtagtatcgggttgtgcgtttagttggaaagtttcgtcgtcggtttcggcgtttttagagtagcggtcgcgtagtgtgagggtgtttcgtgttttggttttttggggcgcgtgggtttgttgcggaggatttgcggaattgcggtggtgatttaattgacgagatacgg

SEQ ID NO: 14276 - DNA, 1465 bp, Artificial Sequence
  chemically treated genomic DNA (Homo sapiens) CpG-island No: 14276
ccgtatctcgtcaattaaatcaccaccgcaattccgcaaatcctccgcaacaaacccacgcgccccaaaaaaccaaaacacgaaacaccctcacactacgcgaccgctactctaaaaacgccgaaaccgacgacgaaactttccaactaaacgcacaacccgatactacgaacaaatcctcaactcccgaaccgacgccgaaaaacacgcgctacctctcctcctacccgaacctacgacccttcaccaaacccgcgcgcaacatcccgtcccaaaccgcacttcgaccaaaaacctacaaattccgcgtaaacgacttttctttaaaaaaaacctacccgaaaaaaaacccgatccacacgaatccccacctcccgccgacgacaaacgacgccgatacaaacgtctccgctcgcacgtacacgaaaaacgaacaataaataataccgttcgaactccaacgctaatcttccttcgataccaaacccgcgccccgaaatttaaaaatatttaccttacgtttctcaatccgaaaatcaaaatcaaacatttaaaaaaacaaaaaccaaaaaaaaacgccgaaacgataacgacgaaaacgcaacgaaccgaataccgcgataatacgatcgcaatataacaaaattcgcaaaataactacaaaaatcaaataataataataacgacgacgacgacgacgacgacgacgacgacgacgacgacaacgacaacgacgctaaacgcaaaactccaacaaactacaaaccaaacgactacgcgaaacgaaataaaacctacgcgaccctacaacccaactctaactaacgaccccgctcctacgcccaatcactacgaaccccgcccccgctaaatcccgccccgacgcgcgaactaacaaactccgcccccctcgacgccgcgaccgccgacgcgtacaaactcgaacaaataaaaacgaaaattaccccgctaaattacctcccgcgcgcgccgccgtccctaacgtatttaccgaaataactctacctactaacgaccatatacgcgcccatcccccaccccgaaatataccctaacctcccgctcacctaccccaacccgacgacgaccgcgacgtacgcgacacaaaaaaaacgctccgatcacaacctccgctaacccgaccgacgatataaaacctcgaaaaacgccctacgctctcactataccctaaatttctaaaccgctctaaaacaaacgcgaaaactaaattaatcctcgcgaaaacgcgaaacgaaatctttaaactctcctccctctaaaaatccctaacgccgaacgaaacgcgaatcaacaaactacgcatcttcctcgcccgaacctctcgcgaaactcaaacaccctcctcctaccaccccgcaaaaactctccaacttttcttccgcgcccaatcgccctaaaaaacaaaaaccgtaaaaacaaaacg

SEQ ID NO: 14277 - DNA, 741 bp, Artificial Sequence
  chemically treated genomic DNA (Homo sapiens) CpG-island No: 14277
aggaggttttgggttttcggagtcgttggaggacgcgcgtcgggtttcgtttagttatttcgttgtaagagggaaaaggtacgagcgtggatacggttaagtagattcggaggtcggagatcggttttaatcgggtttcgaagtttttatcgcggacgaattttgtttttcgcggtcgtttcgcgtcgtattcggggaaaagtaatataatttgttgcgcgggttgagagttcgaagttcgtcgtacgtcgtaatgtttcgcgtttttcgcggggtcgggcgatttagatagggatcggaaaagaattacgtagaagaaagttttattttttgtcgtttgtttttgtgtagttttgtagtttcgtcgttttcgcgtcgttcgttttcgcgattttgtgaatattttgaaaaataagagtcgggggaagtaacgggttaagcgttgttatttggggtattaaaaggaagtcggttagaggtggcgggtttatgcgtttttcgagatttaggtcgcgtcgggggttaagagtttttatagttttttttcgcgtcgtcgggaggttttttcggaattgggtcggagcgtagagaacgtagtgtgagaagggtttatgggttttaggttatttttttcgcgttggacgcgggtagagcggtgtttttttttgtttttgttaagagacgtggagggagggagaagggaggatggtttgtgttgaaagaaataagaatgaagtcggg

SEQ ID NO: 14278 - DNA, 741 bp, Artificial Sequence
  chemically treated genomic DNA (Homo sapiens) CpG-island No: 14278
cccgacttcattcttatttctttcaacacaaaccatcctcccttctccctccctccacgtctcttaacaaaaacaaaaaaaaacaccgctctacccgcgtccaacgcgaaaaaaataacctaaaacccataaacccttctcacactacgttctctacgctccgacccaattccgaaaaaacctcccgacgacgcgaaaaaaaactataaaaactcttaacccccgacgcgacctaaatctcgaaaaacgcataaacccgccacctctaaccgacttccttttaataccccaaataacaacgcttaacccgttacttcccccgactcttatttttcaaaatattcacaaaatcgcgaaaacgaacgacgcgaaaacgacgaaactacaaaactacacaaaaacaaacgacaaaaaataaaactttcttctacgtaattcttttccgatccctatctaaatcgcccgaccccgcgaaaaacgcgaaacattacgacgtacgacgaacttcgaactctcaacccgcgcaacaaattatattacttttccccgaatacgacgcgaaacgaccgcgaaaaacaaaattcgtccgcgataaaaacttcgaaacccgattaaaaccgatctccgacctccgaatctacttaaccgtatccacgctcgtaccttttccctcttacaacgaaataactaaacgaaacccgacgcgcgtcctccaacgactccgaaaacccaaaacctcct

SEQ ID NO: 14279 - DNA, 741 bp, Artificial Sequence
  chemically treated genomic DNA (Homo sapiens) CpG-island No: 14279
ttcgattttatttttgttttttttagtataagttatttttttttttttttttttttacgttttttggtagagatagaaagggatatcgttttgttcgcgtttagcgcgaaggaggtgatttaaaatttatgggttttttttatattgcgttttttgcgtttcggtttagtttcgggaggatttttcgacggcgcgggagaaggttgtaagggtttttggttttcgacgcggtttgggtttcgggggacgtatgaattcgttatttttggtcggtttttttttagtgttttaaatagtagcgtttagttcgttgtttttttcgatttttgttttttaaagtgtttatagggtcgcgagagcgagcgacgcgggggcggcgaggttgtaaggttgtataggaatagacgataagaaatagggtttttttttgcgtggttttttttcggtttttgtttgagtcgttcgatttcgcggggagcgcggagtattgcggcgtgcggcgggtttcgggtttttagttcgcgtagtaagttgtgttgttttttttcgggtgcgacgcgggacggtcgcgaagagtaaagttcgttcgcggtaggaatttcgaggttcggttaggatcgattttcggttttcgagtttatttagtcgtgtttacgttcgtgtttttttttttttgtagcgaaataattgggcggggttcgacgcgcgttttttagcgatttcgggaatttaaggtttttt

SEQ ID NO: 14280 - DNA, 741 bp, Artificial Sequence
  chemically treated genomic DNA (Homo sapiens) CpG-island No: 14280
aaaaaaccttaaattcccgaaatcgctaaaaaacgcgcgtcgaaccccgcccaattatttcgctacaaaaaaaaaaaaacacgaacgtaaacacgactaaataaactcgaaaaccgaaaatcgatcctaaccgaacctcgaaattcctaccgcgaacgaactttactcttcgcgaccgtcccgcgtcgcacccgaaaaaaaacaacacaacttactacgcgaactaaaaacccgaaacccgccgcacgccgcaatactccgcgctccccgcgaaatcgaacgactcaaacaaaaaccgaaaaaaaaccacgcaaaaaaaaaccctatttcttatcgtctattcctatacaaccttacaacctcgccgcccccgcgtcgctcgctctcgcgaccctataaacactttaaaaaacaaaaatcgaaaaaaacaacgaactaaacgctactatttaaaacactaaaaaaaaaccgaccaaaaataacgaattcatacgtcccccgaaacccaaaccgcgtcgaaaaccaaaaacccttacaaccttctcccgcgccgtcgaaaaatcctcccgaaactaaaccgaaacgcaaaaaacgcaatataaaaaaaacccataaattttaaatcacctccttcgcgctaaacgcgaacaaaacgatatccctttctatctctaccaaaaaacgtaaaaaaaaaaaaaaaaaaaaataacttatactaaaaaaaacaaaaataaaatcgaa

SEQ ID NO: 14281 - DNA, 1020 bp, Artificial Sequence
  chemically treated genomic DNA (Homo sapiens) CpG-island No: 14281
gtgtcgaggttgtgtgtgtgtgtgtgtgtgtgtgttcgagtacgtgtgtcgaggttgtgtgtgtgtgtgttcgagtacgtgtgttaaggttgtgtgtgttcgagtacgtgtgttaaggttgtgtgtgtgttcgagtacgtgtgtcgaggttgtgtgtgtgtgttcgagtatgtgtgtttaggttgtgtgtgtgtgtgtgttcgagtatgtgtgttaaagttgtgtgtgtgtgtgcgcgcgtttaagtatgtgtgtttaggttgtgtgtgtgtgtgcgttcgagtatgtgtgtcgaggttgtgtgtgtgtgtgtgtgtgttcgagtatgtgtgtttaggttgtgtgtgtgtgttcgagtacgtgtgtcgaggttgtgtgtgtgttcgagtacgtgtgtcgatgttgtgtgtgttcgagtacgtgtgttgaggttgtgtgtgtgtgtgttcgagtacgtgtgtcgaggttgtgtgtgtgtgttcgagtacgtgtgtcgaggttgtgtgtgtgttcgagtacgtgtgtcgaggttgtgtgtgtgtgttcgagtacgtgtgtcgaggttgtgtgtgtgtgttcgagtacgtgtgtcgaggttgtgtgtgtgttcgagtacgtgtgtcgaggtgtgtgttcgagtacgtgtgtcgaggttgtgtgtgtgtgtgttcgagtacgtgtcgaggttgtgtgtgtgtgttcgagtacgtgtgtcgaggttgtgtgtgtgtgttcgagtacgtgtgtcgaggtgtgtgtgtgtttaagtacgtgtcgaggttgtgtgtgtgtgttcgagtacgtgtgtcgaggtgtgtgtgtgtgttcgagtacgtgtgttaaggttgtgtgtgtgtgtgttcgagtacgtgtgtcgaggttgtgtgtgtgtgtgcgttcgagtacgtgtgtcgaggttgtgtgtgtgtgtgtgtgtgtgtgtgttcgagtacgtatgtcgggagggggataagaagaatatagtagtaggagatgagttttgaaacgtatgttgaggtt

SEQ ID NO: 14282 - DNA, 1020 bp, Artificial Sequence
  chemically treated genomic DNA (Homo sapiens) CpG-island No: 14282
aacctcaacatacgtttcaaaactcatctcctactactatattcttcttatccccctcccgacatacgtactcgaacacacacacacacacacacacacacaacctcgacacacgtactcgaacgcacacacacacacaacctcgacacacgtactcgaacacacacacacacaaccttaacacacgtactcgaacacacacacacacctcgacacacgtactcgaacacacacacacaacctcgacacgtacttaaacacacacacacctcgacacacgtactcgaacacacacacacaacctcgacacacgtactcgaacacacacacacaacctcgacacgtactcgaacacacacacacacaacctcgacacacgtactcgaacacacacctcgacacacgtactcgaacacacacacaacctcgacacacgtactcgaacacacacacacaacctcgacacacgtactcgaacacacacacacaacctcgacacacgtactcgaacacacacacaacctcgacacacgtactcgaacacacacacacaacctcgacacacgtactcgaacacacacacacacaacctcaacacacgtactcgaacacacacaacatcgacacacgtactcgaacacacacacaacctcgacacacgtactcgaacacacacacacaacctaaacacacatactcgaacacacacacacacacacacaacctcgacacacatactcgaacgcacacacacacacaacctaaacacacatacttaaacgcgcgcacacacacacacaactttaacacacatactcgaacacacacacacacacaacctaaacacacatactcgaacacacacacacaacctcgacacacgtactcgaacacacacacaaccttaacacacgtactcgaacacacacaaccttaacacacgtactcgaacacacacacacacaacctcgacacacgtactcgaacacacacacacacacacacacacaacctcgacac

SEQ ID NO: 14283 - DNA, 1020 bp, Artificial Sequence
  chemically treated genomic DNA (Homo sapiens) CpG-island No: 14283
gattttaatatacgttttaaggtttattttttgttgttgtgttttttttatttttttttcgatatacgtattcgagtatatatatatatatatatatatataatttcgatatacgtattcgagcgtatatatatatataatttcgatatacgtattcgagtatatatatatataattttgatatacgtattcgagtatatatatatatttcgatatacgtattcgagtatatatatataatttcgatacgtatttgagtatatatatatttcgatatacgtattcgagtatatatatataatttcgatatacgtattcgagtatatatatataatttcgatacgtattcgagtatatatatatataatttcgatatacgtattcgagtatatatttcgatatacgtattcgagtatatatataatttcgatatacgtattcgagtatatatatataatttcgatatacgtattcgagtatatatatataatttcgatatacgtattcgagtatatatataatttcgatatacgtattcgagtatatatatataatttcgatatacgtattcgagtatatatatatataattttaatatacgtattcgagtatatataatatcgatatacgtattcgagtatatatataatttcgatatacgtattcgagtatatatatataatttggatatatatattcgagtatatatatatatatatataatttcgatatatatattcgagcgtatatatatatataatttggatatatatatttgagcgcgcgtatatatatatataattttgatatatatattcgagtatatatatatatataatttggatatatatattcgagtatatatatataatttcgatatacgtattcgagtatatatataattttgatatacgtattcgagtatatataattttgatatacgtattcgagtatatatatatataatttcgatatacgtattcgagtatatatatatatatatatatataatttcgatat

SEQ ID NO: 14284 - DNA, 1020 bp, Artificial Sequence
  chemically treated genomic DNA (Homo sapiens) CpG-island No: 14284
atatcgaaattatatatatatatatatatatatactcgaatacgtatatcgaaattatatatatatatactcgaatacgtatatcaaaattatatatactcgaatacgtatatcaaaattatatatatactcgaatacgtatatcgaaattatatatatatactcgaatatatatatccaaattatatatatatatatactcgaatatatatatcaaaattatatatatatatacgcgcgctcaaatatatatatccaaattatatatatatatacgctcgaatatatatatcgaaattatatatatatatatatatactcgaatatatatatccaaattatatatatatactcgaatacgtatatcgaaattatatatatactcgaatacgtatatcgatattatatatactcgaatacgtatattaaaattatatatatatatactcgaatacgtatatcgaaattatatatatatactcgaatacgtatatcgaaattatatatatactcgaatacgtatatcgaaattatatatatatactcgaatacgtatatcgaaattatatatatatactcgaatacgtatatcgaaattatatatatactcgaatacgtatatcgaaatatatactcgaatacgtatatcgaaattatatatatatatactcgaatacgtatcgaaattatatatatatactcgaatacgtatatcgaaattatatatatatactcgaatacgtatatcgaaatatatatatactcaaatacgtatcgaaattatatatatatactcgaatacgtatatcgaaatatatatatatactcgaatacgtatatcaaaattatatatatatatactcgaatacgtatatcgaaattatatatatatatacgctcgaatacgtatatcgaaattatatatatatatatatatatatatactcgaatacgtatatcgaaaaaaaaataaaaaaaacacaacaacaaaaaataaaccttaaaacgtatattaaaatc

SEQ ID NO: 14285 - DNA, 587 bp, Artificial Sequence
  chemically treated genomic DNA (Homo sapiens) CpG-island No: 14285
tttttcgttttatttttttattttgagggtatttcgcgtcggtgtaggttttatcgttgttgtcggagtcggtcgggagggtgggcggttgagtcgggtttcgtaggaaggacggtacgaatttcgcggcgtgtacgttaggtacgaagggtttggcgttgacgttgagtttacggttgaaagtcgagttgaggggttcgcgttgggtttcggttatcgtagaggagattttattttcgttcggggtcgatttcggggattttatgtttatttggttttagtaatcgggcgtcgagtcgttgttgttgttgttcgaatttatggtttcggaatttgttgtgtggtagtgagggagcgggtttaataggttagaagagcgggtttcgtcggcggggttaaggtagtaagagcgaagggttaaggggtagcgatacgaattttagttgtatcgcggaggtagttaagcgtcgatgttgtattcgtaattgcggcggtagtagtagatatggcggtttaatattttttttttgtgtgtgagcggatttttttttttaaattttaattacgaattttttgtatattaaggt

SEQ ID NO: 14286 - DNA, 587 bp, Artificial Sequence
  chemically treated genomic DNA (Homo sapiens) CpG-island No: 14286
accttaatatacaaaaaattcgtaattaaaatttaaaaaaaaaaatccgctcacacacaaaaaaaaaatattaaaccgccatatctactactaccgccgcaattacgaatacaacatcgacgcttaactacctccgcgatacaactaaaattcgtatcgctaccccttaacccttcgctcttactaccttaaccccgccgacgaaacccgctcttctaacctattaaacccgctccctcactaccacacaacaaattccgaaaccataaattcgaacaacaacaacaacgactcgacgcccgattactaaaaccaaataaacataaaatccccgaaatcgaccccgaacgaaaataaaatctcctctacgataaccgaaacccaacgcgaacccctcaactcgactttcaaccgtaaactcaacgtcaacgccaaacccttcgtacctaacgtacacgccgcgaaattcgtaccgtccttcctacgaaacccgactcaaccgcccaccctcccgaccgactccgacaacaacgataaaacctacaccgacgcgaaataccctcaaaataaaaaaataaaacgaaaaa

SEQ ID NO: 14287 - DNA, 587 bp, Artificial Sequence
  chemically treated genomic DNA (Homo sapiens) CpG-island No: 14287
attttaatgtataaagaattcgtggttggggtttgggggaggagattcgtttatatataagaggagagtgttgagtcgttatatttgttgttgtcgtcgtagttgcgaatgtagtatcggcgtttagttgttttcgcggtgtagttaaggttcgtgtcgttattttttggtttttcgtttttgttgttttaatttcgtcggcggagttcgtttttttggtttgttgagttcgtttttttattgttatatagtaagtttcgagattatggattcgggtagtagtagtagcgattcggcgttcgattgttgggattaggtggatatggaattttcggggtcggtttcgagcggggatggagttttttttgcggtggtcgaggtttagcgcgagttttttagttcggtttttagtcgtaagtttaacgttaacgttaagtttttcgtgtttaacgtatacgtcgcggagttcgtgtcgttttttttgcggggttcgatttagtcgtttattttttcggtcggtttcggtagtaacgatgaaatttgtatcggcgcgggatatttttaaggtaaaaggatgggacgggggg

SEQ ID NO: 14288 - DNA, 587 bp, Artificial Sequence
  chemically treated genomic DNA (Homo sapiens) CpG-island No: 14288
ccccccgtcccatccttttaccttaaaaatatcccgcgccgatacaaatttcatcgttactaccgaaaccgaccgaaaaaataaacgactaaatcgaaccccgcaaaaaaaacgacacgaactccgcgacgtatacgttaaacacgaaaaacttaacgttaacgttaaacttacgactaaaaaccgaactaaaaaactcgcgctaaacctcgaccaccgcaaaaaaaactccatccccgctcgaaaccgaccccgaaaattccatatccacctaatcccaacaatcgaacgccgaatcgctactactactacccgaatccataatctcgaaacttactatataacaataaaaaaacgaactcaacaaaccaaaaaaacgaactccgccgacgaaattaaaacaacaaaaacgaaaaaccaaaaaataacgacacgaaccttaactacaccgcgaaaacaactaaacgccgatactacattcgcaactacgacgacaacaacaaatataacgactcaacactctcctcttatatataaacgaatctcctcccccaaaccccaaccacgaattctttatacattaaaat

SEQ ID NO: 14289 - DNA, 842 bp, Artificial Sequence
  chemically treated genomic DNA (Homo sapiens) CpG-island No: 14289
acgcgtttcggaggttgtaggcgttatgggtagagtgaggaatcgcgttattgtttagcggcggaggcgaaagcggttcggggattttttcgtcgtttgcgcggttatcgcggttacgggcgttagtcgcgcgtagtgttttcgggtttaagtcggggtcgggagttacgcggcggttaagaggtggttgggtaggtggcgacggaagcgtcgttggcggcgggttcggaaggcgggttttagagatttgttgtttttcgcgttaatttcggattcgtcggggttcgtttcgttttttaaggatttggatttgggcgtatagcgggagcgttgggagacgtttaggaagttgcggggttttagttgcgagggcgtcgttaaggttttgttggatattttcgagtattcgggtttcgtgtattatatcgggggttgttattgcggcgcggttcgttttgcggtttgggtttttgtagatttgcgcgtcgtggattgtagttgtaggttgtgtaggaagaagtagtatcgttattttttcgtttcggtttcgcgttttacgttgttttagggcgtagaaagtatcgttatttatcggtttaatacgtattcggcgttgtatagtttttgtagtaggtgcggggtgtagagtttttacgtagttgtttttgattttcgcgtgtacggcgtcgtttcgtattgtttggacgagggtatcgtgcgtagcgtggttatcgaggaggtcggcggtggcgattcgggggaggaggtcgtcgaggagtataaggttatttataagacgtttttttagttagtttttgtttgttttcgcgaataggagtagt

SEQ ID NO: 14290 - DNA, 842 bp, Artificial Sequence
  chemically treated genomic DNA (Homo sapiens) CpG-island No: 14290
actactcctattcgcgaaaacaaacaaaaactaactaaaaaaacgtcttataaataaccttatactcctcgacgacctcctcccccgaatcgccaccgccgacctcctcgataaccacgctacgcacgataccctcgtccaaacaatacgaaacgacgccgtacacgcgaaaatcaaaaacaactacgtaaaaactctacaccccgcacctactacaaaaactatacaacgccgaatacgtattaaaccgataaataacgatactttctacgccctaaaacaacgtaaaacgcgaaaccgaaacgaaaaaataacgatactacttcttcctacacaacctacaactacaatccacgacgcgcaaatctacaaaaacccaaaccgcaaaacgaaccgcgccgcaataacaacccccgatataatacacgaaacccgaatactcgaaaatatccaacaaaaccttaacgacgccctcgcaactaaaaccccgcaacttcctaaacgtctcccaacgctcccgctatacgcccaaatccaaatccttaaaaaacgaaacgaaccccgacgaatccgaaattaacgcgaaaaacaacaaatctctaaaacccgccttccgaacccgccgccaacgacgcttccgtcgccacctacccaaccacctcttaaccgccgcgtaactcccgaccccgacttaaacccgaaaacactacgcgcgactaacgcccgtaaccgcgataaccgcgcaaacgacgaaaaaatccccgaaccgctttcgcctccgccgctaaacaataacgcgattcctcactctacccataacgcctacaacctccgaaacgcgt

SEQ ID NO: 14291 - DNA, 842 bp, Artificial Sequence
  chemically treated genomic DNA (Homo sapiens) CpG-island No: 14291
attgtttttgttcgcggggataggtaggggttgattgggaggacgttttgtggatggttttgtgtttttcggcggttttttttttcgggtcgttatcgtcgattttttcgatgattacgttgcgtacggtgttttcgtttaggtagtgcggggcgacgtcgtatacgcgggggttagagatagttgcgtggaaattttgtatttcgtatttgttgtagaagttgtgtagcgtcgggtgcgtgttggatcgataggtgacgatgttttttgcgttttggagtagcgtgaagcgcgaggtcgggacgaggaagtggcggtgttgtttttttttgtatagtttgtagttgtaatttacgacgcgtagatttgtaggggtttagatcgtaaagcggatcgcgtcgtagtggtagttttcggtgtgatgtacgaggttcgggtattcgaaggtgtttagtaggattttggcggcgttttcgtagttgaggtttcgtagttttttgaacgttttttagcgttttcgttgtgcgtttaggtttagatttttgggggacggggcgggtttcggcgggttcggggttggcgcggagggtagtaggtttttggggttcgtttttcggattcgtcgttagcggcgttttcgtcgttatttatttagttattttttggtcgtcgcgtggttttcgatttcgatttggattcgggggtattgcgcgcggttggcgttcgtgatcgcgatggtcgcgtaggcggcgggaggattttcgggtcgttttcgttttcgtcgttgagtagtggcgcggttttttattttgtttatggcgtttgtagttttcggagcgcgt

SEQ ID NO: 14292 - DNA, 842 bp, Artificial Sequence
  chemically treated genomic DNA (Homo sapiens) CpG-island No: 14292
acgcgctccgaaaactacaaacgccataaacaaaataaaaaaccgcgccactactcaacgacgaaaacgaaaacgacccgaaaatcctcccgccgcctacgcgaccatcgcgatcacgaacgccaaccgcgcgcaatacccccgaatccaaatcgaaatcgaaaaccacgcgacgaccaaaaaataactaaataaataacgacgaaaacgccgctaacgacgaatccgaaaaacgaaccccaaaaacctactaccctccgcgccaaccccgaacccgccgaaacccgccccgtcccccaaaaatctaaacctaaacgcacaacgaaaacgctaaaaaacgttcaaaaaactacgaaacctcaactacgaaaacgccgccaaaatcctactaaacaccttcgaatacccgaacctcgtacatcacaccgaaaactaccactacgacgcgatccgctttacgatctaaacccctacaaatctacgcgtcgtaaattacaactacaaactatacaaaaaaaaacaacaccgccacttcctcgtcccgacctcgcgcttcacgctactccaaaacgcaaaaaacatcgtcacctatcgatccaacacgcacccgacgctacacaacttctacaacaaatacgaaatacaaaatttccacgcaactatctctaacccccgcgtatacgacgtcgccccgcactacctaaacgaaaacaccgtacgcaacgtaatcatcgaaaaaatcgacgataacgacccgaaaaaaaaaaccgccgaaaaacacaaaaccatccacaaaacgtcctcccaatcaacccctacctatccccgcgaacaaaaacaat

SEQ ID NO: 14293 - DNA, 1630 bp, Artificial Sequence
  chemically treated genomic DNA (Homo sapiens) CpG-island No: 14293
  unsure (19)
attacgtttgtgttttttncgtgttgatgagcgttagcggtaggtcgcgatggtcgtagtggtataggcgaatttttcgcgtcggtgtgtatatcgggtttatttggttttgtatttgcgttatcgttaggtcggacgatgttagttagcggcgggtttttttatttattcggttagttaggattttattttttagtcggtcgagtatttgtattagtatcggcgggaatattatattgttatcgttttcgttatcggattgttgaagggtattcgttaggttgcggcgttgcgttttcgttagtttatcggtggcggttttaattttgatgagtggcgtgaagtttttcggttgataaatcgtttggatgcgggttttgtcgttttgtatcggggataggcgggcgtcgttttagtcgtattaggatatttgcggtttgcgtgatagcgatatttagttcgtgaggtttcgtttacgtcgttatattcgttttgttattttgtcggtttaacgggtcgtaaagatagcgattttcgattagcggttttgtatattgggttcgcgtgtagtgtattaaacggtgttgattgtcgtaatggtattcgtgggtgcgtttattattcgtgcgggataatttttttcgggatgaggtcggttttttttgttagtttgtcgtgacggttatatcggtaaagatagtgcgcgttacggtcgatatggttattcggttttatgttgagggcgttgttcgggtgtagtttcgggtcgagtagacggttatttgtcgggtttgtggtattcgggattcggatatttatattttttgcggtggtgtgaacgtcggttagtttgtcggtggtattgtatttgtaatttcgggtttggcgcgggcggttgatgcggatgagttcgtcgttgtcgttttaggtgtattcgcggttagatagtagattgtttaggtgttggttttgtatttgttcggtaggggtataagcggtggtgagtttatagcggtcgaagttgcgtagcgtttttcggtataggcggtcgcgggtgtattttattatcggtgtgtcggcgagttttatgtttgttagttagtcgttgtcgtaggttagttattttacggcgggtaggttgttcggtatatagcggttcgttagtttttgtgcgttgtacgtatgtttggttttatgttgttagagtagtttattcgtttgcggataatgtatcgtttgataatgggcggcgattttattcgttggaaattatgttacgtatttattggatgtagtattggtataatttgaacgatggcgcgatggaagatgttttgtacgaaatcgtttttatgcgttggtttgttcggatatttttggatagcgtttggtcggatcgtattattattatgaattttcggtatttgttggagtagtattaattggatcggtaattgtttaagattattaatcgttggttggtcgaagtacgcgttatgatgatttaaggtattttgatcgatagttattattattgaggtatttagttcgattaagaataaagagtagtaacgcgattcggagatgtattagattaagaaaggtaattattggtattttgttatgaagg

SEQ ID NO: 14294 - DNA, 1630 bp, Artificial Sequence
  chemically treated genomic DNA (Homo sapiens) CpG-island No: 14294
  unsure (1612)
ccttcataacaaaataccaataattacctttcttaatctaatacatctccgaatcgcgttactactctttattcttaatcgaactaaatacctcaataataataactatcgatcaaaataccttaaatcatcataacgcgtacttcgaccaaccaacgattaataatcttaaacaattaccgatccaattaatactactccaacaaataccgaaaattcataataataatacgatccgaccaaacgctatccaaaaatatccgaacaaaccaacgcataaaaacgatttcgtacaaaacatcttccatcgcgccatcgttcaaattataccaatactacatccaataaatacgtaacataatttccaacgaataaaatcgccgcccattatcaaacgatacattatccgcaaacgaataaactactctaacaacataaaaccaaacatacgtacaacgcacaaaaactaacgaaccgctatataccgaacaacctacccgccgtaaaataactaacctacgacaacgactaactaacaaacataaaactcgccgacacaccgataataaaatacacccgcgaccgcctataccgaaaaacgctacgcaacttcgaccgctataaactcaccaccgcttatacccctaccgaacaaatacaaaaccaacacctaaacaatctactatctaaccgcgaatacacctaaaacgacaacgacgaactcatccgcatcaaccgcccgcgccaaacccgaaattacaaatacaataccaccgacaaactaaccgacgttcacaccaccgcaaaaaatataaatatccgaatcccgaataccacaaacccgacaaataaccgtctactcgacccgaaactacacccgaacaacgccctcaacataaaaccgaataaccatatcgaccgtaacgcgcactatctttaccgatataaccgtcacgacaaactaacaaaaaaaaccgacctcatcccgaaaaaaattatcccgcacgaataataaacgcacccacgaataccattacgacaatcaacaccgtttaatacactacacgcgaacccaatatacaaaaccgctaatcgaaaatcgctatctttacgacccgttaaaccgacaaaataacaaaacgaatataacgacgtaaacgaaacctcacgaactaaatatcgctatcacgcaaaccgcaaatatcctaatacgactaaaacgacgcccgcctatccccgatacaaaacgacaaaacccgcatccaaacgatttatcaaccgaaaaacttcacgccactcatcaaaattaaaaccgccaccgataaactaacgaaaacgcaacgccgcaacctaacgaatacccttcaacaatccgataacgaaaacgataacaatataatattcccgccgatactaatacaaatactcgaccgactaaaaaataaaatcctaactaaccgaataaataaaaaaacccgccgctaactaacatcgtccgacctaacgataacgcaaatacaaaaccaaataaacccgatatacacaccgacgcgaaaaattcgcctataccactacgaccatcgcgacctaccgctaacgctcatcaacacgnaaaaaacacaaacgtaat

SEQ ID NO: 14295 - DNA, 1630 bp, Artificial Sequence
  chemically treated genomic DNA (Homo sapiens) CpG-island No: 14295
  unsure (1612)
tttttatggtaaagtattagtaattgttttttttggtttgatgtattttcggatcgcgttgttgttttttgtttttggtcgagttgggtgttttaatgatggtggttatcgattaaggtgttttgagttattatgacgcgtgtttcggttagttagcgattgatggttttgaataattgtcggtttagttgatgttgttttagtaggtgtcggaaatttatgatggtggtgcggttcggttaggcgttatttagggatattcgggtaaattaacgtatggaggcgatttcgtatagagtattttttatcgcgttatcgtttaggttgtattaatgttgtatttagtgaatgcgtagtatggtttttagcggataaggtcgtcgtttattattagacggtgtattattcgtagacgaatgaattgttttggtagtatgagattagatatgcgtataacgtatagggattggcgaatcgttgtatatcggatagtttgttcgtcgtggaatggttgatttacggtagcggttggttggtaggtatgaaattcgtcgatatatcggtggtggagtatattcgcgatcgtttgtatcgggaaacgttgcgtagtttcggtcgttatgaatttattatcgtttatatttttgtcgggtagatatagagttagtatttgaatagtttgttgtttgatcgcgagtatatttggaacgataacggcgaatttattcgtattagtcgttcgcgttagattcggagttataggtatagtattatcggtaggttgatcggcgtttatattatcgtagggaatatggatattcggatttcgaatattatagattcggtaggtaatcgtttgttcgattcggagttgtattcggatagcgtttttagtatagggtcggataattatatcggtcgtgacgcgtattatttttatcggtatgatcgttacggtaggttgataaagaaaatcgattttatttcggaaggggttatttcgtacggatgatgagcgtatttacgggtattattacgatagttagtatcgtttggtgtattatacgcggatttaatatgtagagtcgttggtcgaaagtcgttatttttacgattcgttgggtcggtagggtggtaaaacgggtatgacggcgtgaacgggattttacgggttggatgtcgttgttacgtaaatcgtaagtgttttggtacggttgggacggcgttcgtttgttttcgatatagaacgatagaattcgtatttaggcgatttattagtcggggagttttacgttatttattagggttgaaatcgttatcggtgagttggcgaaaacgtagcgtcgtagtttggcggatattttttagtagttcggtggcgaagacggtggtagtgtggtgttttcgtcggtgttggtgtagatgttcgatcggttggaaagtgaaattttggttgatcgggtgagtgaggaaattcgtcgttggttggtatcgttcggtttggcggtggcgtagatgtaaagttagatggattcggtatatatatcggcgcgaaaaattcgtttgtattattgcgattatcgcggtttgtcgttggcgtttattagtacgnaaggggtataagcgtggt

SEQ ID NO: 14296 - DNA, 1630 bp, Artificial Sequence
  chemically treated genomic DNA (Homo sapiens) CpG-island No: 14296
  unsure (19)
accacgcttataccccttncgtactaataaacgccaacgacaaaccgcgataatcgcaataatacaaacgaatttttcgcgccgatatatataccgaatccatctaactttacatctacgccaccgccaaaccgaacgataccaaccaacgacgaatttcctcactcacccgatcaaccaaaatttcactttccaaccgatcgaacatctacaccaacaccgacgaaaacaccacactaccaccgtcttcgccaccgaactactaaaaaatatccgccaaactacgacgctacgttttcgccaactcaccgataacgatttcaaccctaataaataacgtaaaactccccgactaataaatcgcctaaatacgaattctatcgttctatatcgaaaacaaacgaacgccgtcccaaccgtaccaaaacacttacgatttacgtaacaacgacatccaacccgtaaaatcccgttcacgccgtcatacccgttttaccaccctaccgacccaacgaatcgtaaaaataacgactttcgaccaacgactctacatattaaatccgcgtataatacaccaaacgatactaactatcgtaataatacccgtaaatacgctcatcatccgtacgaaataaccccttccgaaataaaatcgattttctttatcaacctaccgtaacgatcataccgataaaaataatacgcgtcacgaccgatataattatccgaccctatactaaaaacgctatccgaatacaactccgaatcgaacaaacgattacctaccgaatctataatattcgaaatccgaatatccatattccctacgataatataaacgccgatcaacctaccgataatactatacctataactccgaatctaacgcgaacgactaatacgaataaattcgccgttatcgttccaaatatactcgcgatcaaacaacaaactattcaaatactaactctatatctacccgacaaaaatataaacgataataaattcataacgaccgaaactacgcaacgtttcccgatacaaacgatcgcgaatatactccaccaccgatatatcgacgaatttcatacctaccaaccaaccgctaccgtaaatcaaccattccacgacgaacaaactatccgatatacaacgattcgccaatccctatacgttatacgcatatctaatctcatactaccaaaacaattcattcgtctacgaataatacaccgtctaataataaacgacgaccttatccgctaaaaaccatactacgcattcactaaatacaacattaatacaacctaaacgataacgcgataaaaaatactctatacgaaatcgcctccatacgttaatttacccgaatatccctaaataacgcctaaccgaaccgcaccaccatcataaatttccgacacctactaaaacaacatcaactaaaccgacaattattcaaaaccatcaatcgctaactaaccgaaacacgcgtcataataactcaaaacaccttaatcgataaccaccatcattaaaacacccaactcgaccaaaaacaaaaaacaacaacgcgatccgaaaatacatcaaaccaaaaaaaacaattactaatactttaccataaaaa

SEQ ID NO: 14297 - DNA, 550 bp, Artificial Sequence
  chemically treated genomic DNA (Homo sapiens) CpG-island No: 14297
gatagttcgcgtttcgatcgtttttttttagtttcgtatttcgtttcgtataacgtcgtttttttttttaaagaagtgttcggggttttattttacgtcgcgttagtttattaggggtcgcggtgacgtcgttcgtttaagagttagttttttttaatttttttttaacggggcgtttcggcggggttcgcggttttcggtagtcgtcgttttttttcgcggtattttcggatttcggcgtcgtttttttaaggggtagtttttagtagcgtttttttcgttttttgttgtcggcgcgcgaggcgggggagtcgggttggagcggagcgcgcggttcgcgcggttattggagattaggcggtcggcggtcgggtaggcggcggcggagcgcgcggcggcgtggcggcggatggggacgcggagtcgggcggttgtggcggttgtggcggttgtggttgtggcggcggcggggaagtagttgacgggtcggcggggattttttagagtcgcgattttagaggatttttttatttttttatttgttgaaagg

SEQ ID NO: 14298 - DNA, 550 bp, Artificial Sequence
  chemically treated genomic DNA (Homo sapiens) CpG-island No: 14298
cctttcaacaaataaaaaaataaaaaaatcctctaaaatcgcgactctaaaaaatccccgccgacccgtcaactacttccccgccgccgccacaaccacaaccgccacaaccgccacaaccgcccgactccgcgtccccatccgccgccacgccgccgcgcgctccgccgccgcctacccgaccgccgaccgcctaatctccaataaccgcgcgaaccgcgcgctccgctccaacccgactcccccgcctcgcgcgccgacaacaaaaaacgaaaaaaacgctactaaaaactaccccttaaaaaaacgacgccgaaatccgaaaataccgcgaaaaaaaacgacgactaccgaaaaccgcgaaccccgccgaaacgccccgttaaaaaaaaattaaaaaaaactaactcttaaacgaacgacgtcaccgcgacccctaataaactaacgcgacgtaaaataaaaccccgaacacttctttaaaaaaaaaaacgacgttatacgaaacgaaatacgaaactaaaaaaaaacgatcgaaacgcgaactatc

SEQ ID NO: 14299 - DNA, 550 bp, Artificial Sequence
  chemically treated genomic DNA (Homo sapiens) CpG-island No: 14299
ttttttagtaggtggaggaataaggggattttttagagtcgcgattttagaggattttcgtcggttcgttagttgttttttcgtcgtcgttatagttatagtcgttatagtcgttatagtcgttcggtttcgcgtttttattcgtcgttacgtcgtcgcgcgtttcgtcgtcgtttgttcggtcgtcggtcgtttggtttttagtggtcgcgcggatcgcgcgtttcgttttagttcggttttttcgtttcgcgcgtcggtaatagggggcggggagagcgttgttgggggttgttttttaaaagggcgacgtcggggttcggaagtgtcgcgaggggaggcggcggttgtcgggagtcgcgagtttcgtcgggacgtttcgttaagagagagttaagggaggttggtttttaaacgggcgacgttatcgcgatttttggtgggttggcgcggcgtagagtggagtttcgggtatttttttaaaagggggaacggcgttgtgcgaggcggagtgcggagttagaagggggcggtcggagcgcgagttgtt

SEQ ID NO: 14300 - DNA, 550 bp, Artificial Sequence
  chemically treated genomic DNA (Homo sapiens) CpG-island No: 14300
aacaactcgcgctccgaccgcccccttctaactccgcactccgcctcgcacaacgccgttcccccttttaaaaaaatacccgaaactccactctacgccgcgccaacccaccaaaaatcgcgataacgtcgcccgtttaaaaaccaacctcccttaactctctcttaacgaaacgtcccgacgaaactcgcgactcccgacaaccgccgcctcccctcgcgacacttccgaaccccgacgtcgcccttttaaaaaacaacccccaacaacgctctccccgccccctattaccgacgcgcgaaacgaaaaaaccgaactaaaacgaaacgcgcgatccgcgcgaccactaaaaaccaaacgaccgacgaccgaacaaacgacgacgaaacgcgcgacgacgtaacgacgaataaaaacgcgaaaccgaacgactataacgactataacgactataactataacgacgacgaaaaaacaactaacgaaccgacgaaaatcctctaaaatcgcgactctaaaaaatccccttattcctccacctactaaaaaa

SEQ ID NO: 14301 - DNA, 601 bp, Artificial Sequence
  chemically treated genomic DNA (Homo sapiens) CpG-island No: 14301
tcgtttcgattcggggcgtttagcgtggtgaagtgcgggcgtggagttcgttttttattcggttggaagggtttgcgttttgatttgtgaggatttttgtatgtgtcgcgttttttggttttttacgggaaggtcgaggtcgttaggaagggttgtacggtcggatttttaatagcggttttttggtttggcgggagtagaggggcgtttatattcgtagtttcgggattttagagatagagcgtttcgtttcggtagcggcgtcgcgtttattggttgggttttttttcgtttcgtttagcgatcggttcgtttagagtttacgtatgcgtacgagtatttcgtcgtcgttgtcgtcgttatcgtcgtcgtcgtcgtcgtcgtcgcggttttagtattagcgttcggatagcggtgtcgtttacgggtatggacggtgatagtagtagtagtagcggcggtagcggttcggttttcggttcgggttcggaaggggagtaacggttcgagggggagtttttggttttagacggcggtttttcggataggtagggcggatagtttcgtagattcgtattatagatttttttagatttttttt

SEQ ID NO: 14302 - DNA, 601 bp, Artificial Sequence
  chemically treated genomic DNA (Homo sapiens) CpG-island No: 14302
aaaaaaaatctaaaaaaatctataatacgaatctacgaaactatccgccctacctatccgaaaaaccgccgtctaaaaccaaaaactccccctcgaaccgttactccccttccgaacccgaaccgaaaaccgaaccgctaccgccgctactactactactatcaccgtccatacccgtaaacgacaccgctatccgaacgctaatactaaaaccgcgacgacgacgacgacgacgacgataacgacgacaacgacgacgaaatactcgtacgcatacgtaaactctaaacgaaccgatcgctaaacgaaacgaaaaaaaacccaaccaataaacgcgacgccgctaccgaaacgaaacgctctatctctaaaatcccgaaactacgaatataaacgcccctctactcccgccaaaccaaaaaaccgctattaaaaatccgaccgtacaacccttcctaacgacctcgaccttcccgtaaaaaaccaaaaaacgcgacacatacaaaaatcctcacaaatcaaaacgcaaacccttccaaccgaataaaaaacgaactccacgcccgcacttcaccacgctaaacgccccgaatcgaaacga

SEQ ID NO: 14303 - DNA, 601 bp, Artificial Sequence
  chemically treated genomic DNA (Homo sapiens) CpG-island No: 14303
ggggagggtttgggagggtttgtgatacggatttgcggagttgttcgttttatttgttcggggagtcgtcgtttggggttaagggttttttttcgggtcgttgtttttttttcggattcgggtcgggagtcggatcgttgtcgtcgttgttgttgttgttgttatcgtttatgttcgtgggcggtatcgttgttcgggcgttggtgttgaagtcgcggcggcggcggcggcggcggcggtggcggcggtagcggcggcggggtgttcgtgcgtatgcgtaggttttgagcgggtcggtcgttgggcggggcgaggaggagtttagttaatgggcgcggcgtcgttgtcggagcggagcgttttgtttttaagatttcggggttgcggatgtgagcgtttttttgttttcgttaggttagagagtcgttgttaggagttcggtcgtgtaattttttttagcggtttcggttttttcgtaaggaattagagagcgcgatatatgtagagatttttataaattaaaacgtagatttttttagtcggatagagggcgagttttacgttcgtattttattacgttggacgtttcgggtcgaggcgg

SEQ ID NO: 14304 - DNA, 601 bp, Artificial Sequence
  chemically treated genomic DNA (Homo sapiens) CpG-island No: 14304
ccgcctcgacccgaaacgtccaacgtaataaaatacgaacgtaaaactcgccctctatccgactaaaaaaatctacgttttaatttataaaaatctctacatatatcgcgctctctaattccttacgaaaaaaccgaaaccgctaaaaaaaattacacgaccgaactcctaacaacgactctctaacctaacgaaaacaaaaaaacgctcacatccgcaaccccgaaatcttaaaaacaaaacgctccgctccgacaacgacgccgcgcccattaactaaactcctcctcgccccgcccaacgaccgacccgctcaaaacctacgcatacgcacgaacaccccgccgccgctaccgccgccaccgccgccgccgccgccgccgccgcgacttcaacaccaacgcccgaacaacgataccgcccacgaacataaacgataacaacaacaacaacaacgacgacaacgatccgactcccgacccgaatccgaaaaaaaaacaacgacccgaaaaaaaacccttaaccccaaacgacgactccccgaacaaataaaacgaacaactccgcaaatccgtatcacaaaccctcccaaaccctcccc

SEQ ID NO: 14305 - DNA, 546 bp, Artificial Sequence
  chemically treated genomic DNA (Homo sapiens) CpG-island No: 14305
  unsure (264..265, 271)
cgcgacgcggtttcggtcgagcggggtaagtcggttatttatatcggggataagaaggcgaagatggcggttaagattaataagaagtgggttcggttcgttatcgtgttcgtttacgtgtttttcgtgtcgttggtcgttatcgtgttcgtcgtttattatagttttatttggtagtcggtgggcgtcgggatttcggggggagtcgttggttcgtttttcggcggttttaacgttattggttcgtttgggatttcggggcgnncgtcgncggggtttaatattattgggtcgtttcgtcgcgaggcgtcgcgcgacgtttttttattgtaggcggcgcgatcggcgttttcggagttttttgcggatagtttttcggtcgggtcgttcgagcggtttcgggggtcggacgaggacgaagaggaaacggcggcggcgttcgggagtcgttgaagtttttcgcgttgggggtcgtcgggaattattttttttaagtttagaggtaggatttcgtagtaggatggggtggagagttcgcgggagtga

SEQ ID NO: 14306 - DNA, 546 bp, Artificial Sequence
  chemically treated genomic DNA (Homo sapiens) CpG-island No: 14306
  unsure (276, 282..)
tcactcccgcgaactctccaccccatcctactacgaaatcctacctctaaacttaaaaaaaataattcccgacgacccccaacgcgaaaaacttcaacgactcccgaacgccgccgccgtttcctcttcgtcctcgtccgacccccgaaaccgctcgaacgacccgaccgaaaaactatccgcaaaaaactccgaaaacgccgatcgcgccgcctacaataaaaaaacgtcgcgcgacgcctcgcgacgaaacgacccaataatattaaaccccgncgacgnncgccccgaaatcccaaacgaaccaataacgttaaaaccgccgaaaaacgaaccaacgactccccccgaaatcccgacgcccaccgactaccaaataaaactataataaacgacgaacacgataacgaccaacgacacgaaaaacacgtaaacgaacacgataacgaaccgaacccacttcttattaatcttaaccgccatcttcgccttcttatccccgatataaataaccgacttaccccgctcgaccgaaaccgcgtcgcg

SEQ ID NO: 14307 - DNA, 546 bp, Artificial Sequence
  chemically treated genomic DNA (Homo sapiens) CpG-island No: 14307
  unsure (276, 282..)
ttattttcgcgggttttttattttattttgttgcgaagttttgtttttgggtttggggagaatggttttcggcggtttttagcgcggagggttttaacgattttcgggcgtcgtcgtcgtttttttttcgttttcgttcggttttcgaggtcgttcgagcggttcggtcggggggttgttcgtagggggtttcggaggcgtcggtcgcgtcgtttgtagtgggggaacgtcgcgcggcgtttcgcggcgggacgatttagtggtgttgggtttcgncggcgnncgtttcgaagttttagacgggttagtggcgttggagtcgtcggggggcgggttagcggtttttttcgaggtttcggcgtttatcggttgttagatgaggttgtagtagacggcgagtacgatggcggttagcgatacggagagtacgtaggcgaatacgatggcgagtcggatttattttttgttggttttggtcgttattttcgtttttttgttttcggtgtaggtggtcggtttgtttcgttcggtcggggtcgcgtcgcg

SEQ ID NO: 14308 - DNA, 546 bp, Artificial Sequence
  chemically treated genomic DNA (Homo sapiens) CpG-island No: 14308
  unsure (264..265, 271)
cgcgacgcgaccccgaccgaacgaaacaaaccgaccacctacaccgaaaacaaaaaaacgaaaataacgaccaaaaccaacaaaaaataaatccgactcgccatcgtattcgcctacgtactctccgtatcgctaaccgccatcgtactcgccgtctactacaacctcatctaacaaccgataaacgccgaaacctcgaaaaaaaccgctaacccgccccccgacgactccaacgccactaacccgtctaaaacttcgaaacgnncgccgncgaaacccaacaccactaaatcgtcccgccgcgaaacgccgcgcgacgttcccccactacaaacgacgcgaccgacgcctccgaaaccccctacgaacaaccccccgaccgaaccgctcgaacgacctcgaaaaccgaacgaaaacgaaaaaaaaacgacgacgacgcccgaaaatcgttaaaaccctccgcgctaaaaaccgccgaaaaccattctccccaaacccaaaaacaaaacttcgcaacaaaataaaataaaaaacccgcgaaaataa

SEQ ID NO: 14309 - DNA, 706 bp, Artificial Sequence
  chemically treated genomic DNA (Homo sapiens) CpG-island No: 14309
gcggtagttgttcgaataggaatagttggcgatatttcgcgtcgaagcgttcgaaggggtggttgggtcggaagatttggtcgtcgggcggcggtagcgtgggtagtcgtaggcgggggttgatttcggcgatgtaggcgttttttgtcgttagtgttgcgaattagtagatttagatgtagcggaatttgatgacgtcgtagggtagtaggcgttggaagagtagacgcgaggtgttagtcgtcgtttttcgtaggtcgcggagtcgtcggtgtagcgttagtagtagtcgtcggggcgcgttgtttttttatcggtttcgcgttcggcgcgtatagtcgcgcgttaggtagcgttcgtggagtacggcggaggcgggtagttagattagcgtgagcgttaggtgtattagtatagtcgtgtttatgaagagggcgaggtagcgaacggtcggtaggcggtttaggtagttggtatagaaggtcgcgttcgtggtgaggtcggagattagtagtaggtagtcgaagtggtgtatggtgcggtttacgcgttgcgttagttttttcgacggtagttggtttttgttaaggcgttataggtcgaagaagatgagcgtgtggttggcgtagacgttgtttagtaggaggagggttgttagattgacgaaggggaagtaggttatgcggaaggttatttggtaaaggaa

SEQ ID NO: 14310 - DNA, 706 bp, Artificial Sequence
  chemically treated genomic DNA (Homo sapiens) CpG-island No: 14310
ttcctttaccaaataaccttccgcataacctacttccccttcgtcaatctaacaaccctcctcctactaaacaacgtctacgccaaccacacgctcatcttcttcgacctataacgccttaacaaaaaccaactaccgtcgaaaaaactaacgcaacgcgtaaaccgcaccatacaccacttcgactacctactactaatctccgacctcaccacgaacgcgaccttctataccaactacctaaaccgcctaccgaccgttcgctacctcgccctcttcataaacacgactatactaatacacctaacgctcacgctaatctaactacccgcctccgccgtactccacgaacgctacctaacgcgcgactatacgcgccgaacgcgaaaccgataaaaaaacaacgcgccccgacgactactactaacgctacaccgacgactccgcgacctacgaaaaacgacgactaacacctcgcgtctactcttccaacgcctactaccctacgacgtcatcaaattccgctacatctaaatctactaattcgcaacactaacgacaaaaaacgcctacatcgccgaaatcaacccccgcctacgactacccacgctaccgccgcccgacgaccaaatcttccgacccaaccaccccttcgaacgcttcgacgcgaaatatcgccaactattcctattcgaacaactaccgc

SEQ ID NO: 14311 - DNA, 706 bp, Artificial Sequence
  chemically treated genomic DNA (Homo sapiens) CpG-island No: 14311
tttttttattaggtggtttttcgtatggtttatttttttttcgttaatttggtagttttttttttgttgagtagcgtttgcgttaattatacgtttatttttttcgatttgtggcgttttagtaagagttagttgtcgtcgggggggttggcgtagcgcgtgggtcgtattatgtattatttcggttatttgttgttggttttcggttttattacgagcgcggttttttatgttagttatttgagtcgtttgtcggtcgttcgttgtttcgttttttttatgggtacggttgtgttggtgtatttggcgtttacgttggtttggttgttcgttttcgtcgtgttttacgagcgttatttggcgcgcggttgtgcgcgtcgggcgcggggtcggtgggagggtagcgcgtttcggcggttattgttggcgttgtatcggcggtttcgcggtttgcggagggcggcggttggtatttcgcgtttgtttttttagcgtttgttgttttgcggcgttattaagtttcgttatatttggatttgttggttcgtagtattggcggtagggggcgtttatatcgtcggagttagttttcgtttgcggttgtttacgttgtcgtcgttcggcggttaggtttttcggtttagttattttttcgagcgtttcgacgcggagtatcgttagttgtttttgttcgagtagttgtcgt

SEQ ID NO: 14312 - DNA, 706 bp, Artificial Sequence
  chemically treated genomic DNA (Homo sapiens) CpG-island No: 14312
acgacaactactcgaacaaaaacaactaacgatactccgcgtcgaaacgctcgaaaaaataactaaaccgaaaaacctaaccgccgaacgacgacaacgtaaacaaccgcaaacgaaaactaactccgacgatataaacgccccctaccgccaatactacgaaccaacaaatccaaatataacgaaacttaataacgccgcaaaacaacaaacgctaaaaaaacaaacgcgaaataccaaccgccgccctccgcaaaccgcgaaaccgccgatacaacgccaacaataaccgccgaaacgcgctaccctcccaccgaccccgcgcccgacgcgcacaaccgcgcgccaaataacgctcgtaaaacacgacgaaaacgaacaaccaaaccaacgtaaacgccaaatacaccaacacaaccgtacccataaaaaaaacgaaacaacgaacgaccgacaaacgactcaaataactaacataaaaaaccgcgctcgtaataaaaccgaaaaccaacaacaaataaccgaaataatacataatacgacccacgcgctacgccaacccccccgacgacaactaactcttactaaaacgccacaaatcgaaaaaaataaacgtataattaacgcaaacgctactcaacaaaaaaaaaactaccaaattaacgaaaaaaaaataaaccatacgaaaaaccacctaataaaaaaa

SEQ ID NO: 14313 - DNA, 511 bp, Artificial Sequence
  chemically treated genomic DNA (Homo sapiens) CpG-island No: 14313
aataagggggttcgggcggcggttcgcgtcgaacggtttttttttttattcgaaaatagacgttcgttttgggcgaaagagtattttcgttattaggggatcgaaagaaagaagaaaaggggcggtcggggcgggcgcgttttttcgttgcggggggagaagcgggcgtttttgggggtaggcgtacgtaacgagcgggtcggggttagcgggacgaatttagcgttcgtcgcgtttgttcgcgggggatcggtaggtgttcgtggtttcgtttcgggtttttatcgtagaggcgagaaggcggagggaggaattcggtatcggttatttagtttagcgttttcgtttagcgagggcgggcggaatgcgtcgcgtagtcggcggcggcgttcggttgtcgagcgtttatcgtgtcgggttcgcgcgcggcggggatatttcggcgtttcgcgtttttcgtcgtcgcgtcgttcgtcgcgttgggcgaagaggatagggggggcggttgagg

SEQ ID NO: 14314 - DNA, 511 bp, Artificial Sequence
  chemically treated genomic DNA (Homo sapiens) CpG-island No: 14314
cctcaaccgccccccctatcctcttcgcccaacgcgacgaacgacgcgacgacgaaaaacgcgaaacgccgaaatatccccgccgcgcgcgaacccgacacgataaacgctcgacaaccgaacgccgccgccgactacgcgacgcattccgcccgccctcgctaaacgaaaacgctaaactaaataaccgataccgaattcctccctccgccttctcgcctctacgataaaaacccgaaacgaaaccacgaacacctaccgatcccccgcgaacaaacgcgacgaacgctaaattcgtcccgctaaccccgacccgctcgttacgtacgcctacccccaaaaacgcccgcttctccccccgcaacgaaaaaacgcgcccgccccgaccgccccttttcttctttctttcgatcccctaataacgaaaatactctttcgcccaaaacgaacgtctattttcgaataaaaaaaaaaaccgttcgacgcgaaccgccgcccgaacccccttatt

SEQ ID NO: 14315 - DNA, 511 bp, Artificial Sequence
  chemically treated genomic DNA (Homo sapiens) CpG-island No: 14315
ttttagtcgttttttttatttttttcgtttagcgcgacgagcggcgcggcggcgggaggcgcggagcgtcggagtgttttcgtcgcgcgcgggttcggtacggtgagcgttcggtagtcggacgtcgtcgtcgattgcgcggcgtatttcgttcgttttcgttgagcggggacgttgagttgggtggtcggtatcggattttttttttcgttttttcgtttttacgatggggattcggggcgagattacgaatatttgtcggtttttcgcgaatagacgcggcggacgttggattcgtttcgttaatttcggttcgttcgttgcgtgcgtttgtttttaaaggcgttcgttttttttttcgtaacgggggagcgcgttcgtttcggtcgtttttttttttttttttttcggttttttaataacgggggtattttttcgtttaaaacgggcgtttattttcgggtgaaaaaggaaatcgttcggcgcggatcgtcgttcgggtttttttatt

SEQ ID NO: 14316 - DNA, 511 bp, Artificial Sequence
  chemically treated genomic DNA (Homo sapiens) CpG-island No: 14316
aataaaaaaacccgaacgacgatccgcgccgaacgatttcctttttcacccgaaaataaacgcccgttttaaacgaaaaaatacccccgttattaaaaaaccgaaaaaaaaaaaaaaaaaaacgaccgaaacgaacgcgctcccccgttacgaaaaaaaaaacgaacgcctttaaaaacaaacgcacgcaacgaacgaaccgaaattaacgaaacgaatccaacgtccgccgcgtctattcgcgaaaaaccgacaaatattcgtaatctcgccccgaatccccatcgtaaaaacgaaaaaacgaaaaaaaaaatccgataccgaccacccaactcaacgtccccgctcaacgaaaacgaacgaaatacgccgcgcaatcgacgacgacgtccgactaccgaacgctcaccgtaccgaacccgcgcgcgacgaaaacactccgacgctccgcgcctcccgccgccgcgccgctcgtcgcgctaaacgaaaaaaataaaaaaaacgactaaaa

SEQ ID NO: 14317 - DNA, 642 bp, Artificial Sequence
  chemically treated genomic DNA (Homo sapiens) CpG-island No: 14317
cgattcgaattgcgcgtattaggagtacggtatatacgtatatattagtattagtcgagatatagagaatcgtatacgtcgtaaatcgaagatataaggtagataaggttatggtaagcgtacgaaagtattaaacgtttagaacgtacgttagacgtcgaatataatcgaagtatattaatatattatcgattcgcgcggagcgagttggattagagacgaaagtagataaataatcgtaaagattatagaatagaagatattagtcgaaaacgtatcgcgcgatataggattcgtaatatatacgttgagttatatagttatacggagcgtatatattaattataagtattaataagattagaagttgcgaggtacgatattgagagtaaatattttataaaacgtcggacgatggcgatgaaggtatagatgataatagagacgacgacggaacgagcgtaacgagagtaggtttacgcgataggagatagaacgagacgagatagtaggttagtcgatacgatttagcgatagttaatcgtcgtagagcgcgtatttagcgagtacgcgaagataatattaattagataatacgaataaagagtttattaagatagagtaatacgttagcgaagataa

SEQ ID NO: 14318 - DNA, 642 bp, Artificial Sequence
  chemically treated genomic DNA (Homo sapiens) CpG-island No: 14318
ttatcttcgctaacgtattactctatcttaataaactctttattcgtattatctaattaatattatcttcgcgtactcgctaaatacgcgctctacgacgattaactatcgctaaatcgtatcgactaacctactatctcgtctcgttctatctcctatcgcgtaaacctactctcgttacgctcgttccgtcgtcgtctctattatcatctataccttcatcgccatcgtccgacgttttataaaatatttactctcaatatcgtacctcgcaacttctaatcttattaatacttataattaatatatacgctccgtataactatataactcaacgtatatattacgaatcctatatcgcgcgatacgttttcgactaatatcttctattctataatctttacgattatttatctactttcgtctctaatccaactcgctccgcgcgaatcgataatatattaatatacttcgattatattcgacgtctaacgtacgttctaaacgtttaatactttcgtacgcttaccataaccttatctaccttatatcttcgatttacgacgtatacgattctctatatctcgactaatactaatatatacgtatataccgtactcctaatacgcgcaattcgaatcg

SEQ ID NO: 14319 - DNA, 642 bp, Artificial Sequence
  chemically treated genomic DNA (Homo sapiens) CpG-island No: 14319
ttgttttcgttggcgtattattttgttttagtgggttttttattcgtgttgtttaattggtattgttttcgcgtattcgttggatgcgcgttttgcggcggttagttatcgttgggtcgtgtcggttggtttgttgtttcgtttcgttttgttttttgtcgcgtagatttgttttcgttgcgttcgtttcgtcgtcgtttttgttgttatttgtgtttttatcgttatcgttcggcgttttgtgaggtgtttgtttttagtatcgtgtttcgtagtttttagttttgttggtgtttgtggttggtgtgtgcgtttcgtgtggttgtatagtttagcgtgtgtgttgcgggttttgtgtcgcgcggtgcgttttcgattggtgttttttgttttgtgatttttgcgattgtttgtttattttcgtttttggtttagttcgtttcgcgcgggtcgatggtgtgttggtgtgtttcggttgtgttcggcgtttgacgtacgttttgggcgtttagtattttcgtgcgtttattatggttttgtttgttttgtgttttcgatttgcggcgtgtgcggttttttatgtttcggttggtgttggtgtgtgcgtatatgtcgtgtttttggtgcgcgtagttcgagtcg

SEQ ID NO: 14320 - DNA, 642 bp, Artificial Sequence
  chemically treated genomic DNA (Homo sapiens) CpG-island No: 14320
cgactcgaactacgcgcaccaaaaacacgacatatacgcacacaccaacaccaaccgaaacataaaaaaccgcacacgccgcaaatcgaaaacacaaaacaaacaaaaccataataaacgcacgaaaatactaaacgcccaaaacgtacgtcaaacgccgaacacaaccgaaacacaccaacacaccatcgacccgcgcgaaacgaactaaaccaaaaacgaaaataaacaaacaatcgcaaaaatcacaaaacaaaaaacaccaatcgaaaacgcaccgcgcgacacaaaacccgcaacacacacgctaaactatacaaccacacgaaacgcacacaccaaccacaaacaccaacaaaactaaaaactacgaaacacgatactaaaaacaaacacctcacaaaacgccgaacgataacgataaaaacacaaataacaacaaaaacgacgacgaaacgaacgcaacgaaaacaaatctacgcgacaaaaaacaaaacgaaacgaaacaacaaaccaaccgacacgacccaacgataactaaccgccgcaaaacgcgcatccaacgaatacgcgaaaacaataccaattaaacaacacgaataaaaaacccactaaaacaaaataatacgccaacgaaaacaa

SEQ ID NO: 14321 - DNA, 654 bp, Artificial Sequence
  chemically treated genomic DNA (Homo sapiens) CpG-island No: 14321
gggcgtcgtttagggtatcgttaaggaggacgtcgtttagggtatcgttaaagagggcgtcgtttacggtatcgttaacgaggacgtcgtttagggtatcgttaacgaggatttcgtttacggaatcgttagcgaggacgtcgtttacggtatcgttagcgaggacgtcgtttagggtatcgttaaggaggacgtcgtttagggtatcgttaacgaggacgtcgtttagggtatcgttaaggaggacgtcgtttagggtatcgttaaggaggacgtcgtttagggtatcgttaacgagggcgtcgtttagggtatcgttaaagaggacgtcgtttagggtatcgttaacgaggacgtcgtttagggtatcgttaacgaggacgtcgtttacggaatcgttagcgaggacgtcgtttacggtatcgttagcgaggacgtcgtttagggtatcgttaaggaggatgtcgtttagggtatcgttaacgaggacgtcgtttagggtatcgttaacgaggacgtcgtttagggtatcgttaaagaggacgtcgtttacggtatcgttaacgagttgtatacgatatcgttaacgaggatattttataagtcgtcgttaataagtatattgtatataatatcgttaatgagggtattgta

SEQ ID NO: 14322 - DNA, 654 bp, Artificial Sequence
  chemically treated genomic DNA (Homo sapiens) CpG-island No: 14322
tacaataccctcattaacgatattatatacaatatacttattaacgacgacttataaaatatcctcgttaacgatatcgtatacaactcgttaacgataccgtaaacgacgtcctctttaacgataccctaaacgacgtcctcgttaacgataccctaaacgacgtcctcgttaacgataccctaaacgacatcctccttaacgataccctaaacgacgtcctcgctaacgataccgtaaacgacgtcctcgctaacgattccgtaaacgacgtcctcgttaacgataccctaaacgacgtcctcgttaacgataccctaaacgacgtcctctttaacgataccctaaacgacgccctcgttaacgataccctaaacgacgtcctccttaacgataccctaaacgacgtcctccttaacgataccctaaacgacgtcctcgttaacgataccctaaacgacgtcctccttaacgataccctaaacgacgtcctcgctaacgataccgtaaacgacgtcctcgctaacgattccgtaaacgaaatcctcgttaacgataccctaaacgacgtcctcgttaacgataccgtaaacgacgccctctttaacgataccctaaacgacgtcctccttaacgataccctaaacgacgccc

SEQ ID NO: 14323 - DNA, 654 bp, Artificial Sequence
  chemically treated genomic DNA (Homo sapiens) CpG-island No: 14323
tatagtgtttttattagcgatgttgtgtatagtgtatttgttagcgacggtttgtagggtgttttcgttagcgatgtcgtatatagttcgttggcgatgtcgtgggcggcgttttttttggcgatgttttgggcggcgttttcgttggcgatgttttgggcggcgttttcgttggcgatgttttgggcggtattttttttggcgatgttttggacggcgttttcgttggcgatgtcgtgggcggcgttttcgttggcgatttcgtgggcggcgttttcgttggcgatgttttgggcggcgttttcgttggcgatgttttgggcggcgttttttttggcgatgttttgggcggcgttttcgttggcgatgttttgggcggcgttttttttggcgatgttttgggcggcgttttttttggcgatgttttgggcggcgttttcgttggcgatgttttgggcggcgttttttttggcgatgttttggacggcgttttcgttggcgatgtcgtgggcggcgttttcgttggcgatttcgtgggcggagttttcgttggcgatgttttgggcggcgttttcgttggcgatgtcgtgggcggcgttttttttggcgatgttttgggcggcgttttttttggcgatgttttgggcggcgttt

SEQ ID NO: 14324 - DNA, 654 bp, Artificial Sequence
  chemically treated genomic DNA (Homo sapiens) CpG-island No: 14324
aaacgccgcccaaaacatcgccaaaaaaaacgccgcccaaaacatcgccaaaaaaaacgccgcccacgacatcgccaacgaaaacgccgcccaaaacatcgccaacgaaaactccgcccacgaaatcgccaacgaaaacgccgcccacgacatcgccaacgaaaacgccgtccaaaacatcgccaaaaaaaacgccgcccaaaacatcgccaacgaaaacgccgcccaaaacatcgccaaaaaaaacgccgcccaaaacatcgccaaaaaaaacgccgcccaaaacatcgccaacgaaaacgccgcccaaaacatcgccaaaaaaaacgccgcccaaaacatcgccaacgaaaacgccgcccaaaacatcgccaacgaaaacgccgcccacgaaatcgccaacgaaaacgccgcccacgacatcgccaacgaaaacgccgtccaaaacatcgccaaaaaaaataccgcccaaaacatcgccaacgaaaacgccgcccaaaacatcgccaacgaaaacgccgcccaaaacatcgccaaaaaaaacgccgcccacgacatcgccaacgaactatatacgacatcgctaacgaaaacaccctacaaaccgtcgctaacaaatacactatacacaacatcgctaataaaaacactata

SEQ ID NO: 14325 - DNA, 652 bp, Artificial Sequence
  chemically treated genomic DNA (Homo sapiens) CpG-island No: 14325
ttggcgatgttttgggcggcgttttttttggcgatgttttgggcggcgttttttttggcgatgttttgggcggcgttttcgttggcgatgttttgggcggcgttttttttggcgatgttttggacggcgttttcgttggcgatgtcgtgggcggcgttttcgttggcgatttcgtgggcggagttttcgttggcgatgttttgggcggcgttttcgttggcgatgtcgtgggcggcgttttttttggcgatgttttgggcggcgttttttttggcgatgttttgggcggcgttttcgttggcgatgttttgggcggcgttttcgttggcgatgttttgggcggcgttttttttggcgatgttttgggcggcgttttcgttggcgatgttttgggcggcgttttcgttggcgatgttttgggcggcgttttcgttggcgatgtcgtgggcggcgttttcgttggcgatgtcgtgggcggcgttttcgttggcgatgtttttgtcggcggtttcgttagcgatgtcgtgtatagtattttcgttagcgatgtcgtgtgtggcgttttcgttagtgatgtcgtgtacggtgtttttatggggagttagaaaaatatagagttaaggttagtgttttggtggtggagattgtgaat

SEQ ID NO: 14326 - DNA, 652 bp, Artificial Sequence
  chemically treated genomic DNA (Homo sapiens) CpG-island No: 14326
attcacaatctccaccaccaaaacactaaccttaactctatatttttctaactccccataaaaacaccgtacacgacatcactaacgaaaacgccacacacgacatcgctaacgaaaatactatacacgacatcgctaacgaaaccgccgacaaaaacatcgccaacgaaaacgccgcccacgacatcgccaacgaaaacgccgcccacgacatcgccaacgaaaacgccgcccaaaacatcgccaacgaaaacgccgcccaaaacatcgccaacgaaaacgccgcccaaaacatcgccaaaaaaaacgccgcccaaaacatcgccaacgaaaacgccgcccaaaacatcgccaacgaaaacgccgcccaaaacatcgccaaaaaaaacgccgcccaaaacatcgccaaaaaaaacgccgcccacgacatcgccaacgaaaacgccgcccaaaacatcgccaacgaaaactccgcccacgaaatcgccaacgaaaacgccgcccacgacatcgccaacgaaaacgccgtccaaaacatcgccaaaaaaaacgccgcccaaaacatcgccaacgaaaacgccgcccaaaacatcgccaaaaaaaacgccgcccaaaacatcgccaaaaaaaacgccgcccaaaacatcgccaa

SEQ ID NO: 14327 - DNA, 652 bp, Artificial Sequence
  chemically treated genomic DNA (Homo sapiens) CpG-island No: 14327
atttatagtttttattattagggtattgattttaattttgtgtttttttagttttttatgaggatatcgtatacgatattattaacgaggacgttatatacgatatcgttaacgaggatattgtatacgatatcgttaacgaggtcgtcgataagggtatcgttaacgaggacgtcgtttacggtatcgttagcgaggacgtcgtttacggtatcgttagcgaggacgtcgtttagggtatcgttagcgaggacgtcgtttagggtatcgttagcgaggacgtcgtttagggtatcgttaaggaggacgtcgtttagggtatcgttaacgaggacgtcgtttagggtatcgttaacgagggcgtcgtttagggtatcgttaaggaggacgtcgtttagggtatcgttaaagagggcgtcgtttacggtatcgttaacgaggacgtcgtttagggtatcgttaacgaggatttcgtttacggaatcgttagcgaggacgtcgtttacggtatcgttagcgaggacgtcgtttagggtatcgttaaggaggacgtcgtttagggtatcgttaacgaggacgtcgtttagggtatcgttaaggaggacgtcgtttagggtatcgttaaggaggacgtcgtttagggtatcgttaa

SEQ ID NO: 14328 - DNA, 652 bp, Artificial Sequence
  chemically treated genomic DNA (Homo sapiens) CpG-island No: 14328
ttaacgataccctaaacgacgtcctccttaacgataccctaaacgacgtcctccttaacgataccctaaacgacgtcctcgttaacgataccctaaacgacgtcctccttaacgataccctaaacgacgtcctcgctaacgataccgtaaacgacgtcctcgctaacgattccgtaaacgaaatcctcgttaacgataccctaaacgacgtcctcgttaacgataccgtaaacgacgccctctttaacgataccctaaacgacgtcctccttaacgataccctaaacgacgccctcgttaacgataccctaaacgacgtcctcgttaacgataccctaaacgacgtcctccttaacgataccctaaacgacgtcctcgctaacgataccctaaacgacgtcctcgctaacgataccctaaacgacgtcctcgctaacgataccgtaaacgacgtcctcgctaacgataccgtaaacgacgtcctcgttaacgatacccttatcgacgacctcgttaacgatatcgtatacaatatcctcgttaacgatatcgtatataacgtcctcgttaataatatcgtatacgatatcctcataaaaaactaaaaaaacacaaaattaaaatcaataccctaataataaaaactataaat

SEQ ID NO: 14329 - DNA, 502 bp, Artificial Sequence
  chemically treated genomic DNA (Homo sapiens) CpG-island No: 14329
ggaagataataagtcggtcgtcgttagcgtatttattgtttttagtgggatcgtatcgttttttttttaagtagaggtttcggcgtcgtcgacgtaagttcgaggtttttgggaggagtcgggagcgttcgaacgtatagttttgttttttaggcggttatcgtcggtttttcgtttgatttggacgggcgagtgggttaatgggtacgggacggtgggcggagaggttaatggtacggcgggagggggtagtgttttcgggtgtattttggcgacggtattgggaattttcgtgcggttagtggcgttttcgttcgggtagcgggttgagtgagttgtcgtacgtcgtcgttagtcgtatagttagtcgtcgtacgttgtcgggggaggggcgttagtcgttcgtattgcgtttagagatttacgtagtatttagtttcgttagttcgttaatatagtagtgtcggtttttttttttgtttggtattgtttttttttttcg

SEQ ID NO: 14330 - DNA, 502 bp, Artificial Sequence
  chemically treated genomic DNA (Homo sapiens) CpG-island No: 14330
cgaaaaaaaaaaacaataccaaacaaaaaaaaaaaccgacactactatattaacgaactaacgaaactaaatactacgtaaatctctaaacgcaatacgaacgactaacgcccctcccccgacaacgtacgacgactaactatacgactaacgacgacgtacgacaactcactcaacccgctacccgaacgaaaacgccactaaccgcacgaaaattcccaataccgtcgccaaaatacacccgaaaacactaccccctcccgccgtaccattaacctctccgcccaccgtcccgtacccattaacccactcgcccgtccaaatcaaacgaaaaaccgacgataaccgcctaaaaaacaaaactatacgttcgaacgctcccgactcctcccaaaaacctcgaacttacgtcgacgacgccgaaacctctacttaaaaaaaaaacgatacgatcccactaaaaacaataaatacgctaacgacgaccgacttattatcttcc

SEQ ID NO: 14331 - DNA, 502 bp, Artificial Sequence
  chemically treated genomic DNA (Homo sapiens) CpG-island No: 14331
cggggagggggggtagtgttaggtaaagaggggggtcggtattattgtgttggcggattggcgggattgggtgttgcgtgagtttttgagcgtagtgcgggcggttggcgtttttttttcggtagcgtgcggcggttggttgtgcggttggcggcggcgtgcggtagtttatttagttcgttgttcgagcggaaacgttattgatcgtacggggatttttagtgtcgtcgttagggtgtattcgggagtattgttttttttcgtcgtgttattggttttttcgtttatcgtttcgtatttattggtttattcgttcgtttaaattaggcggagagtcgacggtggtcgtttagagaatagggttgtgcgttcgggcgttttcggttttttttagaagtttcgggtttacgtcggcgacgtcggaatttttgtttgggaaggggacggtgcggttttattgggggtaatgggtgcgttagcggcggtcggtttgttgtttttt

SEQ ID NO: 14332 - DNA, 502 bp, Artificial Sequence
  chemically treated genomic DNA (Homo sapiens) CpG-island No: 14332
aaaaaacaacaaaccgaccgccgctaacgcacccattacccccaataaaaccgcaccgtccccttcccaaacaaaaattccgacgtcgccgacgtaaacccgaaacttctaaaaaaaaccgaaaacgcccgaacgcacaaccctattctctaaacgaccaccgtcgactctccgcctaatttaaacgaacgaataaaccaataaatacgaaacgataaacgaaaaaaccaataacacgacgaaaaaaaacaatactcccgaatacaccctaacgacgacactaaaaatccccgtacgatcaataacgtttccgctcgaacaacgaactaaataaactaccgcacgccgccgccaaccgcacaaccaaccgccgcacgctaccgaaaaaaaaacgccaaccgcccgcactacgctcaaaaactcacgcaacacccaatcccgccaatccgccaacacaataataccgacccccctctttacctaacactaccccccctccccg

SEQ ID NO: 14333 - DNA, 635 bp, Artificial Sequence
  chemically treated genomic DNA (Homo sapiens) CpG-island No: 14333
tcggggcggcgcgggggtcggcggttgtcgcgatttttttttggtagcgggaggttgagcgggcggcgcgacgcgggggtcgacgggggcgtcgggtggtcgcgtcggaagtgttttgcgcggtagaggaagcgtagggatagagcggagtaggtcgagtcggcggaaagggtttttgttgttgcgttcgggtaggggttgtcgcggttttaggtttcgtttcgagacgcggcgcggtttaggcgggaggcgattttttaggaagggattcggggcgggaggaggaagtgaggtcgcgcggaaggaaggcggcgagtttcggggtttcgaggttttggtcgcgttatagtatttatatggtttttggagtgggcgcggttttcgaggaattgttttacgacggtacgtgtgacgagtgcgagttcgacgaggtttcgggggtcgaggaagtgtgtcgagaatgcggtttttgttattgtcgtcgttatgtcgaggcgtataggtagaagttttttagttattatttggtcgaatacgtttacggtttttaggtttggatttcgttagttgacggagagggggcggggaaggaagaagcggaggttaaggtggagtaggagagggagatagaaagt

SEQ ID NO: 14334 - DNA, 635 bp, Artificial Sequence
  chemically treated genomic DNA (Homo sapiens) CpG-island No: 14334
actttctatctccctctcctactccaccttaacctccgcttcttccttccccgccccctctccgtcaactaacgaaatccaaacctaaaaaccgtaaacgtattcgaccaaataataactaaaaaacttctacctatacgcctcgacataacgacgacaataacaaaaaccgcattctcgacacacttcctcgacccccgaaacctcgtcgaactcgcactcgtcacacgtaccgtcgtaaaacaattcctcgaaaaccgcgcccactccaaaaaccatataaatactataacgcgaccaaaacctcgaaaccccgaaactcgccgccttccttccgcgcgacctcacttcctcctcccgccccgaatcccttcctaaaaaatcgcctcccgcctaaaccgcgccgcgtctcgaaacgaaacctaaaaccgcgacaacccctacccgaacgcaacaacaaaaaccctttccgccgactcgacctactccgctctatccctacgcttcctctaccgcgcaaaacacttccgacgcgaccacccgacgcccccgtcgacccccgcgtcgcgccgcccgctcaacctcccgctaccaaaaaaaaatcgcgacaaccgccgacccccgcgccgccccga

SEQ ID NO: 14335 - DNA, 635 bp, Artificial Sequence
  chemically treated genomic DNA (Homo sapiens) CpG-island No: 14335
gttttttattttttttttttgttttattttgattttcgtttttttttttttcgtttttttttcgttagttggcggggtttaggtttgggagtcgtggacgtattcggttagatggtgattgaggaatttttgtttgtgcgtttcggtatggcggcggtagtagtagaagtcgtattttcggtatattttttcggttttcggagtttcgtcgggttcgtattcgttatacgtgtcgtcgtgaggtagtttttcgaaggtcgcgtttattttagaggttatgtgggtgttgtgacgcggttaaggtttcggggtttcggggttcgtcgtttttttttcgcgcggttttatttttttttttcgtttcgggtttttttttagggagtcgtttttcgtttggatcgcgtcgcgtttcgaagcgggatttggggtcgcggtagtttttgttcgggcgtagtagtaaagatttttttcgtcggttcggtttgtttcgttttgtttttgcgttttttttgtcgcgtaaggtattttcggcgcggttattcggcgttttcgtcggttttcgcgtcgcgtcgttcgtttagtttttcgttattagggagagatcgcggtagtcgtcggttttcgcgtcgtttcgg

SEQ ID NO: 14336 - DNA, 635 bp, Artificial Sequence
  chemically treated genomic DNA (Homo sapiens) CpG-island No: 14336
ccgaaacgacgcgaaaaccgacgactaccgcgatctctccctaataacgaaaaactaaacgaacgacgcgacgcgaaaaccgacgaaaacgccgaataaccgcgccgaaaataccttacgcgacaaaaaaaacgcaaaaacaaaacgaaacaaaccgaaccgacgaaaaaaatctttactactacgcccgaacaaaaactaccgcgaccccaaatcccgcttcgaaacgcgacgcgatccaaacgaaaaacgactccctaaaaaaaaacccgaaacgaaaaaaaaaaataaaaccgcgcgaaaaaaaaacgacgaaccccgaaaccccgaaaccttaaccgcgtcacaacacccacataacctctaaaataaacgcgaccttcgaaaaactacctcacgacgacacgtataacgaatacgaacccgacgaaactccgaaaaccgaaaaaatataccgaaaatacgacttctactactaccgccgccataccgaaacgcacaaacaaaaattcctcaatcaccatctaaccgaatacgtccacgactcccaaacctaaaccccgccaactaacgaaaaaaaaacgaaaaaaaaaaaaacgaaaatcaaaataaaacaaaaaaaaaaaataaaaaac

SEQ ID NO: 14337 - DNA, 1889 bp, Artificial Sequence
  chemically treated genomic DNA (Homo sapiens) CpG-island No: 14337
gtttggcgaggaagtcgaggcggcgttgtagtagttgagcgtgggggtttgtaagggcggttagttcggggaagcgaggttcgtggcgtcggtagaggcgtagtagtcgggtcgcggcgttttgttcgcggtgtagttttaggacgcgtcgcgcggttcgttcgcggaatacgtatattgattgtaatagcggttcgttatatttgttttatatgtttgttattcggtagtcgtgtattaagttcgttttattgtttagaaagattagcgtttcgttcggatcgcggtgtaggttgttggtggtacgttgtatgacgcgcgggttttattgtaggttgaagaggttgtttacgagtcggtcgaagttggtcgttaggtagtcgaaaaggattaagtcggtttattgtattaggtttattagtttcgtttggttgaggttggttagtttattttcggtatttcggagggggcgtagacggtcgtttttcgagcgttagggcgcgggtattattacgttcgtgaggttgggtagttagcgtgttaggtttattacgttgttttcggtttagtgcgtagcgcgtagttttttttgtatttgcgtttattgcgcgtttcgagtttttattcgagttagtgttagcggcggtacgtggcgttggaggtttagtaggcgcgttagatagtaagatagggtttcgttttgaatttgtttcgggttgatgtcgtagcgtacgtaggcgcgggtgtcgtcggtaaaacgggttagtcggttggagttgcgttcgtaattttcgcgttttagggttattattcgggcgtcgcgagtcgtttttagttacgtcgtcgtttgggttttcgaaaagttcgggggtatttgtttttttaggtcgcggttttagaagacgttttcgtgtatcgcggcgttttttttcggtcggggttgtttggttgatacgtgttatttgggttcgtttcgggattgtcggggcgggtcgttcgcgtcggtcgttagggtgagtagcgttcggaaagtttttagggagtcgtcgcgggcgttttacgttaggggcgggggtagagggaagcgaggcgcgggcgcggggtcgtcgtttcgggtcgggcgtcgtgggagtcggttttcgggcggtcgggaggcgggtagttcggttcgcggcggtaggagttttttttatagcgttagtagcgagtttagcgttagtagttagagtttcgcggtggcggcggcgtttcgtatttttttgtttatgttttcgcggttgtgtcggtgcgtcgtcgtcgttttaagtcgagtttaggtattcgggtttcggcggcgaggcgggttcggtagtttgtgggtttcggggtttcgggcgtttcggttttatcgcggtcgcggggcgttgcggggttttgttcggcgtttcgttcggcgttgggaattcgagttttcgtcgttttttagttgtttttgtatttcgttgtgagatttttcggtgggcgcgatttataggcgttcggattacgtgggagttagggggatttttttttttttttttcgttttcgtttttcgtttttcgttttttcgttttttttttttttttttttatttaaagcggcgatggtttttttcgagagggagaggcggttttatattcggttcgggatttgggggtttggaggaagtcggattggttgcgttcgcgtcggggcgtaggagggggtggcgtagagtcggagtttggggtttggcgggagggacgcgttttgggttttcgcgggggtgttttggtcgtcgggtttttttgtttaggtagcgcgggttttttgtaaattttagatagatttttattttttttcgagtttcgttaggttaggattaggtagg

SEQ ID NO: 14338 - DNA, 1889 bp, Artificial Sequence
  chemically treated genomic DNA (Homo sapiens) CpG-island No: 14338
cctacctaatcctaacctaacgaaactcgaaaaaaaataaaaatctatctaaaatttacaaaaaacccgcgctacctaaacaaaaaaacccgacgaccaaaacacccccgcgaaaacccaaaacgcgtccctcccgccaaaccccaaactccgactctacgccaccccctcctacgccccgacgcgaacgcaaccaatccgacttcctccaaacccccaaatcccgaaccgaatataaaaccgcctctccctctcgaaaaaaaccatcgccgctttaaataaaaaaaaaaaaaaaaaaaacgaaaaaacgaaaaacgaaaaacgaaaacgaaaaaaaaaaaaaaaaatccccctaactcccacgtaatccgaacgcctataaatcgcgcccaccgaaaaatctcacaacgaaatacaaaaacaactaaaaaacgacgaaaactcgaattcccaacgccgaacgaaacgccgaacaaaaccccgcaacgccccgcgaccgcgataaaaccgaaacgcccgaaaccccgaaacccacaaactaccgaacccgcctcgccgccgaaacccgaatacctaaactcgacttaaaacgacgacgacgcaccgacacaaccgcgaaaacataaacaaaaaaatacgaaacgccgccgccaccgcgaaactctaactactaacgctaaactcgctactaacgctataaaaaaaactcctaccgccgcgaaccgaactacccgcctcccgaccgcccgaaaaccgactcccacgacgcccgacccgaaacgacgaccccgcgcccgcgcctcgcttccctctacccccgcccctaacgtaaaacgcccgcgacgactccctaaaaactttccgaacgctactcaccctaacgaccgacgcgaacgacccgccccgacaatcccgaaacgaacccaaataacacgtatcaaccaaacaaccccgaccgaaaaaaaacgccgcgatacacgaaaacgtcttctaaaaccgcgacctaaaaaaacaaatacccccgaacttttcgaaaacccaaacgacgacgtaactaaaaacgactcgcgacgcccgaataataaccctaaaacgcgaaaattacgaacgcaactccaaccgactaacccgttttaccgacgacacccgcgcctacgtacgctacgacatcaacccgaaacaaattcaaaacgaaaccctatcttactatctaacgcgcctactaaacctccaacgccacgtaccgccgctaacactaactcgaataaaaactcgaaacgcgcaataaacgcaaatacaaaaaaaactacgcgctacgcactaaaccgaaaacaacgtaataaacctaacacgctaactacccaacctcacgaacgtaataatacccgcgccctaacgctcgaaaaacgaccgtctacgccccctccgaaataccgaaaataaactaaccaacctcaaccaaacgaaactaataaacctaatacaataaaccgacttaatccttttcgactacctaacgaccaacttcgaccgactcgtaaacaacctcttcaacctacaataaaacccgcgcgtcatacaacgtaccaccaacaacctacaccgcgatccgaacgaaacgctaatctttctaaacaataaaacgaacttaatacacgactaccgaataacaaacatataaaacaaatataacgaaccgctattacaatcaatatacgtattccgcgaacgaaccgcgcgacgcgtcctaaaactacaccgcgaacaaaacgccgcgacccgactactacgcctctaccgacgccacgaacctcgcttccccgaactaaccgcccttacaaacccccacgctcaactactacaacgccgcctcgacttcctcgccaaac

SEQ ID NO: 14339 - DNA, 1889 bp, Artificial Sequence
  chemically treated genomic DNA (Homo sapiens) CpG-island No: 14339
tttgtttgattttagtttggcggagttcggaaagaggtggaaatttgtttgaagtttgtaggagattcgcgttgtttaggtaaagggattcggcgattaagatattttcgcgagggtttagggcgcgtttttttcgttaggttttagatttcggttttgcgttatttttttttacgtttcggcgcgggcgtagttagttcggttttttttaggtttttaagtttcggatcgagtgtggggtcgtttttttttttcggaaggagttatcgtcgttttaagtggaagaggagaggaagggggcgggggagcggggggcggggagcggaggcggaggagggggagggggatttttttggtttttacgtggttcgggcgtttgtgaatcgcgtttatcggagggttttatagcgaaatataaaagtagttgggaagcggcggggattcgagtttttagcgtcgggcggagcgtcggatagagtttcgtagcgtttcgcggtcgcgatggggtcgaagcgttcgaagtttcggagtttataaattgtcgggttcgtttcgtcgtcgggattcgggtgtttgggttcggtttgaagcggcggcggcgtatcggtatagtcgcgggagtatgggtaggaggatgcggggcgtcgtcgttatcgcggggttttggttgttggcgttgggttcgttgttggcgttgtggggagggtttttgtcgtcgcggatcgagttgttcgtttttcggtcgttcgaagatcgatttttacggcgttcggttcggagcggcggtttcgcgttcgcgtttcgtttttttttgttttcgtttttggcgtgggacgttcgcggcggttttttgaaaatttttcgggcgttgtttattttggcggtcggcgcggacggttcgtttcggtagtttcggagcgagtttaggtggtacgtgttagttaggtagtttcggtcggaggagagcgtcgcggtgtacgggggcgttttttggagtcgcggtttggaggagtaggtgttttcgggtttttcggaggtttaggcggcggcgtggttggaggcggttcgcggcgttcggatggtggttttggagcgcgggggttgcgggcgtagttttaatcgattggttcgttttgtcgacggtattcgcgtttgcgtgcgttacggtattaattcggagtagatttagggcgaggttttgttttattatttggcgcgtttgttgggtttttagcgttacgtgtcgtcgttggtattggttcgggtggaggttcggggcgcgtagtgggcgtaggtgtaggaggagttgcgcgttgcgtattggatcgagggtagcgtggtgagtttgatacgttggttgtttaattttacggacgtggtggtgttcgcgttttggcgttcggaggacggtcgtttgcgtttttttcgggatgtcgggggtgagttggttaattttagttaggcggagttggtggatttagtataatggatcgatttaatttttttcgattatttgacggttaatttcgatcggttcgtaagtaatttttttagtttgtagtgggattcgcgcgttatgtagcgtgttattagtaatttgtatcgcggttcgggcggggcgttggtttttttggataatgaggcgggtttggtgtacggttatcgggtagtaggtatgtgggataagtataacgagtcgttgttgtagttagtgtgcgtgtttcgcgagcggatcgcgcggcgcgttttggagttgtatcgcggataggacgtcgcggttcggttgttgcgtttttatcggcgttacgagtttcgttttttcgagttggtcgtttttgtagatttttacgtttagttgttatagcgtcgtttcgattttttcgttaagt

SEQ ID NO: 14340 - DNA, 1889 bp, Artificial Sequence
  chemically treated genomic DNA (Homo sapiens) CpG-island No: 14340
acttaacgaaaaaatcgaaacgacgctataacaactaaacgtaaaaatctacaaaaacgaccaactcgaaaaaacgaaactcgtaacgccgataaaaacgcaacaaccgaaccgcgacgtcctatccgcgatacaactccaaaacgcgccgcgcgatccgctcgcgaaacacgcacactaactacaacaacgactcgttatacttatcccacatacctactacccgataaccgtacaccaaacccgcctcattatccaaaaaaaccaacgccccgcccgaaccgcgatacaaattactaataacacgctacataacgcgcgaatcccactacaaactaaaaaaattacttacgaaccgatcgaaattaaccgtcaaataatcgaaaaaaattaaatcgatccattatactaaatccaccaactccgcctaactaaaattaaccaactcacccccgacatcccgaaaaaaacgcaaacgaccgtcctccgaacgccaaaacgcgaacaccaccacgtccgtaaaattaaacaaccaacgtatcaaactcaccacgctaccctcgatccaatacgcaacgcgcaactcctcctacacctacgcccactacgcgccccgaacctccacccgaaccaataccaacgacgacacgtaacgctaaaaacccaacaaacgcgccaaataataaaacaaaacctcgccctaaatctactccgaattaataccgtaacgcacgcaaacgcgaataccgtcgacaaaacgaaccaatcgattaaaactacgcccgcaacccccgcgctccaaaaccaccatccgaacgccgcgaaccgcctccaaccacgccgccgcctaaacctccgaaaaacccgaaaacacctactcctccaaaccgcgactccaaaaaacgcccccgtacaccgcgacgctctcctccgaccgaaactacctaactaacacgtaccacctaaactcgctccgaaactaccgaaacgaaccgtccgcgccgaccgccaaaataaacaacgcccgaaaaattttcaaaaaaccgccgcgaacgtcccacgccaaaaacgaaaacaaaaaaaaacgaaacgcgaacgcgaaaccgccgctccgaaccgaacgccgtaaaaatcgatcttcgaacgaccgaaaaacgaacaactcgatccgcgacgacaaaaaccctccccacaacgccaacaacgaacccaacgccaacaaccaaaaccccgcgataacgacgacgccccgcatcctcctacccatactcccgcgactataccgatacgccgccgccgcttcaaaccgaacccaaacacccgaatcccgacgacgaaacgaacccgacaatttataaactccgaaacttcgaacgcttcgaccccatcgcgaccgcgaaacgctacgaaactctatccgacgctccgcccgacgctaaaaactcgaatccccgccgcttcccaactacttttatatttcgctataaaaccctccgataaacgcgattcacaaacgcccgaaccacgtaaaaaccaaaaaaatccccctccccctcctccgcctccgctccccgccccccgctcccccgcccccttcctctcctcttccacttaaaacgacgataactccttccgaaaaaaaaaaacgaccccacactcgatccgaaacttaaaaacctaaaaaaaaccgaactaactacgcccgcgccgaaacgtaaaaaaaaataacgcaaaaccgaaatctaaaacctaacgaaaaaaacgcgccctaaaccctcgcgaaaatatcttaatcgccgaatccctttacctaaacaacgcgaatctcctacaaacttcaaacaaatttccacctctttccgaactccgccaaactaaaatcaaacaaa

SEQ ID NO: 14341 - DNA, 897 bp, Artificial Sequence
  chemically treated genomic DNA (Homo sapiens) CpG-island No: 14341
cggcggtcgcggaatttaggaaataattttattcgttcgaggcgttttgtgggggcggtttcgattttttcgtcgttttttttcgcggagtattagattcggggtcgacggtcgcggggcggatagtttttttttcggggtcgggatgcgttgagtatttcggtttaatttgttttttcggggtggtgatttcgacgcgaaggatcgggcgagttgttgtttttcgggggatattagttttcggcgttcgtttaaggagggaggaaggaagggtttttatcgtgtttgcgtaggagtgagttttatttgttgtatttgcgggcgggcggggtcggcggttttaaggttagtcgaggtcggagtgcgcggttcgcggcgaggtcggtttcgtcgtcgtcgtcgatttttagttcgggttagttacggtcggcgtcggttcgcgggtagtttagtagcgcggtttggttgaagaagatatttttggtcgcgtaggtttcgcgttttttatattcgttcggttcgtttttagatattttttttagttcgttttcgttggcgtcgggcgggacgtttaggatgtcgtatagtttcgtgttagttacgttagttatggcggtcggtcgggtagtgttcggggagaaggtggcgaagtagatagagcggagtcgggtttataagcggcgtcggcggcggtataggtcgagggagatagcgagggggaagcgggggcggggttgaattttgatttagcgtacggtgcgtcgtgacgtcgttgtgtagagttcgttttcgagcgttcgaggcgcggttattggggtcgaagtattgaagagtgggttaggttttttgtttttttttaggtttaggcggttgggtagggttaacgtaggaaatgaa

SEQ ID NO: 14342 - DNA, 897 bp, Artificial Sequence
  chemically treated genomic DNA (Homo sapiens) CpG-island No: 14342
ttcatttcctacgttaaccctacccaaccgcctaaacctaaaaaaaaacaaaaaacctaacccactcttcaatacttcgaccccaataaccgcgcctcgaacgctcgaaaacgaactctacacaacgacgtcacgacgcaccgtacgctaaatcaaaattcaaccccgcccccgcttccccctcgctatctccctcgacctataccgccgccgacgccgcttataaacccgactccgctctatctacttcgccaccttctccccgaacactacccgaccgaccgccataactaacgtaactaacacgaaactatacgacatcctaaacgtcccgcccgacgccaacgaaaacgaactaaaaaaaatatctaaaaacgaaccgaacgaatataaaaaacgcgaaacctacgcgaccaaaaatatcttcttcaaccaaaccgcgctactaaactacccgcgaaccgacgccgaccgtaactaacccgaactaaaaatcgacgacgacgacgaaaccgacctcgccgcgaaccgcgcactccgacctcgactaaccttaaaaccgccgaccccgcccgcccgcaaatacaacaaataaaactcactcctacgcaaacacgataaaaacccttccttcctccctccttaaacgaacgccgaaaactaatatcccccgaaaaacaacaactcgcccgatccttcgcgtcgaaatcaccaccccgaaaaaacaaattaaaccgaaatactcaacgcatcccgaccccgaaaaaaaaactatccgccccgcgaccgtcgaccccgaatctaatactccgcgaaaaaaaacgacgaaaaaatcgaaaccgcccccacaaaacgcctcgaacgaataaaattatttcctaaattccgcgaccgccg

SEQ ID NO: 14343 - DNA, 897 bp, Artificial Sequence
  chemically treated genomic DNA (Homo sapiens) CpG-island No: 14343
tttattttttacgttggttttgtttagtcgtttggatttggaggaaaatagagaatttggtttattttttaatatttcgattttagtggtcgcgtttcgggcgttcgggggcgggttttgtatagcgacgttacggcgtatcgtgcgttgggttaaagtttagtttcgttttcgtttttttttcgttgtttttttcggtttgtgtcgtcgtcgacgtcgtttgtgggttcgatttcgttttgtttgtttcgttatttttttttcgagtattgttcggtcggtcgttatggttaacgtggttgatacgaagttgtacgatattttgggcgtttcgttcggcgttagcgagaacgagttgaagaaggtatttgggagcgggtcgggcgggtgtgaggggcgcggggtttgcgcggttagggatgttttttttagttaggtcgcgttattgggttgttcgcgagtcggcgtcggtcgtgattggttcgggttgggagtcggcggcggcggcgggatcggtttcgtcgcgagtcgcgtatttcggtttcggttgattttggggtcgtcggtttcgttcgttcgtagatgtagtaaataaaatttatttttgcgtaaatacgatgggagttttttttttttttttttttgaacgagcgtcgggggttggtatttttcgggaggtagtagttcgttcggtttttcgcgtcgaggttattatttcggaaaaataggttggatcgaggtgtttagcgtatttcggtttcgagagagaagttgttcgtttcgcggtcgtcggtttcgggtttggtgtttcgcggggaggaacggcggggaggtcgaggtcgtttttatagagcgtttcgggcggatggggttgttttttgggtttcgcggtcgtcg

SEQ ID NO: 14344 - DNA, 897 bp, Artificial Sequence
  chemically treated genomic DNA (Homo sapiens) CpG-island No: 14344
cgacgaccgcgaaacccaaaaaacaaccccatccgcccgaaacgctctataaaaacgacctcgacctccccgccgttcctccccgcgaaacaccaaacccgaaaccgacgaccgcgaaacgaacaacttctctctcgaaaccgaaatacgctaaacacctcgatccaacctatttttccgaaataataacctcgacgcgaaaaaccgaacgaactactacctcccgaaaaataccaacccccgacgctcgttcaaaaaaaaaaaaaaaaaaaactcccatcgtatttacgcaaaaataaattttatttactacatctacgaacgaacgaaaccgacgaccccaaaatcaaccgaaaccgaaatacgcgactcgcgacgaaaccgatcccgccgccgccgccgactcccaacccgaaccaatcacgaccgacgccgactcgcgaacaacccaataacgcgacctaactaaaaaaaacatccctaaccgcgcaaaccccgcgcccctcacacccgcccgacccgctcccaaataccttcttcaactcgttctcgctaacgccgaacgaaacgcccaaaatatcgtacaacttcgtatcaaccacgttaaccataacgaccgaccgaacaatactcgaaaaaaaaataacgaaacaaacaaaacgaaatcgaacccacaaacgacgtcgacgacgacacaaaccgaaaaaaacaacgaaaaaaaaacgaaaacgaaactaaactttaacccaacgcacgatacgccgtaacgtcgctatacaaaacccgcccccgaacgcccgaaacgcgaccactaaaatcgaaatattaaaaaataaaccaaattctctattttcctccaaatccaaacgactaaacaaaaccaacgtaaaaaataaa

SEQ ID NO: 14345 - DNA, 640 bp, Artificial Sequence
  chemically treated genomic DNA (Homo sapiens) CpG-island No: 14345
cgttttttttggcgttcgggggtatcggatcgcggttcgtcgggatggaggtaggtaggtagcgtttcgggagggttttagggagcggttcggagttgttcggcggggcgtttagggcgtagcgggtagcgtttatcgagggcgcgtaggtatttttcgaaattttcgttgattaatattttttagtatttagtgaagtcgattggtatttcggggagtgattggagttagttggttataagcgggcgggacggttggagattgtcgggatagcggttgtcggtgttacgcgggtggtgggcggttcggaaatgagcgtttttcggggatagggggttttgcggggcggcgatagttggatttttagcgcgtataaagtttgcgggaggatttattgtagcggtcgttttttttcgtttagcgagggcgggcgtaggggcgggggatgtcgaagggttaggtttgtttaggtcgcgttattttcgttttagacgtttagttcgttttttttataaaggaagaggagatcggagacgggacgtttgttttgttggtcgaatttttcggttgttggggattttttttaaacgttattaattttttatatttagtagttattcgggagttgggaaataatttt

SEQ ID NO: 14346 - DNA, 640 bp, Artificial Sequence
  chemically treated genomic DNA (Homo sapiens) CpG-island No: 14346
aaaattatttcccaactcccgaataactactaaatataaaaaattaataacgtttaaaaaaaatccccaacaaccgaaaaattcgaccaacaaaacaaacgtcccgtctccgatctcctcttcctttataaaaaaaacgaactaaacgtctaaaacgaaaataacgcgacctaaacaaacctaacccttcgacatcccccgcccctacgcccgccctcgctaaacgaaaaaaaacgaccgctacaataaatcctcccgcaaactttatacgcgctaaaaatccaactatcgccgccccgcaaaaccccctatccccgaaaaacgctcatttccgaaccgcccaccacccgcgtaacaccgacaaccgctatcccgacaatctccaaccgtcccgcccgcttataaccaactaactccaatcactccccgaaataccaatcgacttcactaaatactaaaaaatattaatcaacgaaaatttcgaaaaatacctacgcgccctcgataaacgctacccgctacgccctaaacgccccgccgaacaactccgaaccgctccctaaaaccctcccgaaacgctacctacctacctccatcccgacgaaccgcgatccgatacccccgaacgccaaaaaaaacg

SEQ ID NO: 14347 - DNA, 640 bp, Artificial Sequence
  chemically treated genomic DNA (Homo sapiens) CpG-island No: 14347
gagattgttttttaattttcgagtggttgttgagtgtgagaagttaatggcgtttgaaggaaatttttagtagtcgaagagttcggttaataaagtaaacgtttcgttttcggttttttttttttttgtaggggaaacgaattgaacgtttgaaacgaaggtggcgcggtttggataaatttgatttttcgatatttttcgtttttgcgttcgttttcgttaagcggggaggagcgatcgttataatggattttttcgtaggttttgtgcgcgttgggaatttagttgtcgtcgtttcgtagagttttttgttttcggagggcgtttattttcgggtcgtttattattcgcgtagtatcggtagtcgttgtttcggtagtttttagtcgtttcgttcgtttgtggttaattggttttagttatttttcgaaatgttagtcgattttattgggtattggaagatgttggttaacgagaatttcgaggagtatttgcgcgttttcggtaagcgttgttcgttgcgttttgggcgtttcgtcgagtagtttcgggtcgttttttagagttttttcgagacgttgtttgtttgtttttatttcggcgagtcgcggttcggtgttttcggacgttagaaagggcg

SEQ ID NO: 14348 - DNA, 640 bp, Artificial Sequence
  chemically treated genomic DNA (Homo sapiens) CpG-island No: 14348
cgccctttctaacgtccgaaaacaccgaaccgcgactcgccgaaataaaaacaaacaaacaacgtctcgaaaaaactctaaaaaacgacccgaaactactcgacgaaacgcccaaaacgcaacgaacaacgcttaccgaaaacgcgcaaatactcctcgaaattctcgttaaccaacatcttccaatacccaataaaatcgactaacatttcgaaaaataactaaaaccaattaaccacaaacgaacgaaacgactaaaaactaccgaaacaacgactaccgatactacgcgaataataaacgacccgaaaataaacgccctccgaaaacaaaaaactctacgaaacgacgacaactaaattcccaacgcgcacaaaacctacgaaaaaatccattataacgatcgctcctccccgcttaacgaaaacgaacgcaaaaacgaaaaatatcgaaaaatcaaatttatccaaaccgcgccaccttcgtttcaaacgttcaattcgtttcccctacaaaaaaaaaaaaaaccgaaaacgaaacgtttactttattaaccgaactcttcgactactaaaaatttccttcaaacgccattaacttctcacactcaacaaccactcgaaaattaaaaaacaatctc

SEQ ID NO: 14349 - DNA, 595 bp, Artificial Sequence
  chemically treated genomic DNA (Homo sapiens) CpG-island No: 14349
cggcgtttattaagttttcgagcgcggtttcggtttttttggtttcgttttttacgtttagtagttttttttcgttgtttcgtaggatcggtttcgtgggcgacgtgatttcgggtcggttttattggtagtttagtagcgtttttattagggcgtcgtgcgtgtgggtggttttgggcgtcgggtcgggtaggtgggcgcgattttcgagtttggtttttagtttttttttaaagtttttttacgagcgggattttagttcgcggaagttagatacgcgggacggtcggtttcgcgttttttgcgagttaaagaatttgaaggtttagtggattttggttaggtcgaatcggtaatttagataggtgaggaggcgtagggcggttcgtcggattcggttgtggcgggcggcgtcgttcgcggtgtttagtagtagtattattttgtgatagtatgttatatcggtcgtgtcgtcgtttcggggtttcggttcgggttcgcgttatcgttttttagtttttttttttagggaaatagtattatttattgtttttttttgggattttggtcgaaaggttttcgcgttttttaggaa

SEQ ID NO: 14350 - DNA, 595 bp, Artificial Sequence
  chemically treated genomic DNA (Homo sapiens) CpG-island No: 14350
ttcctaaaaaacgcgaaaacctttcgaccaaaatcccaaaaaaaaacaataaataatactatttccctaaaaaaaaaaactaaaaaacgataacgcgaacccgaaccgaaaccccgaaacgacgacacgaccgatataacatactatcacaaaataatactactactaaacaccgcgaacgacgccgcccgccacaaccgaatccgacgaaccgccctacgcctcctcacctatctaaattaccgattcgacctaaccaaaatccactaaaccttcaaattctttaactcgcaaaaaacgcgaaaccgaccgtcccgcgtatctaacttccgcgaactaaaatcccgctcgtaaaaaaactttaaaaaaaaactaaaaaccaaactcgaaaatcgcgcccacctacccgacccgacgcccaaaaccacccacacgcacgacgccctaataaaaacgctactaaactaccaataaaaccgacccgaaatcacgtcgcccacgaaaccgatcctacgaaacaacgaaaaaaaactactaaacgtaaaaaacgaaaccaaaaaaaccgaaaccgcgctcgaaaacttaataaacgccg

SEQ ID NO: 14351 - DNA, 595 bp, Artificial Sequence
  chemically treated genomic DNA (Homo sapiens) CpG-island No: 14351
tttttggagagcgcgggagtttttcgattagggttttaaaggaaagtagtgagtggtgttgtttttttgaaggaagggattaagggacggtggcgcgggttcggatcggggtttcggggcggcggtacggtcgatatggtatgttgttataaagtaatgttgttgttggatatcgcgggcggcgtcgttcgttatagtcgggttcggcgggtcgttttgcgtttttttatttatttgagttgtcgattcggtttggttagggtttattgggtttttaagttttttgattcgtagggggcgcggagtcggtcgtttcgcgtgtttgattttcgcgagttggggtttcgttcgtgggaggattttgaggaggagttggaggttaggttcgaggatcgcgtttatttgttcggttcggcgtttagggttatttatacgtacggcgttttgatggagacgttgttagattattagtgggatcggttcgagattacgtcgtttacgaagtcgattttgcggagtagcgggaggagattgttggacgtggagagcgaggttaaggaggtcgaggtcgcgttcgggggtttggtgaacgtcg

SEQ ID NO: 14352 - DNA, 595 bp, Artificial Sequence
  chemically treated genomic DNA (Homo sapiens) CpG-island No: 14352
cgacgttcaccaaacccccgaacgcgacctcgacctccttaacctcgctctccacgtccaacaatctcctcccgctactccgcaaaatcgacttcgtaaacgacgtaatctcgaaccgatcccactaataatctaacaacgtctccatcaaaacgccgtacgtataaataaccctaaacgccgaaccgaacaaataaacgcgatcctcgaacctaacctccaactcctcctcaaaatcctcccacgaacgaaaccccaactcgcgaaaatcaaacacgcgaaacgaccgactccgcgccccctacgaatcaaaaaacttaaaaacccaataaaccctaaccaaaccgaatcgacaactcaaataaataaaaaaacgcaaaacgacccgccgaacccgactataacgaacgacgccgcccgcgatatccaacaacaacattactttataacaacataccatatcgaccgtaccgccgccccgaaaccccgatccgaacccgcgccaccgtcccttaatcccttccttcaaaaaaacaacaccactcactactttcctttaaaaccctaatcgaaaaactcccgcgctctccaaaaa

SEQ ID NO: 14353 - DNA, 715 bp, Artificial Sequence
  chemically treated genomic DNA (Homo sapiens) CpG-island No: 14353
gttttcgtcggtatttattcgtcgtttttttttcggcggatttagtttcggcgacgaggttgtttttcgtttatttgtcgttcgcgggttttgtagcggggtttcgcgtgttttttattttaggattttacgattcgggtttagggtatcgaggcgtatttcgtcggcgagagtcggttttcgattacggaggggtagtgcgagaagagtcgagcggcgaggttcggttcgtcgtttttttttgttcgcgcgtttaaggatattttgtttttttttttaaggataaaggataataaaaggagttagggagttatttatcgggttcgagcgcggttatcggtattttttggtcgtttaaattcgagtttcgggtcggatcgttcgttcgagtttttcgttcgcgtcgggtttagtcgtcggggttcgggggagttttcgaggcggtaatcgtagcggcgttttcggcgtcgtgggttcggtcgttttgggcgtttttgtcgcgggttgtgacgtcgacgcgcgcggttcgtttcgttttagtcgcggtagttttattttcgcgggtttgttggtcgttcgggcgtagtttttcgtcggtcggcgggtttcgcggtcgcggcggaacgtttgatagttcggggtgttgttgttttttcggttattttgtgtcgtgtgtgtggtgtttttttttcgttttttttttaggttttatttt

SEQ ID NO: 14354 - DNA, 715 bp, Artificial Sequence
  chemically treated genomic DNA (Homo sapiens) CpG-island No: 14354
aaaataaaacctaaaaaaaaaacgaaaaaaaaacaccacacacacgacacaaaataaccgaaaaaacaacaacaccccgaactatcaaacgttccgccgcgaccgcgaaacccgccgaccgacgaaaaactacgcccgaacgaccaacaaacccgcgaaaataaaactaccgcgactaaaacgaaacgaaccgcgcgcgtcgacgtcacaacccgcgacaaaaacgcccaaaacgaccgaacccacgacgccgaaaacgccgctacgattaccgcctcgaaaactcccccgaaccccgacgactaaacccgacgcgaacgaaaaactcgaacgaacgatccgacccgaaactcgaatttaaacgaccaaaaaataccgataaccgcgctcgaacccgataaataactccctaactccttttattatcctttatccttaaaaaaaaaaacaaaatatccttaaacgcgcgaacaaaaaaaaacgacgaaccgaacctcgccgctcgactcttctcgcactacccctccgtaatcgaaaaccgactctcgccgacgaaatacgcctcgataccctaaacccgaatcgtaaaatcctaaaataaaaaacacgcgaaaccccgctacaaaacccgcgaacgacaaataaacgaaaaacaacctcgtcgccgaaactaaatccgccgaaaaaaaaacgacgaataaataccgacgaaaac

SEQ ID NO: 14355 - DNA, 715 bp, Artificial Sequence
  chemically treated genomic DNA (Homo sapiens) CpG-island No: 14355
ggagtaaagtttagagaggagacgggagagagatattatatatacggtataagatggtcggagaggtagtagtatttcgagttgttaggcgtttcgtcgcggtcgcgaggttcgtcggtcggcggggagttacgttcggacggttagtaggttcgcgggagtggggttgtcgcggttgaggcgaggcgggtcgcgcgcgtcggcgttatagttcgcggtagaggcgtttagggcggtcgggtttacgacgtcgaaagcgtcgttgcggttgtcgtttcggaggttttttcgggtttcggcggttggattcggcgcgggcgggaggttcgggcgggcggttcggttcgggattcgggtttgggcgattaggaggtgtcggtggtcgcgttcggattcggtgagtggttttttagttttttttattgttttttgtttttgggaggaaaagtaaaatgtttttgagcgcgcgagtaggagggggcggcgggtcgggtttcgtcgttcggtttttttcgtattgttttttcgtggtcgggggtcggttttcgtcggcgggatgcgtttcggtgttttgggttcgagtcgtagggttttggggtagggggtacgcggggtttcgttgtagagttcgcgggcggtaggtgggcggggggtagtttcgtcgtcgggattggattcgtcgggaaaggggcggcgggtgaatgtcggcgagagt

SEQ ID NO: 14356 - DNA, 715 bp, Artificial Sequence
  chemically treated genomic DNA (Homo sapiens) CpG-island No: 14356
actctcgccgacattcacccgccgcccctttcccgacgaatccaatcccgacgacgaaactaccccccgcccacctaccgcccgcgaactctacaacgaaaccccgcgtaccccctaccccaaaaccctacgactcgaacccaaaacaccgaaacgcatcccgccgacgaaaaccgacccccgaccacgaaaaaacaatacgaaaaaaaccgaacgacgaaacccgacccgccgccccctcctactcgcgcgctcaaaaacattttacttttcctcccaaaaacaaaaaacaataaaaaaaactaaaaaaccactcaccgaatccgaacgcgaccaccgacacctcctaatcgcccaaacccgaatcccgaaccgaaccgcccgcccgaacctcccgcccgcgccgaatccaaccgccgaaacccgaaaaaacctccgaaacgacaaccgcaacgacgctttcgacgtcgtaaacccgaccgccctaaacgcctctaccgcgaactataacgccgacgcgcgcgacccgcctcgcctcaaccgcgacaaccccactcccgcgaacctactaaccgtccgaacgtaactccccgccgaccgacgaacctcgcgaccgcgacgaaacgcctaacaactcgaaatactactacctctccgaccatcttataccgtatatataatatctctctcccgtctcctctctaaactttactcc

SEQ ID NO: 14357 - DNA, 738 bp, Artificial Sequence
  chemically treated genomic DNA (Homo sapiens) CpG-island No: 14357
cggaatttcgcgagtcggattaggcgttaagttatagtcgcgcgtcgttatcggtttttggtttcgttcggtcggggcgttttcgttagtcgttattggggggtttcggacgtttttttttcggggggttttcgcgggtagtcggatcgggttttttcggggcgcgggagtaaggtcgttcggtttagttttagttttagttttagttttattttcggatcgcgttattatcgcggcgaggttcgtttgtcgttttttcggtttgggttttgtttttcgcgggtcggtttcgggacgcgaagtttatagagggggtttttcggtcgtaggcgttggggtcgttttttttacggcgaggttcggggttgcgcgttgcgttttttgtagggttttcgtggttttttcgttacggttaggttaggcggtttttttattttcgagggcgatattcgtaggttttttcggttcgatcggttgcggaatagtcgggagttcggcgcgaagtcgtagaaggttcgggtttgggttcgcgtcgcgaacgcgtatgttttgtcgaggttcgtcgcgggcgttagcgtattttgatagagttattacgaggtttatttagtagagttttagtggcgtaatcggttagcgcgcggtatttatatagtagtatatgtagagtaatgtcgaggttgtgagttcgagttttatttggagtaagatttttttggatgttcgtaattttttttg

SEQ ID NO: 14358 - DNA, 738 bp, Artificial Sequence
  chemically treated genomic DNA (Homo sapiens) CpG-island No: 14358
caaaaaaaattacgaacatccaaaaaaatcttactccaaataaaactcgaactcacaacctcgacattactctacatatactactatataaataccgcgcgctaaccgattacgccactaaaactctactaaataaacctcgtaataactctatcaaaatacgctaacgcccgcgacgaacctcgacaaaacatacgcgttcgcgacgcgaacccaaacccgaaccttctacgacttcgcgccgaactcccgactattccgcaaccgatcgaaccgaaaaaacctacgaatatcgccctcgaaaataaaaaaaccgcctaacctaaccgtaacgaaaaaaccacgaaaaccctacaaaaaacgcaacgcgcaaccccgaacctcgccgtaaaaaaaacgaccccaacgcctacgaccgaaaaaccccctctataaacttcgcgtcccgaaaccgacccgcgaaaaacaaaacccaaaccgaaaaaacgacaaacgaacctcgccgcgataataacgcgatccgaaaataaaactaaaactaaaactaaaactaaaccgaacgaccttactcccgcgccccgaaaaaacccgatccgactacccgcgaaaaccccccgaaaaaaaaacgtccgaaaccccccaataacgactaacgaaaacgccccgaccgaacgaaaccaaaaaccgataacgacgcgcgactataacttaacgcctaatccgactcgcgaaattccg

SEQ ID NO: 14359 - DNA, 738 bp, Artificial Sequence
  chemically treated genomic DNA (Homo sapiens) CpG-island No: 14359
taaaaggggttgcgaatatttaaaagggttttgttttaggtgaggttcgaatttataatttcggtattgttttgtatgtattgttgtataagtatcgcgcgttaatcgattgcgttattggagttttgttgaatgggtttcgtgatggttttattagggtgcgttggcgttcgcggcgggtttcggtagagtatgcgcgttcgcggcgcgagtttaggttcgagttttttgcgatttcgcgtcgagttttcggttgtttcgtagtcgatcgagtcggggaagtttgcgagtgtcgttttcggggatggaggggtcgtttagtttggtcgtgacgggagggttacgggggttttgtaaagagcgtagcgcgtagtttcgggtttcgtcgtaggaggagcggttttagcgtttgcggtcggaaaattttttttatgggtttcgcgtttcggagtcggttcgcgaggggtagggtttaggtcggggaagcggtaggcgggtttcgtcgcggtggtgacgcggttcgggggtggggttggggttggggttggggttgagtcgggcggttttgttttcgcgtttcggggaggttcgattcgattgttcgcgggggtttttcggaaggagagcgttcggagttttttagtggcggttggcgggggcgtttcggtcgggcgaggttaggggtcggtggcggcgcgcggttgtggtttggcgtttggttcggttcgcgaggtttcg

SEQ ID NO: 14360 - DNA, 738 bp, Artificial Sequence
  chemically treated genomic DNA (Homo sapiens) CpG-island No: 14360
cgaaacctcgcgaaccgaaccaaacgccaaaccacaaccgcgcgccgccaccgacccctaacctcgcccgaccgaaacgcccccgccaaccgccactaaaaaactccgaacgctctccttccgaaaaacccccgcgaacaatcgaatcgaacctccccgaaacgcgaaaacaaaaccgcccgactcaaccccaaccccaaccccaaccccacccccgaaccgcgtcaccaccgcgacgaaacccgcctaccgcttccccgacctaaaccctacccctcgcgaaccgactccgaaacgcgaaacccataaaaaaaattttccgaccgcaaacgctaaaaccgctcctcctacgacgaaacccgaaactacgcgctacgctctttacaaaacccccgtaaccctcccgtcacgaccaaactaaacgacccctccatccccgaaaacgacactcgcaaacttccccgactcgatcgactacgaaacaaccgaaaactcgacgcgaaatcgcaaaaaactcgaacctaaactcgcgccgcgaacgcgcatactctaccgaaacccgccgcgaacgccaacgcaccctaataaaaccatcacgaaacccattcaacaaaactccaataacgcaatcgattaacgcgcgatacttatacaacaatacatacaaaacaataccgaaattataaattcgaacctcacctaaaacaaaacccttttaaatattcgcaacccctttta

SEQ ID NO: 14361 - DNA, 607 bp, Artificial Sequence
  chemically treated genomic DNA (Homo sapiens) CpG-island No: 14361
gcgcgttttagatcgggcgtattcggcgggtatttggttcgtcgtttttcggggggtttcgttagttgttttcgaagtcggttcggggtggcggggcgggttcgagcgttagtcgattttgggatcggtttttcggggcgcggtcgggtagtagttttcgttttttcgtttcgggggtcgggtcgggttttcggggggcggggattcgtttagtggtagtagcgttcgggtcggcggcgggcgtcgggcggttttttgtaggcggcgtcggggcgagtcgttgtcggttgtagttatcgtcgtcgggtcgtcgggtcgcgggggtcgcggcgttcgggtcgcgttcgtgtttttcgggcgcgttgcgcggtcgtcgttgttgttcgcgttcgtgtcgtcgtcgtcgtcgtcgtcgttgttgtcggttacgttagtttcgtcgtcgttcgttttgattttgcgtataggtagtttttaagtttgttattttgtaaaaatatagtttatttaatatattatatatattcgtatatatacgcgcgtatagggggttttttagagtttataaagagggttttaagttcgagtttaaatttaatatagttga

SEQ ID NO: 14362 - DNA, 607 bp, Artificial Sequence
  chemically treated genomic DNA (Homo sapiens) CpG-island No: 14362
tcaactatattaaatttaaactcgaacttaaaaccctctttataaactctaaaaaaccccctatacgcgcgtatatatacgaatatatataatatattaaataaactatatttttacaaaataacaaacttaaaaactacctatacgcaaaatcaaaacgaacgacgacgaaactaacgtaaccgacaacaacgacgacgacgacgacgacgacacgaacgcgaacaacaacgacgaccgcgcaacgcgcccgaaaaacacgaacgcgacccgaacgccgcgacccccgcgacccgacgacccgacgacgataactacaaccgacaacgactcgccccgacgccgcctacaaaaaaccgcccgacgcccgccgccgacccgaacgctactaccactaaacgaatccccgccccccgaaaacccgacccgacccccgaaacgaaaaaacgaaaactactacccgaccgcgccccgaaaaaccgatcccaaaatcgactaacgctcgaacccgccccgccaccccgaaccgacttcgaaaacaactaacgaaaccccccgaaaaacgacgaaccaaatacccgccgaatacgcccgatctaaaacgcgc

SEQ ID NO: 14363 - DNA, 607 bp, Artificial Sequence
  chemically treated genomic DNA (Homo sapiens) CpG-island No: 14363
ttagttatattaaatttagattcggatttgaagttttttttgtggattttagaggattttttgtgcgcgcgtgtgtgtgcgagtgtgtgtggtgtgttgagtaaattgtgtttttgtagaatgataggtttgggggttgtttatgcgtagaattagagcgggcggcggcggggttggcgtaatcggtagtagcggcggcggcggcggcggcggtacgagcgcgggtagtagcgacggtcgcgtagcgcgttcgggaggtacggacgcggttcgagcgtcgcggttttcgcgattcggcgattcggcggcggtggttgtagtcggtaacggttcgtttcggcgtcgtttgtaggaagtcgttcggcgttcgtcgtcggttcggacgttgttgttattgggcgagttttcgtttttcgggagttcggttcggttttcggggcggggaggcgggggttgttgttcggtcgcgtttcgggggatcggttttagagtcgattagcgttcgggttcgtttcgttatttcgggtcggtttcgggagtagttggcggggtttttcggggggcggcgggttaggtgttcgtcgggtgcgttcgatttggggcgcgt

SEQ ID NO: 14364 - DNA, 607 bp, Artificial Sequence
  chemically treated genomic DNA (Homo sapiens) CpG-island No: 14364
acgcgccccaaatcgaacgcacccgacgaacacctaacccgccgccccccgaaaaaccccgccaactactcccgaaaccgacccgaaataacgaaacgaacccgaacgctaatcgactctaaaaccgatcccccgaaacgcgaccgaacaacaacccccgcctccccgccccgaaaaccgaaccgaactcccgaaaaacgaaaactcgcccaataacaacaacgtccgaaccgacgacgaacgccgaacgacttcctacaaacgacgccgaaacgaaccgttaccgactacaaccaccgccgccgaatcgccgaatcgcgaaaaccgcgacgctcgaaccgcgtccgtacctcccgaacgcgctacgcgaccgtcgctactacccgcgctcgtaccgccgccgccgccgccgccgctactaccgattacgccaaccccgccgccgcccgctctaattctacgcataaacaacccccaaacctatcattctacaaaaacacaatttactcaacacaccacacacactcgcacacacacgcgcgcacaaaaaatcctctaaaatccacaaaaaaaacttcaaatccgaatctaaatttaatataactaa

SEQ ID NO: 14365 - DNA, 523 bp, Artificial Sequence
  chemically treated genomic DNA (Homo sapiens) CpG-island No: 14365
tatcgtcgcgtttatgacggcgttcggttacgttggtcgttcgcgttttttagtcggtttgttagtttaagttcgggtttttggtcgtcgtcggttcgcgtcgtcgtcgttcggttttgttaggacgcgtcgtttcggtttttattttatagtgtatcggagtttattatagcgtttgcggtttcgtcgtagggcgttcggttattagggttgcgcggttttagtaacggacgttcgcgcgtttcgttttttgttcgttttttagcgttcgcgtaggtaggagtgggggtttcgcgggagggatttgcgggagtgcggttgtgttagagtaggcggggcgcggcggggcggggaaaggggatttgggatcgggcgtttggttttttttttgtcgagcgacggtttcgggaagtcggtgttcgttcgcgttagaggcgattgtttgaggattgattaagaataaggtaatttttaagatttgtgtcgtttgttttttaaattttaagggttttcgaaggtattg

SEQ ID NO: 14366 - DNA, 523 bp, Artificial Sequence
  chemically treated genomic DNA (Homo sapiens) CpG-island No: 14366
caataccttcgaaaacccttaaaatttaaaaaacaaacgacacaaatcttaaaaattaccttattcttaatcaatcctcaaacaatcgcctctaacgcgaacgaacaccgacttcccgaaaccgtcgctcgacaaaaaaaaaaccaaacgcccgatcccaaatcccctttccccgccccgccgcgccccgcctactctaacacaaccgcactcccgcaaatccctcccgcgaaacccccactcctacctacgcgaacgctaaaaaacgaacaaaaaacgaaacgcgcgaacgtccgttactaaaaccgcgcaaccctaataaccgaacgccctacgacgaaaccgcaaacgctataataaactccgatacactataaaataaaaaccgaaacgacgcgtcctaacaaaaccgaacgacgacgacgcgaaccgacgacgaccaaaaacccgaacttaaactaacaaaccgactaaaaaacgcgaacgaccaacgtaaccgaacgccgtcataaacgcgacgata

SEQ ID NO: 14367 - DNA, 523 bp, Artificial Sequence
  chemically treated genomic DNA (Homo sapiens) CpG-island No: 14367
tagtgttttcgaaagtttttgagatttgggaaataggcggtatagattttggaggttattttgtttttaattagtttttaggtagtcgtttttaacgcgagcgaatatcggtttttcgaggtcgtcgttcggtagaggaggggttaggcgttcgattttagatttttttttttcgtttcgtcgcgtttcgtttgttttggtatagtcgtattttcgtaaatttttttcgcggaatttttatttttgtttgcgcgggcgttggaaggcgggtagggggcggggcgcgcgggcgttcgttgttaaggtcgcgtagttttagtgatcgaacgttttgcggcgagatcgtaggcgttgtggtgggtttcggtgtattgtgggatggaaatcggagcggcgcgttttggtaggatcgggcggcggcggcgcgggtcggcggcggttagggattcgggtttaggttggtaggtcggttgaggggcgcgggcggttagcgtggtcggacgtcgttatgaacgcggcggtg

SEQ ID NO: 14368 - DNA, 523 bp, Artificial Sequence
  chemically treated genomic DNA (Homo sapiens) CpG-island No: 14368
caccgccgcgttcataacgacgtccgaccacgctaaccgcccgcgcccctcaaccgacctaccaacctaaacccgaatccctaaccgccgccgacccgcgccgccgccgcccgatcctaccaaaacgcgccgctccgatttccatcccacaatacaccgaaacccaccacaacgcctacgatctcgccgcaaaacgttcgatcactaaaactacgcgaccttaacaacgaacgcccgcgcgccccgccccctacccgccttccaacgcccgcgcaaacaaaaataaaaattccgcgaaaaaaatttacgaaaatacgactataccaaaacaaacgaaacgcgacgaaacgaaaaaaaaaaatctaaaatcgaacgcctaacccctcctctaccgaacgacgacctcgaaaaaccgatattcgctcgcgttaaaaacgactacctaaaaactaattaaaaacaaaataacctccaaaatctataccgcctatttcccaaatctcaaaaactttcgaaaacacta

SEQ ID NO: 14369 - DNA, 1079 bp, Artificial Sequence
  chemically treated genomic DNA (Homo sapiens) CpG-island No: 14369
gtagttcgcgcgtagttattcggtagttcggtgttttatatacgttgttttatttttcggattttaggtttttgagttgcgaacgggggttcgagtttttaattttcggtgttatcgtagtttaaacgagcgtattttgcgcgggttcgattattttttatttgggatagggttaaggtatacgttttacgtcggcgtcgttttaagtcgaggagtttagtagtttaaggaattttcggcggcgtttcgttgttcgagtcggcgttgggatttcgatttgttcgaggttcgcgcgtcgcggcggttacgtaagtcgtagcgggtcgcgcgcgttatttatcgtcggtcgcgtcgcgttacgtcgttcgtcggtcgtttcgtcgattcgcggttttgtgtcgtcggattcgcgttcgttgtcgtcgcgtatagttgtacgtatttttttagcgtcgtcgatattagtcgcgtcgagtcgtcgttgttatatagtggaaaacgtgatcgcgcgtcgcgttcgttttcgttttcgttattggtcgcgatttcgttttatttgtatatatgaggggcggggtttacgaacgttcgcgtttattggtggtcgcgttcgtcgttttttttatataagacgtatatggaattttatgtttatttcgtcggttttttaatggagagcggcgcgttcgtgttattcgtcgttttttttagtggttttatttattttcggcgtcggcgttttttatttattacgtttttaagttcgttagttcggggagcgcggagtggcgcgtattattgcgggcgggggagttgggcgcggggtttttgcgtattttcggtcggtttggtagattcggcgcgcgaagtcggacgagggagatttttattttcggttatcggtagtaggttcgtttttagcggttagggcgggataagttcgcgcggtatgttttatttacgtatttatatttatttatttatttatttatttaatttatttatcgcggggtttcggagtagtttaggagaaggtggtagtatcgttttgtagtagtttcgggggtacgtttattcgg

SEQ ID NO: 14370 - DNA, 1079 bp, Artificial Sequence
  chemically treated genomic DNA (Homo sapiens) CpG-island No: 14370
ccgaataaacgtacccccgaaactactacaaaacgatactaccaccttctcctaaactactccgaaaccccgcgataaataaattaaataaataaataaataaataaatataaatacgtaaataaaacataccgcgcgaacttatcccgccctaaccgctaaaaacgaacctactaccgataaccgaaaataaaaatctccctcgtccgacttcgcgcgccgaatctaccaaaccgaccgaaaatacgcaaaaaccccgcgcccaactcccccgcccgcaataatacgcgccactccgcgctccccgaactaacgaacttaaaaacgtaataaataaaaaacgccgacgccgaaaataaataaaaccactaaaaaaaacgacgaataacacgaacgcgccgctctccattaaaaaaccgacgaaataaacataaaattccatatacgtcttatataaaaaaaacgacgaacgcgaccaccaataaacgcgaacgttcgtaaaccccgcccctcatatatacaaataaaacgaaatcgcgaccaataacgaaaacgaaaacgaacgcgacgcgcgatcacgttttccactatataacaacgacgactcgacgcgactaatatcgacgacgctaaaaaaatacgtacaactatacgcgacgacaacgaacgcgaatccgacgacacaaaaccgcgaatcgacgaaacgaccgacgaacgacgtaacgcgacgcgaccgacgataaataacgcgcgcgacccgctacgacttacgtaaccgccgcgacgcgcgaacctcgaacaaatcgaaatcccaacgccgactcgaacaacgaaacgccgccgaaaattccttaaactactaaactcctcgacttaaaacgacgccgacgtaaaacgtataccttaaccctatcccaaataaaaaataatcgaacccgcgcaaaatacgctcgtttaaactacgataacaccgaaaattaaaaactcgaacccccgttcgcaactcaaaaacctaaaatccgaaaaataaaacaacgtatataaaacaccgaactaccgaataactacgcgcgaactac

SEQ ID NO: 14371 - DNA, 1079 bp, Artificial Sequence
  chemically treated genomic DNA (Homo sapiens) CpG-island No: 14371
tcgggtgggcgtgttttcggagttgttgtagggcggtgttgttatttttttttgggttgtttcggggtttcgcgatgaatgagttgagtgaatgagtaaatgaatgaatgtgaatgcgtgaatgaagtatgtcgcgcggatttatttcgttttggtcgttgggggcgagtttattgtcggtggtcggaggtggaggtttttttcgttcggtttcgcgcgtcgggtttgttaggtcggtcggaggtgcgtaggagtttcgcgtttagttttttcgttcgtaatggtacgcgttatttcgcgtttttcgagttggcgggtttgagggcgtagtgaatggaaggcgtcgacgtcggaagtggatgagattattagggaggacgacgggtagtacgaacgcgtcgttttttattgaggaatcgacgaggtgaatatggagttttatgtgcgttttatgtaaaaagagcgacgggcgcggttattaatgggcgcgagcgttcgtaggtttcgttttttatgtatgtagatgagacggagtcgcggttaatggcggaggcgggagcgggcgcggcgcgcggttacgttttttattatgtgatagcggcgattcggcgcggttaatgtcgacggcgttgaggggatacgtgtagttgtgcgcggcggtagcgggcgcgggttcggcggtatagagtcgcgagtcggcggagcgatcggcggacggcgtgacgcggcgcggtcggcggtaagtggcgcgcgcggttcgttgcggtttacgtaatcgtcgcggcgcgcgggtttcgggtaggtcggggttttagcgtcggttcgggtagcggagcgtcgtcggaagttttttgggttgttggatttttcggtttgaaacggcgtcggcgtggggcgtgtgttttggttttgttttaggtggagagtggtcgagttcgcgtagggtgcgttcgtttgaattgcggtgatatcgagggttggggattcgaattttcgttcgtagtttaggagtttgaggttcgaaaggtgaggtagcgtgtgtagggtatcgagttatcgagtgattgcgcgcgggttgt

SEQ ID NO: 14372 - DNA, 1079 bp, Artificial Sequence
  chemically treated genomic DNA (Homo sapiens) CpG-island No: 14372
acaacccgcgcgcaatcactcgataactcgataccctacacacgctacctcacctttcgaacctcaaactcctaaactacgaacgaaaattcgaatccccaaccctcgatatcaccgcaattcaaacgaacgcaccctacgcgaactcgaccactctccacctaaaacaaaaccaaaacacacgccccacgccgacgccgtttcaaaccgaaaaatccaacaacccaaaaaacttccgacgacgctccgctacccgaaccgacgctaaaaccccgacctacccgaaacccgcgcgccgcgacgattacgtaaaccgcaacgaaccgcgcgcgccacttaccgccgaccgcgccgcgtcacgccgtccgccgatcgctccgccgactcgcgactctataccgccgaacccgcgcccgctaccgccgcgcacaactacacgtatcccctcaacgccgtcgacattaaccgcgccgaatcgccgctatcacataataaaaaacgtaaccgcgcgccgcgcccgctcccgcctccgccattaaccgcgactccgtctcatctacatacataaaaaacgaaacctacgaacgctcgcgcccattaataaccgcgcccgtcgctctttttacataaaacgcacataaaactccatattcacctcgtcgattcctcaataaaaaacgacgcgttcgtactacccgtcgtcctccctaataatctcatccacttccgacgtcgacgccttccattcactacgccctcaaacccgccaactcgaaaaacgcgaaataacgcgtaccattacgaacgaaaaaactaaacgcgaaactcctacgcacctccgaccgacctaacaaacccgacgcgcgaaaccgaacgaaaaaaacctccacctccgaccaccgacaataaactcgcccccaacgaccaaaacgaaataaatccgcgcgacatacttcattcacgcattcacattcattcatttactcattcactcaactcattcatcgcgaaaccccgaaacaacccaaaaaaaaataacaacaccgccctacaacaactccgaaaacacgcccacccga

SEQ ID NO: 14373 - DNA, 506 bp, Artificial Sequence
  chemically treated genomic DNA (Homo sapiens) CpG-island No: 14373
ttttttcgtcgtcgcgcggtttttcggagtcgattgtagatttttttagttcggtgtttttcgcgttcggacgtcgaggtcgcggtttcgtagaaattcgggtttttttattcgtttttagtaaatatggcggtacggcgagcggggcgggtagggggcgggtagggggcggggcgcgggttttcggttagggttttcggtcgggttttggttatttacgtgtggagatcgggtaggtgggtttggagagcgtgacgcggtgtcgagaggtatcggggagcggcgtttgagtcggggcggggataagggggcggggaggggcggagcgagtcggttttcgcgtgggtttgagattttaagtgcgagcggtaaggtggtggttttcgtcgcgtagagggaagcgggaaatcgagaaagaacgagggtgagggtgatgagggaagggtaaattttaaattttagcgggaggatacgagtttggatcgtttcgggtatttagttttttt

SEQ ID NO: 14374 - DNA, 506 bp, Artificial Sequence
  chemically treated genomic DNA (Homo sapiens) CpG-island No: 14374
aaaaaaactaaatacccgaaacgatccaaactcgtatcctcccgctaaaatttaaaatttacccttccctcatcaccctcaccctcgttctttctcgatttcccgcttccctctacgcgacgaaaaccaccaccttaccgctcgcacttaaaatctcaaacccacgcgaaaaccgactcgctccgcccctccccgcccccttatccccgccccgactcaaacgccgctccccgatacctctcgacaccgcgtcacgctctccaaacccacctacccgatctccacacgtaaataaccaaaacccgaccgaaaaccctaaccgaaaacccgcgccccgccccctacccgccccctacccgccccgctcgccgtaccgccatatttactaaaaacgaataaaaaaacccgaatttctacgaaaccgcgacctcgacgtccgaacgcgaaaaacaccgaactaaaaaaatctacaatcgactccgaaaaaccgcgcgacgacgaaaaaa

SEQ ID NO: 14375 - DNA, 506 bp, Artificial Sequence
  chemically treated genomic DNA (Homo sapiens) CpG-island No: 14375
aagaggattaggtgttcggggcgatttaggttcgtgttttttcgttggagtttgaggtttgttttttttttattatttttattttcgttttttttcggtttttcgtttttttttacgcggcggagattattattttatcgttcgtatttaagattttagatttacgcggaggtcggttcgtttcgttttttttcgtttttttgttttcgtttcggtttagacgtcgtttttcggtgtttttcggtatcgcgttacgttttttaggtttatttgttcggtttttatacgtgggtagttagagttcggtcgagagttttggtcgggagttcgcgtttcgttttttgttcgttttttgttcgtttcgttcgtcgtgtcgttatgtttattgagggcggatggaggggttcgagtttttgcgaagtcgcgatttcggcgttcggacgcggggaatatcgggttgagggagtttgtagtcggtttcgggaagtcgcgcggcgacgggggag

SEQ ID NO: 14376 - DNA, 506 bp, Artificial Sequence
  chemically treated genomic DNA (Homo sapiens) CpG-island No: 14376
ctcccccgtcgccgcgcgacttcccgaaaccgactacaaactccctcaacccgatattccccgcgtccgaacgccgaaatcgcgacttcgcaaaaactcgaacccctccatccgccctcaataaacataacgacacgacgaacgaaacgaacaaaaaacgaacaaaaaacgaaacgcgaactcccgaccaaaactctcgaccgaactctaactacccacgtataaaaaccgaacaaataaacctaaaaaacgtaacgcgataccgaaaaacaccgaaaaacgacgtctaaaccgaaacgaaaacaaaaaaacgaaaaaaaacgaaacgaaccgacctccgcgtaaatctaaaatcttaaatacgaacgataaaataataatctccgccgcgtaaaaaaaaacgaaaaaccgaaaaaaaacgaaaataaaaataataaaaaaaaaacaaacctcaaactccaacgaaaaaacacgaacctaaatcgccccgaacacctaatcctctt

SEQ ID NO: 14377 - DNA, 584 bp, Artificial Sequence
  chemically treated genomic DNA (Homo sapiens) CpG-island No: 14377
tcgcgcggttttggttggttgacggcgatgggttcgggttttcggtcggtcggggcggggtgttatttatttgttgcggcgtcgcgcggttttgggggtttagtttcgtgggcgtttttggttgttgcgtcgttcgcgtttcgtttttcgtcgttagtttttttcgggtcgttttacgtggtcgttttacgtcgttttttcggttggagtcgtcgttttggtcgggtagagttcggagttagtgttagtcgtcgtttcgttcgtcggatttggtttttcgtagttttattagcgttttcgttgcgttcgcggtcggaggggttgcgcgcgttcgtgtgagtgtgcgcgtgtgtgcgtgcgtgagtgcgtatgtgcgcgtgtgcgagttcgcgtgtgttcgtgagtgcgttcgtgtgtttgtgcgggtgtgtatatgcgtgtgatattgtgagcgtgagtgtgagtatgtgtaaggatgtacgtgtgtgagcgtgtatgtgtgcgcggatgtgtgcgtgtgtttgtatgtatatatgtgagtatagagagattaagagatagtgaggttagtgtgtattagaagt

SEQ ID NO: 14378 - DNA, 584 bp, Artificial Sequence
  chemically treated genomic DNA (Homo sapiens) CpG-island No: 14378
acttctaatacacactaacctcactatctcttaatctctctatactcacatatatacatacaaacacacgcacacatccgcgcacacatacacgctcacacacgtacatccttacacatactcacactcacgctcacaatatcacacgcatatacacacccgcacaaacacacgaacgcactcacgaacacacgcgaactcgcacacgcgcacatacgcactcacgcacgcacacacgcgcacactcacacgaacgcgcgcaacccctccgaccgcgaacgcaacgaaaacgctaataaaactacgaaaaaccaaatccgacgaacgaaacgacgactaacactaactccgaactctacccgaccaaaacgacgactccaaccgaaaaaacgacgtaaaacgaccacgtaaaacgacccgaaaaaaactaacgacgaaaaacgaaacgcgaacgacgcaacaaccaaaaacgcccacgaaactaaacccccaaaaccgcgcgacgccgcaacaaataaataacaccccgccccgaccgaccgaaaacccgaacccatcgccgtcaaccaaccaaaaccgcgcga

SEQ ID NO: 14379 - DNA, 584 bp, Artificial Sequence
  chemically treated genomic DNA (Homo sapiens) CpG-island No: 14379
atttttgatgtatattggttttattgttttttggtttttttgtatttatatgtgtgtatataggtatacgtatatattcgcgtatatatgtacgtttatatacgtgtatttttatatatgtttatatttacgtttataatgttatacgtatgtgtatattcgtataagtatacgagcgtatttacgagtatacgcggattcgtatacgcgtatatgcgtatttacgtacgtatatacgcgtatatttatacgggcgcgcgtagttttttcggtcgcgggcgtagcgggggcgttggtggagttgcgaagggttaggttcggcgggcggggcggcggttggtattggtttcggattttgttcggttagggcggcggttttagtcgggagggcgacgtggagcggttacgtggagcggttcgggggaggttggcggcgggaggcgaggcgcgggcggcgtagtagttaggagcgtttacggagttggatttttagagtcgcgcggcgtcgtagtaggtgggtgatatttcgtttcggtcggtcggagattcgagtttatcgtcgttagttagttagggtcgcgcgg

SEQ ID NO: 14380 - DNA, 584 bp, Artificial Sequence
  chemically treated genomic DNA (Homo sapiens) CpG-island No: 14380
ccgcgcgaccctaactaactaacgacgataaactcgaatctccgaccgaccgaaacgaaatatcacccacctactacgacgccgcgcgactctaaaaatccaactccgtaaacgctcctaactactacgccgcccgcgcctcgcctcccgccgccaacctcccccgaaccgctccacgtaaccgctccacgtcgccctcccgactaaaaccgccgccctaaccgaacaaaatccgaaaccaataccaaccgccgccccgcccgccgaacctaacccttcgcaactccaccaacgcccccgctacgcccgcgaccgaaaaaactacgcgcgcccgtataaatatacgcgtatatacgtacgtaaatacgcatatacgcgtatacgaatccgcgtatactcgtaaatacgctcgtatacttatacgaatatacacatacgtataacattataaacgtaaatataaacatatataaaaatacacgtatataaacgtacatatatacgcgaatatatacgtatacctatatacacacatataaatacaaaaaaaccaaaaaacaataaaaccaatatacatcaaaaat

SEQ ID NO: 14381 - DNA, 600 bp, Artificial Sequence
  chemically treated genomic DNA (Homo sapiens) CpG-island No: 14381
gaagtcggtgttgggcgattttgttttcgcgttaggggtggagaatcgaagtttcgtttcgggaaacgcggtttcgcggtcggttagtgttgacgcgtgtcggcgtttttgcgtttgcgcggagggagtcgcgagataggtgcgtatgttagtgcgcgtttgcgagatcgatttggacggagtcgagttgaggttcggttttttgttgatggttagggttttggtaatttttcggtgtgagaggggtagggagtgttttcggcggcgacggggtcgagtttattagtcgtcggggtagtagtcgaaggttcggcgcggtatgttttgggtgtcgcggtgcgggtagtgaacgcgcgtcgggcgggatgggtcgtcgggcgttagagttgtatcgggtttcgttttcgttgtacgcgttttaggtcgattttagtattgggttgtttatcgttgcgggcggaggaggcgtcgttaagataggtataaagaatggcgtggtgagagcgtagggttattggggttgggttttgttgcgggttggcggcgattttagggtggtcggggggtcgcggggcgggttatattttagtttcgggtttt

SEQ ID NO: 14382 - DNA, 600 bp, Artificial Sequence
  chemically treated genomic DNA (Homo sapiens) CpG-island No: 14382
aaaacccgaaactaaaatataacccgccccgcgaccccccgaccaccctaaaatcgccgccaacccgcaacaaaacccaaccccaataaccctacgctctcaccacgccattctttatacctatcttaacgacgcctcctccgcccgcaacgataaacaacccaatactaaaatcgacctaaaacgcgtacaacgaaaacgaaacccgatacaactctaacgcccgacgacccatcccgcccgacgcgcgttcactacccgcaccgcgacacccaaaacataccgcgccgaaccttcgactactaccccgacgactaataaactcgaccccgtcgccgccgaaaacactccctacccctctcacaccgaaaaattaccaaaaccctaaccatcaacaaaaaaccgaacctcaactcgactccgtccaaatcgatctcgcaaacgcgcactaacatacgcacctatctcgcgactccctccgcgcaaacgcaaaaacgccgacacgcgtcaacactaaccgaccgcgaaaccgcgtttcccgaaacgaaacttcgattctccacccctaacgcgaaaacaaaatcgcccaacaccgacttc

SEQ ID NO: 14383 - DNA, 600 bp, Artificial Sequence
  chemically treated genomic DNA (Homo sapiens) CpG-island No: 14383
agggttcgaagttggagtgtggttcgtttcgcgatttttcggttattttggaatcgtcgttagttcgtagtaagatttagttttagtggttttgcgtttttattacgttattttttatgtttgttttggcggcgtttttttcgttcgtagcgatgagtagtttagtgttggggtcgatttgaagcgcgtataacgggaacggagttcggtatagttttggcgttcggcggtttatttcgttcggcgcgcgtttattgttcgtatcgcggtatttaggatatgtcgcgtcgggttttcgattattgtttcggcggttggtgaattcggtttcgtcgtcgtcgggagtattttttattttttttatatcggggagttgttaaaattttgattattagtaggaagtcgagttttagttcggtttcgtttaagtcggtttcgtagacgcgtattggtatgcgtatttgtttcgcggtttttttcgcgtaggcgtaggagcgtcgatacgcgttagtattagtcggtcgcggggtcgcgtttttcggggcggggtttcggttttttatttttggcgcggaggtagagtcgtttagtatcgatttt

SEQ ID NO: 14384 - DNA, 600 bp, Artificial Sequence
  chemically treated genomic DNA (Homo sapiens) CpG-island No: 14384
aaaatcgatactaaacgactctacctccgcgccaaaaataaaaaaccgaaaccccgccccgaaaaacgcgaccccgcgaccgactaatactaacgcgtatcgacgctcctacgcctacgcgaaaaaaaccgcgaaacaaatacgcataccaatacgcgtctacgaaaccgacttaaacgaaaccgaactaaaactcgacttcctactaataatcaaaattttaacaactccccgatataaaaaaaataaaaaatactcccgacgacgacgaaaccgaattcaccaaccgccgaaacaataatcgaaaacccgacgcgacatatcctaaataccgcgatacgaacaataaacgcgcgccgaacgaaataaaccgccgaacgccaaaactataccgaactccgttcccgttatacgcgcttcaaatcgaccccaacactaaactactcatcgctacgaacgaaaaaaacgccgccaaaacaaacataaaaaataacgtaataaaaacgcaaaaccactaaaactaaatcttactacgaactaacgacgattccaaaataaccgaaaaatcgcgaaacgaaccacactccaacttcgaaccct

SEQ ID NO: 14385 - DNA, 776 bp, Artificial Sequence
  chemically treated genomic DNA (Homo sapiens) CpG-island No: 14385
gtcggtttcgtcgttgtattttcgttttagtttatttttcggtttcggggaggcggttattacggtttcgttagtcgcgtttcgagttacgttagttgtagttagttgtgcggtgtcgggtttaggcgcgcgttcgtagtttcgttttattttttacggttggattttttatcgtagtcgcgttcgaggtttcgttttagtcgcggtcgtaacgcgtcgcgcggagtcgacgagacggcggggttagagaggtcgtttcgatcgcgtttttcgtcggaagcggtttgttcgggtttgagttggcgttacgaagtttcggtttaggtttttgatttcgggtttgttcgttggtggcgtcggagtcgagtcggattggttaggttagaggtacgtaggggtcgttttacgggtttagtttcgtcgtggtcgtggtcgtggttggtttgtggggcgaggacgggtttttgcgagggcgaggagtgcgttagttcgtagtttagtttttttttttttcgtaggatgattacggacgtgtagttcgttattttcgttaatatgttgggcgtgtcgttttttttgtttgtcgttttttattattacgtggtcgttaataattttaagaagtaggaatgaaagtggcgtttttttcgttttaggtaacggttcggggttgtagcgtttagtttttagagttgagtggcgaggtcgcgttagggttagtagggttcgaaatttataattagaaagtgtcgggttaagtatgatatagtttagaa

SEQ ID NO: 14386 - DNA, 776 bp, Artificial Sequence
  chemically treated genomic DNA (Homo sapiens) CpG-island No: 14386
ttctaaactatatcatacttaacccgacactttctaattataaatttcgaaccctactaaccctaacgcgacctcgccactcaactctaaaaactaaacgctacaaccccgaaccgttacctaaaacgaaaaaaacgccactttcattcctacttcttaaaattattaacgaccacgtaataataaaaaacgacaaacaaaaaaaacgacacgcccaacatattaacgaaaataacgaactacacgtccgtaatcatcctacgaaaaaaaaaaaaactaaactacgaactaacgcactcctcgccctcgcaaaaacccgtcctcgccccacaaaccaaccacgaccacgaccacgacgaaactaaacccgtaaaacgacccctacgtacctctaacctaaccaatccgactcgactccgacgccaccaacgaacaaacccgaaatcaaaaacctaaaccgaaacttcgtaacgccaactcaaacccgaacaaaccgcttccgacgaaaaacgcgatcgaaacgacctctctaaccccgccgtctcgtcgactccgcgcgacgcgttacgaccgcgactaaaacgaaacctcgaacgcgactacgataaaaaatccaaccgtaaaaaataaaacgaaactacgaacgcgcgcctaaacccgacaccgcacaactaactacaactaacgtaactcgaaacgcgactaacgaaaccgtaataaccgcctccccgaaaccgaaaaataaactaaaacgaaaatacaacgacgaaaccgac

SEQ ID NO: 14387 - DNA, 776 bp, Artificial Sequence
  chemically treated genomic DNA (Homo sapiens) CpG-island No: 14387
ttttggattgtattatgtttggttcgatattttttgattgtaagtttcgaattttgttagttttggcgcggtttcgttatttagttttggggattgggcgttatagtttcgggtcgttatttggggcggagaaagcgttatttttatttttgttttttgggattgttgacggttacgtagtgatagagaacgataagtaagaagagcgatacgtttagtatgttggcgaagatggcgagttgtacgttcgtgattattttgcggagaagagaggggttgagttgcgggttggcgtatttttcgttttcgtaagaattcgttttcgttttataggttagttacggttacggttacggcggggttgggttcgtggaacggtttttgcgtgtttttgatttgattagttcggttcggtttcgacgttattagcgaataagttcgaagttagagatttggatcggaatttcgtagcgttagtttaggttcgaataagtcgttttcggcggggggcgcggtcgggacggtttttttagtttcgtcgtttcgtcggtttcgcgcggcgcgttacggtcgcggttggggcggggtttcgggcgcggttgcggtgggaggtttagtcgtagggggtggggcggggttgcggacgcgcgtttgggttcggtatcgtatagttggttgtagttggcgtggttcgggacgcggttagcgaagtcgtggtggtcgttttttcggagtcgaggagtgggttggggcgagggtgtagcggcggggtcggt

SEQ ID NO: 14388 - DNA, 776 bp, Artificial Sequence
  chemically treated genomic DNA (Homo sapiens) CpG-island No: 14388
accgaccccgccgctacaccctcgccccaacccactcctcgactccgaaaaaacgaccaccacgacttcgctaaccgcgtcccgaaccacgccaactacaaccaactatacgataccgaacccaaacgcgcgtccgcaaccccgccccaccccctacgactaaacctcccaccgcaaccgcgcccgaaaccccgccccaaccgcgaccgtaacgcgccgcgcgaaaccgacgaaacgacgaaactaaaaaaaccgtcccgaccgcgccccccgccgaaaacgacttattcgaacctaaactaacgctacgaaattccgatccaaatctctaacttcgaacttattcgctaataacgtcgaaaccgaaccgaactaatcaaatcaaaaacacgcaaaaaccgttccacgaacccaaccccgccgtaaccgtaaccgtaactaacctataaaacgaaaacgaattcttacgaaaacgaaaaatacgccaacccgcaactcaacccctctcttctccgcaaaataatcacgaacgtacaactcgccatcttcgccaacatactaaacgtatcgctcttcttacttatcgttctctatcactacgtaaccgtcaacaatcccaaaaaacaaaaataaaaataacgctttctccgccccaaataacgacccgaaactataacgcccaatccccaaaactaaataacgaaaccgcgccaaaactaacaaaattcgaaacttacaatcaaaaaatatcgaaccaaacataatacaatccaaaa

SEQ ID NO: 14389 - DNA, 1360 bp, Artificial Sequence
  chemically treated genomic DNA (Homo sapiens) CpG-island No: 14389
ttgtgacgttttttttacggaattttatacgttcgggattttcgtgacgttttttttacggaatgttatacgttcgggattttcgtgacgtttgttttacggaattttatatattcgggattttcgtgatatttgttttacggaattttatatattcgggattttcgtgacgtttgttttacggaattttatatattcgggattttcgtgacgtttgttttacggaatttcgtacgttcgggattttcgtgacgttttttttacggaattttatatatttaggattttcgtgacgtttgttttatggaattttacgtgttcgggatttttgtgatattttttttatacgtttaggatttttgtgacgttttttttacggaattttatacgttcgagattttcgtgacgttttttttacggaattttatacgttcgggatttttgtgacgtttgttttatggaattttatacgttcgggattttcgtgatgttttttttacggaattttatatattcgggattttcgtgacgtttgttttacggaattttatacgttcgggattttcgtgatatttgttttacggaattttgtacgttcgggattttcgtgacgttttttttacggaattttaaacgtttgggatttttgtgacgtttgttttacggaattttatacgttcgggattttcgtgatgttttttttacggaattttatatattcgggattttcgtgacgtttgttttatggaattttatatattcgggattttcgtgatatttgttttacggaatttcgtacgttcgggattttcgtgacgttttttttacggaattttatacgttcgggatttttgtgacgttttttttacggaattttatacgttcgggattttcgtgacgttttttttacggaattttatacgttcgggatttttgtgacgtttgttttatagaattttatacgttcgggattttcgtgacgttttttttacggaattttatatattcgggattttcgtgacgtttgttttacggaattttatatattcgggatttttatgatatttgttttatagaatcgcgtacgttcgggattttcgtgacgttttttttacggaatttcgtacgttcgggattttcgtgacgttttttttacggaattttatacgttcgggatttttgtgacgttttttttacggaattttagacgttcgggattttcgtgatgttttttttacggaattttatatattcgggacgttcgtgatatttgttttacggaattttatagttttttttaatagaatagcgatttattcgtttagtatttcgggggtaggaagagatgttgttttttttt

SEQ ID NO: 14390 - DNA, 1360 bp, Artificial Sequence
  chemically treated genomic DNA (Homo sapiens) CpG-island No: 14390
aaaaaaaaacaacatctcttcctacccccgaaatactaaacgaataaatcgctattctattaaaaaaaactataaaattccgtaaaacaaatatcacgaacgtcccgaatatataaaattccgtaaaaaaaacatcacgaaaatcccgaacgtctaaaattccgtaaaaaaaacgtcacaaaaatcccgaacgtataaaattccgtaaaaaaaacgtcacgaaaatcccgaacgtacgaaattccgtaaaaaaaacgtcacgaaaatcccgaacgtacgcgattctataaaacaaatatcataaaaatcccgaatatataaaattccgtaaaacaaacgtcacgaaaatcccgaatatataaaattccgtaaaaaaaacgtcacgaaaatcccgaacgtataaaattctataaaacaaacgtcacaaaaatcccgaacgtataaaattccgtaaaaaaaacgtcacgaaaatcccgaacgtataaaattccgtaaaaaaaacgtcacaaaaatcccgaacgtataaaattccgtaaaaaaaacgtcacgaaaatcccgaacgtacgaaattccgtaaaacaaatatcacgaaaatcccgaatatataaaattccataaaacaaacgtcacgaaaatcccgaatatataaaattccgtaaaaaaaacatcacgaaaatcccgaacgtataaaattccgtaaaacaaacgtcacaaaaatcccaaacgtttaaaattccgtaaaaaaaacgtcacgaaaatcccgaacgtacaaaattccgtaaaacaaatatcacgaaaatcccgaacgtataaaattccgtaaaacaaacgtcacgaaaatcccgaatatataaaattccgtaaaaaaaacatcacgaaaatcccgaacgtataaaattccataaaacaaacgtcacaaaaatcccgaacgtataaaattccgtaaaaaaaacgtcacgaaaatctcgaacgtataaaattccgtaaaaaaaacgtcacaaaaatcctaaacgtataaaaaaaatatcacaaaaatcccgaacacgtaaaattccataaaacaaacgtcacgaaaatcctaaatatataaaattccgtaaaaaaaacgtcacgaaaatcccgaacgtacgaaattccgtaaaacaaacgtcacgaaaatcccgaatatataaaattccgtaaaacaaacgtcacgaaaatcccgaatatataaaattccgtaaaacaaatatcacgaaaatcccgaatatataaaattccgtaaaacaaacgtcacgaaaatcccgaacgtataacattccgtaaaaaaaacgtcacgaaaatcccgaacgtataaaattccgtaaaaaaaacgtcacaa

SEQ ID NO: 14391 - DNA, 1360 bp, Artificial Sequence
  chemically treated genomic DNA (Homo sapiens) CpG-island No: 14391
aaagagaagtaatatttttttttgttttcggagtgttgggcggatgagtcgttgttttattgggaggagttgtgagatttcgtgaggtaaatgttacggacgtttcgggtgtgtgagatttcgtgagggaaatattacggagatttcgggcgtttgagatttcgtgagggaaacgttatagaggtttcgggcgtgtgagatttcgtgagggaaacgttacggaagtttcgggcgtgcgagatttcgtgagggaaacgttacggaggtttcgggcgtgcgcgattttgtgaggtaaatgttatggaggtttcgggtgtgtgagatttcgtgaggtaaacgttacggaggtttcgggtgtgtgagatttcgtgagggaaacgttacggaagtttcgggcgtgtgagattttgtgaggtaaacgttatagaggtttcgggcgtgtgagatttcgtgagggaaacgttacggaagtttcgggcgtgtgagatttcgtgagggaaacgttatagaggtttcgggcgtgtgagatttcgtgagggaaacgttacggaagtttcgggcgtgcgagatttcgtgaggtaaatgttacggaggtttcgggtgtgtgagattttatgaggtaaacgttacggaggtttcgggtgtgtgagatttcgtgagggaaatattacggaagtttcgggcgtgtgagatttcgtgaggtaaacgttatagaggttttaggcgtttgagatttcgtgagggaaacgttacggaagtttcgggcgtgtaagatttcgtgaggtaaatgttacggaggtttcgggcgtgtgagatttcgtgaggtaaacgttacgggggtttcgggtgtgtgagatttcgtgagggaaatattacggaagtttcgggcgtgtgagattttatgaggtaaacgttatagaggtttcgggcgtgtgagatttcgtgagggaaacgttacggaagtttcgggcgtgtgagatttcgtgagggaaacgttatagaggttttgggcgtgtgagggaaatgttatagaggtttcgggtacgtgagattttatgagataaacgttacggaggttttgggtgtgtgagatttcgtgagggaaacgttacggaggtttcgggcgtgcgagatttcgtgaggtaaacgttacggaggtttcgggtgtgtgagatttcgtgaagtaaacgttacggaggtttcgggtgtgtgagatttcgtgaggtaaatgttacggaggtttcgggtgtgtgagatttcgtgaggtaaacgttacggaggtttcgggcgtgtgatatttcgtgagggaaacgttacggaggtttcgggcgtgtgagatttcgtgagggaaacgttatag

SEQ ID NO: 14392 - DNA, 1360 bp, Artificial Sequence
  chemically treated genomic DNA (Homo sapiens) CpG-island No: 14392
ctataacgtttccctcacgaaatctcacacgcccgaaacctccgtaacgtttccctcacgaaatatcacacgcccgaaacctccgtaacgtttacctcacgaaatctcacacacccgaaacctccgtaacatttacctcacgaaatctcacacacccgaaacctccgtaacgtttacttcacgaaatctcacacacccgaaacctccgtaacgtttacctcacgaaatctcgcacgcccgaaacctccgtaacgtttccctcacgaaatctcacacacccaaaacctccgtaacgtttatctcataaaatctcacgtacccgaaacctctataacatttccctcacacgcccaaaacctctataacgtttccctcacgaaatctcacacgcccgaaacttccgtaacgtttccctcacgaaatctcacacgcccgaaacctctataacgtttacctcataaaatctcacacgcccgaaacttccgtaatatttccctcacgaaatctcacacacccgaaacccccgtaacgtttacctcacgaaatctcacacgcccgaaacctccgtaacatttacctcacgaaatcttacacgcccgaaacttccgtaacgtttccctcacgaaatctcaaacgcctaaaacctctataacgtttacctcacgaaatctcacacgcccgaaacttccgtaatatttccctcacgaaatctcacacacccgaaacctccgtaacgtttacctcataaaatctcacacacccgaaacctccgtaacatttacctcacgaaatctcgcacgcccgaaacttccgtaacgtttccctcacgaaatctcacacgcccgaaacctctataacgtttccctcacgaaatctcacacgcccgaaacttccgtaacgtttccctcacgaaatctcacacgcccgaaacctctataacgtttacctcacaaaatctcacacgcccgaaacttccgtaacgtttccctcacgaaatctcacacacccgaaacctccgtaacgtttacctcacgaaatctcacacacccgaaacctccataacatttacctcacaaaatcgcgcacgcccgaaacctccgtaacgtttccctcacgaaatctcgcacgcccgaaacttccgtaacgtttccctcacgaaatctcacacgcccgaaacctctataacgtttccctcacgaaatctcaaacgcccgaaatctccgtaatatttccctcacgaaatctcacacacccgaaacgtccgtaacatttacctcacgaaatctcacaactcctcccaataaaacaacgactcatccgcccaacactccgaaaacaaaaaaaaatattacttctcttt

SEQ ID NO: 14393 - DNA, 1601 bp, Artificial Sequence
  chemically treated genomic DNA (Homo sapiens) CpG-island No: 14393
tatttatttcgatttcgcgtgttatcgcgagtgggtttatacgtttatttcgatttcgcgtgttatcgcgagtggatttatacgtttatttcggtttcgcgtgttatcgcgagtggatttatatttttatttcgatttcgcgtgttatcgcgagtggatttatagttttatttcgatttcgcgtgttatcgcgagtggatttatacgtttatttcgattttacgtgttatcgcgagtgggtttatacgtttatttcgatttcgcgtgttatcgcgagtggatttatacgtttatttcgattttgcgtgttatcgcgagtggatttatatttttatttcgatttcgcgtgttatcgcgagtggatttatatatttatttcgattttgcgtgttatcgcgagtggatttatacgtttatttcgatttcgcgtgttatcgcgagtggatttatatttttatttcgatttcgcgtgttatcgcgagtggatttatatatttatttcgatttcgcgtgttatcgtgagtggatttatatttttatttcgatttcgcgtgttatcgcgagtggatttatacgtttatttcggtttcgcgtgttatcgcgaggggatttatatttttatttcgattttacgtgttatcgcgagtggatttatacgtttatttcgatttcgcgtgttatagtaagcgggtttatagttttatttcgattttgcgtgttatcgcgagtggatttatacgtttatttcgagtttcgcgtgttatcgcgtagtgggtttatatttttatttcgatttcgtatgttatcgcgagtgggtttatatttttatttcgatttcgcgtgttattacgagtgggtttatatttttatttcgatttcgcgtgttatcgcgagtgggtttatagttttatttcgatttcgcgtgttatcgcgagtggatttatacgtttatttcgattttgcgtgttattacgagtgggtttatagttttatttcgatttcgcgtgttatcgcgagtggatttatatttttatttcgatttcgcgtgttatcgcgagtggatttatacgtttatttcgatttcgcgtgttatcgcgagtgggtttatagcgttatttcgattttacgtgttatcgcgagtggatttatacgtttatttcgatttcgcgtgttatcgcgagtggatttatagttttatttcgatttcgcgtgttatcgcgagtggatttatacgtttatttcgatttcgcgtgttatcgcgagtgggtttatagttttatttcgatttcgcgtgttatcgcgagtggatttatacgtttatttcgatttcgcgtgttatcgcgagtgggtttatagttttatttcgattttatatgttatcgcgagtgggtttatacgtttatttcgatttcgcgtgttatcgcgagtggatttatacgtttatttcgatttcgcgtgttatcgcgagtgggtttatagttttatttcgatttcgcgtgttatcgcgagtggatttatacgtttatttcgattttatatgtttacgtgtttaatgaatattgtgttagaaggttagtagtaaatatgttatagtattttat

SEQ ID NO: 14394 - DNA, 1601 bp, Artificial Sequence
  chemically treated genomic DNA (Homo sapiens) CpG-island No: 14394
ataaaatactataacatatttactactaaccttctaacacaatattcattaaacacgtaaacatataaaatcgaaataaacgtataaatccactcgcgataacacgcgaaatcgaaataaaactataaacccactcgcgataacacgcgaaatcgaaataaacgtataaatccactcgcgataacacgcgaaatcgaaataaacgtataaacccactcgcgataacatataaaatcgaaataaaactataaacccactcgcgataacacgcgaaatcgaaataaacgtataaatccactcgcgataacacgcgaaatcgaaataaaactataaacccactcgcgataacacgcgaaatcgaaataaacgtataaatccactcgcgataacacgcgaaatcgaaataaaactataaatccactcgcgataacacgcgaaatcgaaataaacgtataaatccactcgcgataacacgtaaaatcgaaataacgctataaacccactcgcgataacacgcgaaatcgaaataaacgtataaatccactcgcgataacacgcgaaatcgaaataaaaatataaatccactcgcgataacacgcgaaatcgaaataaaactataaacccactcgtaataacacgcaaaatcgaaataaacgtataaatccactcgcgataacacgcgaaatcgaaataaaactataaacccactcgcgataacacgcgaaatcgaaataaaaatataaacccactcgtaataacacgcgaaatcgaaataaaaatataaacccactcgcgataacatacgaaatcgaaataaaaatataaacccactacgcgataacacgcgaaactcgaaataaacgtataaatccactcgcgataacacgcaaaatcgaaataaaactataaacccgcttactataacacgcgaaatcgaaataaacgtataaatccactcgcgataacacgtaaaatcgaaataaaaatataaatcccctcgcgataacacgcgaaaccgaaataaacgtataaatccactcgcgataacacgcgaaatcgaaataaaaatataaatccactcacgataacacgcgaaatcgaaataaatatataaatccactcgcgataacacgcgaaatcgaaataaaaatataaatccactcgcgataacacgcgaaatcgaaataaacgtataaatccactcgcgataacacgcaaaatcgaaataaatatataaatccactcgcgataacacgcgaaatcgaaataaaaatataaatccactcgcgataacacgcaaaatcgaaataaacgtataaatccactcgcgataacacgcgaaatcgaaataaacgtataaacccactcgcgataacacgtaaaatcgaaataaacgtataaatccactcgcgataacacgcgaaatcgaaataaaactataaatccactcgcgataacacgcgaaatcgaaataaaaatataaatccactcgcgataacacgcgaaaccgaaataaacgtataaatccactcgcgataacacgcgaaatcgaaataaacgtataaacccactcgcgataacacgcgaaatcgaaataaata

SEQ ID NO: 14395 - DNA, 1601 bp, Artificial Sequence
  chemically treated genomic DNA (Homo sapiens) CpG-island No: 14395
atggggtgttgtggtatgtttattgttgattttttagtatagtgtttattaaatacgtgaatatgtggggtcgggatgagcgtgtgaatttattcgcggtgatacgcggggtcgggatgaggttgtgaatttattcgcggtgatacgcggggtcgggatgagcgtgtgaatttattcgcggtgatacgcggggtcgggatgagcgtgtgaatttattcgcggtgatatgtggggtcgggatgaggttgtgaatttattcgcggtgatacgcgggatcgggatgagcgtgtgaatttattcgcggtgatacgcggggtcgggatgaggttgtgaatttattcgcggtgatacgcggggtcgggatgagcgtgtgagtttattcgcggtgatacgcggggtcgggatgaggttgtgaatttattcgcggtgatacgcggggtcgggatgagcgtgtgagtttattcgcggtgatacgtggggtcgggatgacgttgtgaatttattcgcggtgatacgcggggtcgggatgagcgtgtgagtttattcgcggtgatacgcggggtcgggatgagggtgtgaatttattcgcggtgatacgcggggtcgggatgaggttgtgaatttattcgtggtgatacgtagggtcgggatgagcgtgtgaatttattcgcggtgatacgcggggtcgggatgaggttgtgaatttattcgcggtgatacgcggggtcgggatgagggtgtgaatttattcgtggtgatacgcggggtcgggatgagggtgtgaatttattcgcggtgatatgcggggtcgggatgagggtgtgagtttattgcgcgataatacgcggggttcgggatgagcgtgtgaatttattcgcggtgatacgtagggtcgggatgaggttgtgaattcgtttgttgtgatacgcggggtcgggatgagcgtgtgagtttattcgcggtgatacgtggggtcgggatgagggtgtgagttttttcgcggtgatacgcggggtcgggatgagcgtgtgaatttattcgcggtgatacgcggggtcgggatgagggtgtgagtttatttacggtgatacgcggggtcgggatgagtgtgtgaatttattcgcggtgatacgcggggtcgggatgagggtgtgagtttattcgcggtgatacgcggggtcgggatgagcgtgtgaatttattcgcggtgatacgtagggtcgggatgagtgtgtgaatttattcgcggtgatacgcggggtcgggatgagggtgtgagtttattcgcggtgatacgtagggtcgggatgagcgtgtgagtttattcgcggtgatacgcggggtcgggatgagcgtgtgaatttattcgcggtgatacgtggggtcgggatgagcgtgtgaatttattcgcggtgatacgcggggtcgggatgaggttgtgaatttattcgcggtgatacgcggggtcgggatgagggtgtgagtttattcgcggtgatacgcggggtcgggatgagcgtgtgaatttattcgcggtgatacgcggggtcgggatgagcgtgtgaatttattcgcggtgatacgcggggtcgggatgagtg

SEQ ID NO: 14396 - DNA, 1601 bp, Artificial Sequence
  chemically treated genomic DNA (Homo sapiens) CpG-island No: 14396
cactcatcccgaccccgcgtatcaccgcgaataaattcacacgctcatcccgaccccgcgtatcaccgcgaataaattcacacgctcatcccgaccccgcgtatcaccgcgaataaactcacaccctcatcccgaccccgcgtatcaccgcgaataaattcacaacctcatcccgaccccgcgtatcaccgcgaataaattcacacgctcatcccgaccccacgtatcaccgcgaataaattcacacgctcatcccgaccccgcgtatcaccgcgaataaactcacacgctcatcccgaccctacgtatcaccgcgaataaactcacaccctcatcccgaccccgcgtatcaccgcgaataaattcacacactcatcccgaccctacgtatcaccgcgaataaattcacacgctcatcccgaccccgcgtatcaccgcgaataaactcacaccctcatcccgaccccgcgtatcaccgcgaataaattcacacactcatcccgaccccgcgtatcaccgtaaataaactcacaccctcatcccgaccccgcgtatcaccgcgaataaattcacacgctcatcccgaccccgcgtatcaccgcgaaaaaactcacaccctcatcccgaccccacgtatcaccgcgaataaactcacacgctcatcccgaccccgcgtatcacaacaaacgaattcacaacctcatcccgaccctacgtatcaccgcgaataaattcacacgctcatcccgaaccccgcgtattatcgcgcaataaactcacaccctcatcccgaccccgcatatcaccgcgaataaattcacaccctcatcccgaccccgcgtatcaccacgaataaattcacaccctcatcccgaccccgcgtatcaccgcgaataaattcacaacctcatcccgaccccgcgtatcaccgcgaataaattcacacgctcatcccgaccctacgtatcaccacgaataaattcacaacctcatcccgaccccgcgtatcaccgcgaataaattcacaccctcatcccgaccccgcgtatcaccgcgaataaactcacacgctcatcccgaccccgcgtatcaccgcgaataaattcacaacgtcatcccgaccccacgtatcaccgcgaataaactcacacgctcatcccgaccccgcgtatcaccgcgaataaattcacaacctcatcccgaccccgcgtatcaccgcgaataaactcacacgctcatcccgaccccgcgtatcaccgcgaataaattcacaacctcatcccgaccccgcgtatcaccgcgaataaattcacacgctcatcccgatcccgcgtatcaccgcgaataaattcacaacctcatcccgaccccacatatcaccgcgaataaattcacacgctcatcccgaccccgcgtatcaccgcgaataaattcacacgctcatcccgaccccgcgtatcaccgcgaataaattcacaacctcatcccgaccccgcgtatcaccgcgaataaattcacacgctcatcccgaccccacatattcacgtatttaataaacactatactaaaaaatcaacaataaacataccacaacaccccat

SEQ ID NO: 14397 - DNA, 1567 bp, Artificial Sequence
  chemically treated genomic DNA (Homo sapiens) CpG-island No: 14397
ggttagttcggtgtgcgtggttagttcggttttcgtggttagttcggtgtgcgtggtcgttttagtttttatggtcggttcggtttttatggtcggttcggtttttatggttagttcggtgtgcgtggttagtttggtgtgcgtggttagttcggtgtgcgtggttagttcggtgtgtatggttagttcggttttcgtgttaagtttggtttttgtggttagttcggtttttgtagtcggttcggtgtgtgtggttggttcggtatgtatgtttagttcggttttcgtggtcggttcggtgtgtatggtcggttcggtgtgtatgtttagttcggtgtgcgtggttagtttggtgtgcgtggttagtttggtgtgcgtggttagttcggtgtgcgtggttagttcggtgtgcgtggttagttcggtgtgcgtggttagtttggtgtgcgtggttagttcggtgtgcgtggttagttcggtgtgcgtggttagttcggttttcgtggttagtttggtttttgtggttagttcggtttttgtagtcggttcggtgtgtgtggttggttcggtatgtatgtttagttcggttttcgtggtcggttcggtgtgtatggtcggttcggtgtgtatgtttagttcggtgtgcgtggtcggtttattgtgtatggtcggttcggtatgtatggttagttcggtgtgcgtggttagttcggtgtgtatggtcggtttagttttcgtggttagttcggtgtgcgtggttggttcggtgtgtatggtttgtttagttttcgtggttagttcggttttcgtggttagttcggtgtgtatggtcggttcggtgtgcgtggttagttcggttttcgtggttagttcggttttcgtggtcggttcggtgtgcgtggtcggttcggtgtgcgtggttagttcgttgtacgtgttcggttcggtgtgtgttgttagttcggtttttatggttagtttagtgtgcgtggttagttcggtgtgtatggttagttcggtttttgtggttagttcggtttttatggttagttcggtgtgcgtggttagttcgggtttcgtggttagttcggtgtgtatggtcggtttagtgtgcgtggttagttcggtgtgcgtggtcggtttagtgtgcgtggttagtttggttttcgtggttagttcggtgtgcgtggtcggttcggtgtgcgtggtcggtttaatgtgcgtggtcggtttagttttcgtggtcgtttcggtgtgtatggtcggttcggttttcgtggtcgtttcggtgtgcgtggttggttcggttttcgtggtcggttcggtgtgcgtggtcggttcggtgcgtgtggtcggttcggttttcgtggtcggtttagtgtgcgtggttagttcggtgtgcgtggtcggttcgatattcgtggttggttcggtgtgcgtggtcggtttggtgtgtgtggtcggttcggttttcgtggtcggttcggtgtgtatggttagttagatttttgtggttagtttcgtttagaagaggtgtatatgaggggatatgatgttttgggttgtg

SEQ ID NO: 14398 - DNA, 1567 bp, Artificial Sequence
  chemically treated genomic DNA (Homo sapiens) CpG-island No: 14398
cacaacccaaaacatcatatcccctcatatacacctcttctaaacgaaactaaccacaaaaatctaactaaccatacacaccgaaccgaccacgaaaaccgaaccgaccacacacaccaaaccgaccacgcacaccgaaccaaccacgaatatcgaaccgaccacgcacaccgaactaaccacgcacactaaaccgaccacgaaaaccgaaccgaccacacgcaccgaaccgaccacgcacaccgaaccgaccacgaaaaccgaaccaaccacgcacaccgaaacgaccacgaaaaccgaaccgaccatacacaccgaaacgaccacgaaaactaaaccgaccacgcacattaaaccgaccacgcacaccgaaccgaccacgcacaccgaactaaccacgaaaaccaaactaaccacgcacactaaaccgaccacgcacaccgaactaaccacgcacactaaaccgaccatacacaccgaactaaccacgaaacccgaactaaccacgcacaccgaactaaccataaaaaccgaactaaccacaaaaaccgaactaaccatacacaccgaactaaccacgcacactaaactaaccataaaaaccgaactaacaacacacaccgaaccgaacacgtacaacgaactaaccacgcacaccgaaccgaccacgcacaccgaaccgaccacgaaaaccgaactaaccacgaaaaccgaactaaccacgcacaccgaaccgaccatacacaccgaactaaccacgaaaaccgaactaaccacgaaaactaaacaaaccatacacaccgaaccaaccacgcacaccgaactaaccacgaaaactaaaccgaccatacacaccgaactaaccacgcacaccgaactaaccatacataccgaaccgaccatacacaataaaccgaccacgcacaccgaactaaacatacacaccgaaccgaccatacacaccgaaccgaccacgaaaaccgaactaaacatacataccgaaccaaccacacacaccgaaccgactacaaaaaccgaactaaccacaaaaaccaaactaaccacgaaaaccgaactaaccacgcacaccgaactaaccacgcacaccgaactaaccacgcacaccaaactaaccacgcacaccgaactaaccacgcacaccgaactaaccacgcacaccgaactaaccacgcacaccaaactaaccacgcacaccaaactaaccacgcacaccgaactaaacatacacaccgaaccgaccatacacaccgaaccgaccacgaaaaccgaactaaacatacataccgaaccaaccacacacaccgaaccgactacaaaaaccgaactaaccacaaaaaccaaacttaacacgaaaaccgaactaaccatacacaccgaactaaccacgcacaccgaactaaccacgcacaccaaactaaccacgcacaccgaactaaccataaaaaccgaaccgaccataaaaaccgaaccgaccataaaaactaaaacgaccacgcacaccgaactaaccacgaaaaccgaactaaccacgcacaccgaactaacc

SEQ ID NO: 14399 - DNA, 1567 bp, Artificial Sequence
  chemically treated genomic DNA (Homo sapiens) CpG-island No: 14399
tatagtttaaagtattatgtttttttatatgtattttttttgaacggagttgattatagaaatttagttgattatgtatatcgagtcgattacggaaatcgagtcgattatatatattaagtcgattacgtatatcgagttaattacggatatcgagtcgattacgtatatcgagttgattacgtatattgagtcgattacggaaatcgagtcgattatacgtatcgagtcgattacgtatatcgagtcgattacggaaatcgagttaattacgtatatcgagacgattacggaaatcgagtcgattatgtatatcgagacgattacggaaattgagtcgattacgtatattgagtcgattacgtatatcgagtcgattacgtatatcgagttgattacggaaattaagttgattacgtatattgagtcgattacgtatatcgagttgattacgtatattgagtcgattatgtatatcgagttgattacggaattcgagttgattacgtatatcgagttgattatggaaatcgagttgattatagaaatcgagttgattatgtatatcgagttgattacgtatattgagttgattatggaaatcgagttgataatatatatcgagtcgaatacgtgtagcgagttgattacgtatatcgagtcgattacgtatatcgagtcgattacggaaatcgagttgattacggaaatcgagttgattacgtatatcgagtcgattatgtatatcgagttgattacggaaatcgagttgattacggaaattgagtagattatgtatatcgagttaattacgtatatcgagttgattacggaaattgagtcgattatgtatatcgagttgattacgtatatcgagttgattatgtatatcgagtcgattatgtataatgagtcgattacgtatatcgagttgaatatgtatatcgagtcgattatgtatatcgagtcgattacggaaatcgagttgaatatgtatatcgagttaattatatatatcgagtcgattatagaaatcgagttgattatagaaattaagttgattacggaaatcgagttgattacgtatatcgagttgattacgtatatcgagttgattacgtatattaagttgattacgtatatcgagttgattacgtatatcgagttgattacgtatatcgagttgattacgtatattaagttgattacgtatattaagttgattacgtatatcgagttgaatatgtatatcgagtcgattatgtatatcgagtcgattacggaaatcgagttgaatatgtatatcgagttaattatatatatcgagtcgattatagaaatcgagttgattatagaaattaagtttagtacggaaatcgagttgattatgtatatcgagttgattacgtatatcgagttgattacgtatattaagttgattacgtatatcgagttgattatggaaatcgagtcgattatggaaatcgagtcgattatggaaattgagacgattacgtatatcgagttgattacggaaatcgagttgattacgtatatcgagttgatt

SEQ ID NO: 14400 - DNA, 1567 bp, Artificial Sequence
  chemically treated genomic DNA (Homo sapiens) CpG-island No: 14400
aatcaactcgatatacgtaatcaactcgatttccgtaatcaactcgatatacgtaatcgtctcaatttccataatcgactcgatttccataatcgactcgatttccataatcaactcgatatacgtaatcaacttaatatacgtaatcaactcgatatacgtaatcaactcgatatacataatcaactcgatttccgtactaaacttaatttctataatcaactcgatttctataatcgactcgatatatataattaactcgatatacatattcaactcgatttccgtaatcgactcgatatacataatcgactcgatatacatattcaactcgatatacgtaatcaacttaatatacgtaatcaacttaatatacgtaatcaactcgatatacgtaatcaactcgatatacgtaatcaactcgatatacgtaatcaacttaatatacgtaatcaactcgatatacgtaatcaactcgatatacgtaatcaactcgatttccgtaatcaacttaatttctataatcaactcgatttctataatcgactcgatatatataattaactcgatatacatattcaactcgatttccgtaatcgactcgatatacataatcgactcgatatacatattcaactcgatatacgtaatcgactcattatacataatcgactcgatatacataatcaactcgatatacgtaatcaactcgatatacataatcgactcaatttccgtaatcaactcgatatacgtaattaactcgatatacataatctactcaatttccgtaatcaactcgatttccgtaatcaactcgatatacataatcgactcgatatacgtaatcaactcgatttccgtaatcaactcgatttccgtaatcgactcgatatacgtaatcgactcgatatacgtaatcaactcgctacacgtattcgactcgatatatattatcaactcgatttccataatcaactcaatatacgtaatcaactcgatatacataatcaactcgatttctataatcaactcgatttccataatcaactcgatatacgtaatcaactcgaattccgtaatcaactcgatatacataatcgactcaatatacgtaatcaactcgatatacgtaatcgactcaatatacgtaatcaacttaatttccgtaatcaactcgatatacgtaatcgactcgatatacgtaatcgactcaatatacgtaatcgactcaatttccgtaatcgtctcgatatacataatcgactcgatttccgtaatcgtctcgatatacgtaattaactcgatttccgtaatcgactcgatatacgtaatcgactcgatacgtataatcgactcgatttccgtaatcgactcaatatacgtaatcaactcgatatacgtaatcgactcgatatccgtaattaactcgatatacgtaatcgacttaatatatataatcgactcgatttccgtaatcgactcgatatacataatcaactaaatttctataatcaactccgttcaaaaaaaatacatataaaaaaacataatactttaaactata

SEQ ID NO: 14401 - DNA, 563 bp, Artificial Sequence
  chemically treated genomic DNA (Homo sapiens) CpG-island No: 14401
ttaagttttagtcgtatttgttttcgggttcgttttagttttcgaggggtttgcggaggcgacgttttagttaggagggatgcgcgtttgcgagtttttcggggatttcggagtcgttttattgcggtgtttgtcgttattttttttacgttttagtaattgcgacgcgacggtagatagtgtaggcggtaatcgacggtcgggacgtttaattttaagttttagtaagtttcgcggttacgttttttgattatttcgcgttagtaagatttaaattacggatttcgattgatttcgcgcggcgcgttacgttgttagttttagttaatcggtttcggataagtcggaggggagggagacgtagaggcggataagatggcggcggtagttgtatagggcgggagaagcggtggtagcggaggttgtagtggggttggtggtgtttttaattgcgggatagtaacgtggtcgtagcggtttgttggataaggtgaggagtcggtttttgggaatagttgaattttggggaggtttgggaggcggcgagtttatttttttatttt

SEQ ID NO: 14402 - DNA, 563 bp, Artificial Sequence
  chemically treated genomic DNA (Homo sapiens) CpG-island No: 14402
aaaataaaaaaataaactcgccgcctcccaaacctccccaaaattcaactattcccaaaaaccgactcctcaccttatccaacaaaccgctacgaccacgttactatcccgcaattaaaaacaccaccaaccccactacaacctccgctaccaccgcttctcccgccctatacaactaccgccgccatcttatccgcctctacgtctccctcccctccgacttatccgaaaccgattaactaaaactaacaacgtaacgcgccgcgcgaaatcaatcgaaatccgtaatttaaatcttactaacgcgaaataatcaaaaaacgtaaccgcgaaacttactaaaacttaaaattaaacgtcccgaccgtcgattaccgcctacactatctaccgtcgcgtcgcaattactaaaacgtaaaaaaaataacgacaaacaccgcaataaaacgactccgaaatccccgaaaaactcgcaaacgcgcatccctcctaactaaaacgtcgcctccgcaaacccctcgaaaactaaaacgaacccgaaaacaaatacgactaaaacttaa

SEQ ID NO: 14403 - DNA, 563 bp, Artificial Sequence
  chemically treated genomic DNA (Homo sapiens) CpG-island No: 14403
gggatgggaaggtgggttcgtcgttttttaggtttttttaggatttaattgtttttaagaatcggttttttattttatttaataagtcgttacggttacgttgttgtttcgtagttggaagtattattagttttattatagttttcgttattatcgtttttttcgttttgtatagttgtcgtcgttattttgttcgtttttgcgtttttttttttttcgatttgttcgaagtcgattggttggagttgatagcgtgacgcgtcgcgcggagttaatcgggattcgtagtttgggttttgttggcgcgaggtagttagaggacgtggtcgcggggtttgttgggatttgaggttagacgtttcggtcgtcggttgtcgtttatattgtttgtcgtcgcgtcgtagttattaaggcgtggggaagatagcggtaggtatcgtagtggagcggtttcgagattttcggggggttcgtaggcgcgtattttttttgattgggacgtcgttttcgtagatttttcggaggttgaagcgagttcggaggtaggtgcgattgaaatttag

SEQ ID NO: 14404 - DNA, 563 bp, Artificial Sequence
  chemically treated genomic DNA (Homo sapiens) CpG-island No: 14404
ctaaatttcaatcgcacctacctccgaactcgcttcaacctccgaaaaatctacgaaaacgacgtcccaatcaaaaaaaatacgcgcctacgaaccccccgaaaatctcgaaaccgctccactacgatacctaccgctatcttccccacgccttaataactacgacgcgacgacaaacaatataaacgacaaccgacgaccgaaacgtctaacctcaaatcccaacaaaccccgcgaccacgtcctctaactacctcgcgccaacaaaacccaaactacgaatcccgattaactccgcgcgacgcgtcacgctatcaactccaaccaatcgacttcgaacaaatcgaaaaaaaaaaaaacgcaaaaacgaacaaaataacgacgacaactatacaaaacgaaaaaaacgataataacgaaaactataataaaactaataatacttccaactacgaaacaacaacgtaaccgtaacgacttattaaataaaataaaaaaccgattcttaaaaacaattaaatcctaaaaaaacctaaaaaacgacgaacccaccttcccatccc

SEQ ID NO: 14405 - DNA, 1303 bp, Artificial Sequence
  chemically treated genomic DNA (Homo sapiens) CpG-island No: 14405
cgtcgcgtttttgtttttacgaggggtcgtcgcgtttttgttttcgtcgaggggtcgtcgcgtttttgttttcgtcgaggggtcgtcgcgtttttgttttcgtcgagggggcgtcgcgtttttgtttttacgaggggtcgtcgcgtttttgtttttacgaggggtcgtcgcgtttttgttttcgtcgaggggtcgtcgcgtttttgttttcgtcgagggggcgtcgcgtttttgtttttacgaggggtcgtcgcgtttttgtttttacgaggggtcgtcgcgtttttgttttcgtcgaggggtcgtcgcgtttttgttttcgtcgaggggtcgtcgcgtttttgttttcgtcgagggggcgtcgcgtttttgttttcgtcgagggggcgtcgcgtttttgtttttacgaggggtcgtcgcgtttttgtttttacgaggggtcgtcgcgtttttgtttttacgaggggtcgtcgcgtttttgtttttacgaggggtcgtcgcgtttttgttttcgtcggggggcgtcgcgtttttgtttttacgaggggtcgtcgcgtttttgtttttacgaggggtcgtcgcgtttttgtttttacgagggggcgtcgcgtttttgttttcgtcgaggggtcgtcgcgtttttgtttttacgaggggtcgtcgcgtttttgtttttacgaggggtcgtcgcgtttttgtttttacgaggggtcgtcgcgtttttgtttttacgaggggtcgtcgcgtttttgttttcgtcgagggggcgtcgcgtttttgtttttacgaggggtcgtcgcgtttttgttttcgtcgaggggtcgtcgcgtttttgtttttacgaggggtcgtcgcgtttttgttttcgtcgaggggtcgtcgcgtttttgtttttacgaggggtcgtcgcgtttttgttttcgtcgaggggtcgtcgcgtttttgttttcgtcgaggggggtcgcgtttttgtttttacgaggggtcgtcgcgtttttgttttcgtcgaggggggttcgcgtttttgtttttacgaggggtcgtcgcgtttttgttttcgtcgaggggtcgtcgcgtttttgtttttacgaggggtcgtcgcgtttttgttttcgtcgaggggtcgtcgcgtttttgtttttacgagggggcgtcgcgtttttgtttttacgaggggtcgtcgcgtttttgtttttacgaggggtcgtcgcgtttttgttttcgtcgaggggtcgttacgtttttgtttttattgaggtgttgagattgttatggtttatttatggtgttttttgtttatttt

SEQ ID NO: 14406 - DNA, 1303 bp, Artificial Sequence
  chemically treated genomic DNA (Homo sapiens) CpG-island No: 14406
aaaataaacaaaaaacaccataaataaaccataacaatctcaacacctcaataaaaacaaaaacgtaacgacccctcgacgaaaacaaaaacgcgacgacccctcgtaaaaacaaaaacgcgacgacccctcgtaaaaacaaaaacgcgacgccccctcgtaaaaacaaaaacgcgacgacccctcgacgaaaacaaaaacgcgacgacccctcgtaaaaacaaaaacgcgacgacccctcgacgaaaacaaaaacgcgacgacccctcgtaaaaacaaaaacgcgaacccccctcgacgaaaacaaaaacgcgacgacccctcgtaaaaacaaaaacgcgacccccctcgacgaaaacaaaaacgcgacgacccctcgacgaaaacaaaaacgcgacgacccctcgtaaaaacaaaaacgcgacgacccctcgacgaaaacaaaaacgcgacgacccctcgtaaaaacaaaaacgcgacgacccctcgacgaaaacaaaaacgcgacgacccctcgtaaaaacaaaaacgcgacgccccctcgacgaaaacaaaaacgcgacgacccctcgtaaaaacaaaaacgcgacgacccctcgtaaaaacaaaaacgcgacgacccctcgtaaaaacaaaaacgcgacgacccctcgtaaaaacaaaaacgcgacgacccctcgacgaaaacaaaaacgcgacgccccctcgtaaaaacaaaaacgcgacgacccctcgtaaaaacaaaaacgcgacgacccctcgtaaaaacaaaaacgcgacgccccccgacgaaaacaaaaacgcgacgacccctcgtaaaaacaaaaacgcgacgacccctcgtaaaaacaaaaacgcgacgacccctcgtaaaaacaaaaacgcgacgacccctcgtaaaaacaaaaacgcgacgccccctcgacgaaaacaaaaacgcgacgccccctcgacgaaaacaaaaacgcgacgacccctcgacgaaaacaaaaacgcgacgacccctcgacgaaaacaaaaacgcgacgacccctcgtaaaaacaaaaacgcgacgacccctcgtaaaaacaaaaacgcgacgccccctcgacgaaaacaaaaacgcgacgacccctcgacgaaaacaaaaacgcgacgacccctcgtaaaaacaaaaacgcgacgacccctcgtaaaaacaaaaacgcgacgccccctcgacgaaaacaaaaacgcgacgacccctcgacgaaaacaaaaacgcgacgacccctcgacgaaaacaaaaacgcgacgacccctcgtaaaaacaaaaacgcgacg

SEQ ID NO: 14407 - DNA, 1303 bp, Artificial Sequence
  chemically treated genomic DNA (Homo sapiens) CpG-island No: 14407
agggtgggtaggaagtattatggataaattatggtagttttaatattttagtgaggatagagacgtggcggtttttcggcgaggatagagacgcggcggtttttcgtgaggatagagacgcggcggtttttcgtgaggatagagacgcggcgttttttcgtgaggatagagacgcggcggtttttcggcgaggatagagacgcggcggtttttcgtgaggatagagacgcggcggtttttcggcgaggatagagacgcggcggtttttcgtgaggatagagacgcgggtttttttcggcgaggatagagacgcggcggtttttcgtgaggatagagacgcggtttttttcggcgaggatagagacgcggcggtttttcggcgaggatagagacgcggcggtttttcgtgaggatagagacgcggcggtttttcggcgaggatagagacgcggcggtttttcgtgaggatagagacgcggcggtttttcggcgaggatagagacgcggcggtttttcgtgaggatagagacgcggcgttttttcggcgaggatagagacgcggcggtttttcgtgaggatagagacgcggcggtttttcgtgaggatagaggcgcggcggtttttcgtgaggatagagacgcggcggtttttcgtgaggatagagacgcggcggtttttcggcgaggatagagacgcggcgttttttcgtgaggatagaggcgcggcggtttttcgtgaggatagaggcgcggcggtttttcgtgaggatagagacgcggcgtttttcggcgaggatagagacgcggcggtttttcgtgaggatagagacgcggcggtttttcgtgaggatagagacgcggcggtttttcgtgaggatagagacgcggcggtttttcgtgaggatagagacgcggcgttttttcggcgaggatagagacgcggcgttttttcggcgaggatagagacgcggcggtttttcggcgaggatagagacgcggcggtttttcggcgaggatagaggcgcggcggtttttcgtgaggatagagacgcggcggtttttcgtgaggatagagacgcggcgttttttcggcgaggatagagacgcggcggtttttcggcgaggatagagacgcggcggtttttcgtgaggatagagacgcggcggtttttcgtgaggatagagacgcggcgttttttcggcgaggatagagacgcggcggtttttcggcgaggatagagacgcggcggtttttcggcgaggatagagacgcggcggtttttcgtgaggatagaggcgcggcg

SEQ ID NO: 14408 - DNA, 1303 bp, Artificial Sequence
  chemically treated genomic DNA (Homo sapiens) CpG-island No: 14408
cgccgcgcctctatcctcacgaaaaaccgccgcgtctctatcctcgccgaaaaaccgccgcgtctctatcctcgccgaaaaaccgccgcgtctctatcctcgccgaaaaaacgccgcgtctctatcctcacgaaaaaccgccgcgtctctatcctcacgaaaaaccgccgcgtctctatcctcgccgaaaaaccgccgcgtctctatcctcgccgaaaaaacgccgcgtctctatcctcacgaaaaaccgccgcgtctctatcctcacgaaaaaccgccgcgcctctatcctcgccgaaaaaccgccgcgtctctatcctcgccgaaaaaccgccgcgtctctatcctcgccgaaaaaacgccgcgtctctatcctcgccgaaaaaacgccgcgtctctatcctcacgaaaaaccgccgcgtctctatcctcacgaaaaaccgccgcgtctctatcctcacgaaaaaccgccgcgtctctatcctcacgaaaaaccgccgcgtctctatcctcgccgaaaaacgccgcgtctctatcctcacgaaaaaccgccgcgcctctatcctcacgaaaaaccgccgcgcctctatcctcacgaaaaaacgccgcgtctctatcctcgccgaaaaaccgccgcgtctctatcctcacgaaaaaccgccgcgtctctatcctcacgaaaaaccgccgcgcctctatcctcacgaaaaaccgccgcgtctctatcctcacgaaaaaccgccgcgtctctatcctcgccgaaaaaacgccgcgtctctatcctcacgaaaaaccgccgcgtctctatcctcgccgaaaaaccgccgcgtctctatcctcacgaaaaaccgccgcgtctctatcctcgccgaaaaaccgccgcgtctctatcctcacgaaaaaccgccgcgtctctatcctcgccgaaaaaccgccgcgtctctatcctcgccgaaaaaaaccgcgtctctatcctcacgaaaaaccgccgcgtctctatcctcgccgaaaaaaacccgcgtctctatcctcacgaaaaaccgccgcgtctctatcctcgccgaaaaaccgccgcgtctctatcctcacgaaaaaccgccgcgtctctatcctcgccgaaaaaccgccgcgtctctatcctcacgaaaaaacgccgcgtctctatcctcacgaaaaaccgccgcgtctctatcctcacgaaaaaccgccgcgtctctatcctcgccgaaaaaccgccacgtctctatcctcactaaaatattaaaactaccataatttatccataatacttcctacccaccct

SEQ ID NO: 14409 - DNA, 568 bp, Artificial Sequence
  chemically treated genomic DNA (Homo sapiens) CpG-island No: 14409
ttcgcgcgtttttttcgtttttttagggtttcggcgggagttggggttgcggtcggggttcgggattcgggtaggtttttacgcgttttttcgtcgtcgggatgtttttggagttttagattttgttcgggaaatttgggtgtcgtttcggttggaagtttcggaggtttgcgtcggtttcgcgcgtttcgttttcggggcgggatcgttgtattcggggttttttcgcgtttcgttttcgattttttcgtggttgtttcgtattttatttattacggtttcggttagggtttcgcgggtttggcgcgttttttcgggcgcggcgggtattggtcgtagttttgtcgattttagttttgggttcggttagcgttgcgttttgtttcgtttgggtcgttcgggttttttcgcgcgttgttttttttttgttgcgttttatagggattcgtttttttttagttttgttttttgcgtcgttgtttttttttacgggttttcgttttttttttgcgtttttttagcgcgtggtgttagcgggttttttttttgtttatggggtgatagtttg

SEQ ID NO: 14410 - DNA, 568 bp, Artificial Sequence
  chemically treated genomic DNA (Homo sapiens) CpG-island No: 14410
caaactatcaccccataaacaaaaaaaaaacccgctaacaccacgcgctaaaaaaacgcaaaaaaaaaacgaaaacccgtaaaaaaaaacaacgacgcaaaaaacaaaactaaaaaaaaacgaatccctataaaacgcaacaaaaaaaaaacaacgcgcgaaaaaacccgaacgacccaaacgaaacaaaacgcaacgctaaccgaacccaaaactaaaatcgacaaaactacgaccaatacccgccgcgcccgaaaaaacgcgccaaacccgcgaaaccctaaccgaaaccgtaataaataaaatacgaaacaaccacgaaaaaatcgaaaacgaaacgcgaaaaaaccccgaatacaacgatcccgccccgaaaacgaaacgcgcgaaaccgacgcaaacctccgaaacttccaaccgaaacgacacccaaatttcccgaacaaaatctaaaactccaaaaacatcccgacgacgaaaaaacgcgtaaaaacctacccgaatcccgaaccccgaccgcaaccccaactcccgccgaaaccctaaaaaaacgaaaaaaacgcgcgaa

SEQ ID NO: 14411 - DNA, 568 bp, Artificial Sequence
  chemically treated genomic DNA (Homo sapiens) CpG-island No: 14411
tagattgttattttatgggtagagaaggggttcgttaatattacgcgttgagggggcgtaggggagaggcgggaattcgtggagggaggtagcggcgtagggagtaggattggagggaggcgggtttttgtggagcgtagtaggaggaaggtagcgcgcggggaggttcgggcggtttaggcgaggtaggacgtagcgttgatcggatttagggttgaagtcggtagaattgcggttagtgttcgtcgcgttcgggggagcgcgttaggttcgcggggttttagtcgaggtcgtagtaggtggaatacggggtagttacggaggaatcgggggcgaggcgcggagaggtttcggatgtagcggtttcgtttcgagaacggagcgcgcggaatcggcgtaggttttcgaggtttttagtcgagacggtatttaggtttttcgagtagggtttgaggttttaaggatatttcggcggcgagaaggcgcgtagagatttgttcgggtttcgagtttcgatcgtagttttagttttcgtcgaggttttggaaaggcgggggagacgcgcggg

SEQ ID NO: 14412 - DNA, 568 bp, Artificial Sequence
  chemically treated genomic DNA (Homo sapiens) CpG-island No: 14412
cccgcgcgtctcccccgcctttccaaaacctcgacgaaaactaaaactacgatcgaaactcgaaacccgaacaaatctctacgcgccttctcgccgccgaaatatccttaaaacctcaaaccctactcgaaaaacctaaataccgtctcgactaaaaacctcgaaaacctacgccgattccgcgcgctccgttctcgaaacgaaaccgctacatccgaaacctctccgcgcctcgcccccgattcctccgtaactaccccgtattccacctactacgacctcgactaaaaccccgcgaacctaacgcgctcccccgaacgcgacgaacactaaccgcaattctaccgacttcaaccctaaatccgatcaacgctacgtcctacctcgcctaaaccgcccgaacctccccgcgcgctaccttcctcctactacgctccacaaaaacccgcctccctccaatcctactccctacgccgctacctccctccacgaattcccgcctctcccctacgccccctcaacgcgtaatattaacgaaccccttctctacccataaaataacaatcta

SEQ ID NO: 14413 - DNA, 592 bp, Artificial Sequence
  chemically treated genomic DNA (Homo sapiens) CpG-island No: 14413
gtagtgcgtatgcgcgtcgttggcgtttaggtcgcggtaaggttgaggggaaggtggagggggtatagttcgcggagcgcgtttgtattttagcgttttagggtatttttcggggtttgggcgcgggtattcgggatttatttttttcggcgttcgaggtcgcgggatagtgggggcgtcgggaggaagtttcgtttagttttggtgggcggtggggtcgttggggtttggggcgtcgcgggttcggttcggattgacggcggtggggggcggggatggggtcgtggtgtcgggtcgcgtagaatttttgggattttcgcggcgtttaggttggggtttagggttcggagaacgttttttcgcgtggttatggttttgttagaattaggagcgggagaggcgtttatagatttttgagggtagaatcgtttggtttttaggtcgaaaggagtcggcgaggcgattttcgatttcgggacggagtcgcgggaacgggggattttaggcgttcgttttcgtttagtaggttaatttttttcgcgacgcgtttcgtatcgttttttatattaaatatgtatttatgtgtttagtt

SEQ ID NO: 14414 - DNA, 592 bp, Artificial Sequence
  chemically treated genomic DNA (Homo sapiens) CpG-island No: 14414
aactaaacacataaatacatatttaatataaaaaacgatacgaaacgcgtcgcgaaaaaaattaacctactaaacgaaaacgaacgcctaaaatcccccgttcccgcgactccgtcccgaaatcgaaaatcgcctcgccgactcctttcgacctaaaaaccaaacgattctaccctcaaaaatctataaacgcctctcccgctcctaattctaacaaaaccataaccacgcgaaaaaacgttctccgaaccctaaaccccaacctaaacgccgcgaaaatcccaaaaattctacgcgacccgacaccacgaccccatccccgccccccaccgccgtcaatccgaaccgaacccgcgacgccccaaaccccaacgaccccaccgcccaccaaaactaaacgaaacttcctcccgacgcccccactatcccgcgacctcgaacgccgaaaaaaataaatcccgaatacccgcgcccaaaccccgaaaaataccctaaaacgctaaaatacaaacgcgctccgcgaactataccccctccaccttcccctcaaccttaccgcgacctaaacgccaacgacgcgcatacgcactac

SEQ ID NO: 14415 - DNA, 592 bp, Artificial Sequence
  chemically treated genomic DNA (Homo sapiens) CpG-island No: 14415
gattgaatatatgaatatatatttggtgtaagaagcgatacgaagcgcgtcgcgggaaaaattaatttgttgggcgggagcggacgtttagaatttttcgttttcgcggtttcgtttcgggatcgggggtcgtttcgtcggtttttttcggtttgggaattaggcggttttgtttttaggaatttgtgggcgtttttttcgtttttgattttgataaagttatagttacgcgggaaaacgtttttcgggttttgagttttaatttgggcgtcgcgggggttttaagggttttgcgcggttcggtattacggttttattttcgttttttatcgtcgttagttcgggtcgagttcgcggcgttttaggttttagcggttttatcgtttattagggttgggcgaggttttttttcggcgtttttattatttcgcgatttcgggcgtcggaggggatgagtttcggatgttcgcgtttaggtttcgagggatgttttgaagcgttggggtataggcgcgtttcgcggattgtgttttttttattttttttttagttttgtcgcggtttgagcgttagcggcgcgtatgcgtattgt

SEQ ID NO: 14416 - DNA, 592 bp, Artificial Sequence
  chemically treated genomic DNA (Homo sapiens) CpG-island No: 14416
acaatacgcatacgcgccgctaacgctcaaaccgcgacaaaactaaaaaaaaaataaaaaaaacacaatccgcgaaacgcgcctataccccaacgcttcaaaacatccctcgaaacctaaacgcgaacatccgaaactcatcccctccgacgcccgaaatcgcgaaataataaaaacgccgaaaaaaaacctcgcccaaccctaataaacgataaaaccgctaaaacctaaaacgccgcgaactcgacccgaactaacgacgataaaaaacgaaaataaaaccgtaataccgaaccgcgcaaaacccttaaaacccccgcgacgcccaaattaaaactcaaaacccgaaaaacgttttcccgcgtaactataactttatcaaaatcaaaaacgaaaaaaacgcccacaaattcctaaaaacaaaaccgcctaattcccaaaccgaaaaaaaccgacgaaacgacccccgatcccgaaacgaaaccgcgaaaacgaaaaattctaaacgtccgctcccgcccaacaaattaatttttcccgcgacgcgcttcgtatcgcttcttacaccaaatatatattcatatattcaatc

SEQ ID NO: 14417 - DNA, 505 bp, Artificial Sequence
  chemically treated genomic DNA (Homo sapiens) CpG-island No: 14417
tttcggtttttggaggcggtacgtttggttacgcgttgcgaggcgtttttgtttttttcgtttggtggttttcggtaggggcgggtagggtacgtgagggcgtttgcgtttttttttggtattcggtgttgttggtcgcgcgggttgttcgggaagggaaatttcggaggaagttattgttgttatgttttttgttgtcgttatcggttgagtcgtgttaagaattttttttttcgtataggatttcgtagtttttttttattttcgagtttattcgttagggttattacgggttaggttgtcgtattcgagtcgcggagtgcgcggtggtcgttgcgtattttagttttagggtttttagaattggggagagttttaggatgggtgcgacgtttagaaaatcgacggcgtcgggttcgacgtatttagagttttggtatagttaagtagggatttgggttttattttggttttgataagtagttcgaaaaggtgaatttggtcg

SEQ ID NO: 14418 - DNA, 505 bp, Artificial Sequence
  chemically treated genomic DNA (Homo sapiens) CpG-island No: 14418
cgaccaaattcaccttttcgaactacttatcaaaaccaaaataaaacccaaatccctacttaactataccaaaactctaaatacgtcgaacccgacgccgtcgattttctaaacgtcgcacccatcctaaaactctccccaattctaaaaaccctaaaactaaaatacgcaacgaccaccgcgcactccgcgactcgaatacgacaacctaacccgtaataaccctaacgaataaactcgaaaataaaaaaaaactacgaaatcctatacgaaaaaaaaaattcttaacacgactcaaccgataacgacaacaaaaaacataacaacaataacttcctccgaaatttcccttcccgaacaacccgcgcgaccaacaacaccgaataccaaaaaaaaacgcaaacgccctcacgtaccctacccgcccctaccgaaaaccaccaaacgaaaaaaacaaaaacgcctcgcaacgcgtaaccaaacgtaccgcctccaaaaaccgaaa

SEQ ID NO: 14419 - DNA, 505 bp, Artificial Sequence
  chemically treated genomic DNA (Homo sapiens) CpG-island No: 14419
cggttaagtttattttttcgggttatttattagagttaaggtggaatttaagtttttgtttagttatgttagggttttgggtacgtcgggttcggcgtcgtcggttttttaagcgtcgtatttattttagggttttttttaattttgagaattttggagttgggatgcgtagcggttatcgcgtatttcgcggttcggatgcggtagtttggttcgtagtgattttggcgggtgagttcgagaatggggagaaattgcggggttttatgcggggaaagggatttttggtacggtttagtcgatgacgataataggggatataataataatggtttttttcgggattttttttttcgggtagttcgcgcggttagtagtatcgagtgttaggagggggcgtagacgtttttacgtgttttgttcgtttttgtcgggagttattaggcggggaaggtagaggcgtttcgtagcgcgtggttaaacgtgtcgtttttagaaatcgagg

SEQ ID NO: 14420 - DNA, 505 bp, Artificial Sequence
  chemically treated genomic DNA (Homo sapiens) CpG-island No: 14420
cctcgatttctaaaaacgacacgtttaaccacgcgctacgaaacgcctctaccttccccgcctaataactcccgacaaaaacgaacaaaacacgtaaaaacgtctacgccccctcctaacactcgatactactaaccgcgcgaactacccgaaaaaaaaaatcccgaaaaaaaccattattattatatcccctattatcgtcatcgactaaaccgtaccaaaaatccctttccccgcataaaaccccgcaatttctccccattctcgaactcacccgccaaaatcactacgaaccaaactaccgcatccgaaccgcgaaatacgcgataaccgctacgcatcccaactccaaaattctcaaaattaaaaaaaaccctaaaataaatacgacgcttaaaaaaccgacgacgccgaacccgacgtacccaaaaccctaacataactaaacaaaaacttaaattccaccttaactctaataaataacccgaaaaaataaacttaaccg

SEQ ID NO: 14421 - DNA, 862 bp, Artificial Sequence
  chemically treated genomic DNA (Homo sapiens) CpG-island No: 14421
aacggacggttagtcgatagataagatggtttacgggggtggaggggaggtcggacggtcgtttagaggggtaggtggacggtggcggtaggcgcgggggtcggcggggcgcgttggcggtttttttgttattttcggttcgttgtttcggtcgtttcgcgcgttttattttatatttcgtcgttttcggtttcgtttgtgcggacgcgggaatattttcgttgtttagatcgtatttgtttttttttcgtcgttttttcgtttttcggcggtcgtcgttttttaggggttcgtaagattcgcgcggagttcgtttattttcgggtttcggcgtttatagttggtcgcggttggagggggcgcgcggaggggagtttcggggtttatagagggagttttgaagtttgggtagcgaggcgtttcgttttgggttcggggtaatgcggattttggcgtatcgggcgagcgtttcggttcgatcgagcggtagttgtttttagggaaggtaggcgtcgcgggggtggcggaggggttcggcggtttgggacgtcggtcggaggggagtgagaggtcgttttattcgaggaagttagcgcggtcgggaggaggcgtagtcggttgtgtagggttgggcgtttcgtgtggttagaggggatgaagcggggtgtagcggagcgagggatatcgcggtgcgttggggcggtcgtcggggttcgcgtcgagagagataacgaaatggacggagggtagtagggtggcgttttcggtcgagggttagtttaggtttgttttatttttttaaacgtagatcgttcggtttatcgcggtttcgggggtttattaggcgagtggtttttaagtt

SEQ ID NO: 14422 - DNA, 862 bp, Artificial Sequence
  chemically treated genomic DNA (Homo sapiens) CpG-island No: 14422
aacttaaaaaccactcgcctaataaacccccgaaaccgcgataaaccgaacgatctacgtttaaaaaaataaaacaaacctaaactaaccctcgaccgaaaacgccaccctactaccctccgtccatttcgttatctctctcgacgcgaaccccgacgaccgccccaacgcaccgcgatatccctcgctccgctacaccccgcttcatcccctctaaccacacgaaacgcccaaccctacacaaccgactacgcctcctcccgaccgcgctaacttcctcgaataaaacgacctctcactcccctccgaccgacgtcccaaaccgccgaacccctccgccacccccgcgacgcctaccttccctaaaaacaactaccgctcgatcgaaccgaaacgctcgcccgatacgccaaaatccgcattaccccgaacccaaaacgaaacgcctcgctacccaaacttcaaaactccctctataaaccccgaaactcccctccgcgcgccccctccaaccgcgaccaactataaacgccgaaacccgaaaataaacgaactccgcgcgaatcttacgaacccctaaaaaacgacgaccgccgaaaaacgaaaaaacgacgaaaaaaaaacaaatacgatctaaacaacgaaaatattcccgcgtccgcacaaacgaaaccgaaaacgacgaaatataaaataaaacgcgcgaaacgaccgaaacaacgaaccgaaaataacaaaaaaaccgccaacgcgccccgccgacccccgcgcctaccgccaccgtccacctacccctctaaacgaccgtccgacctcccctccacccccgtaaaccatcttatctatcgactaaccgtccgtt

SEQ ID NO: 14423 - DNA, 862 bp, Artificial Sequence
  chemically treated genomic DNA (Homo sapiens) CpG-island No: 14423
ggtttggagattattcgtttggtgagttttcgggatcgcggtgggtcggacggtttgcgtttgaagaggtaggatagatttgggttggttttcggtcgggggcgttattttattatttttcgtttatttcgttgtttttttcggcgcgggtttcggcggtcgttttagcgtatcgcggtgtttttcgtttcgttgtatttcgttttattttttttggttatacggagcgtttagttttatatagtcggttacgttttttttcggtcgcgttgattttttcgggtgaagcggttttttattttttttcggtcggcgttttaggtcgtcggattttttcgttattttcgcggcgtttgttttttttgggagtagttgtcgttcggtcgggtcggagcgttcgttcggtgcgttaaggttcgtattgtttcgggtttagggcgggacgtttcgttgtttaggttttagagttttttttgtaggtttcggggttttttttcgcgcgttttttttagtcgcggttagttgtgggcgtcggggttcgaggatgggcgggtttcgcgcgggttttgcgggtttttggggagcggcggtcgtcgggaagcgagggggcggcgaggaaggagtaggtgcggtttgggtagcgggggtattttcgcgttcgtatagacggggtcgggggcggcgaggtgtgaaatgaggcgcgcggagcggtcgggatagcgggtcgggggtggtaggagaatcgttaacgcgtttcgtcggttttcgcgtttgtcgttatcgtttatttgtttttttgagcggtcgttcgattttttttttattttcgtgggttattttgtttgtcggttgatcgttcgtt

SEQ ID NO: 14424 - DNA, 862 bp, Artificial Sequence
  chemically treated genomic DNA (Homo sapiens) CpG-island No: 14424
aacgaacgatcaaccgacaaacaaaataacccacgaaaataaaaaaaaaatcgaacgaccgctcaaaaaaacaaataaacgataacgacaaacgcgaaaaccgacgaaacgcgttaacgattctcctaccacccccgacccgctatcccgaccgctccgcgcgcctcatttcacacctcgccgcccccgaccccgtctatacgaacgcgaaaatacccccgctacccaaaccgcacctactccttcctcgccgccccctcgcttcccgacgaccgccgctccccaaaaacccgcaaaacccgcgcgaaacccgcccatcctcgaaccccgacgcccacaactaaccgcgactaaaaaaaacgcgcgaaaaaaaaccccgaaacctacaaaaaaaactctaaaacctaaacaacgaaacgtcccgccctaaacccgaaacaatacgaaccttaacgcaccgaacgaacgctccgacccgaccgaacgacaactactcccaaaaaaaacaaacgccgcgaaaataacgaaaaaatccgacgacctaaaacgccgaccgaaaaaaaataaaaaaccgcttcacccgaaaaaatcaacgcgaccgaaaaaaaacgtaaccgactatataaaactaaacgctccgtataaccaaaaaaaataaaacgaaatacaacgaaacgaaaaacaccgcgatacgctaaaacgaccgccgaaacccgcgccgaaaaaaacaacgaaataaacgaaaaataataaaataacgcccccgaccgaaaaccaacccaaatctatcctacctcttcaaacgcaaaccgtccgacccaccgcgatcccgaaaactcaccaaacgaataatctccaaacc

SEQ ID NO: 14425 - DNA, 1024 bp, Artificial Sequence
  chemically treated genomic DNA (Homo sapiens) CpG-island No: 14425
  unsure (295)
atttgggcggtcgggcgggggagagacgttttttaaagtttaggaattggagggttcgtttaaagagtcggcgtcggtcgcgttgttggggaggatttagagggagattcgttatttattttcgggtcgtatcggttagtttagcgcgattagtattttttcgttacgaatttgagagataagaagcgaaaatagggtgtgtgggggatggagagagttttcgggaggtagttgcgttttcgtacgttttaatttaaagaagagagggaacgaggaagcgaatttattgtttatntacgggcggagcggtttaatttagagcgggtagttgcggacgagttggagaggaaggtgattataattagtgaattagtaatttttgtcgagttttaagtttcgatttagcggtataatgcgttgtgtcggcgtttcggggaaaggaaagaattttaaaggtattgagagcgtagggttaaaagaacgtttttaggttatttggagtttacggcggtgtattcgataagttagttgcggttgttttggtgtgggttgtttatcgtgcgtacgtttcgggcgcgcggtttttttaggcgcggtgttttatttcgggttcgggaagcgagtcgtttggttagtacgtgggttggggaaaagtttgtcgagatcggttgggagcgtttggtagttttggaattttagcggtcgtcgcggggttgcgacgttaggtaggagcgcggagcggcgggtgtagttattgggatgtttcgttttcgttcgagcgcggtttttaggtaaggggtgcgttcgtttatattttttgtttttttaattaattgtgtcgttttttgcgttttttttacggttattttatagttaagattttttttttttcgagttgtagaaggtagaacgttttcgggaggacgaagtgattcgaagggatgtggtaagcgtatttttcgatggagatgtagatcggttgaggtttgggatgtttttataagtaggtggtgttgtggtttaa

SEQ ID NO: 14426 - DNA, 1024 bp, Artificial Sequence
  chemically treated genomic DNA (Homo sapiens) CpG-island No: 14426
  unsure (730)
ttaaaccacaacaccacctacttataaaaacatcccaaacctcaaccgatctacatctccatcgaaaaatacgcttaccacatcccttcgaatcacttcgtcctcccgaaaacgttctaccttctacaactcgaaaaaaaaaaaatcttaactataaaataaccgtaaaaaaaacgcaaaaaacgacacaattaattaaaaaaacaaaaaatataaacgaacgcaccccttacctaaaaaccgcgctcgaacgaaaacgaaacatcccaataactacacccgccgctccgcgctcctacctaacgtcgcaaccccgcgacgaccgctaaaattccaaaactaccaaacgctcccaaccgatctcgacaaacttttccccaacccacgtactaaccaaacgactcgcttcccgaacccgaaataaaacaccgcgcctaaaaaaaccgcgcgcccgaaacgtacgcacgataaacaacccacaccaaaacaaccgcaactaacttatcgaatacaccgccgtaaactccaaataacctaaaaacgttcttttaaccctacgctctcaatacctttaaaattctttcctttccccgaaacgccgacacaacgcattataccgctaaatcgaaacttaaaactcgacaaaaattactaattcactaattataatcaccttcctctccaactcgtccgcaactacccgctctaaattaaaccgctccgcccgtanataaacaataaattcgcttcctcgttccctctcttctttaaattaaaacgtacgaaaacgcaactacctcccgaaaactctctccatcccccacacaccctattttcgcttcttatctctcaaattcgtaacgaaaaaatactaatcgcgctaaactaaccgatacgacccgaaaataaataacgaatctccctctaaatcctccccaacaacgcgaccgacgccgactctttaaacgaaccctccaattcctaaactttaaaaaacgtctctcccccgcccgaccgcccaaat

SEQ ID NO: 14427 - DNA, 1024 bp, Artificial Sequence
  chemically treated genomic DNA (Homo sapiens) CpG-island No: 14427
  unsure (730)
ttggattatagtattatttatttatagaagtattttaagttttagtcggtttgtatttttatcggaaagtgcgtttgttatattttttcggattatttcgttttttcgagagcgttttgttttttatagttcggaaagaaagaaattttagttgtgaagtgatcgtggagaaagcgtaggaagcgatataattggttagggaggtagagagtgtgagcgggcgtattttttgtttggggatcgcgttcgggcggggacggagtattttagtggttgtattcgtcgtttcgcgtttttgtttggcgtcgtaatttcgcggcggtcgttggaattttagagttgttaggcgtttttagtcggtttcggtaaatttttttttagtttacgtgttaattaagcggttcgtttttcgagttcgggatggagtatcgcgtttagggaggtcgcgcgttcgagacgtgcgtacggtaggtaatttatattaaggtagtcgtagttggtttatcgggtatatcgtcgtggattttaaatggtttaagagcgtttttttagttttgcgtttttagtgtttttagagttttttttttttttcggagcgtcggtataacgtattatgtcgttgggtcggagtttagggttcggtagaggttgttaatttattgattataattatttttttttttaattcgttcgtagttgttcgttttggattaagtcgtttcgttcgtgngtaggtagtgggttcgttttttcgtttttttttttttttagattgggacgtgcgaaggcgtagttgtttttcgggggttttttttattttttatatattttgttttcgttttttgttttttaggttcgtggcggagagatgttgatcgcgttgaattgatcggtgcggttcgggggtgagtggcgagtttttttttgagttttttttagtagcgcggtcggcgtcggttttttgggcgaattttttagtttttagattttgagaggcgtttttttttcgttcgatcgtttagat

SEQ ID NO: 14428 - DNA, 1024 bp, Artificial Sequence
  chemically treated genomic DNA (Homo sapiens) CpG-island No: 14428
  unsure (295)
atctaaacgatcgaacgaaaaaaaaacgcctctcaaaatctaaaaactaaaaaattcgcccaaaaaaccgacgccgaccgcgctactaaaaaaaactcaaaaaaaaactcgccactcacccccgaaccgcaccgatcaattcaacgcgatcaacatctctccgccacgaacctaaaaaacaaaaaacgaaaacaaaatatataaaaaataaaaaaaacccccgaaaaacaactacgccttcgcacgtcccaatctaaaaaaaaaaaaaaacgaaaaaacgaacccactacctacncacgaacgaaacgacttaatccaaaacgaacaactacgaacgaattaaaaaaaaaaataattataatcaataaattaacaacctctaccgaaccctaaactccgacccaacgacataatacgttataccgacgctccgaaaaaaaaaaaaaactctaaaaacactaaaaacgcaaaactaaaaaaacgctcttaaaccatttaaaatccacgacgatatacccgataaaccaactacgactaccttaatataaattacctaccgtacgcacgtctcgaacgcgcgacctccctaaacgcgatactccatcccgaactcgaaaaacgaaccgcttaattaacacgtaaactaaaaaaaaatttaccgaaaccgactaaaaacgcctaacaactctaaaattccaacgaccgccgcgaaattacgacgccaaacaaaaacgcgaaacgacgaatacaaccactaaaatactccgtccccgcccgaacgcgatccccaaacaaaaaatacgcccgctcacactctctacctccctaaccaattatatcgcttcctacgctttctccacgatcacttcacaactaaaatttctttctttccgaactataaaaaacaaaacgctctcgaaaaaacgaaataatccgaaaaaatataacaaacgcactttccgataaaaatacaaaccgactaaaacttaaaatacttctataaataaataatactataatccaa

SEQ ID NO: 14429 - DNA, 759 bp, Artificial Sequence
  chemically treated genomic DNA (Homo sapiens) CpG-island No: 14429
cgtcgcggaaaaaatcgtagcggttaattgggcgcggattcgtttttaggcgaaattcgtaaacggtgtgacgtgtgcgcgttgtggttttaaaggcggttttatagcgatttgggcgttcgaggtcgtgttttcgagagttatagggagtttgtcgaggttatttgacggcggtgtcgcgtttatattgtcggttggatttttaggtattcgttatttagcgttttgtttttcggcgtcgggaattacgagttcgttagtatcgcgggatttgtagcgtttttcgtttttcgtaggcggtttagatagtttcgtttcgttttagcgttaggagacgcgtagaattttcggcggttttagttttttttcgttcgcgcgttttcgcgttttcgcgttttcgcgttttcgcgcgtattcgttttttagatttcggttgggtttttaggcgcgtcgcgtagggcgggcggggcgggggcggggttttttggtagtttttgggagttgcgaacgttcgtttcgggttcggcggttaaacgttggtttcgagtttagcgtcgggtttttttgttttcgttagttacgtcgtatgttaagtgggtaagggaatttattgaatcgtgagagcggagacgggatatttgaatattggcgtgcgggttgcggcgttttttttaggaattggaagtcggcggggatcgggttttttgggtttttcggtcgcggaaagggttagggtcgttatttatttttgagtagttt

SEQ ID NO: 14430 - DNA, 759 bp, Artificial Sequence
  chemically treated genomic DNA (Homo sapiens) CpG-island No: 14430
aaactactcaaaaataaataacgaccctaaccctttccgcgaccgaaaaacccaaaaaacccgatccccgccgacttccaattcctaaaaaaaacgccgcaacccgcacgccaatattcaaatatcccgtctccgctctcacgattcaataaattcccttacccacttaacatacgacgtaactaacgaaaacaaaaaaacccgacgctaaactcgaaaccaacgtttaaccgccgaacccgaaacgaacgttcgcaactcccaaaaactaccaaaaaaccccgcccccgccccgcccgccctacgcgacgcgcctaaaaacccaaccgaaatctaaaaaacgaatacgcgcgaaaacgcgaaaacgcgaaaacgcgaaaacgcgcgaacgaaaaaaaactaaaaccgccgaaaattctacgcgtctcctaacgctaaaacgaaacgaaactatctaaaccgcctacgaaaaacgaaaaacgctacaaatcccgcgatactaacgaactcgtaattcccgacgccgaaaaacaaaacgctaaataacgaatacctaaaaatccaaccgacaatataaacgcgacaccgccgtcaaataacctcgacaaactccctataactctcgaaaacacgacctcgaacgcccaaatcgctataaaaccgcctttaaaaccacaacgcgcacacgtcacaccgtttacgaatttcgcctaaaaacgaatccgcgcccaattaaccgctacgattttttccgcgacg

SEQ ID NO: 14431 - DNA, 759 bp, Artificial Sequence
  chemically treated genomic DNA (Homo sapiens) CpG-island No: 14431
aaattgtttaaaagtaagtagcgattttaatttttttcgcggtcgaaagatttagggagttcggttttcgtcggtttttaatttttgaaggaggcgtcgtagttcgtacgttagtgtttaggtgtttcgttttcgtttttacgatttagtgggtttttttgtttatttggtatgcggcgtgattggcgaaaataagaaagttcggcgttaagttcgaagttagcgtttggtcgtcgagttcggggcgggcgttcgtagtttttagaaattgttagaaggtttcgttttcgtttcgttcgttttgcgcgacgcgtttgggagtttagtcgggatttgggaggcgggtacgcgcggggacgcggggacgcggggacgcggggacgcgcgggcggggaggagttggggtcgtcgggggttttgcgcgttttttaacgttagggcgggacggggttgtttgggtcgtttgcgaagggcggagggcgttgtaagtttcgcggtgttggcgggttcgtgattttcggcgtcgggaagtagggcgttgagtagcgggtgtttgagagtttaatcggtagtgtagacgcgatatcgtcgttaggtggtttcggtaggttttttatagttttcgaggatacgatttcgaacgtttaggtcgttgtaagatcgtttttggggttatagcgcgtatacgttatatcgtttgcggatttcgtttaagagcgagttcgcgtttagttggtcgttgcggtttttttcgcgacg

SEQ ID NO: 14432 - DNA, 759 bp, Artificial Sequence
  chemically treated genomic DNA (Homo sapiens) CpG-island No: 14432
cgtcgcgaaaaaaaccgcaacgaccaactaaacgcgaactcgctcttaaacgaaatccgcaaacgatataacgtatacgcgctataaccccaaaaacgatcttacaacgacctaaacgttcgaaatcgtatcctcgaaaactataaaaaacctaccgaaaccacctaacgacgatatcgcgtctacactaccgattaaactctcaaacacccgctactcaacgccctacttcccgacgccgaaaatcacgaacccgccaacaccgcgaaacttacaacgccctccgcccttcgcaaacgacccaaacaaccccgtcccgccctaacgttaaaaaacgcgcaaaacccccgacgaccccaactcctccccgcccgcgcgtccccgcgtccccgcgtccccgcgtccccgcgcgtacccgcctcccaaatcccgactaaactcccaaacgcgtcgcgcaaaacgaacgaaacgaaaacgaaaccttctaacaatttctaaaaactacgaacgcccgccccgaactcgacgaccaaacgctaacttcgaacttaacgccgaactttcttattttcgccaatcacgccgcataccaaataaacaaaaaaacccactaaatcgtaaaaacgaaaacgaaacacctaaacactaacgtacgaactacgacgcctccttcaaaaattaaaaaccgacgaaaaccgaactccctaaatctttcgaccgcgaaaaaaattaaaatcgctacttacttttaaacaattt

SEQ ID NO: 14433 - DNA, 579 bp, Artificial Sequence
  chemically treated genomic DNA (Homo sapiens) CpG-island No: 14433
gatttgtagtttttttacggttattaagtgtatttagggtaggttttttattacgagtttcgtgatgattcgaggtcgggtagcgtttgcgtattgaagtcgagggagcgtgcgggcggtattattggcgggaggagtaaagatggcggcgcgaggttttcgttttttgtttcgggttgaagcgttttgagagaggcggtagcggtaattcgagttttaatagtaatttagtgttggtagttttggtagtagttgtcgaggtcggagtaatggcggaattggagtatttaggagggaagcgggtagagtcggcgcgaatgcggcgggtagagtagtttcggcgttggcggggttcgttgatagagtaggagtttgcggagcgacgaggcgcggggcggtagtcgttgattaggcgcgggagttttagggttcgtttcgaggacggtgttgtttttttggtcgtttgttttagcggggatatcgacgaggtgagaaagtttttggtaagaggtgttgatattaatacggttaacgtggacggtttgatagttttgtattaggtaattttttttttggttt

SEQ ID NO: 14434 - DNA, 579 bp, Artificial Sequence
  chemically treated genomic DNA (Homo sapiens) CpG-island No: 14434
aaaccaaaaaaaaaattacctaatacaaaactatcaaaccgtccacgttaaccgtattaatatcaacacctcttaccaaaaactttctcacctcgtcgatatccccgctaaaacaaacgaccaaaaaaacaacaccgtcctcgaaacgaaccctaaaactcccgcgcctaatcaacgactaccgccccgcgcctcgtcgctccgcaaactcctactctatcaacgaaccccgccaacgccgaaactactctacccgccgcattcgcgccgactctacccgcttccctcctaaatactccaattccgccattactccgacctcgacaactactaccaaaactaccaacactaaattactattaaaactcgaattaccgctaccgcctctctcaaaacgcttcaacccgaaacaaaaaacgaaaacctcgcgccgccatctttactcctcccgccaataataccgcccgcacgctccctcgacttcaatacgcaaacgctacccgacctcgaatcatcacgaaactcgtaataaaaaacctaccctaaatacacttaataaccgtaaaaaaactacaaatc

SEQ ID NO: 14435 - DNA, 579 bp, Artificial Sequence
  chemically treated genomic DNA (Homo sapiens) CpG-island No: 14435
agattaagaaaggagttatttggtgtagggttgttaagtcgtttacgttgatcgtgttgatattagtattttttgttagaagtttttttatttcgtcggtgttttcgttagagtaggcggttagaaagatagtatcgttttcgaagcggattttggggttttcgcgtttggttagcggttgtcgtttcgcgtttcgtcgtttcgtaggtttttgttttgttagcgagtttcgttagcgtcgaagttgttttgttcgtcgtattcgcgtcgattttgttcgttttttttttaggtgttttagtttcgttattgtttcggtttcggtagttgttgttaaaattattaatattaaattattgttggggttcgagttgtcgttgtcgttttttttagagcgttttagttcggagtagagggcggagatttcgcgtcgttatttttatttttttcgttagtagtatcgttcgtacgttttttcggttttaatacgtaggcgttgttcggtttcgggttattacgggattcgtagtaagaggtttgttttaagtgtatttggtggtcgtaagggaattataaatt

SEQ ID NO: 14436 - DNA, 579 bp, Artificial Sequence
  chemically treated genomic DNA (Homo sapiens) CpG-island No: 14436
aatttataattcccttacgaccaccaaatacacttaaaacaaacctcttactacgaatcccgtaataacccgaaaccgaacaacgcctacgtattaaaaccgaaaaaacgtacgaacgatactactaacgaaaaaaataaaaataacgacgcgaaatctccgccctctactccgaactaaaacgctctaaaaaaaacgacaacgacaactcgaaccccaacaataatttaatattaataattttaacaacaactaccgaaaccgaaacaataacgaaactaaaacacctaaaaaaaaaacgaacaaaatcgacgcgaatacgacgaacaaaacaacttcgacgctaacgaaactcgctaacaaaacaaaaacctacgaaacgacgaaacgcgaaacgacaaccgctaaccaaacgcgaaaaccccaaaatccgcttcgaaaacgatactatctttctaaccgcctactctaacgaaaacaccgacgaaataaaaaaacttctaacaaaaaatactaatatcaacacgatcaacgtaaacgacttaacaaccctacaccaaataactcctttcttaatct

SEQ ID NO: 14437 - DNA, 620 bp, Artificial Sequence
  chemically treated genomic DNA (Homo sapiens) CpG-island No: 14437
  unsure (492)
aaacgttcgttgtaggcggttggtggtttagggaagcggcgtcgattgcgtgtaaaataatcgtcgttaacgtaattttatattttttagatttatacgttaaagaacgcgaatttcgcggttttaatttttggttttttcgtttcggcgtttgtagtttcgcggggaaggggcgacgcgagggggcgtagggatagtttcgtatttgggaggttcgagggggcgttcgggagggaggggttgtaaacggcggcgagcgcgcgcggtaatcgttaaacgttcgtttttgtagtttcggtttcgcgtttttattttgtcgacggttgttcggtttcggttcgcggcggcggttttagagtcgaggatcggggtgggttcgcgtttttcgttattggagaaagttcggggtttttttgttgttggtgtcggcggggagcggcggtcggttgcgagtcgtgaggtgttgtaggtagagttggacgtatacgtttntgcgttgtttttcggtcggtagcgttatattgttggcgattaatttattttttaatttgttttttgttaggatcgaggggttttttaggaatttcggtatttcggggatttgcgaagtttttttttta

SEQ ID NO: 14438 - DNA, 620 bp, Artificial Sequence
  chemically treated genomic DNA (Homo sapiens) CpG-island No: 14438
  unsure (129)
taaaaaaaaaacttcgcaaatccccgaaataccgaaattcctaaaaaacccctcgatcctaacaaaaaacaaattaaaaaataaattaatcgccaacaatataacgctaccgaccgaaaaacaacgcanaaacgtatacgtccaactctacctacaacacctcacgactcgcaaccgaccgccgctccccgccgacaccaacaacaaaaaaaccccgaactttctccaataacgaaaaacgcgaacccaccccgatcctcgactctaaaaccgccgccgcgaaccgaaaccgaacaaccgtcgacaaaataaaaacgcgaaaccgaaactacaaaaacgaacgtttaacgattaccgcgcgcgctcgccgccgtttacaacccctccctcccgaacgccccctcgaacctcccaaatacgaaactatccctacgccccctcgcgtcgccccttccccgcgaaactacaaacgccgaaacgaaaaaaccaaaaattaaaaccgcgaaattcgcgttctttaacgtataaatctaaaaaatataaaattacgttaacgacgattattttacacgcaatcgacgccgcttccctaaaccaccaaccgcctacaacgaacgttt

SEQ ID NO: 14439 - DNA, 620 bp, Artificial Sequence
  chemically treated genomic DNA (Homo sapiens) CpG-island No: 14439
  unsure (129)
tggggagggggtttcgtagattttcgagatgtcggagtttttggaagatttttcggttttgataaaagataagttgaagagtgagttggtcgttaataatgtgacgttgtcggtcggggagtagcgtanagacgtgtacgtttagttttatttgtagtattttacggttcgtaatcggtcgtcgtttttcgtcggtattaatagtaagggggtttcggattttttttagtgacgaagagcgcgagtttatttcggttttcggttttggggtcgtcgtcgcgggtcggagtcgagtagtcgtcggtagggtaaggacgcggggtcggggttataaaggcgggcgtttggcggttgtcgcgcgcgttcgtcgtcgtttgtagtttttttttttcgggcgttttttcgggttttttaggtgcggggttgtttttgcgttttttcgcgtcgtttttttttcgcggggttgtaggcgtcggagcggagaggttagaagttggggtcgcggggttcgcgttttttgacgtgtgggtttgggaggtgtggagttgcgttggcggcggttgttttgtacgtagtcgacgtcgtttttttggattattagtcgtttgtagcgggcgttt

SEQ ID NO: 14440 - DNA, 620 bp, Artificial Sequence
  chemically treated genomic DNA (Homo sapiens) CpG-island No: 14440
  unsure (492)
aaacgcccgctacaaacgactaataatccaaaaaaacgacgtcgactacgtacaaaacaaccgccgccaacgcaactccacacctcccaaacccacacgtcaaaaaacgcgaaccccgcgaccccaacttctaacctctccgctccgacgcctacaaccccgcgaaaaaaaaacgacgcgaaaaaacgcaaaaacaaccccgcacctaaaaaacccgaaaaaacgcccgaaaaaaaaaaactacaaacgacgacgaacgcgcgcgacaaccgccaaacgcccgcctttataaccccgaccccgcgtccttaccctaccgacgactactcgactccgacccgcgacgacgaccccaaaaccgaaaaccgaaataaactcgcgctcttcgtcactaaaaaaaatccgaaacccccttactattaataccgacgaaaaacgacgaccgattacgaaccgtaaaatactacaaataaaactaaacgtacacgtctntacgctactccccgaccgacaacgtcacattattaacgaccaactcactcttcaacttatcttttatcaaaaccgaaaaatcttccaaaaactccgacatctcgaaaatctacgaaaccccctcccca

SEQ ID NO: 14441 - DNA, 757 bp, Artificial Sequence
  chemically treated genomic DNA (Homo sapiens) CpG-island No: 14441
tttttttacgtcggtaatgcgtgcgggggtttatcggcggcgttcgagtacgcggtcggttacggcggggggtatttggcgtcgggttattgcgcgtagacgggcgtcgcgttgttttcgtcgttttcggtcgcgtttttgtagtttttatcgttttcggggtacgggtttttagcgtcgttgtataattatttcgtagggggttacgtagcgtagttcggttatggcgcgttttcgtcgtttttaggtttattttcggttttttatttgatttcgggtttgttcgcgtttacgtttttgttcgcgtcggtatcgtttatcgtttatggtttttttacggtcgcgtcgggtgtcgaattcgggttgtcgttgaagcgtaaggtcgtcgacgaggggttcgagggtcgttatcgtaagtacgcgtacgagttcgttaaggttttcgtggttgacggagttttttatttcgtcgcggataacggcgaatgtcggggtaacgggtttcgggttaagtcgttaggagtcgcggaggaggcgtcgggtaagtacggtggcggcgttttttttaaggttttgggttttttcgtttacggttcgtaattggagttttttgaaaagttttcggagcgggtttcggtttttcgtggggggttcgtcgtgtcgtcgggggagatttttaaaggcgtggattttggggttttggagttggtgacgagtaagatggtggattgcgggttttcggtgtagtgggcggatg

SEQ ID NO: 14442 - DNA, 757 bp, Artificial Sequence
  chemically treated genomic DNA (Homo sapiens) CpG-island No: 14442
catccgcccactacaccgaaaacccgcaatccaccatcttactcgtcaccaactccaaaaccccaaaatccacgcctttaaaaatctcccccgacgacacgacgaaccccccacgaaaaaccgaaacccgctccgaaaacttttcaaaaaactccaattacgaaccgtaaacgaaaaaacccaaaaccttaaaaaaaacgccgccaccgtacttacccgacgcctcctccgcgactcctaacgacttaacccgaaacccgttaccccgacattcgccgttatccgcgacgaaataaaaaactccgtcaaccacgaaaaccttaacgaactcgtacgcgtacttacgataacgaccctcgaacccctcgtcgacgaccttacgcttcaacgacaacccgaattcgacacccgacgcgaccgtaaaaaaaccataaacgataaacgataccgacgcgaacaaaaacgtaaacgcgaacaaacccgaaatcaaataaaaaaccgaaaataaacctaaaaacgacgaaaacgcgccataaccgaactacgctacgtaaccccctacgaaataattatacaacgacgctaaaaacccgtaccccgaaaacgataaaaactacaaaaacgcgaccgaaaacgacgaaaacaacgcgacgcccgtctacgcgcaataacccgacgccaaataccccccgccgtaaccgaccgcgtactcgaacgccgccgataaacccccgcacgcattaccgacgtaaaaaaa

SEQ ID NO: 14443 - DNA, 757 bp, Artificial Sequence
  chemically treated genomic DNA (Homo sapiens) CpG-island No: 14443
tattcgtttattgtatcgggggttcgtagtttattattttgttcgttattagttttagggttttagggtttacgtttttgggagtttttttcgacggtacggcgaattttttacgaggagtcggggttcgtttcgggaattttttaaagggttttagttgcgggtcgtagacgggggagtttaggattttgagggggacgtcgttatcgtatttgttcgacgtttttttcgcggtttttggcggtttggttcggaattcgttgtttcgatattcgtcgttgttcgcggcggggtaggaggtttcgttagttacgggggttttggcgggttcgtacgcgtatttgcggtagcggttttcgggtttttcgtcggcggttttgcgttttagcgatagttcggattcggtattcggcgcggtcgtggggaagttataggcggtgggcggtgtcggcgcgggtaggggcgtgggcgcgggtaggttcggggttaggtagggggtcgggggtgggtttgggggcggcgggagcgcgttatagtcgggttgcgttgcgtagttttttgcgggatagttgtatagcggcgttgagggttcgtatttcggaggcggtgggggttgtaggagcgcggtcgggggcggcgggggtagcgcggcgttcgtttgcgcgtagtaattcggcgttaggtatttttcgtcgtagtcggtcgcgtattcgggcgtcgtcgatgggttttcgtacgtattgtcggcgtagagggg

SEQ ID NO: 14444 - DNA, 757 bp, Artificial Sequence
  chemically treated genomic DNA (Homo sapiens) CpG-island No: 14444
cccctctacgccgacaatacgtacgaaaacccatcgacgacgcccgaatacgcgaccgactacgacgaaaaatacctaacgccgaattactacgcgcaaacgaacgccgcgctacccccgccgcccccgaccgcgctcctacaacccccaccgcctccgaaatacgaaccctcaacgccgctatacaactatcccgcaaaaaactacgcaacgcaacccgactataacgcgctcccgccgcccccaaacccacccccgaccccctacctaaccccgaacctacccgcgcccacgcccctacccgcgccgacaccgcccaccgcctataacttccccacgaccgcgccgaataccgaatccgaactatcgctaaaacgcaaaaccgccgacgaaaaacccgaaaaccgctaccgcaaatacgcgtacgaacccgccaaaacccccgtaactaacgaaacctcctaccccgccgcgaacaacgacgaatatcgaaacaacgaattccgaaccaaaccgccaaaaaccgcgaaaaaaacgtcgaacaaatacgataacgacgtccccctcaaaatcctaaactcccccgtctacgacccgcaactaaaaccctttaaaaaattcccgaaacgaaccccgactcctcgtaaaaaattcgccgtaccgtcgaaaaaaactcccaaaaacgtaaaccctaaaaccctaaaactaataacgaacaaaataataaactacgaacccccgatacaataaacgaata

SEQ ID NO: 14445 - DNA, 611 bp, Artificial Sequence
  chemically treated genomic DNA (Homo sapiens) CpG-island No: 14445
gcgcgtttaaggcggcgttggaggaggagttggtgtggtttttgtttaggtcgttcgtttattcgggtagtttgcgttcgtcgcggatcgttttgttttttgggtcgcggggcgcgggtaaagcgttgttgggtcgttgtttcgttacgtagttgggcgttacgttgttgcgtttgcgcggcgcgattttggttgcgttcggcgtcgtcgagggcgcgcgttttttttaggtcgttttcgcggtcgcgcgttgtcgtttatttttcgtattttttattagcgagttagaggcgttgtttttcgttcgggacgacggcgcggcggtagggggcgcgttgtaggtgtcgtttttggtttgtttggacgggggttgcggcgcgggggttgacggcgtgttggttgtgggtattatttcgcggttcgcggttttggacgaggcgattcgtcggcgttttttttttcgtttttacgtggcgttgttcgatagttcggttcgcgggtagattttgtagcgggcgttggtttagtagggttgcgcgtttagtgagcgggaattggcggcgttggtgtagggtacgtagggtttttttgggggcgagttggggtagttg

SEQ ID NO: 14446 - DNA, 611 bp, Artificial Sequence
  chemically treated genomic DNA (Homo sapiens) CpG-island No: 14446
caactaccccaactcgcccccaaaaaaaccctacgtaccctacaccaacgccgccaattcccgctcactaaacgcgcaaccctactaaaccaacgcccgctacaaaatctacccgcgaaccgaactatcgaacaacgccacgtaaaaacgaaaaaaaaaacgccgacgaatcgcctcgtccaaaaccgcgaaccgcgaaataatacccacaaccaacacgccgtcaacccccgcgccgcaacccccgtccaaacaaaccaaaaacgacacctacaacgcgccccctaccgccgcgccgtcgtcccgaacgaaaaacaacgcctctaactcgctaataaaaaatacgaaaaataaacgacaacgcgcgaccgcgaaaacgacctaaaaaaaacgcgcgccctcgacgacgccgaacgcaaccaaaatcgcgccgcgcaaacgcaacaacgtaacgcccaactacgtaacgaaacaacgacccaacaacgctttacccgcgccccgcgacccaaaaaacaaaacgatccgcgacgaacgcaaactacccgaataaacgaacgacctaaacaaaaaccacaccaactcctcctccaacgccgccttaaacgcgc

SEQ ID NO: 14447 - DNA, 611 bp, Artificial Sequence
  chemically treated genomic DNA (Homo sapiens) CpG-island No: 14447
tagttgttttagttcgtttttagagaagttttgcgtgttttgtattagcgtcgttagttttcgtttattgagcgcgtagttttgttgggttagcgttcgttgtaggatttgttcgcgggtcgggttgtcgggtagcgttacgtagaagcggagagagaagcgtcggcgggtcgtttcgtttagagtcgcgggtcgcgaggtggtgtttataattagtacgtcgttagttttcgcgtcgtagttttcgtttaggtaggttaggagcggtatttgtagcgcgttttttgtcgtcgcgtcgtcgtttcgggcggggagtagcgtttttagttcgttgatgaggagtacggagggtgggcggtagcgcgcggtcgcgaaggcggtttggaggaggcgcgcgttttcggcggcgtcgggcgtagttagggtcgcgtcgcgtaggcgtaatagcgtggcgtttagttgcgtggcgaggtagcggtttagtagcgttttgttcgcgtttcgcggtttaaagagtaggacggttcgcggcgggcgtaggttgttcgggtaggcgggcggtttgagtaggggttatattagttttttttttagcgtcgttttgagcgcgt

SEQ ID NO: 14448 - DNA, 611 bp, Artificial Sequence
  chemically treated genomic DNA (Homo sapiens) CpG-island No: 14448
acgcgctcaaaacgacgctaaaaaaaaaactaatataacccctactcaaaccgcccgcctacccgaacaacctacgcccgccgcgaaccgtcctactctttaaaccgcgaaacgcgaacaaaacgctactaaaccgctacctcgccacgcaactaaacgccacgctattacgcctacgcgacgcgaccctaactacgcccgacgccgccgaaaacgcgcgcctcctccaaaccgccttcgcgaccgcgcgctaccgcccaccctccgtactcctcatcaacgaactaaaaacgctactccccgcccgaaacgacgacgcgacgacaaaaaacgcgctacaaataccgctcctaacctacctaaacgaaaactacgacgcgaaaactaacgacgtactaattataaacaccacctcgcgacccgcgactctaaacgaaacgacccgccgacgcttctctctccgcttctacgtaacgctacccgacaacccgacccgcgaacaaatcctacaacgaacgctaacccaacaaaactacgcgctcaataaacgaaaactaacgacgctaatacaaaacacgcaaaacttctctaaaaacgaactaaaacaacta

SEQ ID NO: 14449 - DNA, 966 bp, Artificial Sequence
  chemically treated genomic DNA (Homo sapiens) CpG-island No: 14449
taattcgcgggcgttcggaattttttttttattatcggcgcggagttcgtttacgttttcgttttcgtatagttttcggtttttggttttcgttagggatggcggcgcggattttggcgagcgttttggtttttacgttttgggtttgggcgttggtttcggcgggggtcgtggacgttatgggtttttacgtagtcgttcgtttggtcgagttgttgatttcggaggagtgcggttattttcggtcgtttttagaggcgttcgagttcgacgtggaggtcgagttgtttcggttttttgaagatcggttggcgcggtttgagtcgtttaatattacgtcgttgttttcgagtcggcggcggcggcgagaggcggcggaggattcggcgggtagggtagtcgggtttggagaggtgttcgacggttgtcgggaggcgttggcggtttggttggttttttaggtcgcgtttttgttttgggatcgtttggttcgggttttgcggcgtagcggtcgttcggacgtggttagggagttgggtaagaatttttattagtaggcgacgttgtagttgcgtaagttcgggtagcgttttttgtcgcggttcggcgtcgtcgttcgcgtgttttttgtttcggtttcgcgttttcggcgcgtcgcggttttcgcgtcggattgggacgttttgtagttgatcgtggagcgtttgtcgtagtttttgtacgagcggagttttatgggttgggcggggtcgttggcgttcggtttttttatcggtttcgtgggggcgttgggtatcggggcgttggtcgttttgtttacgttatggattattggcggcgacggcgatcgggcgtcgttcggtagtttcggttcgttcgttatagtgtagggttggtgggaaataaagttgtttttttttaaagagcggcgcgcgttttcgggggtttgggttgtagatgggttag

SEQ ID NO: 14450 - DNA, 966 bp, Artificial Sequence
  chemically treated genomic DNA (Homo sapiens) CpG-island No: 14450
ctaacccatctacaacccaaacccccgaaaacgcgcgccgctctttaaaaaaaaacaactttatttcccaccaaccctacactataacgaacgaaccgaaactaccgaacgacgcccgatcgccgtcgccgccaataatccataacgtaaacaaaacgaccaacgccccgatacccaacgcccccacgaaaccgataaaaaaaccgaacgccaacgaccccgcccaacccataaaactccgctcgtacaaaaactacgacaaacgctccacgatcaactacaaaacgtcccaatccgacgcgaaaaccgcgacgcgccgaaaacgcgaaaccgaaacaaaaaacacgcgaacgacgacgccgaaccgcgacaaaaaacgctacccgaacttacgcaactacaacgtcgcctactaataaaaattcttacccaactccctaaccacgtccgaacgaccgctacgccgcaaaacccgaaccaaacgatcccaaaacaaaaacgcgacctaaaaaaccaaccaaaccgccaacgcctcccgacaaccgtcgaacacctctccaaacccgactaccctacccgccgaatcctccgccgcctctcgccgccgccgccgactcgaaaacaacgacgtaatattaaacgactcaaaccgcgccaaccgatcttcaaaaaaccgaaacaactcgacctccacgtcgaactcgaacgcctctaaaaacgaccgaaaataaccgcactcctccgaaatcaacaactcgaccaaacgaacgactacgtaaaaacccataacgtccacgacccccgccgaaaccaacgcccaaacccaaaacgtaaaaaccaaaacgctcgccaaaatccgcgccgccatccctaacgaaaaccaaaaaccgaaaactatacgaaaacgaaaacgtaaacgaactccgcgccgataataaaaaaaaaattccgaacgcccgcgaatta

SEQ ID NO: 14451 - DNA, 966 bp, Artificial Sequence
  chemically treated genomic DNA (Homo sapiens) CpG-island No: 14451
ttggtttatttgtagtttaggttttcgggggcgcgcgtcgttttttaggaaggagtagttttgttttttattagttttgtattgtggcgagcgggtcggggttgtcgggcgacgttcggtcgtcgtcgtcgttagtgatttatagcgtgagtaggacgattagcgtttcggtgtttagcgtttttacgaagtcggtgaggaggtcgagcgttagcggtttcgtttaatttatggggtttcgttcgtataggggttgcggtaggcgttttacgattagttgtagggcgttttagttcggcgcggggatcgcggcgcgtcgggggcgcggggtcggggtaaagggtacgcgggcggcggcgtcgggtcgcggtaggaagcgttgttcgaatttgcgtagttgtagcgtcgtttgttggtggaggtttttgtttagttttttggttacgttcgggcggtcgttgcgtcgtagggttcgagttaggcggttttaggatagggacgcggtttggggggttagttaggtcgttagcgtttttcggtagtcgtcggatatttttttaggttcggttattttgttcgtcgggtttttcgtcgtttttcgtcgtcgtcgtcggttcggagataacgacgtggtgttgagcggtttaggtcgcgttagtcggtttttagaaagtcgggataattcggtttttacgtcgggttcgggcgtttttaggagcgatcggaaatggtcgtattttttcggggttagtagttcggttagacggacggttgcgtgagggtttatagcgtttacggttttcgtcggagttagcgtttaaatttagagcgtgaggattaaggcgttcgttagagttcgcgtcgttatttttggcgggaattagggatcgaggattgtgcggggacggggacgtggacgggtttcgcgtcggtgatgggggaggggtttcgaacgttcgcggattg

SEQ ID NO: 14452 - DNA, 966 bp, Artificial Sequence
  chemically treated genomic DNA (Homo sapiens) CpG-island No: 14452
caatccgcgaacgttcgaaacccctcccccatcaccgacgcgaaacccgtccacgtccccgtccccgcacaatcctcgatccctaattcccgccaaaaataacgacgcgaactctaacgaacgccttaatcctcacgctctaaatttaaacgctaactccgacgaaaaccgtaaacgctataaaccctcacgcaaccgtccgtctaaccgaactactaaccccgaaaaaatacgaccatttccgatcgctcctaaaaacgcccgaacccgacgtaaaaaccgaattatcccgactttctaaaaaccgactaacgcgacctaaaccgctcaacaccacgtcgttatctccgaaccgacgacgacgacgaaaaacgacgaaaaacccgacgaacaaaataaccgaacctaaaaaaatatccgacgactaccgaaaaacgctaacgacctaactaaccccccaaaccgcgtccctatcctaaaaccgcctaactcgaaccctacgacgcaacgaccgcccgaacgtaaccaaaaaactaaacaaaaacctccaccaacaaacgacgctacaactacgcaaattcgaacaacgcttcctaccgcgacccgacgccgccgcccgcgtaccctttaccccgaccccgcgcccccgacgcgccgcgatccccgcgccgaactaaaacgccctacaactaatcgtaaaacgcctaccgcaacccctatacgaacgaaaccccataaattaaacgaaaccgctaacgctcgacctcctcaccgacttcgtaaaaacgctaaacaccgaaacgctaatcgtcctactcacgctataaatcactaacgacgacgacgaccgaacgtcgcccgacaaccccgacccgctcgccacaatacaaaactaataaaaaacaaaactactccttcctaaaaaacgacgcgcgcccccgaaaacctaaactacaaataaaccaa

SEQ ID NO: 14453 - DNA, 569 bp, Artificial Sequence
  chemically treated genomic DNA (Homo sapiens) CpG-island No: 14453
ggcggtcgtagtagtcgtagtagtagcggttttaggatggtgagcgttattgttttttagtttaggtttgtcgttttcggttcgcgtcgtcgtttcggttttcgggtcggacgcgtttttaggtcgcgtatatttatttaggattcggtcgtgatgtcgaggtacggggtcgcgggcgggtcgggatggggcggggggaggtgatcgttcggttagggtgttcggagttttgttcgtcggttcggggtcggagagggtcgagagggcgggggttgttagtcgcggggtttagttcggcgggggtcggagggtagggtcggcgagagattttagcgggtacgtgggagtcgagggttatttttcggggggagggggcgggtagagtaggggatagtcgttcggtcgtcgacgggtattcgtttcgtagttttttttggtgcgggggttgtagcgaaagcgagtagtcggttcgggggcgtttgttggtttgggggtggggagttaaggtttgcgggttcgggttttagaaggatttagcgttcggagttcgagggtcggttcgtaggttt

SEQ ID NO: 14454 - DNA, 569 bp, Artificial Sequence
  chemically treated genomic DNA (Homo sapiens) CpG-island No: 14454
aaacctacgaaccgaccctcgaactccgaacgctaaatccttctaaaacccgaacccgcaaaccttaactccccacccccaaaccaacaaacgcccccgaaccgactactcgctttcgctacaacccccgcaccaaaaaaaactacgaaacgaatacccgtcgacgaccgaacgactatcccctactctacccgccccctccccccgaaaaataaccctcgactcccacgtacccgctaaaatctctcgccgaccctaccctccgacccccgccgaactaaaccccgcgactaacaacccccgccctctcgaccctctccgaccccgaaccgacgaacaaaactccgaacaccctaaccgaacgatcacctccccccgccccatcccgacccgcccgcgaccccgtacctcgacatcacgaccgaatcctaaataaatatacgcgacctaaaaacgcgtccgacccgaaaaccgaaacgacgacgcgaaccgaaaacgacaaacctaaactaaaaaacaataacgctcaccatcctaaaaccgctactactacgactactacgaccgcc

SEQ ID NO: 14455 - DNA, 569 bp, Artificial Sequence
  chemically treated genomic DNA (Homo sapiens) CpG-island No: 14455
gggtttgcgggtcggttttcgggtttcggacgttggatttttttgggattcgaattcgtaaattttggttttttatttttaggttagtagacgttttcgagtcggttgttcgttttcgttgtagttttcgtattagagggggttgcgagacgggtgttcgtcggcggtcgggcggttattttttgttttgttcgtttttttttttcgagaagtgattttcggtttttacgtattcgttagggtttttcgtcggttttgtttttcgattttcgtcgagttgaatttcgcgattagtagttttcgttttttcggtttttttcggtttcgggtcggcggataaagtttcggatattttgatcgaacggttattttttttcgttttatttcggttcgttcgcggtttcgtatttcggtattacggtcgggttttaggtgagtgtgcgcggtttgggggcgcgttcggttcggggatcggggcggcggcgcgggtcgggggcgataggtttgggttggggggtagtggcgtttattattttggagtcgttgttgttgcggttgttgcggtcgtt

SEQ ID NO: 14456 - DNA, 569 bp, Artificial Sequence
  chemically treated genomic DNA (Homo sapiens) CpG-island No: 14456
aacgaccgcaacaaccgcaacaacaacgactccaaaataataaacgccactaccccccaacccaaacctatcgcccccgacccgcgccgccgccccgatccccgaaccgaacgcgcccccaaaccgcgcacactcacctaaaacccgaccgtaataccgaaatacgaaaccgcgaacgaaccgaaataaaacgaaaaaaaataaccgttcgatcaaaatatccgaaactttatccgccgacccgaaaccgaaaaaaaccgaaaaaacgaaaactactaatcgcgaaattcaactcgacgaaaatcgaaaaacaaaaccgacgaaaaaccctaacgaatacgtaaaaaccgaaaatcacttctcgaaaaaaaaaaacgaacaaaacaaaaaataaccgcccgaccgccgacgaacacccgtctcgcaaccccctctaatacgaaaactacaacgaaaacgaacaaccgactcgaaaacgtctactaacctaaaaataaaaaaccaaaatttacgaattcgaatcccaaaaaaatccaacgtccgaaacccgaaaaccgacccgcaaaccc

SEQ ID NO: 14457 - DNA, 830 bp, Artificial Sequence
  chemically treated genomic DNA (Homo sapiens) CpG-island No: 14457
  unsure (247)
ttatattatatcgtttatatcgttttattttgtttatcgggggtgtatatcggtttttttatattttcgtattcgtattttgggaagcggtttgtatttcgttcgttatagacgtcgcgtttttttatttcggttatatattttttttttttttattagttagtcgtatttttacggcggtttcgtttacggtttttttattttaaaattgtgtgttttaattcgttcgttttttacggtcgtgtgnaatatatatatttttcgtttaatattttttcgatattttatcgtcggtacgttttaatatttagtttatttcgcgcgtttatttgagtattttatatatatagttttttattacgttttcgaatttttttatttcgtacgttttttaattagggttttttattgttttttttttttgttttcgttttcgttttattttatttttttattatataagattttcgatacgttttataaatttttttttattacgtttttattcgaaaatttcgtttttcgatcgttcgaatttcgttttaacgtttttattatattattttaatttttttattttttagcgttttttttatttttatattatttttttttttagcgtttttatatttttcgagttatattttttatttttcgttacgtattatcgttttatatcgtacgtttttattaaacgcgtgttatataattttcgttatatattttcgatcgtttttataatcgtataatagaattttcgtcgtttttatgttttattagtttttgatatttgtacgaacgtaagggtttttattacgtgttcgtttttt

SEQ ID NO: 14458 - DNA, 830 bp, Artificial Sequence
  chemically treated genomic DNA (Homo sapiens) CpG-island No: 14458
  unsure (584)
aaaaaacgaacacgtaataaaaacccttacgttcgtacaaatatcaaaaactaataaaacataaaaacgacgaaaattctattatacgattataaaaacgatcgaaaatatataacgaaaattatataacacgcgtttaataaaaacgtacgatataaaacgataatacgtaacgaaaaataaaaaatataactcgaaaaatataaaaacgctaaaaaaaaaaataatataaaaataaaaaaaacgctaaaaaataaaaaaattaaaataatataataaaaacgttaaaacgaaattcgaacgatcgaaaaacgaaattttcgaataaaaacgtaataaaaaaaaatttataaaacgtatcgaaaatcttatataataaaaaaataaaataaaacgaaaacgaaaacaaaaaaaaaaaacaataaaaaaccctaattaaaaaacgtacgaaataaaaaaattcgaaaacgtaataaaaaactatatatataaaatactcaaataaacgcgcgaaataaactaaatattaaaacgtaccgacgataaaatatcgaaaaaatattaaacgaaaaatatatatattncacacgaccgtaaaaaacgaacgaattaaaacacacaattttaaaataaaaaaaccgtaaacgaaaccgccgtaaaaatacgactaactaataaaaaaaaaaaaaatatataaccgaaataaaaaaacgcgacgtctataacgaacgaaatacaaaccgcttcccaaaatacgaatacgaaaatataaaaaaaccgatatacacccccgataaacaaaataaaacgatataaacgatataatataa

SEQ ID NO: 14459 - DNA, 830 bp, Artificial Sequence
  chemically treated genomic DNA (Homo sapiens) CpG-island No: 14459
  unsure (584)
ggagggcgagtacgtggtagaggtttttgcgttcgtgtagatgttagaggttagtgagatatgagggcggcggggattttgttatgcggttatggggacggtcggagatgtgtggcggaggttgtgtagtacgcgtttggtgaggacgtacgatgtgggacggtggtgcgtggcggggggtgggaggtatggttcgagggatgtggggacgttagagaggagggtagtgtagggatggagagggcgttgggaagtaggagggttggggtggtgtggtgaaagcgttgggacggggttcggacggtcgaggggcggggttttcgggtaggagcgtgatgagagggggtttgtggggcgtatcgggagttttgtatggtgggggagtggggtggggcgggggcgagggtaaggagagggagtagtgggggattttggttggagagcgtacgggatgaggaagttcgaggacgtggtgaggggttgtatatgtggggtgtttaggtaaacgcgcggggtgaattgagtgttgaggcgtgtcgacgatagaatgtcgagagggtgttgggcgaggggtgtgtgtgttntatacggtcgtgagggacgggcgggttagagtatatagttttggagtagagaggtcgtaggcgaagtcgtcgtgggggtgcgattggttgatgggaggagagggggtgtgtggtcgaggtaagaggacgcggcgtttatggcgagcggagtgtaggtcgttttttagggtgcgaatgcgggggtgtggaggggtcgatgtgtattttcgatggataaagtggggcggtgtaaacggtgtgatgtgg

SEQ ID NO: 14460 - DNA, 830 bp, Artificial Sequence
  chemically treated genomic DNA (Homo sapiens) CpG-island No: 14460
  unsure (247)
ccacatcacaccgtttacaccgccccactttatccatcgaaaatacacatcgacccctccacacccccgcattcgcaccctaaaaaacgacctacactccgctcgccataaacgccgcgtcctcttacctcgaccacacaccccctctcctcccatcaaccaatcgcacccccacgacgacttcgcctacgacctctctactccaaaactatatactctaacccgcccgtccctcacgaccgtatanaacacacacacccctcgcccaacaccctctcgacattctatcgtcgacacgcctcaacactcaattcaccccgcgcgtttacctaaacaccccacatatacaacccctcaccacgtcctcgaacttcctcatcccgtacgctctccaaccaaaatcccccactactccctctccttaccctcgcccccgccccaccccactcccccaccatacaaaactcccgatacgccccacaaaccccctctcatcacgctcctacccgaaaaccccgcccctcgaccgtccgaaccccgtcccaacgctttcaccacaccaccccaaccctcctacttcccaacgccctctccatccctacactaccctcctctctaacgtccccacatccctcgaaccatacctcccaccccccgccacgcaccaccgtcccacatcgtacgtcctcaccaaacgcgtactacacaacctccgccacacatctccgaccgtccccataaccgcataacaaaatccccgccgccctcatatctcactaacctctaacatctacacgaacgcaaaaacctctaccacgtactcgccctcc

SEQ ID NO: 14461 - DNA, 734 bp, Artificial Sequence
  chemically treated genomic DNA (Homo sapiens) CpG-island No: 14461
attttttcgttaattttttgttttattcgtttataacgttttataacgggttttattatttcgcgtttttatgaatcgtttttttatttacgttttatatgaacgtttttattataatcgttttttttaatatttttcgtttttacgtattttttattaatatttcggtttatacgtagtttttatatatattcgttcgttttatattcgtaataattgtatacggtatattttacgttcgtttatttacgtatttattaattgtcgcgtataaaagttttttagttattttttttattatacgattttatatatatttttttaattcgtttataaattttttttattatcgtcgaaattttgcgcgaatagttcggttatggtttttatttagttttttaaatttttttttcgtttttttaattttcgttttttttttaaaatcgtttattttttttatttgttttatttttttaaaaaagttaatttttgtttaacgttcggtttcgttttgttattgttttatatcgttttaatcgtttaaatatacgtttaatatcgttttttattttttttttttttttataatttttttttaattttttttacgttcgttttaatgcgtattaattcgttttattttcgttttttatcgtttttaaacgttttttaaatcgttttaattacgtttttttatacgtttaaatttttttttatattttttttttaggttt

SEQ ID NO: 14462 - DNA, 734 bp, Artificial Sequence
  chemically treated genomic DNA (Homo sapiens) CpG-island No: 14462
aaacctaaaaaaaaaatataaaaaaaaatttaaacgtataaaaaaacgtaattaaaacgatttaaaaaacgtttaaaaacgataaaaaacgaaaataaaacgaattaatacgcattaaaacgaacgtaaaaaaaattaaaaaaaaattataaaaaaaaaaaaaaaataaaaaacgatattaaacgtatatttaaacgattaaaacgatataaaacaataacaaaacgaaaccgaacgttaaacaaaaattaacttttttaaaaaaataaaacaaataaaaaaaataaacgattttaaaaaaaaaacgaaaattaaaaaaacgaaaaaaaaatttaaaaaactaaataaaaaccataaccgaactattcgcgcaaaatttcgacgataataaaaaaaatttataaacgaattaaaaaaatatatataaaatcgtataataaaaaaaataactaaaaaacttttatacgcgacaattaataaatacgtaaataaacgaacgtaaaatataccgtatacaattattacgaatataaaacgaacgaatatatataaaaactacgtataaaccgaaatattaataaaaaatacgtaaaaacgaaaaatattaaaaaaaacgattataataaaaacgttcatataaaacgtaaataaaaaaacgattcataaaaacgcgaaataataaaacccgttataaaacgttataaacgaataaaacaaaaaattaacgaaaaaat

SEQ ID NO: 14463 - DNA, 734 bp, Artificial Sequence
  chemically treated genomic DNA (Homo sapiens) CpG-island No: 14463
gggtttgggagggggatgtaagggggagtttgggcgtgtgaggaggcgtagttaaggcggtttgaagggcgtttaagggcggtggagggcggagatggagcgagttagtgcgtattaaggcgggcgtgggggggattgggggagggttatagggaggaggggaggatgggaagcggtgttgagcgtgtgtttgggcggttaaagcggtgtgaggtagtggtagggcgggatcgggcgttgagtaaagattggtttttttggaggggtaaagtagatagggggggtaggcggttttggggggaaggcgggagttaggagggcgaggagggggtttgaggggttgaataggggttatgatcgggttattcgcgtagggtttcggcgatggtgaggggaatttgtaggcgggttggaggggtatgtataaggtcgtgtagtagggagggtgattaggaagtttttatgcgcggtagttggtaggtgcgtgggtaagcggacgtgggatgtgtcgtgtgtagttgttgcgagtatggaacgagcgggtatgtatgagggttgcgtgtggatcggggtgttggtgagggatgcgtgggaacggggggtattggagggggcgattatggtgggagcgtttatgtgaggcgtggataagagagcggtttatagaggcgcgaaatggtggagttcgttatgggacgttgtaagcgggtgggataggggattgacggggaggt

SEQ ID NO: 14464 - DNA, 734 bp, Artificial Sequence
  chemically treated genomic DNA (Homo sapiens) CpG-island No: 14464
acctccccgtcaatcccctatcccacccgcttacaacgtcccataacgaactccaccatttcgcgcctctataaaccgctctcttatccacgcctcacataaacgctcccaccataatcgccccctccaataccccccgttcccacgcatccctcaccaacaccccgatccacacgcaaccctcatacatacccgctcgttccatactcgcaacaactacacacgacacatcccacgtccgcttacccacgcacctaccaactaccgcgcataaaaacttcctaatcaccctccctactacacgaccttatacatacccctccaacccgcctacaaattcccctcaccatcgccgaaaccctacgcgaataacccgatcataacccctattcaacccctcaaaccccctcctcgccctcctaactcccgccttccccccaaaaccgcctaccccccctatctactttacccctccaaaaaaaccaatctttactcaacgcccgatcccgccctaccactacctcacaccgctttaaccgcccaaacacacgctcaacaccgcttcccatcctcccctcctccctataaccctcccccaatcccccccacgcccgccttaatacgcactaactcgctccatctccgccctccaccgcccttaaacgcccttcaaaccgccttaactacgcctcctcacacgcccaaactcccccttacatccccctcccaaaccc

SEQ ID NO: 14465 - DNA, 1084 bp, Artificial Sequence
  chemically treated genomic DNA (Homo sapiens) CpG-island No: 14465
  unsure (662, 964)
cgaaagcgtagagggcggcgaggcgaagtagcgttagcgcgaaagggtcgaggcgaggttagcgtcgacgtagagcggcgacggagtagattagggagagaagggcgagacgagcgatagcgcgttaggggtagggtaggaagtatcgggtcgaagaggcgcgacgtcgggagtaagggggggggaggcgttaggaggggcggggttcggcggaacggaatttaaggtacggttaggtagtttaggtcgggaaggttcgaaaagtcgtttcgtattcggagatagtagcgcgttagcgtcggttcggtcgatagcgagatcggaaatcgacggacggaaggcgtaggacggagagcggagtaggcgagtcggaggcgaaggagcggcggaaatcggatcggcgcgtaagcgggagcgacgtagtaacgggaggcgtacgtacgcgggatgacgcgggagttaagcggagaggaaagcggtcgcgcgacggggtaggtattattcggtatagaatatgaagcgtatcgcgaacgcggtcgataatttacgacgacggttacgcgagacgtagagacggcgcgagcgaacggatttcgatcggagcgcggaaattttacgagttcgttagtacgtattaacgtcgaggatcgaggatcgaagtnttagtttatacgttagtatcgagcgacggggacggcggtcggtcgaataacggagcgagtcgtcgaggtcggacgacggcgatcgaggaaacggtcgcgattagtaagttataaacgtcgtcgcgagtaaagagtcgcgtatcgtcgaaatatatattacggacgcggtagattcgaagcgcgttaagaagcggcgtcggtaagagaggttaagatattatagtcggcggaggtcggtagcgtcgcgttaggtttaaggcgttaagggcgttttaggttaagtcgattagagtaagtttttnagagtcgtaaggtttagatcgcgtaattcgtatttacgagttcggagtcggaggtagcgtagatcgttagttagtatttcggttagtagcgttaatcgttaacgacggtatcgcgtatat

SEQ ID NO: 14466 - DNA, 1084 bp, Artificial Sequence
  chemically treated genomic DNA (Homo sapiens) CpG-island No: 14466
  unsure (121, 423)
atatacgcgataccgtcgttaacgattaacgctactaaccgaaatactaactaacgatctacgctacctccgactccgaactcgtaaatacgaattacgcgatctaaaccttacgactctnaaaaacttactctaatcgacttaacctaaaacgcccttaacgccttaaacctaacgcgacgctaccgacctccgccgactataatatcttaacctctcttaccgacgccgcttcttaacgcgcttcgaatctaccgcgtccgtaatatatatttcgacgatacgcgactctttactcgcgacgacgtttataacttactaatcgcgaccgtttcctcgatcgccgtcgtccgacctcgacgactcgctccgttattcgaccgaccgccgtccccgtcgctcgatactaacgtataaactaanacttcgatcctcgatcctcgacgttaatacgtactaacgaactcgtaaaatttccgcgctccgatcgaaatccgttcgctcgcgccgtctctacgtctcgcgtaaccgtcgtcgtaaattatcgaccgcgttcgcgatacgcttcatattctataccgaataatacctaccccgtcgcgcgaccgctttcctctccgcttaactcccgcgtcatcccgcgtacgtacgcctcccgttactacgtcgctcccgcttacgcgccgatccgatttccgccgctccttcgcctccgactcgcctactccgctctccgtcctacgccttccgtccgtcgatttccgatctcgctatcgaccgaaccgacgctaacgcgctactatctccgaatacgaaacgacttttcgaaccttcccgacctaaactacctaaccgtaccttaaattccgttccgccgaaccccgcccctcctaacgcctcccccccccttactcccgacgtcgcgcctcttcgacccgatacttcctaccctacccctaacgcgctatcgctcgtctcgcccttctctccctaatctactccgtcgccgctctacgtcgacgctaacctcgcctcgaccctttcgcgctaacgctacttcgcctcgccgccctctacgctttcg

SEQ ID NO: 14467 - DNA, 1084 bp, Artificial Sequence
  chemically treated genomic DNA (Homo sapiens) CpG-island No: 14467
  unsure (121, 423)
gtgtgcgcggtgtcgtcgttggcggttagcgttgttggtcggagtgttggttggcggtttgcgttgttttcggtttcgggttcgtgggtgcgggttgcgcggtttgggttttgcggttttngggagtttgttttggtcggtttgatttggggcgtttttggcgttttgggtttggcgcggcgttgtcggttttcgtcggttgtggtgttttggttttttttgtcggcgtcgttttttggcgcgtttcgggtttgtcgcgttcgtggtgtgtgtttcggcggtgcgcggttttttgttcgcggcggcgtttgtggtttgttggtcgcggtcgttttttcggtcgtcgtcgttcggtttcgacggttcgtttcgttgttcggtcggtcgtcgttttcgtcgttcggtgttggcgtgtgggttggngtttcggttttcggttttcggcgttggtgcgtgttggcgggttcgtagggttttcgcgtttcggtcggggttcgttcgttcgcgtcgtttttgcgtttcgcgtggtcgtcgtcgtgggttgtcgatcgcgttcgcgatgcgttttatgttttgtgtcgggtggtgtttgtttcgtcgcgcggtcgttttttttttcgtttggttttcgcgttatttcgcgtgcgtgcgtttttcgttgttgcgtcgttttcgtttgcgcgtcggttcggttttcgtcgttttttcgttttcggttcgtttgtttcgtttttcgttttgcgtttttcgttcgtcggttttcggtttcgttgtcgatcgggtcggcgttggcgcgttgttgttttcgggtgcggggcggtttttcgggttttttcggtttgggttgtttggtcgtgttttgggtttcgtttcgtcgagtttcgttttttttggcgttttttttttttttgttttcggcgtcgcgttttttcggttcggtgttttttgttttgtttttggcgcgttgtcgttcgtttcgtttttttttttttggtttgtttcgtcgtcgttttgcgtcggcgttggtttcgtttcggttttttcgcgttggcgttgtttcgtttcgtcgttttttgcgttttcg

SEQ ID NO: 14468 - DNA, 1084 bp, Artificial Sequence
  chemically treated genomic DNA (Homo sapiens) CpG-island No: 14468
  unsure (662, 964)
cgaaaacgcaaaaaacgacgaaacgaaacaacgccaacgcgaaaaaaccgaaacgaaaccaacgccgacgcaaaacgacgacgaaacaaaccaaaaaaaaaaaaacgaaacgaacgacaacgcgccaaaaacaaaacaaaaaacaccgaaccgaaaaaacgcgacgccgaaaacaaaaaaaaaaaaaacgccaaaaaaaacgaaactcgacgaaacgaaacccaaaacacgaccaaacaacccaaaccgaaaaaacccgaaaaaccgccccgcacccgaaaacaacaacgcgccaacgccgacccgatcgacaacgaaaccgaaaaccgacgaacgaaaaacgcaaaacgaaaaacgaaacaaacgaaccgaaaacgaaaaaacgacgaaaaccgaaccgacgcgcaaacgaaaacgacgcaacaacgaaaaacgcacgcacgcgaaataacgcgaaaaccaaacgaaaaaaaaaacgaccgcgcgacgaaacaaacaccacccgacacaaaacataaaacgcatcgcgaacgcgatcgacaacccacgacgacgaccacgcgaaacgcaaaaacgacgcgaacgaacgaaccccgaccgaaacgcgaaaaccctacgaacccgccaacacgcaccaacgccgaaaaccgaaaaccgaaacnccaacccacacgccaacaccgaacgacgaaaacgacgaccgaccgaacaacgaaacgaaccgtcgaaaccgaacgacgacgaccgaaaaaacgaccgcgaccaacaaaccacaaacgccgccgcgaacaaaaaaccgcgcaccgccgaaacacacaccacgaacgcgacaaacccgaaacgcgccaaaaaacgacgccgacaaaaaaaaccaaaacaccacaaccgacgaaaaccgacaacgccgcgccaaacccaaaacgccaaaaacgccccaaatcaaaccgaccaaaacaaactcccnaaaaccgcaaaacccaaaccgcgcaacccgcacccacgaacccgaaaccgaaaacaacgcaaaccgccaaccaacactccgaccaacaacgctaaccgccaacgacgacaccgcgcacac

SEQ ID NO: 14469 - DNA, 1433 bp, Artificial Sequence
  chemically treated genomic DNA (Homo sapiens) CpG-island No: 14469
  unsure (1429)
tattagtcggtgttgattgtcgtaatggtatcggtgggtgcgtttattattcgtgcggataatttttttcgggatgaggtcggttttttttgttagtttgtcgtgacggttatatcggtaaagatagtgcgcgttacgggcgatacggttattcggttatatgttgagggcgttgttcgggtgtagtttcgggtcgggtaggcggttatttgtcgggtttgtggtatacgggatgcggatatttagattcgttgcggtggtgtgaacgtcggttagtttgtcggtggtgttgtagttgtaatttcgggtttggcgcgggttgttgatgcggatgagttcgtcgttgtcgttttaggtgtaatcgcggttagatagtaggttgtttaggtgttggttttgtaattgttcggtaggggtataagcggtggtgagtttataacggtcgaagttgcgtagcgtttttcggtgtaggcggtcgcgggtgtattttattagcggtgtgtcgtcgagttttatgtttgttaggtaatcgttgtcgtaggttagttattttacggcgggtaggttgttcggtatatagcggttcgttagtttttgcgcgttgtacgtatgtttggttttatgttgttagagtagtgttttcgtttgcgggtgatgtatcgtttgacgtttatcggttagtcggttttttttattatatttgtaatgtatcgttattcggtgtttttcgttgatatggttgatgtttgttagttagttacgttcgttatattgttatcgttttgcggttttattttttacggtgcggtgcgtgaggcggtttgtttcgttatagtgttagtgggtgattagatttttattttcgttgcggataagtttgtcggttaggtcgtggtgataacgttgtgtgcggtcgttaaagtcggttttttgtattagtcggttaagtatatcgtaacggaaggtggtgtggttgtcgtttttattggttaggcggatgattcgttcggtagtatcgtattttatattgcgcgttagttcgttttgcgtggtacggacggtttttttttacgtatcgtattgtgtttcgtttttgttgtcgttcggggtaatgacggcggttaggttatcggcgatgttgtatttatatcgcgttttatggttttgcgtgttttttacggtaattaattgtttagggttgtcgtatgcgcggtattgatttagttttttttcgcggtgtatcgtcgttatttgttcgaagcggttatggttataacgggttatataatcggaatagtttgttaagtttagtaattgatcgtaacggttttacgttatggtttttcggttgtcggtggtattttttcgtgcgtagggtaagttaattgtgtgattattataacggtagcgggtgatatcgtcgttaagngtag

SEQ ID NO: 14470 - DNA, 1433 bp, Artificial Sequence
  chemically treated genomic DNA (Homo sapiens) CpG-island No: 14470
  unsure (5)
ctacncttaacgacgatatcacccgctaccgttataataatcacacaattaacttaccctacgcacgaaaaaataccaccgacaaccgaaaaaccataacgtaaaaccgttacgatcaattactaaacttaacaaactattccgattatataacccgttataaccataaccgcttcgaacaaataacgacgatacaccgcgaaaaaaaactaaatcaataccgcgcatacgacaaccctaaacaattaattaccgtaaaaaacacgcaaaaccataaaacgcgatataaatacaacatcgccgataacctaaccgccgtcattaccccgaacgacaacaaaaacgaaacacaatacgatacgtaaaaaaaaaccgtccgtaccacgcaaaacgaactaacgcgcaatataaaatacgatactaccgaacgaatcatccgcctaaccaataaaaacgacaaccacaccaccttccgttacgatatacttaaccgactaatacaaaaaaccgactttaacgaccgcacacaacgttatcaccacgacctaaccgacaaacttatccgcaacgaaaataaaaatctaatcacccactaacactataacgaaacaaaccgcctcacgcaccgcaccgtaaaaaataaaaccgcaaaacgataacaatataacgaacgtaactaactaacaaacatcaaccatatcaacgaaaaacaccgaataacgatacattacaaatataataaaaaaaaccgactaaccgataaacgtcaaacgatacatcacccgcaaacgaaaacactactctaacaacataaaaccaaacatacgtacaacgcgcaaaaactaacgaaccgctatataccgaacaacctacccgccgtaaaataactaacctacgacaacgattacctaacaaacataaaactcgacgacacaccgctaataaaatacacccgcgaccgcctacaccgaaaaacgctacgcaacttcgaccgttataaactcaccaccgcttatacccctaccgaacaattacaaaaccaacacctaaacaacctactatctaaccgcgattacacctaaaacgacaacgacgaactcatccgcatcaacaacccgcgccaaacccgaaattacaactacaacaccaccgacaaactaaccgacgttcacaccaccgcaacgaatctaaatatccgcatcccgtataccacaaacccgacaaataaccgcctacccgacccgaaactacacccgaacaacgccctcaacatataaccgaataaccgtatcgcccgtaacgcgcactatctttaccgatataaccgtcacgacaaactaacaaaaaaaaccgacctcatcccgaaaaaaattatccgcacgaataataaacgcacccaccgataccattacgacaatcaacaccgactaata

SEQ ID NO: 14471 - DNA, 1433 bp, Artificial Sequence
  chemically treated genomic DNA (Homo sapiens) CpG-island No: 14471
  unsure (5)
ttgtntttgacggcgatattattcgttatcgttatgataattatatagttgatttattttgcgtacgggaagatgttatcggtagtcggaaaattatgacgtggagtcgttacggttagttgttgagtttaatagattgtttcggttatgtaattcgttatgattatgatcgtttcgggtagatgacggcggtgtatcgcgaggaagggttgagttagtatcgcgtatacgatagttttggatagttaattgtcgtgaaagatacgtagggttatgaaacgcggtatgaatataatatcgtcggtgatttgatcgtcgttattgtttcggacggtagtagaaacgggatatagtacgatgcgtggggaaaggtcgttcgtattacgtagggcgggttgacgcgtagtatggaatacgatgttgtcggacgggttattcgtttgattagtgaaaacggtagttatattatttttcgttacgatgtatttgatcggttgatataggaaatcggttttgacggtcgtatatagcgttattattacgatttgatcggtaaatttattcgtagcgaggatgagggtttggttatttattggtattatgacgaagtagatcgttttacgtatcgtatcgtgaagggtgaaatcgtagagcggtggtagtatgacgaacgtggttggttgatagatattagttatattagcgaagggtatcgggtggcggtgtattataggtatgatgagaaaggtcggttgatcggtgagcgttagacggtgtattattcgtagacggaagtattgttttggtagtatgagattagatatgcgtataacgcgtaggggttggcgaatcgttgtatatcggatagtttgttcgtcgtggaatggttgatttacggtagcggttatttggtaggtatgaaattcggcgatatatcgttggtggagtatattcgcgatcgtttgtatcgggaaacgttgcgtagtttcggtcgttatgaatttattatcgtttatatttttgtcgggtagttatagagttagtatttgaatagtttgttgtttgatcgcgattatatttggaacgataacggcgaatttattcgtattagtagttcgcgttagattcggagttatagttatagtattatcggtaggttgatcggcgtttatattatcgtagcgaatttggatattcgtatttcgtatattatagattcggtaggtaatcgtttgttcgattcggagttgtattcggatagcgtttttagtatgtggtcggataatcgtatcgttcgtgacgcgtattatttttatcggtatgatcgttacggtaggttgatagagaaaatcgattttatttcggaaggggttattcgtacggatgatgagcgtatttatcggtattattacgatagttagtatcggttggtg

SEQ ID NO: 14472 - DNA, 1433 bp, Artificial Sequence
  chemically treated genomic DNA (Homo sapiens) CpG-island No: 14472
  unsure (1429)
caccaaccgatactaactatcgtaataataccgataaatacgctcatcatccgtacgaataaccccttccgaaataaaatcgattttctctatcaacctaccgtaacgatcataccgataaaaataatacgcgtcacgaacgatacgattatccgaccacatactaaaaacgctatccgaatacaactccgaatcgaacaaacgattacctaccgaatctataatatacgaaatacgaatatccaaattcgctacgataatataaacgccgatcaacctaccgataatactataactataactccgaatctaacgcgaactactaatacgaataaattcgccgttatcgttccaaatataatcgcgatcaaacaacaaactattcaaatactaactctataactacccgacaaaaatataaacgataataaattcataacgaccgaaactacgcaacgtttcccgatacaaacgatcgcgaatatactccaccaacgatatatcgccgaatttcatacctaccaaataaccgctaccgtaaatcaaccattccacgacgaacaaactatccgatatacaacgattcgccaacccctacgcgttatacgcatatctaatctcatactaccaaaacaatacttccgtctacgaataatacaccgtctaacgctcaccgatcaaccgacctttctcatcatacctataatacaccgccacccgatacccttcgctaatataactaatatctatcaaccaaccacgttcgtcatactaccaccgctctacgatttcacccttcacgatacgatacgtaaaacgatctacttcgtcataataccaataaataaccaaaccctcatcctcgctacgaataaatttaccgatcaaatcgtaataataacgctatatacgaccgtcaaaaccgatttcctatatcaaccgatcaaatacatcgtaacgaaaaataatataactaccgttttcactaatcaaacgaataacccgtccgacaacatcgtattccatactacgcgtcaacccgccctacgtaatacgaacgacctttccccacgcatcgtactatatcccgtttctactaccgtccgaaacaataacgacgatcaaatcaccgacgatattatattcataccgcgtttcataaccctacgtatctttcacgacaattaactatccaaaactatcgtatacgcgatactaactcaacccttcctcgcgatacaccgccgtcatctacccgaaacgatcataatcataacgaattacataaccgaaacaatctattaaactcaacaactaaccgtaacgactccacgtcataattttccgactaccgataacatcttcccgtacgcaaaataaatcaactatataattatcataacgataacgaataatatcgccgtcaaanacaa

SEQ ID NO: 14473 - DNA, 675 bp, Artificial Sequence
  chemically treated genomic DNA (Homo sapiens) CpG-island No: 14473
  unsure (615)
tcgttaacgttgcgggttggtagggcgaaattagtcgtgaataatttaatgaattgatcgcgttattggtaaaacgaattttattggtttgtcgtcgcgttttgaaagacgcgggtgtagaagttgatgaagtgttggaagtggtgatggtgggcggttttattcgcgtgtcgttggtgcgtgaacgggtaggcgaatttttcggtcgtttatcgttgatttttatcgattcggataaagtcgtcgttattggcgcggcgatttaggcggatattttggtgggtaataagttagatagcgaaatgttgttgtttgatgtgattttattgtcgttgggtttcgaaacgatgggcggtttggtggagaaagtgatttcgcgtaatattattatttcggtggttcgcgtttaggattttattatttttaaagatggttagacggcgatgtttatttatgtaatgtagggtgagcgcgaattggtgtaggattgtcgtttattggcgcgttttgtttgcgtggtatttcggcgttatcggttggcggtgcgtatattcgcgtgacgttttaggtcgatgtcgacggttttttgagcgtgacgcgaatgagaatttattngcgtgagcgtttatttaggttaaatcgtttacgtttgacgatagcgaatcgttcgatgat

SEQ ID NO: 14474 - DNA, 675 bp, Artificial Sequence
  chemically treated genomic DNA (Homo sapiens) CpG-island No: 14474
  unsure (61)
atcatcgaacgattcgctatcgtcaaacgtaaacgatttaacctaaataaacgctcacgcnaataaattctcattcgcgtcacgctcaaaaaaccgtcgacatcgacctaaaacgtcacgcgaatatacgcaccgccaaccgataacgccgaaataccacgcaaacaaaacgcgccaataaacgacaatcctacaccaattcgcgctcaccctacattacataaataaacatcgccgtctaaccatctttaaaaataataaaatcctaaacgcgaaccaccgaaataataatattacgcgaaatcactttctccaccaaaccgcccatcgtttcgaaacccaacgacaataaaatcacatcaaacaacaacatttcgctatctaacttattacccaccaaaatatccgcctaaatcgccgcgccaataacgacgactttatccgaatcgataaaaatcaacgataaacgaccgaaaaattcgcctacccgttcacgcaccaacgacacgcgaataaaaccgcccaccatcaccacttccaacacttcatcaacttctacacccgcgtctttcaaaacgcgacgacaaaccaataaaattcgttttaccaataacgcgatcaattcattaaattattcacgactaatttcgccctaccaacccgcaacgttaacga

SEQ ID NO: 14475 - DNA, 675 bp, Artificial Sequence
  chemically treated genomic DNA (Homo sapiens) CpG-island No: 14475
  unsure (61)
attatcgagcgattcgttatcgttagacgtagacggtttgatttgaatagacgtttacgtnagtggatttttattcgcgttacgtttaaaagatcgtcggtatcgatttggaacgttacgcgaatatgcgtatcgttagtcggtagcgtcggaatattacgtaggtaaaacgcgttagtgagcggtagttttgtattagttcgcgtttattttgtattatatggatagatatcgtcgtttgattatttttaaaggtggtgaaattttgagcgcgggttatcggaatagtggtattacgcggaattattttttttattaggtcgtttatcgtttcgaggtttagcgatagtgggattatattaagtaatagtatttcgttgtttggtttgttatttattagaatattcgtttgaatcgtcgcgttaatagcgacgattttattcgggtcgatggaagttagcggtggacgatcgaaaaattcgtttattcgtttacgtattagcggtacgcgagtagaatcgtttattattattatttttagtattttattagtttttatattcgcgttttttagagcgcgacgataagttagtaaggttcgttttattagtggcgcgattagtttattgaattgtttacggttgatttcgttttgttagttcgtaacgttaacgg

SEQ ID NO: 14476 - DNA, 675 bp, Artificial Sequence
  chemically treated genomic DNA (Homo sapiens) CpG-island No: 14476
  unsure (615)
ccgttaacgttacgaactaacaaaacgaaatcaaccgtaaacaattcaataaactaatcgcgccactaataaaacgaaccttactaacttatcgtcgcgctctaaaaaacgcgaatataaaaactaataaaatactaaaaataataataataaacgattctactcgcgtaccgctaatacgtaaacgaataaacgaatttttcgatcgtccaccgctaacttccatcgacccgaataaaatcgtcgctattaacgcgacgattcaaacgaatattctaataaataacaaaccaaacaacgaaatactattacttaatataatcccactatcgctaaacctcgaaacgataaacgacctaataaaaaaaataattccgcgtaataccactattccgataacccgcgctcaaaatttcaccacctttaaaaataatcaaacgacgatatctatccatataatacaaaataaacgcgaactaatacaaaactaccgctcactaacgcgttttacctacgtaatattccgacgctaccgactaacgatacgcatattcgcgtaacgttccaaatcgataccgacgatcttttaaacgtaacgcgaataaaaatccactnacgtaaacgtctattcaaatcaaaccgtctacgtctaacgataacgaatcgctcgataat

SEQ ID NO: 14477 - DNA, 713 bp, Artificial Sequence
  chemically treated genomic DNA (Homo sapiens) CpG-island No: 14477
gttttcgcgagcgaggtcggagaaggcgcggcggtttttggtttggttatttcgtttttgtcgtagttgaatcgtcgattacgagtttttgtatcgcgtatatatttcgcgcgtttcgttttcggtttcgttcggttatcgtcgttttttagaacgtcgcgttcgtgattcggaagagtattttttttagtaattgcgggattgcggcggcgtcggtttcggggagaaacggtgaggtttttattcgtttgttttttgtatcgtttagtgttgtacgatttttcgggatcgattcggggtttggtttttggggggtttcgcggcgtttcgttcggtatttgtggtggcggttcgggacgagcgtttttcgtttttggcgttgtttttcggtttacgcgttttttttgtttcgtattttttttaatgtttttagttttttatttttcgtttttgatcgattcggttttttaggtacgtttatagcgtcggggtttttgtagtttaggatggcgtgaggggagcgagattagaattagagtttgttgttgtagagaggacgtttttcgaggttcgggttatttgtggacgcgttttttagggttttgatcgagatgtttaggattggtagggatggggagtttcgggaattttgaagggtagtcgtttaattataatatgtttttgacgtttgcgttttttatagtgatatattt

SEQ ID NO: 14478 - DNA, 713 bp, Artificial Sequence
  chemically treated genomic DNA (Homo sapiens) CpG-island No: 14478
aaatatatcactataaaaaacgcaaacgtcaaaaacatattataattaaacgactacccttcaaaattcccgaaactccccatccctaccaatcctaaacatctcgatcaaaaccctaaaaaacgcgtccacaaataacccgaacctcgaaaaacgtcctctctacaacaacaaactctaattctaatctcgctcccctcacgccatcctaaactacaaaaaccccgacgctataaacgtacctaaaaaaccgaatcgatcaaaaacgaaaaataaaaaactaaaaacattaaaaaaaatacgaaacaaaaaaaacgcgtaaaccgaaaaacaacgccaaaaacgaaaaacgctcgtcccgaaccgccaccacaaataccgaacgaaacgccgcgaaaccccccaaaaaccaaaccccgaatcgatcccgaaaaatcgtacaacactaaacgatacaaaaaacaaacgaataaaaacctcaccgtttctccccgaaaccgacgccgccgcaatcccgcaattactaaaaaaaatactcttccgaatcacgaacgcgacgttctaaaaaacgacgataaccgaacgaaaccgaaaacgaaacgcgcgaaatatatacgcgatacaaaaactcgtaatcgacgattcaactacgacaaaaacgaaataaccaaaccaaaaaccgccgcgccttctccgacctcgctcgcgaaaac

SEQ ID NO: 14479 - DNA, 713 bp, Artificial Sequence
  chemically treated genomic DNA (Homo sapiens) CpG-island No: 14479
aagtgtattattgtggaaagcgtaaacgttaaggatatgttataattaagcggttgttttttaagattttcgaggttttttatttttgttagttttgaatatttcgattaagattttagagaacgcgtttataggtgattcgagtttcgggaggcgttttttttatagtaataggttttaattttggtttcgttttttttacgttattttaggttataagggtttcggcgttataagcgtgtttgggaggtcgggtcggttaggagcggagagtggggagttggggatattgagggagatgcgggatagggaagacgcgtgggtcggggagtaacgttagaggcggaagacgttcgtttcgggtcgttattataggtgtcgggcgaagcgtcgcggagttttttagaggttagatttcgggtcggtttcgaggggtcgtgtagtattaggcggtgtagggggtaggcgagtgagggttttatcgttttttttcggagtcggcgtcgtcgtagtttcgtagttgttaaggagaatgttttttcgggttacgggcgcggcgttttagagagcgacggtggtcgggcgaggtcgagagcgaagcgcgcggggtgtgtgcgcggtgtaggagttcgtagtcggcggtttagttgcgataagggcgaaatggttaggttaggggtcgtcgcgtttttttcggtttcgttcgcggggat

SEQ ID NO: 14480 - DNA, 713 bp, Artificial Sequence
  chemically treated genomic DNA (Homo sapiens) CpG-island No: 14480
atccccgcgaacgaaaccgaaaaaaacgcgacgacccctaacctaaccatttcgcccttatcgcaactaaaccgccgactacgaactcctacaccgcgcacacaccccgcgcgcttcgctctcgacctcgcccgaccaccgtcgctctctaaaacgccgcgcccgtaacccgaaaaaacattctccttaacaactacgaaactacgacgacgccgactccgaaaaaaaacgataaaaccctcactcgcctaccccctacaccgcctaatactacacgacccctcgaaaccgacccgaaatctaacctctaaaaaactccgcgacgcttcgcccgacacctataataacgacccgaaacgaacgtcttccgcctctaacgttactccccgacccacgcgtcttccctatcccgcatctccctcaatatccccaactccccactctccgctcctaaccgacccgacctcccaaacacgcttataacgccgaaacccttataacctaaaataacgtaaaaaaaacgaaaccaaaattaaaacctattactataaaaaaaacgcctcccgaaactcgaatcacctataaacgcgttctctaaaatcttaatcgaaatattcaaaactaacaaaaataaaaaacctcgaaaatcttaaaaaacaaccgcttaattataacatatccttaacgtttacgctttccacaataatacactt

SEQ ID NO: 14481 - DNA, 1103 bp, Artificial Sequence
  chemically treated genomic DNA (Homo sapiens) CpG-island No: 14481
ggacgcgacgtggtgtttgtacgcgcggaatgcgatagtaaggttgtttttaggtttcggggacgcgttatttttattttcgttcggagggtagggttcgagcgcgggattttagtcgattttgattggcggcgcgattttgaggtttgcgttcgttttagttgttttttttgtgtaatggggagacgcgttttatcgtttgataacggtcgaagagcgtcgcgttttcgtttttcgcgtgcgcgtttatgttgtttattttcgtttcgtattgattttttttcgtgtttcgcgtttcgtattgtcgtttcgtttcgagttttatgtcgtagttatcgcgacggagttcgtagcgggaatttgttttcgcgcgttagtacgcgcgttttatgtgtcgtttttattagcgtcggttttcgtttataggttagatgtattgttattttggcgaagtcgtagattcgattggtcgggacgaggcgcgagatcgggttgcgggcggggtcgaacgtggtataaaaggggcgggaggtaggttcgtgtcgttttgtagacgttatcgtcgaggaaaatcgtgtattattagttatggttaattttatcgtgtttttcgatattgtcgtcgacggcgagtttttgggtcgcgttttttttgaggtcgggcgggcggcggcgtgcgggaatgggtttagaaagtgggtcggggtcggggtgggtggtagcgttttaaaggttcgggtcggggcgattttgtttgaggggcgagcgcgggcgggttcggcgttattttttgacgaggggttattttgggaggttcgagtcgcgggaggaggcggacgcgggcggataaaggtaggcgggtcgttgcgaggcgtttggggagggggttcgcgttcgttcgttcgttttatgtgtcgcgttttgttttgttcgacgtacgtgttcggcggtcgcgtttaggttcgcgttttgagagtcgttcgtcgttttagtttggtttgggcgtcgtagatcggagttagaagtacgttcgcgggggtttgcgatcgtttttttgggaagttgttttttggtaggtatgggtgttttatattttgagttgg

SEQ ID NO: 14482 - DNA, 1103 bp, Artificial Sequence
  chemically treated genomic DNA (Homo sapiens) CpG-island No: 14482
ccaactcaaaatataaaacacccatacctaccaaaaaacaacttcccaaaaaaacgatcgcaaacccccgcgaacgtacttctaactccgatctacgacgcccaaaccaaactaaaacgacgaacgactctcaaaacgcgaacctaaacgcgaccgccgaacacgtacgtcgaacaaaacaaaacgcgacacataaaacgaacgaacgaacgcgaaccccctccccaaacgcctcgcaacgacccgcctacctttatccgcccgcgtccgcctcctcccgcgactcgaacctcccaaaataacccctcgtcaaaaaataacgccgaacccgcccgcgctcgcccctcaaacaaaatcgccccgacccgaacctttaaaacgctaccacccaccccgaccccgacccactttctaaacccattcccgcacgccgccgcccgcccgacctcaaaaaaaacgcgacccaaaaactcgccgtcgacgacaatatcgaaaaacacgataaaattaaccataactaataatacacgattttcctcgacgataacgtctacaaaacgacacgaacctacctcccgccccttttataccacgttcgaccccgcccgcaacccgatctcgcgcctcgtcccgaccaatcgaatctacgacttcgccaaaataacaatacatctaacctataaacgaaaaccgacgctaataaaaacgacacataaaacgcgcgtactaacgcgcgaaaacaaattcccgctacgaactccgtcgcgataactacgacataaaactcgaaacgaaacgacaatacgaaacgcgaaacacgaaaaaaaatcaatacgaaacgaaaataaacaacataaacgcgcacgcgaaaaacgaaaacgcgacgctcttcgaccgttatcaaacgataaaacgcgtctccccattacacaaaaaaaacaactaaaacgaacgcaaacctcaaaatcgcgccgccaatcaaaatcgactaaaatcccgcgctcgaaccctaccctccgaacgaaaataaaaataacgcgtccccgaaacctaaaaacaaccttactatcgcattccgcgcgtacaaacaccacgtcgcgtcc

SEQ ID NO: 14483 - DNA, 1103 bp, Artificial Sequence
  chemically treated genomic DNA (Homo sapiens) CpG-island No: 14483
ttagtttaggatgtaaagtatttatgtttgttaggggatagttttttaggaaggcggtcgtaagttttcgcgagcgtgtttttggtttcggtttgcggcgtttaggttaagttagggcgacgaacgatttttaaggcgcggatttgagcgcggtcgtcgagtacgtgcgtcggataggatagggcgcggtatatgaggcgggcgggcggacgcgggttttttttttaaacgtttcgtagcggttcgtttgtttttgttcgttcgcgttcgttttttttcgcgattcggattttttaaaatggtttttcgttaggaaatggcgtcgagttcgttcgcgttcgttttttaagtagggtcgtttcggttcgggtttttggggcgttattatttatttcgatttcggtttattttttgggtttattttcgtacgtcgtcgttcgttcgattttaaaggagacgcggtttaagggttcgtcgtcgacggtaatgtcgaagaatacggtggggttgattatggttaatagtatacggtttttttcggcggtggcgtttgtaaaacggtacgagtttgtttttcgttttttttatattacgttcggtttcgttcgtaattcggtttcgcgtttcgtttcggttaatcgggtttgcgatttcgttagagtgatagtgtatttggtttatagacggaagtcggcgttgatggggacgatatatgaggcgcgcgtgttaacgcgcggaggtaggttttcgttgcgggtttcgtcgcggtggttgcggtatgggattcggggcggggcggtagtacgggacgcggggtacgggggagggttagtgcggaacgggggtgggtagtatgggcgcgtacgcgggagacggaagcgcggcgtttttcggtcgttgttaagcgatgaggcgcgtttttttattgtatagagggggtaattgaggcgaacgtaggttttaaggtcgcgtcgttagttaaggtcgattggggtttcgcgttcggattttatttttcgagcggaaatggggatggcgcgttttcgagatttaggagtagttttgttgtcgtatttcgcgcgtgtaaatattacgtcgcgttt

SEQ ID NO: 14484 - DNA, 1103 bp, Artificial Sequence
  chemically treated genomic DNA (Homo sapiens) CpG-island No: 14484
aaacgcgacgtaatatttacacgcgcgaaatacgacaacaaaactactcctaaatctcgaaaacgcgccatccccatttccgctcgaaaaataaaatccgaacgcgaaaccccaatcgaccttaactaacgacgcgaccttaaaacctacgttcgcctcaattaccccctctatacaataaaaaaacgcgcctcatcgcttaacaacgaccgaaaaacgccgcgcttccgtctcccgcgtacgcgcccatactacccacccccgttccgcactaaccctcccccgtaccccgcgtcccgtactaccgccccgccccgaatcccataccgcaaccaccgcgacgaaacccgcaacgaaaacctacctccgcgcgttaacacgcgcgcctcatatatcgtccccatcaacgccgacttccgtctataaaccaaatacactatcactctaacgaaatcgcaaacccgattaaccgaaacgaaacgcgaaaccgaattacgaacgaaaccgaacgtaatataaaaaaaacgaaaaacaaactcgtaccgttttacaaacgccaccgccgaaaaaaaccgtatactattaaccataatcaaccccaccgtattcttcgacattaccgtcgacgacgaacccttaaaccgcgtctcctttaaaatcgaacgaacgacgacgtacgaaaataaacccaaaaaataaaccgaaatcgaaataaataataacgccccaaaaacccgaaccgaaacgaccctacttaaaaaacgaacgcgaacgaactcgacgccatttcctaacgaaaaaccattttaaaaaatccgaatcgcgaaaaaaaacgaacgcgaacgaacaaaaacaaacgaaccgctacgaaacgtttaaaaaaaaaacccgcgtccgcccgcccgcctcatataccgcgccctatcctatccgacgcacgtactcgacgaccgcgctcaaatccgcgccttaaaaatcgttcgtcgccctaacttaacctaaacgccgcaaaccgaaaccaaaaacacgctcgcgaaaacttacgaccgccttcctaaaaaactatcccctaacaaacataaatactttacatcctaaactaa

SEQ ID NO: 14485 - DNA, 678 bp, Artificial Sequence
  chemically treated genomic DNA (Homo sapiens) CpG-island No: 14485
agttttttttagacgtagagcgggcgggcggttagtgcgcgtcgagggtttaggggtcggcgtcgcgaggggttgtaggtcgcgttcggtcgttgttcgggtcgtaggtgggagtcgttgtttgggttttagggttggatggtagtcggcggcggggattgaacgcgggagggttgtagggtgcgcgtcggcgaggggtttttcgttggaagttgagggatagacgtggggattcgtggttgttcggttttatcgtttagtcgtagggcgagtgttgtttcgtggaggtgatacggcgttaagagcggcgcgaggttttttgttggaggagggtaacggggaattcgaaggcgattgttttatgttggaggataaggggtattgttttttcggggtttcgcgtcggcgtcgaggaggggttcgttcgttgtttttgcgttttgagttcggtttttggtttttggggtcggggacgtagagaggggttggagtcggtcgatttacggtttagggcgttttttcgcggtttaagtagcggtcgtcgtttggagcgtagagtttgcggggtttagggggcgtcgacgttcgttttgaggcgtttttgttgttgcggcggcggggatggggacgatttaggggattttttgtagttattattggtagttttattaagaattg

SEQ ID NO: 14486 - DNA, 678 bp, Artificial Sequence
  chemically treated genomic DNA (Homo sapiens) CpG-island No: 14486
caattcttaataaaactaccaataataactacaaaaaatcccctaaatcgtccccatccccgccgccgcaacaacaaaaacgcctcaaaacgaacgtcgacgccccctaaaccccgcaaactctacgctccaaacgacgaccgctacttaaaccgcgaaaaaacgccctaaaccgtaaatcgaccgactccaacccctctctacgtccccgaccccaaaaaccaaaaaccgaactcaaaacgcaaaaacaacgaacgaacccctcctcgacgccgacgcgaaaccccgaaaaaacaataccccttatcctccaacataaaacaatcgccttcgaattccccgttaccctcctccaacaaaaaacctcgcgccgctcttaacgccgtatcacctccacgaaacaacactcgccctacgactaaacgataaaaccgaacaaccacgaatccccacgtctatccctcaacttccaacgaaaaacccctcgccgacgcgcaccctacaaccctcccgcgttcaatccccgccgccgactaccatccaaccctaaaacccaaacaacgactcccacctacgacccgaacaacgaccgaacgcgacctacaacccctcgcgacgccgacccctaaaccctcgacgcgcactaaccgcccgcccgctctacgtctaaaaaaaact

SEQ ID NO: 14487 - DNA, 678 bp, Artificial Sequence
  chemically treated genomic DNA (Homo sapiens) CpG-island No: 14487
taatttttgatggggttgttagtgatggttgtagggggttttttgggtcgtttttattttcgtcgtcgtagtagtagagacgttttagagcgggcgtcggcgttttttgggtttcgtaaattttgcgttttaggcggcggtcgttgtttaggtcgcgagggggcgttttgggtcgtgggtcgatcggttttagtttttttttgcgttttcggttttaggagttagaggtcgagtttaggacgtagaggtagcgagcgaattttttttcggcgtcgacgcgaagtttcgagagaatagtgttttttgttttttagtatagaatagtcgttttcgaatttttcgttatttttttttagtagaaagtttcgcgtcgtttttggcgtcgtgttatttttacggagtagtattcgttttgcggttggacggtggggtcgagtagttacgggtttttacgtttgttttttagtttttaacgagaagtttttcgtcggcgcgtattttgtagttttttcgcgtttagttttcgtcgtcggttgttatttagttttgggatttagatagcggtttttatttgcggttcggatagcggtcgagcgcggtttgtagtttttcgcggcgtcggtttttgagttttcggcgcgtattagtcgttcgttcgttttgcgtttgaaggaggtt

SEQ ID NO: 14488 - DNA, 678 bp, Artificial Sequence
  chemically treated genomic DNA (Homo sapiens) CpG-island No: 14488
aacctccttcaaacgcaaaacgaacgaacgactaatacgcgccgaaaactcaaaaaccgacgccgcgaaaaactacaaaccgcgctcgaccgctatccgaaccgcaaataaaaaccgctatctaaatcccaaaactaaataacaaccgacgacgaaaactaaacgcgaaaaaactacaaaatacgcgccgacgaaaaacttctcgttaaaaactaaaaaacaaacgtaaaaacccgtaactactcgaccccaccgtccaaccgcaaaacgaatactactccgtaaaaataacacgacgccaaaaacgacgcgaaactttctactaaaaaaaaataacgaaaaattcgaaaacgactattctatactaaaaaacaaaaaacactattctctcgaaacttcgcgtcgacgccgaaaaaaaattcgctcgctacctctacgtcctaaactcgacctctaactcctaaaaccgaaaacgcaaaaaaaaactaaaaccgatcgacccacgacccaaaacgccccctcgcgacctaaacaacgaccgccgcctaaaacgcaaaatttacgaaacccaaaaaacgccgacgcccgctctaaaacgtctctactactacgacgacgaaaataaaaacgacccaaaaaaccccctacaaccatcactaacaaccccatcaaaaatta

SEQ ID NO: 14489 - DNA, 687 bp, Artificial Sequence
  chemically treated genomic DNA (Homo sapiens) CpG-island No: 14489
ttcgatttcggtcgagtagaagaggttttttggtcggcgtggtattgttagtgtaggtggttgtagaggtcgagcgtttcggggtgtagcggtagtattttggcgtatacgatggtttcggttagttcgcgcggtagttttcgtttaggggtttttattcggagtgtagttggtaggcgcgtcgggcgttggggattcgttaggtagagcgcggcgagtagtacgtggcgtagtatgtcgggttttcggggcgtacggggcggcggcggggagttcggggagttcgtcggttcgggaagggtagttttgggcgttcggttgttcgggtcgttttcgggagttgagcgtatcgttgttttcgttacggggttcggtatgttcgttttggcgcgttacgttttaaaagggtttcggggattggatcgtcgggcgttcgtttttcgttttgtttttgcggttggggcgtgggcgggggaggggcggggagtcgggcgggtttcggcgtcggttggggcggggattagggattcggagaacgcggggacgtcgggatttagttttgaattggggatagtggtttagtaattttttggcgttttacgatggacgtggttcgagtttgttaggcgtaaagtttgtttgtaaacgtaaggtatttattaaagaatgatttttaatttgtacgat

SEQ ID NO: 14490 - DNA, 687 bp, Artificial Sequence
  chemically treated genomic DNA (Homo sapiens) CpG-island No: 14490
atcgtacaaattaaaaatcattctttaataaataccttacgtttacaaacaaactttacgcctaacaaactcgaaccacgtccatcgtaaaacgccaaaaaattactaaaccactatccccaattcaaaactaaatcccgacgtccccgcgttctccgaatccctaatccccgccccaaccgacgccgaaacccgcccgactccccgcccctcccccgcccacgccccaaccgcaaaaacaaaacgaaaaacgaacgcccgacgatccaatccccgaaacccttttaaaacgtaacgcgccaaaacgaacataccgaaccccgtaacgaaaacaacgatacgctcaactcccgaaaacgacccgaacaaccgaacgcccaaaactacccttcccgaaccgacgaactccccgaactccccgccgccgccccgtacgccccgaaaacccgacatactacgccacgtactactcgccgcgctctacctaacgaatccccaacgcccgacgcgcctaccaactacactccgaataaaaacccctaaacgaaaactaccgcgcgaactaaccgaaaccatcgtatacgccaaaatactaccgctacaccccgaaacgctcgacctctacaaccacctacactaacaataccacgccgaccaaaaaacctcttctactcgaccgaaatcgaa

SEQ ID NO: 14491 - DNA, 687 bp, Artificial Sequence
  chemically treated genomic DNA (Homo sapiens) CpG-island No: 14491
atcgtgtaaattaagagttattttttaatgaatgttttgcgtttgtaaataggttttacgtttggtaagttcggattacgtttatcgtggggcgttaggagattgttgggttattgtttttaatttagggttgggtttcggcgttttcgcgtttttcgagtttttggttttcgttttagtcggcgtcgggattcgttcgatttttcgtttttttttcgtttacgttttagtcgtaggggtagggcgggaggcgggcgttcggcggtttagttttcgggatttttttaaagcgtggcgcgttagggcgggtatgtcgagtttcgtggcggagatagcggtgcgtttagttttcgggagcggttcgagtagtcgagcgtttagggttgtttttttcgggtcggcgggtttttcgggtttttcgtcgtcgtttcgtgcgtttcgggagttcggtatgttgcgttacgtgttgttcgtcgcgttttgtttggcgggtttttagcgttcggcgcgtttgttagttgtatttcgagtggaggtttttgagcgagggttgtcgcgcgagttggtcgagattatcgtgtacgttagggtgttgtcgttgtatttcgaggcgttcggtttttataattatttgtattggtagtattacgtcggttagggggttttttttattcggtcgaggtcgag

SEQ ID NO: 14492 - DNA, 687 bp, Artificial Sequence
  chemically treated genomic DNA (Homo sapiens) CpG-island No: 14492
ctcgacctcgaccgaataaaaaaaaccccctaaccgacgtaatactaccaatacaaataattataaaaaccgaacgcctcgaaatacaacgacaacaccctaacgtacacgataatctcgaccaactcgcgcgacaaccctcgctcaaaaacctccactcgaaatacaactaacaaacgcgccgaacgctaaaaacccgccaaacaaaacgcgacgaacaacacgtaacgcaacataccgaactcccgaaacgcacgaaacgacgacgaaaaacccgaaaaacccgccgacccgaaaaaaacaaccctaaacgctcgactactcgaaccgctcccgaaaactaaacgcaccgctatctccgccacgaaactcgacatacccgccctaacgcgccacgctttaaaaaaatcccgaaaactaaaccgccgaacgcccgcctcccgccctacccctacgactaaaacgtaaacgaaaaaaaaacgaaaaatcgaacgaatcccgacgccgactaaaacgaaaaccaaaaactcgaaaaacgcgaaaacgccgaaacccaaccctaaattaaaaacaataacccaacaatctcctaacgccccacgataaacgtaatccgaacttaccaaacgtaaaacctatttacaaacgcaaaacattcattaaaaaataactcttaatttacacgat

SEQ ID NO: 14493 - DNA, 608 bp, Artificial Sequence
  chemically treated genomic DNA (Homo sapiens) CpG-island No: 14493
tttcgcgaatttttttcggcggtatttttaaatatatagcggcggatatataaagacgttcgcgagttagtattagtgtaggtattcgggtatatatagatatacgacgtaaggtttcggggattcggatggagtcgtagtgttttcggttcgggcggagagggttcgcgcgtaggggtagttgttttcgggtcgtttttatatcgggcgcgcggtttttaagtcgggagttggcgagttgaaagttcgggataattagcgttaattatatgtgtgtaaatagtcgcggtagagggcgcggtttaggtcgcgggcgttttttttttcggtttgattttggtagttttatcgtagtggaggggttttgttggcgtagttcgagtcgatcgttaggggagagcgcgtaggagtatttacgagattcgggaatcggggtgcgtcgttagtgtttagagttatcgagtttcgattatatacgcgggcgcgcgttgcggttcggtaatttcgggatggcgggttatagtcgggttagaggttgagtttagaattgggggtcgaatattcgttgtttttcgttgttttttagcggggatcgggcggggtggggt

SEQ ID NO: 14494 - DNA, 608 bp, Artificial Sequence
  chemically treated genomic DNA (Homo sapiens) CpG-island No: 14494
accccaccccgcccgatccccgctaaaaaacaacgaaaaacaacgaatattcgacccccaattctaaactcaacctctaacccgactataacccgccatcccgaaattaccgaaccgcaacgcgcgcccgcgtatataatcgaaactcgataactctaaacactaacgacgcaccccgattcccgaatctcgtaaatactcctacgcgctctcccctaacgatcgactcgaactacgccaacaaaacccctccactacgataaaactaccaaaatcaaaccgaaaaaaaaaacgcccgcgacctaaaccgcgccctctaccgcgactatttacacacatataattaacgctaattatcccgaactttcaactcgccaactcccgacttaaaaaccgcgcgcccgatataaaaacgacccgaaaacaactacccctacgcgcgaaccctctccgcccgaaccgaaaacactacgactccatccgaatccccgaaaccttacgtcgtatatctatatatacccgaatacctacactaatactaactcgcgaacgtctttatatatccgccgctatatatttaaaaataccgccgaaaaaaattcgcgaaa

SEQ ID NO: 14495 - DNA, 608 bp, Artificial Sequence
  chemically treated genomic DNA (Homo sapiens) CpG-island No: 14495
gttttatttcgttcggttttcgttgaagggtagcgaagggtagcgggtgttcggtttttagttttgggtttagtttttggttcgattgtaattcgttatttcgagattgtcgggtcgtaacgcgcgttcgcgtgtgtggtcggggttcggtggttttgggtattgacggcgtatttcgattttcgggtttcgtgggtgtttttgcgcgtttttttttagcggtcggttcgagttgcgttagtagagtttttttattgcggtgggattgttagggttaggtcgggggaggggacgttcgcggtttagatcgcgttttttgtcgcggttgtttgtatatatgtaattagcgttaattatttcgggtttttagttcgttagttttcggtttgagagtcgcgcgttcggtgtgagagcggttcgggagtagttgtttttacgcgcgagtttttttcgttcgggtcggggatattgcggttttattcgagttttcgggattttgcgtcgtgtatttgtgtgtgttcgagtgtttatattagtgttggttcgcgagcgtttttgtgtgttcgtcgttgtgtgtttgaagatgtcgtcggggaaggttcgcggga

SEQ ID NO: 14496 - DNA, 608 bp, Artificial Sequence
  chemically treated genomic DNA (Homo sapiens) CpG-island No: 14496
tcccgcgaaccttccccgacgacatcttcaaacacacaacgacgaacacacaaaaacgctcgcgaaccaacactaatataaacactcgaacacacacaaatacacgacgcaaaatcccgaaaactcgaataaaaccgcaatatccccgacccgaacgaaaaaaactcgcgcgtaaaaacaactactcccgaaccgctctcacaccgaacgcgcgactctcaaaccgaaaactaacgaactaaaaacccgaaataattaacgctaattacatatatacaaacaaccgcgacaaaaaacgcgatctaaaccgcgaacgtcccctcccccgacctaaccctaacaatcccaccgcaataaaaaaactctactaacgcaactcgaaccgaccgctaaaaaaaaacgcgcaaaaacacccacgaaacccgaaaatcgaaatacgccgtcaatacccaaaaccaccgaaccccgaccacacacgcgaacgcgcgttacgacccgacaatctcgaaataacgaattacaatcgaaccaaaaactaaacccaaaactaaaaaccgaacacccgctacccttcgctacccttcaacgaaaaccgaacgaaataaaac

SEQ ID NO: 14497 - DNA, 568 bp, Artificial Sequence
  chemically treated genomic DNA (Homo sapiens) CpG-island No: 14497
agaatatcgttcgttacgacgacgagggcggcggcgaggaggatatcgaggttttcgatatcgcggttatgtggaattttcgggaggcgtaggcgggggtcgtttttaagacgcggtaggatatgttgttcgagatcgagagtttttttcgttacgtgttttagacgtgcgtagtgaatagtattgtttatagttacgtgttggttaagttttacgaggtcgatatggatttgtgggtatcgtttttcgattttttttagacgtatatgttcgagggggacggttttgtggcggggtcgttgagttttttgtagtcggttacgtcggattcggaatagagtttcgattttttgacggattgggggtttcgttttcggaagttggtcgagttttacggggcgtcggagggattcgcgtcgttgtggtgacggaagttaggaggtaggcgcgcgtttaaatttagacgtttttcgcgggtgtttcgcggataaggtgtagttaattatacgagtaatattgtgttggagagtgagaatgggggtgagtaggcgaatagagttttttttgg

SEQ ID NO: 14498 - DNA, 568 bp, Artificial Sequence
  chemically treated genomic DNA (Homo sapiens) CpG-island No: 14498
ccaaaaaaaactctattcgcctactcacccccattctcactctccaacacaatattactcgtataattaactacaccttatccgcgaaacacccgcgaaaaacgtctaaatttaaacgcgcgcctacctcctaacttccgtcaccacaacgacgcgaatccctccgacgccccgtaaaactcgaccaacttccgaaaacgaaacccccaatccgtcaaaaaatcgaaactctattccgaatccgacgtaaccgactacaaaaaactcaacgaccccgccacaaaaccgtccccctcgaacatatacgtctaaaaaaaatcgaaaaacgatacccacaaatccatatcgacctcgtaaaacttaaccaacacgtaactataaacaatactattcactacgcacgtctaaaacacgtaacgaaaaaaactctcgatctcgaacaacatatcctaccgcgtcttaaaaacgacccccgcctacgcctcccgaaaattccacataaccgcgatatcgaaaacctcgatatcctcctcgccgccgccctcgtcgtcgtaacgaacgatattct

SEQ ID NO: 14499 - DNA, 568 bp, Artificial Sequence
  chemically treated genomic DNA (Homo sapiens) CpG-island No: 14499
ttagagagagttttgttcgtttgtttatttttatttttattttttagtatagtattgttcgtgtggttggttgtattttgttcgcgaagtattcgcggagaacgtttggatttggacgcgcgtttgttttttggttttcgttattatagcggcgcgggttttttcgacgtttcgtagagttcggttagttttcggaagcggggtttttagttcgttaggaagtcgaagttttgtttcgagttcgacgtggtcgattgtagggagtttagcgatttcgttatagagtcgtttttttcgaatatatacgtttggagggagtcgaagggcggtgtttataggtttatgtcggtttcgtagagtttggttagtacgtagttgtggatagtgttgtttattgcgtacgtttgaggtacgtagcgggagaggttttcgatttcgggtagtatgttttgtcgcgttttgggggcggttttcgtttgcgtttttcgggggttttatatggtcgcgatgtcgaaggtttcggtgtttttttcgtcgtcgttttcgtcgtcgtagcggacgatgtttt

SEQ ID NO: 14500 - DNA, 568 bp, Artificial Sequence
  chemically treated genomic DNA (Homo sapiens) CpG-island No: 14500
aaaacatcgtccgctacgacgacgaaaacgacgacgaaaaaaacaccgaaaccttcgacatcgcgaccatataaaacccccgaaaaacgcaaacgaaaaccgcccccaaaacgcgacaaaacatactacccgaaatcgaaaacctctcccgctacgtacctcaaacgtacgcaataaacaacactatccacaactacgtactaaccaaactctacgaaaccgacataaacctataaacaccgcccttcgactccctccaaacgtatatattcgaaaaaaacgactctataacgaaatcgctaaactccctacaatcgaccacgtcgaactcgaaacaaaacttcgacttcctaacgaactaaaaaccccgcttccgaaaactaaccgaactctacgaaacgtcgaaaaaacccgcgccgctataataacgaaaaccaaaaaacaaacgcgcgtccaaatccaaacgttctccgcgaatacttcgcgaacaaaatacaaccaaccacacgaacaatactatactaaaaaataaaaataaaaataaacaaacgaacaaaactctctctaa

SEQ ID NO: 14501 - DNA, 697 bp, Artificial Sequence
  chemically treated genomic DNA (Homo sapiens) CpG-island No: 14501
cgcgtgcgtagaggcggatcgtaaggttagggcgtgagggaagggcgggcgtacgtttttgcgtgcgttttaggtagcgcgtacgtcggcgtgagagggtacggggaaaaggtggttttggtcggggtggttcggttttttggggttatgtaattgagttcgtcgatttaggggttttttttcgttgttttcgtcgcgtgttagtagggagttttcgttcgggagagagattgtttttacgttcgttgcgttttttcgacggtagagtaggtttgttcgttcgtgggagcgtttcggtcgagaagttttgaggggggaggggaggttattttgtttcgatcgatttttcggaatcgggcggacgggttgggagaggttgcggagcgcggtcgtcgttttcggaggtattggacgtcgttattgtcggggtttttttaaagttgttcgtaggtcgttcgcgtcgtttcgagttttttttttacgttttttcggtttttcggtttgagaacgttcgagtgaggagttggtcgtagtgagagggatcgattttttggggtcgtcgcgcgagagttcgagtcgttttttttaatggcgaagaagacgtacgatttgttttttaagttgtttttgatcggggatttcggagtggggaagatttgcgttttttttcgtttttcggatgatgtttttaatatta

SEQ ID NO: 14502 - DNA, 697 bp, Artificial Sequence
  chemically treated genomic DNA (Homo sapiens) CpG-island No: 14502
taatattaaaaacatcatccgaaaaacgaaaaaaaacgcaaatcttccccactccgaaatccccgatcaaaaacaacttaaaaaacaaatcgtacgtcttcttcgccattaaaaaaaacgactcgaactctcgcgcgacgaccccaaaaaatcgatccctctcactacgaccaactcctcactcgaacgttctcaaaccgaaaaaccgaaaaaacgtaaaaaaaaaactcgaaacgacgcgaacgacctacgaacaactttaaaaaaaccccgacaataacgacgtccaatacctccgaaaacgacgaccgcgctccgcaacctctcccaacccgtccgcccgattccgaaaaatcgatcgaaacaaaataacctcccctcccccctcaaaacttctcgaccgaaacgctcccacgaacgaacaaacctactctaccgtcgaaaaaacgcaacgaacgtaaaaacaatctctctcccgaacgaaaactccctactaacacgcgacgaaaacaacgaaaaaaaacccctaaatcgacgaactcaattacataaccccaaaaaaccgaaccaccccgaccaaaaccaccttttccccgtaccctctcacgccgacgtacgcgctacctaaaacgcacgcaaaaacgtacgcccgcccttccctcacgccctaaccttacgatccgcctctacgcacgcg

SEQ ID NO: 14503 - DNA, 697 bp, Artificial Sequence
  chemically treated genomic DNA (Homo sapiens) CpG-island No: 14503
tagtattgaaggtattattcgaaaaacgaaaaaggacgtaggttttttttatttcggaattttcgattaggagtagtttgaaaagtaggtcgtacgtttttttcgttattgggaggagcggttcgggttttcgcgcggcggttttaagggatcggttttttttattacggttaattttttattcgggcgtttttaggtcggaggatcggggaagcgtgggaaaaaggttcgagacggcgcgggcgatttacgaatagttttgaggaagtttcgatagtggcggcgtttagtgttttcgagggcggcgatcgcgtttcgtagttttttttagttcgttcgttcggtttcggggagtcggtcgggataaaatggttttttttttttttttagggtttttcggtcgggacgtttttacgggcgagtaagtttgttttgtcgtcgaggaggcgtagcgggcgtgaggatagtttttttttcgagcggaaattttttgttagtacgcggcgagggtagcgaagaaggatttttaagtcgacgagtttagttatatagttttaggaaatcgagttatttcggttagagttatttttttttcgtgtttttttacgtcggcgtgcgcgttgtttgagacgtacgtaagggcgtacgttcgttttttttttacgttttagttttgcggttcgtttttgcgtacgcg

SEQ ID NO: 14504 - DNA, 697 bp, Artificial Sequence
  chemically treated genomic DNA (Homo sapiens) CpG-island No: 14504
cgcgtacgcaaaaacgaaccgcaaaactaaaacgtaaaaaaaaaacgaacgtacgcccttacgtacgtctcaaacaacgcgcacgccgacgtaaaaaaacacgaaaaaaaaataactctaaccgaaataactcgatttcctaaaactatataactaaactcgtcgacttaaaaatccttcttcgctaccctcgccgcgtactaacaaaaaatttccgctcgaaaaaaaaactatcctcacgcccgctacgcctcctcgacgacaaaacaaacttactcgcccgtaaaaacgtcccgaccgaaaaaccctaaaaaaaaaaaaaaaaccattttatcccgaccgactccccgaaaccgaacgaacgaactaaaaaaaactacgaaacgcgatcgccgccctcgaaaacactaaacgccgccactatcgaaacttcctcaaaactattcgtaaatcgcccgcgccgtctcgaacctttttcccacgcttccccgatcctccgacctaaaaacgcccgaataaaaaattaaccgtaataaaaaaaaccgatcccttaaaaccgccgcgcgaaaacccgaaccgctcctcccaataacgaaaaaaacgtacgacctacttttcaaactactcctaatcgaaaattccgaaataaaaaaaacctacgtcctttttcgtttttcgaataataccttcaatacta

SEQ ID NO: 14505 - DNA, 702 bp, Artificial Sequence
  chemically treated genomic DNA (Homo sapiens) CpG-island No: 14505
tttttcgtttttacgtagtttgttttttcgtgtcggtggttgggtcgcggtcgggtcgtttgtttttttcgatatacgcgttagcgttatgtgtttcgtcgtcgttgttttttttcggttttttattgttcgtcgttagtttgcgtcgtcggcgttcgtgttttttcggttttttgggtggtcgtggttagcgcgtgcgttgatttttgtttacgtcgggtagttgtttttttcgggagggatagtaatcgatacgaaggtagagcgacgggcggtagggttagataggagtagaggagtagcgggagacgcggcggcggacgtagggtagacgtagaaagcgcgacgtgaggacgcgcgataggaagatcgacgagggtagaaggagcgcggcgcggaagagagtacgcggggcgcgaggaggagtaggaaggaggggggagagtcgcggagagagtagagagagagagaggagtagaagcgaaaacgttaggggatgaaataaaacgatcggtaagaattataagaaatacgagatttaagacgagaggattttagggagatgcgaatagcgggttattagatgtagatggtcgcggtaacgtgagtaggtaaggcggttataaaagagtttaatcgtataaaggttgataaagagagagttgtttttaaagggatcgttgttgtacgaggaattaagga

SEQ ID NO: 14506 - DNA, 702 bp, Artificial Sequence
  chemically treated genomic DNA (Homo sapiens) CpG-island No: 14506
tccttaattcctcgtacaacaacgatccctttaaaaacaactctctctttatcaacctttatacgattaaactcttttataaccgccttacctactcacgttaccgcgaccatctacatctaataacccgctattcgcatctccctaaaatcctctcgtcttaaatctcgtatttcttataattcttaccgatcgttttatttcatcccctaacgttttcgcttctactcctctctctctctctactctctccgcgactctcccccctccttcctactcctcctcgcgccccgcgtactctcttccgcgccgcgctccttctaccctcgtcgatcttcctatcgcgcgtcctcacgtcgcgctttctacgtctaccctacgtccgccgccgcgtctcccgctactcctctactcctatctaaccctaccgcccgtcgctctaccttcgtatcgattactatccctcccgaaaaaaacaactacccgacgtaaacaaaaatcaacgcacgcgctaaccacgaccacccaaaaaaccgaaaaaacacgaacgccgacgacgcaaactaacgacgaacaataaaaaaccgaaaaaaaacaacgacgacgaaacacataacgctaacgcgtatatcgaaaaaaacaaacgacccgaccgcgacccaaccaccgacacgaaaaaacaaactacgtaaaaacgaaaaa

SEQ ID NO: 14507 - DNA, 702 bp, Artificial Sequence
  chemically treated genomic DNA (Homo sapiens) CpG-island No: 14507
tttttagtttttcgtgtaataacggtttttttagggataattttttttttgttagtttttatgcggttgagtttttttatggtcgttttgtttgtttacgttatcgcggttatttgtatttaataattcgttattcgtatttttttgggattttttcgttttgggtttcgtgttttttgtggtttttgtcggtcgttttgttttattttttgacgttttcgtttttatttttttttttttttttgtttttttcgcggttttttttttttttttttgttttttttcgcgtttcgcgtgttttttttcgcgtcgcgttttttttgttttcgtcggtttttttatcgcgcgtttttacgtcgcgttttttgcgtttgttttgcgttcgtcgtcgcgtttttcgttgtttttttgtttttgtttggttttgtcgttcgtcgttttgttttcgtgtcggttgttgtttttttcgagggaggtagttgttcgacgtaagtaaggattagcgtacgcgttggttacgattatttaggggatcgggaagatacgggcgtcgacggcgtaggttggcggcgggtagtgagaggtcggaagaagatagcggcgacggggtatatgacgttggcgcgtgtatcggaaagggtaggcggttcgatcgcgatttagttatcggtacgggaaggtagattgcgtgagagcgaaaga

SEQ ID NO: 14508 - DNA, 702 bp, Artificial Sequence
  chemically treated genomic DNA (Homo sapiens) CpG-island No: 14508
tctttcgctctcacgcaatctaccttcccgtaccgataactaaatcgcgatcgaaccgcctaccctttccgatacacgcgccaacgtcatataccccgtcgccgctatcttcttccgacctctcactacccgccgccaacctacgccgtcgacgcccgtatcttcccgatcccctaaataatcgtaaccaacgcgtacgctaatccttacttacgtcgaacaactacctccctcgaaaaaaacaacaaccgacacgaaaacaaaacgacgaacgacaaaaccaaacaaaaacaaaaaaacaacgaaaaacgcgacgacgaacgcaaaacaaacgcaaaaaacgcgacgtaaaaacgcgcgataaaaaaaccgacgaaaacaaaaaaaacgcgacgcgaaaaaaaacacgcgaaacgcgaaaaaaaacaaaaaaaaaaaaaaaaaaccgcgaaaaaaacaaaaaaaaaaaaaaaaataaaaacgaaaacgtcaaaaaataaaacaaaacgaccgacaaaaaccacaaaaaacacgaaacccaaaacgaaaaaatcccaaaaaaatacgaataacgaattattaaatacaaataaccgcgataacgtaaacaaacaaaacgaccataaaaaaactcaaccgcataaaaactaacaaaaaaaaaattatccctaaaaaaaccgttattacacgaaaaactaaaaa

SEQ ID NO: 14509 - DNA, 721 bp, Artificial Sequence
  chemically treated genomic DNA (Homo sapiens) CpG-island No: 14509
tttcgtattttattttatttcgttacgatcgttggttcgtatttatttatcgtttcgtttatattatgtttttttttatgtattgttttttggacggttgtatttgatttacgttagcgttttttttttttttacgtcgattcgcgttcgttaaattttcggcgttcggtttgtcgtttatgtgtcgtgtttgttgttttttattttagcggtttttcgttttcgttttgtcgcgggtcgttcgttttttattttttatacgttgtttttttcgttcgtcgtatattcgtttttttttcgttattttttgtcgttcgttttttttttcgtcgcgcgtgggcgcgtttcggttttttattgtgtgcgggggggtatttgcgcgttttcgttcgcgttattcgtgtttgtttttttttgttgcgttgcgttcgtttcgttttcgttagtcgtttcggtgttttgtgcggatcgtttttttgtatatatttttgcggttttttttttcgggtggttgttttgtagcgtgtcgtttttgttttcgcgttttgtgttttgttgtttttgttgtacgtcggtcgcgtagtgagtatttgttgcgtttttacgttttttttcgtgtcggttttgcgcgagacggtaataaggattagcgtgaataatagaacgaaaaagtaggtgtcgatagataagtaagtaacgtttgcgattagttttttaagta

SEQ ID NO: 14510 - DNA, 721 bp, Artificial Sequence
  chemically treated genomic DNA (Homo sapiens) CpG-island No: 14510
tacttaaaaaactaatcgcaaacgttacttacttatctatcgacacctactttttcgttctattattcacgctaatccttattaccgtctcgcgcaaaaccgacacgaaaaaaaacgtaaaaacgcaacaaatactcactacgcgaccgacgtacaacaaaaacaacaaaacacaaaacgcgaaaacaaaaacgacacgctacaaaacaaccacccgaaaaaaaaaaccgcaaaaatatatacaaaaaaacgatccgcacaaaacaccgaaacgactaacgaaaacgaaacgaacgcaacgcaacaaaaaaaaacaaacacgaataacgcgaacgaaaacgcgcaaatacccccccgcacacaataaaaaaccgaaacgcgcccacgcgcgacgaaaaaaaaaacgaacgacaaaaaataacgaaaaaaaaacgaatatacgacgaacgaaaaaaacaacgtataaaaaataaaaaacgaacgacccgcgacaaaacgaaaacgaaaaaccgctaaaataaaaaacaacaaacacgacacataaacgacaaaccgaacgccgaaaatttaacgaacgcgaatcgacgtaaaaaaaaaaaaaacgctaacgtaaatcaaatacaaccgtccaaaaaacaatacataaaaaaaaacataatataaacgaaacgataaataaatacgaaccaacgatcgtaacgaaataaaataaaatacgaaa

SEQ ID NO: 14511 - DNA, 721 bp, Artificial Sequence
  chemically treated genomic DNA (Homo sapiens) CpG-island No: 14511
tatttaggggattgatcgtaaacgttgtttgtttgtttgtcgatatttgttttttcgttttattgtttacgttagtttttgttgtcgtttcgcgtagagtcgatacggagaggagcgtagaggcgtagtagatgtttattgcgcggtcggcgtgtaataggagtagtagggtatagagcgcgagagtaggggcggtacgttgtagagtagttattcggaggggagaatcgtaagagtgtgtgtaagagggcgattcgtatagaatatcgaggcgattagcgaaagcgaggcgagcgtagcgtagtaggggagagtaagtacgaatagcgcgggcggggacgcgtagatgttttttcgtatatagtgaggaatcgagacgcgtttacgcgcggcggaggggggggcgggcgatagaggatgacgagagggaagcgggtatacgacgagcgggggagatagcgtgtgaaaggtgggaggcgggcggttcgcgatagggcgagagcggggggtcgttggggtggggggtagtaggtacggtatatgggcgataggtcgagcgtcgagagtttgacgggcgcggatcggcgtgaggagaggagagacgttggcgtagattaggtatagtcgtttagaagataatgtatgagaggggatatggtgtgggcgaaacgatgggtaggtgcgaattagcggtcgtggcgaagtgaggtagggtgcggga

SEQ ID NO: 14512 - DNA, 721 bp, Artificial Sequence
  chemically treated genomic DNA (Homo sapiens) CpG-island No: 14512
tcccgcaccctacctcacttcgccacgaccgctaattcgcacctacccatcgtttcgcccacaccatatcccctctcatacattatcttctaaacgactatacctaatctacgccaacgtctctcctctcctcacgccgatccgcgcccgtcaaactctcgacgctcgacctatcgcccatataccgtacctactaccccccaccccaacgaccccccgctctcgccctatcgcgaaccgcccgcctcccacctttcacacgctatctcccccgctcgtcgtatacccgcttccctctcgtcatcctctatcgcccgcccccccctccgccgcgcgtaaacgcgtctcgattcctcactatatacgaaaaaacatctacgcgtccccgcccgcgctattcgtacttactctcccctactacgctacgctcgcctcgctttcgctaatcgcctcgatattctatacgaatcgccctcttacacacactcttacgattctcccctccgaataactactctacaacgtaccgcccctactctcgcgctctataccctactactcctattacacgccgaccgcgcaataaacatctactacgcctctacgctcctctccgtatcgactctacgcgaaacgacaacaaaaactaacgtaaacaataaaacgaaaaaacaaatatcgacaaacaaacaaacaacgtttacgatcaatcccctaaata

SEQ ID NO: 14513 - DNA, 741 bp, Artificial Sequence
  chemically treated genomic DNA (Homo sapiens) CpG-island No: 14513
gtttgcgtaggtggttggatacgtcgcgattgttgcgcgcgggacggttttttggttttcgtttcggtgggttttttggggtttttttagttcggttgggttcgttttacgggttgtaagttcgcgataggcgcgttttgttttcggaatagattgtatattttggttgtagtcgttgtcgggtagttgtttttagggcgtcgtagtcgattcgcgtttttattagtcggttcgtatttttttacggggtttttttgggtatgattcgcgtttacgaagagagttagggtgagcggtaggaagtttttttaggggtttcgtagggcgcgtttcgggttgcgggttttggttcgcggttttatggcgcggggcggttggagagtggtgcgcgcgggtatcgcgaagagttttgtggtcggtacgttggacgttcgcgggttgttttttcggtttcgttcggcggttagtttttttgagtttagggggttttgaagcggtcgattgggggttcggttttcggcggaacgagggttgcgcgtttcgagtttcgagttcgcgtttttattttagttgggttcgtacggttgttgtattttcgcgttttttttttgtgtttgtagtcgtttgaaggggattcggacggttttatttttggaaatttttttcggttttttcgttttttttatttatattaggtttttttttcggagggatagtttagtttttttattatcggagagg

SEQ ID NO: 14514 - DNA, 741 bp, Artificial Sequence
  chemically treated genomic DNA (Homo sapiens) CpG-island No: 14514
cctctccgataataaaaaaactaaactatccctccgaaaaaaaaacctaatataaataaaaaaaacgaaaaaaccgaaaaaaatttccaaaaataaaaccgtccgaatccccttcaaacgactacaaacacaaaaaaaaaacgcgaaaatacaacaaccgtacgaacccaactaaaataaaaacgcgaactcgaaactcgaaacgcgcaaccctcgttccgccgaaaaccgaacccccaatcgaccgcttcaaaaccccctaaactcaaaaaaactaaccgccgaacgaaaccgaaaaaacaacccgcgaacgtccaacgtaccgaccacaaaactcttcgcgatacccgcgcgcaccactctccaaccgccccgcgccataaaaccgcgaaccaaaacccgcaacccgaaacgcgccctacgaaacccctaaaaaaacttcctaccgctcaccctaactctcttcgtaaacgcgaatcatacccaaaaaaaccccgtaaaaaaatacgaaccgactaataaaaacgcgaatcgactacgacgccctaaaaacaactacccgacaacgactacaaccaaaatatacaatctattccgaaaacaaaacgcgcctatcgcgaacttacaacccgtaaaacgaacccaaccgaactaaaaaaaccccaaaaaacccaccgaaacgaaaaccaaaaaaccgtcccgcgcgcaacaatcgcgacgtatccaaccacctacgcaaac

SEQ ID NO: 14515 - DNA, 741 bp, Artificial Sequence
  chemically treated genomic DNA (Homo sapiens) CpG-island No: 14515
ttttttcggtaatgagggggttgagttgttttttcgaggagggggtttggtgtggataaaagagacgaaaaagtcgggggaggtttttaaaaataaaatcgttcgggttttttttagacggttgtaggtatagggaggaggcgcgaaggtgtagtagtcgtgcgagtttagttggagtaggagcgcggattcgaggttcggggcgcgtagttttcgtttcgtcgagagtcgggtttttagtcggtcgttttagggttttttagatttagagaagttggtcgtcgggcggggtcgggagaatagttcgcgggcgtttagcgtgtcgattataaagtttttcgcggtgttcgcgcgtattattttttagtcgtttcgcgttatgaggtcgcggattaaagttcgtagttcggggcgcgttttgcggaatttttggagaggttttttgtcgtttattttggtttttttcgtgggcgcgggttatgtttaaagggatttcgtagggagatacgagtcggttggtggagacgcgaatcgattgcggcgttttgggggtagttattcggtagcggttgtagttaaggtgtatagtttgtttcgggagtaggacgcgtttgtcgcgggtttgtagttcgtggagcgggtttagtcgggttgggggagttttaggaggtttatcgaggcggaggttaggaggtcgtttcgcgcgtagtagtcgcggcgtgtttagttatttgcgtagat

SEQ ID NO: 14516 - DNA, 741 bp, Artificial Sequence
  chemically treated genomic DNA (Homo sapiens) CpG-island No: 14516
atctacgcaaataactaaacacgccgcgactactacgcgcgaaacgacctcctaacctccgcctcgataaacctcctaaaactcccccaacccgactaaacccgctccacgaactacaaacccgcgacaaacgcgtcctactcccgaaacaaactatacaccttaactacaaccgctaccgaataactacccccaaaacgccgcaatcgattcgcgtctccaccaaccgactcgtatctccctacgaaatccctttaaacataacccgcgcccacgaaaaaaaccaaaataaacgacaaaaaacctctccaaaaattccgcaaaacgcgccccgaactacgaactttaatccgcgacctcataacgcgaaacgactaaaaaataatacgcgcgaacaccgcgaaaaactttataatcgacacgctaaacgcccgcgaactattctcccgaccccgcccgacgaccaacttctctaaatctaaaaaaccctaaaacgaccgactaaaaacccgactctcgacgaaacgaaaactacgcgccccgaacctcgaatccgcgctcctactccaactaaactcgcacgactactacaccttcgcgcctcctccctatacctacaaccgtctaaaaaaaacccgaacgattttatttttaaaaacctcccccgactttttcgtctcttttatccacaccaaaccccctcctcgaaaaaacaactcaaccccctcattaccgaaaaaa

SEQ ID NO: 14517 - DNA, 564 bp, Artificial Sequence
  chemically treated genomic DNA (Homo sapiens) CpG-island No: 14517
ggcgagcgggcggcgagggggattaattcgtgcggagtagggggcggcgcggggttgatttaggcgttggtcgggtagatggcgtttgttacgatcgggatattgggtcgttttttttttgttttgggtaagttcgaattgtagatttgtttcgaatcgttttttcgtttttcgttttagggatcgtttttggatcgggggatttaggttgtagttttgtaggtttgaaggaagtcgggaggggcgttgaggttcgcgtaagggaatagggtcgtcgtttttttcgtttgcgttttggtcgttgggggcgtttttcgtagggtcggtcggagcgggggtggcgcggggcggggcgcggcgcgcggagcgtagggaggtttcgggcgcgttttttggcggagttggcggttttggcgtttcgtggttgtaatgttttggcgtcgtcgttttcgttttggattttaatttttttttattggcgtgagggttacgtttgagtttggcgcggtgatggttgtcggtagaagaggggtttttttttttttttttttttttttttttttt

SEQ ID NO: 14518 - DNA, 564 bp, Artificial Sequence
  chemically treated genomic DNA (Homo sapiens) CpG-island No: 14518
aaaaaaaaaaaaaaaaaaaaaaaaaaaaaaaacccctcttctaccgacaaccatcaccgcgccaaactcaaacgtaaccctcacgccaataaaaaaaaattaaaatccaaaacgaaaacgacgacgccaaaacattacaaccacgaaacgccaaaaccgccaactccgccaaaaaacgcgcccgaaacctccctacgctccgcgcgccgcgccccgccccgcgccacccccgctccgaccgaccctacgaaaaacgcccccaacgaccaaaacgcaaacgaaaaaaacgacgaccctattcccttacgcgaacctcaacgcccctcccgacttccttcaaacctacaaaactacaacctaaatcccccgatccaaaaacgatccctaaaacgaaaaacgaaaaaacgattcgaaacaaatctacaattcgaacttacccaaaacaaaaaaaaaacgacccaatatcccgatcgtaacaaacgccatctacccgaccaacgcctaaatcaaccccgcgccgccccctactccgcacgaattaatccccctcgccgcccgctcgcc

SEQ ID NO: 14519 - DNA, 564 bp, Artificial Sequence
  chemically treated genomic DNA (Homo sapiens) CpG-island No: 14519
gaaagaaaagaaaaagaaaaagaaaaagaggattttttttttatcggtagttattatcgcgttaggtttaggcgtgatttttacgttagtggaaggggattgagatttagagcgaaggcggcggcgttagggtattgtagttacggagcgttagggtcgttagtttcgttagggggcgcgttcgggatttttttgcgtttcgcgcgtcgcgtttcgtttcgcgttattttcgtttcggtcggttttgcggagggcgtttttagcggttagggcgtaagcggagggggcggcggttttgtttttttacgcgggttttagcgtttttttcggttttttttagatttgtaaggttgtagtttgggtttttcgatttaaagacggtttttgaggcgaggggcgggagaacgattcggggtaggtttgtagttcgaatttgtttagagtaggagaaaggcggtttagtgtttcggtcgtggtaggcgttatttgttcgattagcgtttgggttagtttcgcgtcgttttttgtttcgtacgggttaatttttttcgtcgttcgttcgtt

SEQ ID NO: 14520 - DNA, 564 bp, Artificial Sequence
  chemically treated genomic DNA (Homo sapiens) CpG-island No: 14520
aacgaacgaacgacgaaaaaaattaacccgtacgaaacaaaaaacgacgcgaaactaacccaaacgctaatcgaacaaataacgcctaccacgaccgaaacactaaaccgcctttctcctactctaaacaaattcgaactacaaacctaccccgaatcgttctcccgcccctcgcctcaaaaaccgtctttaaatcgaaaaacccaaactacaaccttacaaatctaaaaaaaaccgaaaaaaacgctaaaacccgcgtaaaaaaacaaaaccgccgccccctccgcttacgccctaaccgctaaaaacgccctccgcaaaaccgaccgaaacgaaaataacgcgaaacgaaacgcgacgcgcgaaacgcaaaaaaatcccgaacgcgccccctaacgaaactaacgaccctaacgctccgtaactacaataccctaacgccgccgccttcgctctaaatctcaatccccttccactaacgtaaaaatcacgcctaaacctaacgcgataataactaccgataaaaaaaaaatcctctttttctttttctttttcttttctttc

SEQ ID NO: 14521 - DNA, 767 bp, Artificial Sequence
  chemically treated genomic DNA (Homo sapiens) CpG-island No: 14521
atttttcgtagttaggttttcggatcgaagattatatttattttcgttttcgatgttttagtattttttttttcgttcgagtgttttatttcgaggattattttgcgtatgcgtttagtttttggaggtaagcggttgtgtgcgggtggtcgcggtgagtgtgtaaggtcgcggtggtcgcgtgataagtttgcgttattagtgcgttcgtcggttaggagaacggagtttgtgatagattttttcgtaatattaagtattgtattaggatttgcggtttcgttttagaggtcgttatttttttgattattcgaaaggtcggatttatttttcggtgtattttgggattagggcggggttttgagcgtcgttatgtttttgtacggtaggatcgtaaagtacgtcgggatcggttggtttggttttgaagacgtggatggcgggaattttcgtttttggtttgggtgagttagaagggagaaggtaggggaaagatttattgtcggatcggatcgtggttagggtggcgggttgaacggtttttttaaaatttttttcgtggtcgggaagttcgttggattagagtagtcgtggtttcgggagcgcgtcggggtcgcgggatgggcgcgggggtgggtatggattttgttggttcggacgatgggagagggcgggcggtttaggaaaggggattttagtcgtgatatttgtgttattcgcggtttaggggttgtgtttgagtggtgtgtgttttgtcgtttgggttt

SEQ ID NO: 14522 - DNA, 767 bp, Artificial Sequence
  chemically treated genomic DNA (Homo sapiens) CpG-island No: 14522
aaacccaaacgacaaaacacacaccactcaaacacaacccctaaaccgcgaataacacaaatatcacgactaaaatcccctttcctaaaccgcccgccctctcccatcgtccgaaccaacaaaatccatacccacccccgcgcccatcccgcgaccccgacgcgctcccgaaaccacgactactctaatccaacgaacttcccgaccacgaaaaaaattttaaaaaaaccgttcaacccgccaccctaaccacgatccgatccgacaataaatctttcccctaccttctcccttctaactcacccaaaccaaaaacgaaaattcccgccatccacgtcttcaaaaccaaaccaaccgatcccgacgtactttacgatcctaccgtacaaaaacataacgacgctcaaaaccccgccctaatcccaaaatacaccgaaaaataaatccgacctttcgaataatcaaaaaaataacgacctctaaaacgaaaccgcaaatcctaatacaatacttaatattacgaaaaaatctatcacaaactccgttctcctaaccgacgaacgcactaataacgcaaacttatcacgcgaccaccgcgaccttacacactcaccgcgaccacccgcacacaaccgcttacctccaaaaactaaacgcatacgcaaaataatcctcgaaataaaacactcgaacgaaaaaaaaaatactaaaacatcgaaaacgaaaataaatataatcttcgatccgaaaacctaactacgaaaaat

SEQ ID NO: 14523 - DNA, 767 bp, Artificial Sequence
  chemically treated genomic DNA (Homo sapiens) CpG-island No: 14523
aaatttagacggtagggtatatattatttaggtataatttttgggtcgcggatgatataaatgttacggttaggatttttttttttgagtcgttcgtttttttttatcgttcgagttagtagagtttatgtttattttcgcgtttatttcgcggtttcggcgcgttttcgaggttacggttattttggtttagcgggtttttcggttacggaaggagttttaagaaggtcgtttagttcgttattttggttacggttcggttcgataatgggttttttttttatttttttttttttagtttatttaggttagaagcgagaattttcgttatttacgtttttaaaattaaattaatcggtttcggcgtgttttgcgattttgtcgtataaaagtatggcggcgtttagggtttcgttttgattttaagatgtatcggggagtaggttcggtttttcgggtggttaggaagatggcggtttttggggcggagtcgtaggttttggtataatatttggtgttacgaaaggatttattataagtttcgtttttttggtcggcgggcgtattggtagcgtaggtttgttacgcggttatcgcggttttgtatatttatcgcgattattcgtatatagtcgtttatttttaagagttgggcgtatgcgtaaagtggttttcgaggtgaggtattcgggcggagggggaggtgttgagatatcgagggcggaagtgggtgtggttttcggttcgaaggtttggttgcggggagt

SEQ ID NO: 14524 - DNA, 767 bp, Artificial Sequence
  chemically treated genomic DNA (Homo sapiens) CpG-island No: 14524
actccccgcaaccaaaccttcgaaccgaaaaccacacccacttccgccctcgatatctcaacacctccccctccgcccgaatacctcacctcgaaaaccactttacgcatacgcccaactcttaaaaataaacgactatatacgaataatcgcgataaatatacaaaaccgcgataaccgcgtaacaaacctacgctaccaatacgcccgccgaccaaaaaaacgaaacttataataaatcctttcgtaacaccaaatattataccaaaacctacgactccgccccaaaaaccgccatcttcctaaccacccgaaaaaccgaacctactccccgatacatcttaaaatcaaaacgaaaccctaaacgccgccatacttttatacgacaaaatcgcaaaacacgccgaaaccgattaatttaattttaaaaacgtaaataacgaaaattctcgcttctaacctaaataaactaaaaaaaaaaaaataaaaaaaaaacccattatcgaaccgaaccgtaaccaaaataacgaactaaacgaccttcttaaaactccttccgtaaccgaaaaacccgctaaaccaaaataaccgtaacctcgaaaacgcgccgaaaccgcgaaataaacgcgaaaataaacataaactctactaactcgaacgataaaaaaaaacgaacgactcaaaaaaaaaaatcctaaccgtaacatttatatcatccgcgacccaaaaattatacctaaataatatataccctaccgtctaaattt

SEQ ID NO: 14525 - DNA, 648 bp, Artificial Sequence
  chemically treated genomic DNA (Homo sapiens) CpG-island No: 14525
tcgttatgttttttgtagagtaatgggtggttatggtcgatggcgtttatgtcgttgttttttttgtagagcgatgggtggttatggtcgatggcgtttatgtcgttgttttttttgtagagcgatgggtggtcgtggtcgatggcgttcgtgtcgttgttttttttgtagagcgatgggtggtcgtggtcgatggcgttcgtgtcgttgttttttttgtagagcgatgggtggtcgtggcgatggcgttcgtgtcgttgttttttttgtagagcgatgggtggtcgtggcgatggcgttcgtgtcgttgttttttttgtagagcgatgggtggtcgtggcgatggcgttcgtgtcgttgttttttttgtagagcgatgggtggtcgtggtcgatggcgttcgtgtcgttgttttttttgtagagcgatgggtggtcgtggcgatggcgttcgtgtcgttgttttttttgtagagcgatgggtggtcgtgtcgatggcgttcgtgtcgttgttttttttgtagagcgatgggtggtcgtgtcgatggcgttcgtgtcgttgttttttttgtagagcgatgggtggtcgtgtcgatggcgttcgtgtcgttattttttttgttttcgtgtatgtttgaatatttttata

SEQ ID NO: 14526 - DNA, 648 bp, Artificial Sequence
  chemically treated genomic DNA (Homo sapiens) CpG-island No: 14526
tataaaaatattcaaacatacacgaaaacaaaaaaaataacgacacgaacgccatcgacacgaccacccatcgctctacaaaaaaaacaacgacacgaacgccatcgacacgaccacccatcgctctacaaaaaaaacaacgacacgaacgccatcgacacgaccacccatcgctctacaaaaaaaacaacgacacgaacgccatcgccacgaccacccatcgctctacaaaaaaaacaacgacacgaacgccatcgaccacgaccacccatcgctctacaaaaaaaacaacgacacgaacgccatcgccacgaccacccatcgctctacaaaaaaaacaacgacacgaacgccatcgccacgaccacccatcgctctacaaaaaaaacaacgacacgaacgccatcgccacgaccacccatcgctctacaaaaaaaacaacgacacgaacgccatcgaccacgaccacccatcgctctacaaaaaaaacaacgacacgaacgccatcgaccacgaccacccatcgctctacaaaaaaaacaacgacataaacgccatcgaccataaccacccatcgctctacaaaaaaaacaacgacataaacgccatcgaccataaccacccattactctacaaaaaacataacga

SEQ ID NO: 14527 - DNA, 648 bp, Artificial Sequence
  chemically treated genomic DNA (Homo sapiens) CpG-island No: 14527
tatagaaatgtttaaatatatacgaaagtagagaagataacggtacggacgttatcggtacggttatttatcgttttgtagagaagataacggtacggacgttatcggtacggttatttatcgttttgtagagaagataacggtacggacgttatcggtacggttatttatcgttttgtagagaagataacggtacggacgttatcgttacggttatttatcgttttgtagagaagataacggtacggacgttatcggttacggttatttatcgttttgtagagaagataacggtacggacgttatcgttacggttatttatcgttttgtagagaagataacggtacggacgttatcgttacggttatttatcgttttgtagagaagataacggtacggacgttatcgttacggttatttatcgttttgtagagaagataacggtacggacgttatcggttacggttatttatcgttttgtagagaagataacggtacggacgttatcggttacggttatttatcgttttgtagagaagataacggtatggacgttatcggttatggttatttatcgttttgtagagaagataacggtatggacgttatcggttatggttatttattattttgtagagaatataacgg

SEQ ID NO: 14528 - DNA, 648 bp, Artificial Sequence
  chemically treated genomic DNA (Homo sapiens) CpG-island No: 14528
ccgttatattctctacaaaataataaataaccataaccgataacgtccataccgttatcttctctacaaaacgataaataaccataaccgataacgtccataccgttatcttctctacaaaacgataaataaccgtaaccgataacgtccgtaccgttatcttctctacaaaacgataaataaccgtaaccgataacgtccgtaccgttatcttctctacaaaacgataaataaccgtaacgataacgtccgtaccgttatcttctctacaaaacgataaataaccgtaacgataacgtccgtaccgttatcttctctacaaaacgataaataaccgtaacgataacgtccgtaccgttatcttctctacaaaacgataaataaccgtaaccgataacgtccgtaccgttatcttctctacaaaacgataaataaccgtaacgataacgtccgtaccgttatcttctctacaaaacgataaataaccgtaccgataacgtccgtaccgttatcttctctacaaaacgataaataaccgtaccgataacgtccgtaccgttatcttctctacaaaacgataaataaccgtaccgataacgtccgtaccgttatcttctctactttcgtatatatttaaacatttctata

SEQ ID NO: 14529 - DNA, 1898 bp, Artificial Sequence
  chemically treated genomic DNA (Homo sapiens) CpG-island No: 14529
gtcgggaaagacgcggtgttcgagtttagtttagttgaggtttgcgtatcgtcgggaaagacgcggggttcgagattagtttagttgaggtttgcgtatcgtcgggaaagatttagagttcgagattagtttagttgaggtttgcgtatcgtcgggaaagacgcggtgttcgagtttagtttagttgaggtttgcgtatcgtcgggaaagacgcggggttcgagattagtttagttgaggtttgcgtattatcgggaaagacgcggggttcgagattagtttagttgaggtttgcgtatcgtcgggaaagacgcggggttcgagattagtttagttgaggtttgcgtatcgtcgggaaagacgcggggttcgagattagtttagttgaggtttgcgtatcgtcgggaaagatttagagttcgagtttagtttagttgaggtttgcgtatcgtcgggaaagacgcggggtttaagtgtagtttagttgaggtttgcgtatcgtcgggaaagacgcggtgttcgagtttagtttagttgaggtttgcgtatcgtcgggaaagacgcggggtttaagtgtagtttagttgaggtttgcgtatcgtcgggaaagacgcggggttcgagattagtttagttgaggtttgcgtatcgtcgggaaagacgcggggttcgagtttagtttagttgaggtttgtatagcgtcgggaaagacgtagagttagtttagtttagttggggtttgcgtatcgtcgggaaagacgtagagttcgagattagtttagttgggtttgcgtatcgtcgggaaagacgtagagttcgagattagtttagttggggtttgcgtatcgtcgggaaagacgtagagttcgagattagtttagttggggtttgcgtatcgtacgggaaagacgcggggttcgagtttagtttagttgaggtttgcgtatcgcgggaaagacgcggtgttcgagattagtttagttgaggtttgcgtatcgtcgggaaagacgcggggtttaagtgtagtttagttgaggtttgcgtatcgtcgggaaagatttagagttcgagattagtttagttgaggtttgcgtatcgtcgggaaagacgcggggtttaagtgtagtttagttgaggtttgcgtatcgtcgggaaagacgtagagttcgagattagtttagttggggtttgcgtatcgtcgggaaagacgtagagttcgagattagtttagttgaggtttgcgtatcgtcgggaaagacgcggggttcgagtttagtttagttgaggtttgcgtatcgtcgggaaagacggagagttcgagtttagtttagttgaggtttgcgtatcgtcgggaaagacgcggggttcgagtttagtttagttgaggtttgcgtatcgtcgggaaagacgcggggttcgagtttagtttagttgaggtttgcgtatcgtcgggaaagatttagagttcgagtttagtttagttgaggtttgcgtatcgtcgggaaagacgcggggttcgagtttagtttagttgaggtttgcgtatcgtcgggaaagacgcggtgttcgagattagtttagttgaggtttgcgtatcgtcgggaaagacgcggggttcgagtttagtttagttgaggtttgcgtatcgtcgggaaagatttagagttcgagtttagtttagttgaggtttgcgtatcgtcgggaaagacgcggggttcgagattagtttagttgaggtttgcgtatcgtcgggaaagacgcggggttcgagattagtttagttgaggtttgtatagcgtcgggaaagacgtagagttcgagattagtttagttgagttttgtatatttaatttcgtcgaggatttatattttgattttaggggtttttttagtttgtt

SEQ ID NO: 14530 - DNA, 1898 bp, Artificial Sequence
  chemically treated genomic DNA (Homo sapiens) CpG-island No: 14530
aacaaactaaaaaaacccctaaaatcaaaatataaatcctcgacgaaattaaatatacaaaactcaactaaactaatctcgaactctacgtctttcccgacgctatacaaacctcaactaaactaatctcgaaccccgcgtctttcccgacgatacgcaaacctcaactaaactaatctcgaaccccgcgtctttcccgacgatacgcaaacctcaactaaactaaactcgaactctaaatctttcccgacgatacgcaaacctcaactaaactaaactcgaaccccgcgtctttcccgacgatacgcaaacctcaactaaactaatctcgaacaccgcgtctttcccgacgatacgcaaacctcaactaaactaaactcgaaccccgcgtctttcccgacgatacgcaaacctcaactaaactaaactcgaactctaaatctttcccgacgatacgcaaacctcaactaaactaaactcgaaccccgcgtctttcccgacgatacgcaaacctcaactaaactaaactcgaaccccgcgtctttcccgacgatacgcaaacctcaactaaactaaactcgaactctccgtctttcccgacgatacgcaaacctcaactaaactaaactcgaaccccgcgtctttcccgacgatacgcaaacctcaactaaactaatctcgaactctacgtctttcccgacgatacgcaaaccccaactaaactaatctcgaactctacgtctttcccgacgatacgcaaacctcaactaaactacacttaaaccccgcgtctttcccgacgatacgcaaacctcaactaaactaatctcgaactctaaatctttcccgacgatacgcaaacctcaactaaactacacttaaaccccgcgtctttcccgacgatacgcaaacctcaactaaactaatctcgaacaccgcgtctttcccgcgatacgcaaacctcaactaaactaaactcgaaccccgcgtctttcccgtacgatacgcaaaccccaactaaactaatctcgaactctacgtctttcccgacgatacgcaaaccccaactaaactaatctcgaactctacgtctttcccgacgatacgcaaacccaactaaactaatctcgaactctacgtctttcccgacgatacgcaaaccccaactaaactaaactaactctacgtctttcccgacgctatacaaacctcaactaaactaaactcgaaccccgcgtctttcccgacgatacgcaaacctcaactaaactaatctcgaaccccgcgtctttcccgacgatacgcaaacctcaactaaactacacttaaaccccgcgtctttcccgacgatacgcaaacctcaactaaactaaactcgaacaccgcgtctttcccgacgatacgcaaacctcaactaaactacacttaaaccccgcgtctttcccgacgatacgcaaacctcaactaaactaaactcgaactctaaatctttcccgacgatacgcaaacctcaactaaactaatctcgaaccccgcgtctttcccgacgatacgcaaacctcaactaaactaatctcgaaccccgcgtctttcccgacgatacgcaaacctcaactaaactaatctcgaaccccgcgtctttcccgataatacgcaaacctcaactaaactaatctcgaaccccgcgtctttcccgacgatacgcaaacctcaactaaactaaactcgaacaccgcgtctttcccgacgatacgcaaacctcaactaaactaatctcgaactctaaatctttcccgacgatacgcaaacctcaactaaactaatctcgaaccccgcgtctttcccgacgatacgcaaacctcaactaaactaaactcgaacaccgcgtctttcccgac

SEQ ID NO: 14531 - DNA, 1898 bp, Artificial Sequence
  chemically treated genomic DNA (Homo sapiens) CpG-island No: 14531
gataggttaagagaatttttgaaattagaatgtaagttttcggcggagttaggtatgtaggatttagttaggttggtttcggattttgcgtttttttcggcgttgtgtaggttttagttaggttggtttcggatttcgcgtttttttcggcggtgcgtaggttttagttaggttggtttcggatttcgcgtttttttcggcggtgcgtaggttttagttaggttggattcggattttgggtttttttcggcggtgcgtaggttttagttaggttggattcggatttcgcgtttttttcggcggtgcgtaggttttagttaggttggtttcggatatcgcgtttttttcggcggtgcgtaggttttagttaggttggattcggatttcgcgtttttttcggcggtgcgtaggttttagttaggttggattcggattttgggtttttttcggcggtgcgtaggttttagttaggttggattcggatttcgcgtttttttcggcggtgcgtaggttttagttaggttggattcggatttcgcgtttttttcggcggtgcgtaggttttagttaggttggattcggatttttcgtttttttcggcggtgcgtaggttttagttaggttggattcggatttcgcgtttttttcggcggtgcgtaggttttagttaggttggtttcggattttgcgtttttttcggcggtgcgtaggttttagttaggttggtttcggattttgcgtttttttcggcggtgcgtaggttttagttaggttgtatttggatttcgcgtttttttcggcggtgcgtaggttttagttaggttggtttcggattttgggtttttttcggcggtgcgtaggttttagttaggttgtatttggatttcgcgtttttttcggcggtgcgtaggttttagttaggttggtttcggatatcgcgtttttttcgcggtgcgtaggttttagttaggttggattcggatttcgcgtttttttcgtgcggtgcgtaggttttagttaggttggtttcggattttgcgtttttttcggcggtgcgtaggttttagttaggttggtttcggattttgcgtttttttcggcggtgcgtaggtttagttaggttggtttcggattttgcgtttttttcggcggtgcgtaggttttagttaggttggattgattttgcgtttttttcggcgttgtgtaggttttagttaggttggattcggatttcgcgtttttttcggcggtgcgtaggttttagttaggttggtttcggatttcgcgtttttttcggcggtgcgtaggttttagttaggttgtatttggatttcgcgtttttttcggcggtgcgtaggttttagttaggttggattcggatatcgcgtttttttcggcggtgcgtaggttttagttaggttgtatttggatttcgcgtttttttcggcggtgcgtaggttttagttaggttggattcggattttgggtttttttcggcggtgcgtaggttttagttaggttggtttcggatttcgcgtttttttcggcggtgcgtaggttttagttaggttggtttcggatttcgcgtttttttcggcggtgcgtaggttttagttaggttggtttcggatttcgcgtttttttcggtggtgcgtaggttttagttaggttggtttcggatttcgcgtttttttcggcggtgcgtaggttttagttaggttggattcggatatcgcgtttttttcggcggtgcgtaggttttagttaggttggtttcggattttgggtttttttcggcggtgcgtaggttttagttaggttggtttcggatttcgcgtttttttcggcggtgcgtaggttttagttaggttggattcggatatcgcgtttttttcggt

SEQ ID NO: 14532 - DNA, 1898 bp, Artificial Sequence
  chemically treated genomic DNA (Homo sapiens) CpG-island No: 14532
accgaaaaaaacgcgatatccgaatccaacctaactaaaacctacgcaccgccgaaaaaaacgcgaaatccgaaaccaacctaactaaaacctacgcaccgccgaaaaaaacccaaaatccgaaaccaacctaactaaaacctacgcaccgccgaaaaaaacgcgatatccgaatccaacctaactaaaacctacgcaccgccgaaaaaaacgcgaaatccgaaaccaacctaactaaaacctacgcaccaccgaaaaaaacgcgaaatccgaaaccaacctaactaaaacctacgcaccgccgaaaaaaacgcgaaatccgaaaccaacctaactaaaacctacgcaccgccgaaaaaaacgcgaaatccgaaaccaacctaactaaaacctacgcaccgccgaaaaaaacccaaaatccgaatccaacctaactaaaacctacgcaccgccgaaaaaaacgcgaaatccaaatacaacctaactaaaacctacgcaccgccgaaaaaaacgcgatatccgaatccaacctaactaaaacctacgcaccgccgaaaaaaacgcgaaatccaaatacaacctaactaaaacctacgcaccgccgaaaaaaacgcgaaatccgaaaccaacctaactaaaacctacgcaccgccgaaaaaaacgcgaaatccgaatccaacctaactaaaacctacacaacgccgaaaaaaacgcaaaatcaatccaacctaactaaaacctacgcaccgccgaaaaaaacgcaaaatccgaaaccaacctaactaaacctacgcaccgccgaaaaaaacgcaaaatccgaaaccaacctaactaaaacctacgcaccgccgaaaaaaacgcaaaatccgaaaccaacctaactaaaacctacgcaccgcacgaaaaaaacgcgaaatccgaatccaacctaactaaaacctacgcaccgcgaaaaaaacgcgatatccgaaaccaacctaactaaaacctacgcaccgccgaaaaaaacgcgaaatccaaatacaacctaactaaaacctacgcaccgccgaaaaaaacccaaaatccgaaaccaacctaactaaaacctacgcaccgccgaaaaaaacgcgaaatccaaatacaacctaactaaaacctacgcaccgccgaaaaaaacgcaaaatccgaaaccaacctaactaaaacctacgcaccgccgaaaaaaacgcaaaatccgaaaccaacctaactaaaacctacgcaccgccgaaaaaaacgcgaaatccgaatccaacctaactaaaacctacgcaccgccgaaaaaaacgaaaaatccgaatccaacctaactaaaacctacgcaccgccgaaaaaaacgcgaaatccgaatccaacctaactaaaacctacgcaccgccgaaaaaaacgcgaaatccgaatccaacctaactaaaacctacgcaccgccgaaaaaaacccaaaatccgaatccaacctaactaaaacctacgcaccgccgaaaaaaacgcgaaatccgaatccaacctaactaaaacctacgcaccgccgaaaaaaacgcgatatccgaaaccaacctaactaaaacctacgcaccgccgaaaaaaacgcgaaatccgaatccaacctaactaaaacctacgcaccgccgaaaaaaacccaaaatccgaatccaacctaactaaaacctacgcaccgccgaaaaaaacgcgaaatccgaaaccaacctaactaaaacctacgcaccgccgaaaaaaacgcgaaatccgaaaccaacctaactaaaacctacacaacgccgaaaaaaacgcaaaatccgaaaccaacctaactaaatcctacatacctaactccgccgaaaacttacattctaatttcaaaaattctcttaacctatc

SEQ ID NO: 14533 - DNA, 850 bp, Artificial Sequence
  chemically treated genomic DNA (Homo sapiens) CpG-island No: 14533
ttagagcggtaagttagtgtcgtagtttttttcggcgggcgtttcggttttcgtagttttcggggtagagttcggtttcgtcgttcgtttttcggagtgggtgtttcggattcgttttttttttcgacgttattatttgcgttcgtttcggcgtcgtttttgttcggcgttttatcgttaagcgagtttttcgggttcgatttgattcggtttttagttttagaagagaggcggcggagcgagtagggtaagattaggtcgggtcgcgagtatagggtttcgttgttatttggaggcggtttgataatttcgatttttttcgttatatttcggattcggtcgtcgtttcgtaaggttttcgtagggtttttcgcggtttatattcgtttttcgaatcggttttttttcgttttcggcgttttttttttttttagttcgatcgagtcgggtttatattatttttttttgtcgttttcgttcggcgcggtttttattttttgttttttatttagtaataatcggttagtttttagcgcgggaggcgtttttttattttgagcgggcgatttcgcggtcgttttcggcgcggttttttgtttcggggatcgcgatgggggagggggcgcggcgggggtttcgtcgttcgcgtattcggaggcgagtcgttttcgcggcgaggaaagatcggcgttttttcgtttttcgtagttcgggacgttcgcgtcgtcgtcgttcggtcgagttgttattttgcggtcgttatttatttcgttttcggtttgtaaggcgggcggttttcgggggttgttatttcgaggcgcgtcgcgtttttcgatggcgggatcgtggt

SEQ ID NO: 14534 - DNA, 850 bp, Artificial Sequence
  chemically treated genomic DNA (Homo sapiens) CpG-island No: 14534
accacgatcccgccatcgaaaaacgcgacgcgcctcgaaataacaacccccgaaaaccgcccgccttacaaaccgaaaacgaaataaataacgaccgcaaaataacaactcgaccgaacgacgacgacgcgaacgtcccgaactacgaaaaacgaaaaaacgccgatctttcctcgccgcgaaaacgactcgcctccgaatacgcgaacgacgaaacccccgccgcgccccctcccccatcgcgatccccgaaacaaaaaaccgcgccgaaaacgaccgcgaaatcgcccgctcaaaataaaaaaacgcctcccgcgctaaaaactaaccgattattactaaataaaaaacaaaaaataaaaaccgcgccgaacgaaaacgacaaaaaaaaataatataaacccgactcgatcgaactaaaaaaaaaaaaaacgccgaaaacgaaaaaaaaccgattcgaaaaacgaatataaaccgcgaaaaaccctacgaaaaccttacgaaacgacgaccgaatccgaaatataacgaaaaaaatcgaaattatcaaaccgcctccaaataacaacgaaaccctatactcgcgacccgacctaatcttaccctactcgctccgccgcctctcttctaaaactaaaaaccgaatcaaatcgaacccgaaaaactcgcttaacgataaaacgccgaacaaaaacgacgccgaaacgaacgcaaataataacgtcgaaaaaaaaaacgaatccgaaacacccactccgaaaaacgaacgacgaaaccgaactctaccccgaaaactacgaaaaccgaaacgcccgccgaaaaaaactacgacactaacttaccgctctaa

SEQ ID NO: 14535 - DNA, 850 bp, Artificial Sequence
  chemically treated genomic DNA (Homo sapiens) CpG-island No: 14535
attacggtttcgttatcggggaacgcggcgcgtttcgaggtgatagttttcgggggtcgttcgttttgtaggtcgggggcggggtgggtggcggtcgtagggtggtagttcggtcgggcggcggcggcgcgggcgtttcgagttgcggagggcgggaggacgtcggttttttttcgtcgcggagacggttcgttttcgagtgcgcgggcggcgaggttttcgtcgcgtttttttttttatcgcggttttcgaggtaaggggtcgcgtcgggggcggtcgcgggatcgttcgtttagggtgggggggcgtttttcgcgttgggagttgatcggttattgttggatggggggtaggggatgagggtcgcgtcgggcgggggcggtaggggggagtagtgtagattcgattcgatcgggttgagaggaagggaggcgtcgaagacggaaggggatcggttcgaaaagcgagtgtgggtcgcgggaggttttgcggggattttgcggggcggcggtcgagttcgaggtgtggcggggggaatcgaagttgttagatcgtttttaagtgatagcgggattttgtgttcgcggttcggtttggttttgttttgttcgtttcgtcgttttttttttggggttgggggtcgggttaggtcgggttcgaggggttcgtttggcggtgaagcgtcggataaaggcggcgtcggagcgggcgtaggtggtggcgtcggggaggggagcgggttcgaggtatttatttcgaggggcgggcgacggggtcggattttgtttcggggattgcgggggtcggggcgttcgtcgggaggagttgcggtattggtttgtcgttttag

SEQ ID NO: 14536 - DNA, 850 bp, Artificial Sequence
  chemically treated genomic DNA (Homo sapiens) CpG-island No: 14536
ctaaaacgacaaaccaataccgcaactcctcccgacgaacgccccgacccccgcaatccccgaaacaaaatccgaccccgtcgcccgcccctcgaaataaatacctcgaacccgctcccctccccgacgccaccacctacgcccgctccgacgccgcctttatccgacgcttcaccgccaaacgaacccctcgaacccgacctaacccgacccccaaccccaaaaaaaaaacgacgaaacgaacaaaacaaaaccaaaccgaaccgcgaacacaaaatcccgctatcacttaaaaacgatctaacaacttcgattccccccgccacacctcgaactcgaccgccgccccgcaaaatccccgcaaaacctcccgcgacccacactcgcttttcgaaccgatccccttccgtcttcgacgcctcccttcctctcaacccgatcgaatcgaatctacactactcccccctaccgcccccgcccgacgcgaccctcatcccctaccccccatccaacaataaccgatcaactcccaacgcgaaaaacgcccccccaccctaaacgaacgatcccgcgaccgcccccgacgcgaccccttacctcgaaaaccgcgataaaaaaaaaaacgcgacgaaaacctcgccgcccgcgcactcgaaaacgaaccgtctccgcgacgaaaaaaaaccgacgtcctcccgccctccgcaactcgaaacgcccgcgccgccgccgcccgaccgaactaccaccctacgaccgccacccaccccgcccccgacctacaaaacgaacgacccccgaaaactatcacctcgaaacgcgccgcgttccccgataacgaaaccgtaat

SEQ ID NO: 14537 - DNA, 593 bp, Artificial Sequence
  chemically treated genomic DNA (Homo sapiens) CpG-island No: 14537
ttgatttttttatttattttcgtttacgttttcgtttatagtttcgataattttttttttattatttatttatttttcgttttttaattttttaagtttttattatttttttttatcgaacgttttttaagcgttagttttttttaatatttcgtattcgttcgtttcggcgtttttttttatttacgaggcgcgttaggttttcgttcgcgttttttagtttttttttagttttgtttcgttttttttcgttttttcgttttcgtttcgtcgtagttagttacgttagtagtagttagcgttcgtgttcgttcggtcgtttcgtcgtattttagtcgcgtttagagacgttttttcgcggtcgtttttcgcgtttacgtgcgttcgcggtttaggtataggtcgcgtgttcgttttaggtcgtttgtcgtttacgagcgcgtgtttcggttcgtgcgtttacgcgttgtatcgaggtttcgtgttttacgttcgtgcgcgtatttgtgggaagttagggtttgtttattagcgttacgtaggacgttcgtatttttttattttcggtttgtgttgtaaaatattaagtgtgt

SEQ ID NO: 14538 - DNA, 593 bp, Artificial Sequence
  chemically treated genomic DNA (Homo sapiens) CpG-island No: 14538
acacacttaatattttacaacacaaaccgaaaataaaaaaatacgaacgtcctacgtaacgctaataaacaaaccctaacttcccacaaatacgcgcacgaacgtaaaacacgaaacctcgatacaacgcgtaaacgcacgaaccgaaacacgcgctcgtaaacgacaaacgacctaaaacgaacacgcgacctatacctaaaccgcgaacgcacgtaaacgcgaaaaacgaccgcgaaaaaacgtctctaaacgcgactaaaatacgacgaaacgaccgaacgaacacgaacgctaactactactaacgtaactaactacgacgaaacgaaaacgaaaaaacgaaaaaaaacgaaacaaaactaaaaaaaaactaaaaaacgcgaacgaaaacctaacgcgcctcgtaaataaaaaaaaacgccgaaacgaacgaatacgaaatattaaaaaaaactaacgcttaaaaaacgttcgataaaaaaaaataataaaaacttaaaaaattaaaaaacgaaaaataaataaataataaaaaaaaaattatcgaaactataaacgaaaacgtaaacgaaaataaataaaaaaatcaa

SEQ ID NO: 14539 - DNA, 593 bp, Artificial Sequence
  chemically treated genomic DNA (Homo sapiens) CpG-island No: 14539
gtatatttgatattttgtagtataggtcgggggtggaagggtgcgggcgttttgcgtggcgttggtggataggttttggttttttataggtgcgcgtacgagcgtggagtacggggtttcggtgtagcgcgtgggcgtacgggtcgggatacgcgttcgtgggcggtaggcggtttgggacgagtacgcggtttgtgtttgggtcgcggacgtacgtggacgcgaggaacggtcgcggagagacgtttttgagcgcggttggggtgcggcgggacggtcgagcgagtacgggcgttggttgttgttggcgtggttggttgcggcggggcggaggcggaggggcgaggagggacggggtagggttggaggaaagttgggggacgcgagcgagagtttggcgcgtttcgtaggtgggggaaggcgtcgaggcggacgggtgcggggtattggggggggttggcgtttggggggcgttcgatgagaggggatggtggggatttgaggggttggggagcggagggtggatgggtggtggaaggagggttgtcgaggttgtgggcgggagcgtgggcgggggtgggtgggggagttag

SEQ ID NO: 14540 - DNA, 593 bp, Artificial Sequence
  chemically treated genomic DNA (Homo sapiens) CpG-island No: 14540
ctaactcccccacccacccccgcccacgctcccgcccacaacctcgacaaccctccttccaccacccatccaccctccgctccccaacccctcaaatccccaccatcccctctcatcgaacgccccccaaacgccaaccccccccaataccccgcacccgtccgcctcgacgccttcccccacctacgaaacgcgccaaactctcgctcgcgtcccccaactttcctccaaccctaccccgtccctcctcgcccctccgcctccgccccgccgcaaccaaccacgccaacaacaaccaacgcccgtactcgctcgaccgtcccgccgcaccccaaccgcgctcaaaaacgtctctccgcgaccgttcctcgcgtccacgtacgtccgcgacccaaacacaaaccgcgtactcgtcccaaaccgcctaccgcccacgaacgcgtatcccgacccgtacgcccacgcgctacaccgaaaccccgtactccacgctcgtacgcgcacctataaaaaaccaaaacctatccaccaacgccacgcaaaacgcccgcacccttccacccccgacctatactacaaaatatcaaatatac

SEQ ID NO: 14541 - DNA, 554 bp, Artificial Sequence
  chemically treated genomic DNA (Homo sapiens) CpG-island No: 14541
tcgcgttttcgggttttttgagggttttatcgtgttcggtttgggcgatgatacggggttttagcggtagcgagagaaaggttttgtcggtagttggaggcggggaggaaggaggagagaacgtaggttcgtttttttcgtcgagcggtacgtacgacggcggcgatagcggcggaacgggcgggtcgggcgcgagcggtatttgcgcgtagattatggtttcgttttttttcgttttgttcgtcgcgtttcgtttattcgttaatcggtcggggaggcgggagtagggcgggaggagtttagggtgggaggacgcgcggcggtagggagttggagaggggaaggcgttggttaggtcgttttcgggagttttagtttttcgtttcggtacgtgggtttttcggttttaggttttcgttttcgtttgcgtgcgcggtttgggttatttgtttacgtttattcgacgtttatagttttaagtttttttagttggattgcggagtgttttgggttttgattttttttcgggagattcggggcgtttgaagttaggt

SEQ ID NO: 14542 - DNA, 554 bp, Artificial Sequence
  chemically treated genomic DNA (Homo sapiens) CpG-island No: 14542
acctaacttcaaacgccccgaatctcccgaaaaaaaatcaaaacccaaaacactccgcaatccaactaaaaaaacttaaaactataaacgtcgaataaacgtaaacaaataacccaaaccgcgcacgcaaacgaaaacgaaaacctaaaaccgaaaaacccacgtaccgaaacgaaaaactaaaactcccgaaaacgacctaaccaacgccttcccctctccaactccctaccgccgcgcgtcctcccaccctaaactcctcccgccctactcccgcctccccgaccgattaacgaataaacgaaacgcgacgaacaaaacgaaaaaaaacgaaaccataatctacgcgcaaataccgctcgcgcccgacccgcccgttccgccgctatcgccgccgtcgtacgtaccgctcgacgaaaaaaacgaacctacgttctctcctccttcctccccgcctccaactaccgacaaaacctttctctcgctaccgctaaaaccccgtatcatcgcccaaaccgaacacgataaaaccctcaaaaaacccgaaaacgcga

SEQ ID NO: 14543 - DNA, 554 bp, Artificial Sequence
  chemically treated genomic DNA (Homo sapiens) CpG-island No: 14543
gtttgattttagacgtttcggatttttcggagagaagttagggtttaaggtatttcgtagtttagttgggaaagtttggggttgtaggcgtcgagtgaacgtgagtaggtaatttaggtcgcgtacgtagacggaagcggagatttagaatcgagaagtttacgtgtcgaagcggaagattagagttttcgggaacggtttagttagcgtttttttttttttagttttttgtcgtcgcgcgtttttttattttgggtttttttcgttttattttcgttttttcggtcggttagcgaatgggcgggacgcggcgggtaaggcggggaggggcggggttatggtttgcgcgtaggtgtcgttcgcgttcggttcgttcgtttcgtcgttgtcgtcgtcgtcgtgcgtgtcgttcggcggaggggacgggtttgcgtttttttttttttttttttcgtttttagttgtcggtaggatttttttttcgttgtcgttgggatttcgtgttatcgtttaggtcgagtacggtgaggtttttagggagttcgggggcgcga

SEQ ID NO: 14544 - DNA, 554 bp, Artificial Sequence
  chemically treated genomic DNA (Homo sapiens) CpG-island No: 14544
tcgcgcccccgaactccctaaaaacctcaccgtactcgacctaaacgataacacgaaatcccaacgacaacgaaaaaaaaatcctaccgacaactaaaaacgaaaaaaaaaaaaaaaaaaacgcaaacccgtcccctccgccgaacgacacgcacgacgacgacgacaacgacgaaacgaacgaaccgaacgcgaacgacacctacgcgcaaaccataaccccgcccctccccgccttacccgccgcgtcccgcccattcgctaaccgaccgaaaaaacgaaaataaaacgaaaaaaacccaaaataaaaaaacgcgcgacgacaaaaaactaaaaaaaaaaaaacgctaactaaaccgttcccgaaaactctaatcttccgcttcgacacgtaaacttctcgattctaaatctccgcttccgtctacgtacgcgacctaaattacctactcacgttcactcgacgcctacaaccccaaactttcccaactaaactacgaaataccttaaaccctaacttctctccgaaaaatccgaaacgtctaaaatcaaac

SEQ ID NO: 14545 - DNA, 613 bp, Artificial Sequence
  chemically treated genomic DNA (Homo sapiens) CpG-island No: 14545
  unsure (101..102, 309, 321, 323, 345)
cggaacgatttcgttggttatgttggcggcgatttgtaataagatcggtaatacgagttcgttgacgacgttgttagagtcgagcgttttcgttaaagggnntttttatttttggaagcgtttttcgtttagttgtaatttcggttttagtttttcgggtttcgcggtggttatcgggggtcgtggttcgggcggtttggcgggcggttcgggcgcgtaatagcgttttttgtttggtttttacgtcgtttacgtcgttcgtttttagtagcgattacggcggttttttttttaattcggcggttgttnggcggtaggttngngttcgttttcgtaagaggcgtngagttagtcggtttttatttttaaggtgtatacgacggtagtcgacgggttgtattcgcgcgtgggtatggcgtattcgtacgagttttggtataagtcgggtttttattcgacgttggcggtcggcgaggtgattaacggcgcggcgtcgtcgtggtgggacgtgtatagtagttcgggttcgtggttggaagtgtagaaatcgttggggggttttagagttcgttgtattcgggcgttttttaggtttcgttgtattcgtagttgg

SEQ ID NO: 14546 - DNA, 613 bp, Artificial Sequence
  chemically treated genomic DNA (Homo sapiens) CpG-island No: 14546
  unsure (269, 291, 293, 305, 512..)
ccaactacgaatacaacgaaacctaaaaaacgcccgaatacaacgaactctaaaaccccccaacgatttctacacttccaaccacgaacccgaactactatacacgtcccaccacgacgacgccgcgccgttaatcacctcgccgaccgccaacgtcgaataaaaacccgacttataccaaaactcgtacgaatacgccatacccacgcgcgaatacaacccgtcgactaccgtcgtatacaccttaaaaataaaaaccgactaactcnacgcctcttacgaaaacgaacncnaacctaccgccnaacaaccgccgaattaaaaaaaaaaccgccgtaatcgctactaaaaacgaacgacgtaaacgacgtaaaaaccaaacaaaaaacgctattacgcgcccgaaccgcccgccaaaccgcccgaaccacgacccccgataaccaccgcgaaacccgaaaaactaaaaccgaaattacaactaaacgaaaaacgcttccaaaaataaaaannccctttaacgaaaacgctcgactctaacaacgtcgtcaacgaactcgtattaccgatcttattacaaatcgccgccaacataaccaacgaaatcgttccg

SEQ ID NO: 14547 - DNA, 613 bp, Artificial Sequence
  chemically treated genomic DNA (Homo sapiens) CpG-island No: 14547
  unsure (269, 291, 293, 305, 512..)
ttagttgcgagtgtagcgaggtttggggggcgttcgagtgtagcgagttttggagttttttagcggtttttgtatttttagttacgagttcgggttgttgtgtacgttttattacgacgacgtcgcgtcgttggttatttcgtcggtcgttagcgtcgaatggaagttcgatttgtattaggattcgtacgggtgcgttatgtttacgcgcgggtatagttcgtcggttgtcgtcgtgtgtattttggaaatgaaggtcgattggtttnacgttttttgcggggacgaatntnggtttgtcgttnggtagtcgtcgagttggagaagaggtcgtcgtagtcgttgttgaaggcggacgacgtgggcgacgtggaggttaggtagaaggcgttgttgcgcgttcgagtcgttcgttaggtcgttcgagttacggttttcggtggttatcgcgaagttcgagaggttggagtcgaggttgtagttggacgaggagcgtttttaggggtgaaagnnttttttggcgaaggcgttcgattttggtagcgtcgttagcgggttcgtgttgtcgattttgttgtaggtcgtcgttagtatggttaacggggtcgtttcg

SEQ ID NO: 14548 - DNA, 613 bp, Artificial Sequence
  chemically treated genomic DNA (Homo sapiens) CpG-island No: 14548
  unsure (101..102, 309, 321, 323, 345)
cgaaacgaccccgttaaccatactaacgacgacctacaacaaaatcgacaacacgaacccgctaacgacgctaccaaaatcgaacgccttcgccaaaaaannctttcacccctaaaaacgctcctcgtccaactacaacctcgactccaacctctcgaacttcgcgataaccaccgaaaaccgtaactcgaacgacctaacgaacgactcgaacgcgcaacaacgccttctacctaacctccacgtcgcccacgtcgtccgccttcaacaacgactacgacgacctcttctccaactcgacgactaccnaacgacaaaccnanattcgtccccgcaaaaaacgtnaaaccaatcgaccttcatttccaaaatacacacgacgacaaccgacgaactatacccgcgcgtaaacataacgcacccgtacgaatcctaatacaaatcgaacttccattcgacgctaacgaccgacgaaataaccaacgacgcgacgtcgtcgtaataaaacgtacacaacaacccgaactcgtaactaaaaatacaaaaaccgctaaaaaactccaaaactcgctacactcgaacgccccccaaacctcgctacactcgcaactaa

SEQ ID NO: 14549 - DNA, 1072 bp, Artificial Sequence
  chemically treated genomic DNA (Homo sapiens) CpG-island No: 14549
tttagttcgtttacgtatttcgtttttagttttacgggtttcggttttttcgtcgtcgtcgttttttatttgttttttattagttagtatttgttggtttaggacggttttaagtcggtgttgtttttttattcggattttagcgtcgtcgtggtagtcgtcgtcgttagcgttatgatatcgggcgtcgcggttgtcgtcgtcggggggagttcggtacgttttgttcgtcgttattcgggtcgcgtatttgcgattgttttaattgttaggaggcggagcggttgggttcggtcggggcgagtttgcgcgtaagggtttgtatagttgttatatttcgggttgcggtaaggtgtacgggaagacgtcgtatttgaaggcgtatttgtcgtggtatacgggcgagcggtttttcgtgtgtaattggtttttttgcggtaagcgttttacgtttcggacgagttgtagcgtatttgcggatttatacgggcgagaagcgtttcgtttgttcggtgtgtaataagcgttttatgcgtagcgattatttgagtaaatatattaagacgtataacgggggcggcgggggtaaaaagggtagcgatagtgatacggacgttagtaatttggagacgtttcgtttcgaatttttcgattttattttgtatgatttcggcgttagtgtcgttcgggcggtagcggcggcggcggtagcggcggcggcggcggcggtcgttttcgcgtgaggtaaggaagtagcgtttggttttaacgatttttagaggtcgggcgagaggcgcgagtatataagcgagtagagatatcgagaacgaacgagaggttcggagggcgagcgagcgggaggcgggagggtaggggttttagtgacgttttagggttcgggttgggcgcgaggtggagtcgtttagggttttcgggttgcggttcgttcgttgtgcgaggagtttttttttgtttttcgcgttcggataagaatcgaacgcgtggttcggaaataaaagcgaattatttttcgatataaatattttaaaaattgtatttttagacgtatata

SEQ ID NO: 14550 - DNA, 1072 bp, Artificial Sequence
  chemically treated genomic DNA (Homo sapiens) CpG-island No: 14550
tatatacgtctaaaaatacaatttttaaaatatttatatcgaaaaataattcgcttttatttccgaaccacgcgttcgattcttatccgaacgcgaaaaacaaaaaaaaactcctcgcacaacgaacgaaccgcaacccgaaaaccctaaacgactccacctcgcgcccaacccgaaccctaaaacgtcactaaaacccctaccctcccgcctcccgctcgctcgccctccgaacctctcgttcgttctcgatatctctactcgcttatatactcgcgcctctcgcccgacctctaaaaatcgttaaaaccaaacgctacttccttacctcacgcgaaaacgaccgccgccgccgccgccgctaccgccgccgccgctaccgcccgaacgacactaacgccgaaatcatacaaaataaaatcgaaaaattcgaaacgaaacgtctccaaattactaacgtccgtatcactatcgctaccctttttacccccgccgcccccgttatacgtcttaatatatttactcaaataatcgctacgcataaaacgcttattacacaccgaacaaacgaaacgcttctcgcccgtataaatccgcaaatacgctacaactcgtccgaaacgtaaaacgcttaccgcaaaaaaaccaattacacacgaaaaaccgctcgcccgtataccacgacaaatacgccttcaaatacgacgtcttcccgtacaccttaccgcaacccgaaatataacaactatacaaacccttacgcgcaaactcgccccgaccgaacccaaccgctccgcctcctaacaattaaaacaatcgcaaatacgcgacccgaataacgacgaacaaaacgtaccgaactccccccgacgacgacaaccgcgacgcccgatatcataacgctaacgacgacgactaccacgacgacgctaaaatccgaataaaaaaacaacaccgacttaaaaccgtcctaaaccaacaaatactaactaataaaaaacaaataaaaaacgacgacgacgaaaaaaccgaaacccgtaaaactaaaaacgaaatacgtaaacgaactaaa

SEQ ID NO: 14551 - DNA, 1072 bp, Artificial Sequence
  chemically treated genomic DNA (Homo sapiens) CpG-island No: 14551
tgtgtacgtttgggagtatagtttttaaagtgtttgtgtcggaggatggttcgtttttgttttcggattacgcgttcgatttttattcgggcgcggaaggtagaggggagtttttcgtatagcgggcgaatcgtagttcgggagttttgagcggttttatttcgcgtttagttcgggttttggggcgttattgaagtttttgttttttcgtttttcgttcgttcgtttttcgaatttttcgttcgttttcggtgtttttattcgtttgtgtgttcgcgtttttcgttcggtttttaagagtcgttggggttagacgttgtttttttgttttacgcggaggcggtcgtcgtcgtcgtcgtcgttgtcgtcgtcgtcgttgtcgttcgggcggtattgacgtcggagttatgtaggatgaggtcgggggattcggaacggggcgtttttaggttgttggcgttcgtgttattgtcgttgttttttttgttttcgtcgttttcgttgtgcgttttaatgtgtttgtttaggtggtcgttgcgtatgaagcgtttgttgtatatcggataggcgaagcgtttttcgttcgtgtgagttcgtagatgcgttgtagttcgttcgaggcgtgaagcgtttgtcgtagaagagttagttgtatacgaagggtcgttcgttcgtgtgttacggtaggtgcgtttttaggtgcgacgttttttcgtatattttgtcgtagttcggaatgtggtagttgtgtaggtttttgcgcgtaggttcgtttcggtcgggtttagtcgtttcgttttttggtagttggggtagtcgtaggtgcgcggttcgagtagcggcgggtagagcgtgtcgagtttttttcggcggcggtagtcgcggcgttcgatattatggcgttggcggcggcggttgttacggcggcgttggagttcgaataggagggtaatatcggtttgaagtcgttttgggttagtaggtgttggttggtggagagtaggtgggaggcggcggcggcggaggagtcgaggttcgtggagttgaaggcggagtgcgtgagcgagttgaa

SEQ ID NO: 14552 - DNA, 1072 bp, Artificial Sequence
  chemically treated genomic DNA (Homo sapiens) CpG-island No: 14552
ttcaactcgctcacgcactccgccttcaactccacgaacctcgactcctccgccgccgccgcctcccacctactctccaccaaccaacacctactaacccaaaacgacttcaaaccgatattaccctcctattcgaactccaacgccgccgtaacaaccgccgccgccaacgccataatatcgaacgccgcgactaccgccgccgaaaaaaactcgacacgctctacccgccgctactcgaaccgcgcacctacgactaccccaactaccaaaaaacgaaacgactaaacccgaccgaaacgaacctacgcgcaaaaacctacacaactaccacattccgaactacgacaaaatatacgaaaaaacgtcgcacctaaaaacgcacctaccgtaacacacgaacgaacgacccttcgtatacaactaactcttctacgacaaacgcttcacgcctcgaacgaactacaacgcatctacgaactcacacgaacgaaaaacgcttcgcctatccgatatacaacaaacgcttcatacgcaacgaccacctaaacaaacacattaaaacgcacaacgaaaacgacgaaaacaaaaaaaacaacgacaataacacgaacgccaacaacctaaaaacgccccgttccgaatcccccgacctcatcctacataactccgacgtcaataccgcccgaacgacaacgacgacgacgacaacgacgacgacgacgacgaccgcctccgcgtaaaacaaaaaaacaacgtctaaccccaacgactcttaaaaaccgaacgaaaaacgcgaacacacaaacgaataaaaacaccgaaaacgaacgaaaaattcgaaaaacgaacgaacgaaaaacgaaaaaacaaaaacttcaataacgccccaaaacccgaactaaacgcgaaataaaaccgctcaaaactcccgaactacgattcgcccgctatacgaaaaactcccctctaccttccgcgcccgaataaaaatcgaacgcgtaatccgaaaacaaaaacgaaccatcctccgacacaaacactttaaaaactatactcccaaacgtacaca

SEQ ID NO: 14553 - DNA, 600 bp, Artificial Sequence
  chemically treated genomic DNA (Homo sapiens) CpG-island No: 14553
tttttcgcggttaggttgtttcgttttttttattcgagtttttttttattttggttatttttttttttcgattaagttgtttataatcgggagttttttattttttaagcgtttttggtcgggggatggtttttcggagagtcggttggtagggacgcgtttttcggaggggtttcgggtcggggtattggaggtttagagggtgtttggcgcgtttgggggtcgcgggttggcggcgcggagtagagggtgtggtgggtttttttaggaacgcgggcgttcgggcgtcgggtttagggagttttgtttttcgttgataataaaggtagattaaagggttcggtcgtgtaggtttcgttggtcgcgcggtttttttcgtaggttagtgattaaggtttgtgtgcgttgtttttgtttcgcgggttagcggacgtttattatttaggttttcgggagcggcgggcggcggtttcggatcgagcgtttagtcgggagatagtagttcgcggaatttgagtttagaggtagcggggtttcgggtttcgtcgaattaataggcgaaaatagggtttagttttttgttcggttttttttaagttt

SEQ ID NO: 14554 - DNA, 600 bp, Artificial Sequence
  chemically treated genomic DNA (Homo sapiens) CpG-island No: 14554
aaacttaaaaaaaaccgaacaaaaaactaaaccctattttcgcctattaattcgacgaaacccgaaaccccgctacctctaaactcaaattccgcgaactactatctcccgactaaacgctcgatccgaaaccgccgcccgccgctcccgaaaacctaaataataaacgtccgctaacccgcgaaacaaaaacaacgcacacaaaccttaatcactaacctacgaaaaaaaccgcgcgaccaacgaaacctacacgaccgaaccctttaatctacctttattatcaacgaaaaacaaaactccctaaacccgacgcccgaacgcccgcgttcctaaaaaaacccaccacaccctctactccgcgccgccaacccgcgacccccaaacgcgccaaacaccctctaaacctccaataccccgacccgaaacccctccgaaaaacgcgtccctaccaaccgactctccgaaaaaccatcccccgaccaaaaacgcttaaaaaataaaaaactcccgattataaacaacttaatcgaaaaaaaaaaataaccaaaataaaaaaaaactcgaataaaaaaaacgaaacaacctaaccgcgaaaaa

SEQ ID NO: 14555 - DNA, 600 bp, Artificial Sequence
  chemically treated genomic DNA (Homo sapiens) CpG-island No: 14555
gggtttgggggaggtcgggtagggggttagattttgttttcgtttgttggttcggcggggttcggggtttcgttgtttttgggtttaggtttcgcggattgttgtttttcggttggacgttcggttcggggtcgtcgttcgtcgttttcgggagtttgggtgatggacgttcgttgattcgcggggtagaggtagcgtatataggttttgattattggtttgcggagggagtcgcgcggttagcgggatttgtacgatcgggttttttgatttgtttttattattaacgagaaataaagttttttgggttcgacgttcgggcgttcgcgtttttggggagatttattatattttttatttcgcgtcgttagttcgcggtttttaaacgcgttaggtattttttgggtttttagtgtttcggttcgaagttttttcggaaaacgcgtttttgttagtcggtttttcggaagattatttttcgattagaggcgtttagggagtggggggttttcggttatgaatagtttgatcggggagagaaaatggttaaagtgaagaaaaattcgagtaagaagagcggggtagtttggtcgcggggag

SEQ ID NO: 14556 - DNA, 600 bp, Artificial Sequence
  chemically treated genomic DNA (Homo sapiens) CpG-island No: 14556
ctccccgcgaccaaactaccccgctcttcttactcgaatttttcttcactttaaccattttctctccccgatcaaactattcataaccgaaaaccccccactccctaaacgcctctaatcgaaaaataatcttccgaaaaaccgactaacaaaaacgcgttttccgaaaaaacttcgaaccgaaacactaaaaacccaaaaaatacctaacgcgtttaaaaaccgcgaactaacgacgcgaaataaaaaatataataaatctccccaaaaacgcgaacgcccgaacgtcgaacccaaaaaactttatttctcgttaataataaaaacaaatcaaaaaacccgatcgtacaaatcccgctaaccgcgcgactccctccgcaaaccaataatcaaaacctatatacgctacctctaccccgcgaatcaacgaacgtccatcacccaaactcccgaaaacgacgaacgacgaccccgaaccgaacgtccaaccgaaaaacaacaatccgcgaaacctaaacccaaaaacaacgaaaccccgaaccccgccgaaccaacaaacgaaaacaaaatctaaccccctacccgacctcccccaaaccc

SEQ ID NO: 14557 - DNA, 594 bp, Artificial Sequence
  chemically treated genomic DNA (Homo sapiens) CpG-island No: 14557
cgtatgcgttgattaagtttaagcggtttcggatgatgttacgcgagggtttgagttagttaaggggtcggcgcgtttgggggtatgcggttgttgcgggacgtattaggtttagtcgttcgatagtcgttcgaggagtagtttagttattttagggttcggaggattaatcgtttcgatatcgtttcgggcggcggtagtgttggtcggcgaggcgaggaggtcgggtcgttacggtgggcgaaaagttttgaaagttttttttagttttttcggtgcgtttttcgttcgttttgcggaggttttgagggcggatttaaggtttcgcgagaagttatttgaggcggcgacgattgtttttagttttacgggaacgtcgcggacgtagcgtttttttttcggataagaaaatagttattttagagtaggttttttttttttttttgtttttttttttttttcgtgtttatggttgacgcgagttgtttttggacgtgggtttcgggtttgattggatagacgtgggttttgtttttgaaaggcgtaaaattttagatttgttttgtaattttttggttttcgtttttgttttta

SEQ ID NO: 14558 - DNA, 594 bp, Artificial Sequence
  chemically treated genomic DNA (Homo sapiens) CpG-island No: 14558
taaaaacaaaaacgaaaaccaaaaaattacaaaacaaatctaaaattttacgcctttcaaaaacaaaacccacgtctatccaatcaaacccgaaacccacgtccaaaaacaactcgcgtcaaccataaacacgaaaaaaaaaaaaaaacaaaaaaaaaaaaaaaacctactctaaaataactattttcttatccgaaaaaaaaacgctacgtccgcgacgttcccgtaaaactaaaaacaatcgtcgccgcctcaaataacttctcgcgaaaccttaaatccgccctcaaaacctccgcaaaacgaacgaaaaacgcaccgaaaaaactaaaaaaaactttcaaaacttttcgcccaccgtaacgacccgacctcctcgcctcgccgaccaacactaccgccgcccgaaacgatatcgaaacgattaatcctccgaaccctaaaataactaaactactcctcgaacgactatcgaacgactaaacctaatacgtcccgcaacaaccgcatacccccaaacgcgccgaccccttaactaactcaaaccctcgcgtaacatcatccgaaaccgcttaaacttaatcaacgcatacg

SEQ ID NO: 14559 - DNA, 594 bp, Artificial Sequence
  chemically treated genomic DNA (Homo sapiens) CpG-island No: 14559
tagaggtaaaaacggagattaggaggttgtaggataagtttgaggttttacgttttttagaaatagaatttacgtttgtttagttaagttcgggatttacgtttaaaagtagttcgcgttagttatgggtacgggaaaggggaaaaaataaggaaaggggaggaatttattttagaatggttgtttttttgttcgggagagggacgttgcgttcgcggcgttttcgtggggttgagaatagtcgtcgtcgttttagatggtttttcgcggggttttgaattcgtttttagggttttcgtaaggcgagcgggaggcgtatcggaagaattgagaggaatttttagggtttttcgtttatcgtggcggttcggttttttcgtttcgtcggttaatattgtcgtcgttcggggcggtgtcgaagcggttggtttttcgggttttggggtggttgggttgtttttcgggcggttgtcgggcgattaggtttggtgcgtttcgtagtagtcgtatgtttttaggcgcgtcggttttttggttggtttagattttcgcgtggtattattcgaagtcgtttaggtttagttagcgtatgcg

SEQ ID NO: 14560 - DNA, 594 bp, Artificial Sequence
  chemically treated genomic DNA (Homo sapiens) CpG-island No: 14560
cgcatacgctaactaaacctaaacgacttcgaataataccacgcgaaaatctaaaccaaccaaaaaaccgacgcgcctaaaaacatacgactactacgaaacgcaccaaacctaatcgcccgacaaccgcccgaaaaacaacccaaccaccccaaaacccgaaaaaccaaccgcttcgacaccgccccgaacgacgacaatattaaccgacgaaacgaaaaaaccgaaccgccacgataaacgaaaaaccctaaaaattcctctcaattcttccgatacgcctcccgctcgccttacgaaaaccctaaaaacgaattcaaaaccccgcgaaaaaccatctaaaacgacgacgactattctcaaccccacgaaaacgccgcgaacgcaacgtccctctcccgaacaaaaaaacaaccattctaaaataaattcctcccctttccttattttttcccctttcccgtacccataactaacgcgaactacttttaaacgtaaatcccgaacttaactaaacaaacgtaaattctatttctaaaaaacgtaaaacctcaaacttatcctacaacctcctaatctccgtttttacctcta

SEQ ID NO: 14561 - DNA, 561 bp, Artificial Sequence
  chemically treated genomic DNA (Homo sapiens) CpG-island No: 14561
ttcgtcgcggtcggtcgtcgttttttattaggtgttcggagaaatcgggatttgtttttcgcggggtagggagtttgggagtcgcgtttatcgtttattcgttcggtttttttttttcgggattcgcgtattaggacgtcgttttttcgttttttttttttcgttttttacgttcggagattttcgtcgggttcgtgttatttcgtttaggtttacgtagggttcggcgttttcggggaatatttcgtttatcgtcggttttatttcggggtcgcggcgttttaggtttattttcggttttagagtcgttttcggcgcgcgttatatggtagatttagacgtcggaggatcgcgtttttgtggtgttcgttcgttggggtgttttcggtcgtcggcgcgttcgcggttatcggcgtttgtttttgcgttggcgagggcgggcgtttgtaacgtttttgatgggcggtcgggcggttacggggagaaaaggttgttagtaatgggagtagtgtttgtagagtacgttttcgattagaggtcggatttagaataaagaaggag

SEQ ID NO: 14562 - DNA, 561 bp, Artificial Sequence
  chemically treated genomic DNA (Homo sapiens) CpG-island No: 14562
ctccttctttattctaaatccgacctctaatcgaaaacgtactctacaaacactactcccattactaacaaccttttctccccgtaaccgcccgaccgcccatcaaaaacgttacaaacgcccgccctcgccaacgcaaaaacaaacgccgataaccgcgaacgcgccgacgaccgaaaacaccccaacgaacgaacaccacaaaaacgcgatcctccgacgtctaaatctaccatataacgcgcgccgaaaacgactctaaaaccgaaaataaacctaaaacgccgcgaccccgaaataaaaccgacgataaacgaaatattccccgaaaacgccgaaccctacgtaaacctaaacgaaataacacgaacccgacgaaaatctccgaacgtaaaaaacgaaaaaaaaaaaacgaaaaaacgacgtcctaatacgcgaatcccgaaaaaaaaaaaccgaacgaataaacgataaacgcgactcccaaactccctaccccgcgaaaaacaaatcccgatttctccgaacacctaataaaaaacgacgaccgaccgcgacgaa

SEQ ID NO: 14563 - DNA, 561 bp, Artificial Sequence
  chemically treated genomic DNA (Homo sapiens) CpG-island No: 14563
ttttttttttattttggattcggtttttggtcggaggcgtgttttgtaggtattgtttttattgttggtagtttttttttttcgtggtcgttcggtcgtttattagaggcgttgtagacgttcgttttcgttagcgtaaagataaacgtcggtggtcgcggacgcgtcggcggtcgggagtattttagcgggcgggtattatagaggcgcggtttttcggcgtttagatttgttatgtggcgcgcgtcggaagcggttttgaggtcggaagtgagtttagagcgtcgcggtttcgagatgaagtcggcggtggacgagatgtttttcgagggcgtcgggttttacgtggatttggacgaggtggtacgggttcggcgggagttttcgagcgtggggagcggggaagggggagcggaagggcggcgttttggtgcgcgggtttcggggaggggaggtcgggcgggtgggcgatgggcgcggtttttaggttttttgtttcgcggagagtaaatttcggttttttcgagtatttggtgaaaggcggcgatcgatcgcggcggg

SEQ ID NO: 14564 - DNA, 561 bp, Artificial Sequence
  chemically treated genomic DNA (Homo sapiens) CpG-island No: 14564
cccgccgcgatcgatcgccgcctttcaccaaatactcgaaaaaaccgaaatttactctccgcgaaacaaaaaacctaaaaaccgcgcccatcgcccacccgcccgacctcccctccccgaaacccgcgcaccaaaacgccgcccttccgctcccccttccccgctccccacgctcgaaaactcccgccgaacccgtaccacctcgtccaaatccacgtaaaacccgacgccctcgaaaaacatctcgtccaccgccgacttcatctcgaaaccgcgacgctctaaactcacttccgacctcaaaaccgcttccgacgcgcgccacataacaaatctaaacgccgaaaaaccgcgcctctataatacccgcccgctaaaatactcccgaccgccgacgcgtccgcgaccaccgacgtttatctttacgctaacgaaaacgaacgtctacaacgcctctaataaacgaccgaacgaccacgaaaaaaaaaaactaccaacaataaaaacaatacctacaaaacacgcctccgaccaaaaaccgaatccaaaataaaaaaaaaa

SEQ ID NO: 14565 - DNA, 619 bp, Artificial Sequence
  chemically treated genomic DNA (Homo sapiens) CpG-island No: 14565
agttagttcgaatttatttgtttggtaggtgcgcgtttttcgaggcgtgataagggagcgtcggcgcggtgggtggggggtagagaatgtgaagttttagacgtatggtattcgtcgttaagtcgtcgcggtggttgtcgggatgcgtcgtagcgaatggtcgcgtcgggcgtcgttttgagtgattttttattcgcgtttagcggtttcgggcggtagtataaggcggtagttatggcggaggcggcggttgtagcgggtgggattggtttggggcgggcgcgagttacgggtttgtagcggatcgggatcgggattcggatcggatcgcgtcgggcgggaggttgcgggttttttttggttatttgttgggtcggtttcgggaggttttgagtattaatgagtgtaaagcgcggagagtcgcgtcggcgtagcggtagcgtttacgcgttattttcgtcgcgtaggagtcgggtattattttaaagaagcggtgagtagcggtatgtggaaggagttagcgtcgagggattaggtcgggttgtgttgtaggagggtataggcgaggtgggaagggaagtgatacgggtgggcggaaggtatttcggtttttgaaagt

SEQ ID NO: 14566 - DNA, 619 bp, Artificial Sequence
  chemically treated genomic DNA (Homo sapiens) CpG-island No: 14566
actttcaaaaaccgaaataccttccgcccacccgtatcacttcccttcccacctcgcctataccctcctacaacacaacccgacctaatccctcgacgctaactccttccacataccgctactcaccgcttctttaaaataatacccgactcctacgcgacgaaaataacgcgtaaacgctaccgctacgccgacgcgactctccgcgctttacactcattaatactcaaaacctcccgaaaccgacccaacaaataaccaaaaaaaacccgcaacctcccgcccgacgcgatccgatccgaatcccgatcccgatccgctacaaacccgtaactcgcgcccgccccaaaccaatcccacccgctacaaccgccgcctccgccataactaccgccttatactaccgcccgaaaccgctaaacgcgaataaaaaatcactcaaaacgacgcccgacgcgaccattcgctacgacgcatcccgacaaccaccgcgacgacttaacgacgaataccatacgtctaaaacttcacattctctaccccccacccaccgcgccgacgctcccttatcacgcctcgaaaaacgcgcacctaccaaacaaataaattcgaactaact

SEQ ID NO: 14567 - DNA, 619 bp, Artificial Sequence
  chemically treated genomic DNA (Homo sapiens) CpG-island No: 14567
atttttagggatcgggatgtttttcgtttattcgtgttatttttttttttatttcgtttgtgtttttttgtagtatagttcggtttggtttttcgacgttaattttttttatatatcgttatttatcgtttttttgggatggtgttcgatttttgcgcggcgggagtggcgcgtgggcgttgtcgttgcgtcgacgcggtttttcgcgttttgtatttattggtatttagagtttttcggggtcggtttagtagatggttagagagaattcgtagtttttcgttcggcgcggttcggttcgggtttcggtttcggttcgttgtagattcgtagttcgcgttcgttttaagttagttttattcgttgtagtcgtcgttttcgttatggttatcgttttgtgttgtcgttcggaatcgttgggcgcgggtgaaaggttatttagagcggcgttcggcgcgattattcgttgcggcgtatttcggtagttatcgcggcgatttggcggcgggtgttatgcgtttggagttttatattttttgttttttatttatcgcgtcggcgtttttttgttacgtttcgggaagcgcgtatttgttaagtaggtgagttcgagttgatt

SEQ ID NO: 14568 - DNA, 619 bp, Artificial Sequence
  chemically treated genomic DNA (Homo sapiens) CpG-island No: 14568
aatcaactcgaactcacctacttaacaaatacgcgcttcccgaaacgtaacaaaaaaacgccgacgcgataaataaaaaacaaaaaatataaaactccaaacgcataacacccgccgccaaatcgccgcgataactaccgaaatacgccgcaacgaataatcgcgccgaacgccgctctaaataacctttcacccgcgcccaacgattccgaacgacaacacaaaacgataaccataacgaaaacgacgactacaacgaataaaactaacttaaaacgaacgcgaactacgaatctacaacgaaccgaaaccgaaacccgaaccgaaccgcgccgaacgaaaaactacgaattctctctaaccatctactaaaccgaccccgaaaaactctaaataccaataaatacaaaacgcgaaaaaccgcgtcgacgcaacgacaacgcccacgcgccactcccgccgcgcaaaaatcgaacaccatcccaaaaaaacgataaataacgatatataaaaaaaattaacgtcgaaaaaccaaaccgaactatactacaaaaaaacacaaacgaaataaaaaaaaaaataacacgaataaacgaaaaacatcccgatccctaaaaat

SEQ ID NO: 14569 - DNA, 511 bp, Artificial Sequence
  chemically treated genomic DNA (Homo sapiens) CpG-island No: 14569
tagcgatcgtagttttatcgtagttattttagtagtttcgtttcgttcgcgttttttttcgtcgagtcggatcgttttttttttcgcgtatttcgtacggttcgggtttattttaagtgttcggggggggtgcgggcgggcgttcgtttagggtcgtttcgtttttcggtttgggtgtcgttagcgtttgttcgattttttgtagtttcggtcgggtcgtttgcgtcgtttatgtttttcggggcgtcgtgttgcgcgtttatcgagttttttcgttgttttttttcgtcgtcgtcgggttcgtgcgtttatttagtggtacggttttcggcggttttcgggttagtggcgttgatagaggttgatagaggcggcggcggcgggaataagggttcgtgttggtttcggcgttgggcggcggttgggagtttggtttttgttttttttttcgagcgtggtttgtttttttggtcgcggcgggattttttttttttatttttttttatttttt

SEQ ID NO: 14570 - DNA, 511 bp, Artificial Sequence
  chemically treated genomic DNA (Homo sapiens) CpG-island No: 14570
aaaaaataaaaaaaaataaaaaaaaaaaatcccgccgcgaccaaaaaaacaaaccacgctcgaaaaaaaaaacaaaaaccaaactcccaaccgccgcccaacgccgaaaccaacacgaacccttattcccgccgccgccgcctctatcaacctctatcaacgccactaacccgaaaaccgccgaaaaccgtaccactaaataaacgcacgaacccgacgacgacgaaaaaaaacaacgaaaaaactcgataaacgcgcaacacgacgccccgaaaaacataaacgacgcaaacgacccgaccgaaactacaaaaaatcgaacaaacgctaacgacacccaaaccgaaaaacgaaacgaccctaaacgaacgcccgcccgcaccccccccgaacacttaaaataaacccgaaccgtacgaaatacgcgaaaaaaaaaacgatccgactcgacgaaaaaaaacgcgaacgaaacgaaactactaaaataactacgataaaactacgatcgcta

SEQ ID NO: 14571 - DNA, 511 bp, Artificial Sequence
  chemically treated genomic DNA (Homo sapiens) CpG-island No: 14571
ggggagtgaggaggggtgagaggaggaggtttcgtcgcggttaagaaaataagttacgttcgggggaggaggtagagattaaatttttaatcgtcgtttagcgtcggggttaatacgggtttttgttttcgtcgtcgtcgtttttgttagtttttgttagcgttattggttcgggggtcgtcgaggatcgtattattgggtgaacgtacgggttcggcgacggcgaggggaggtagcgagggggttcggtgaacgcgtaatacggcgtttcgaagagtatgggcgacgtaggcggttcgatcgaggttatagagagtcgggtaagcgttaacggtatttaaatcggggagcgaggcggttttggacggacgttcgttcgtatttttttcggatatttaagatgggttcgggtcgtgcggggtgcgcggggaagggagcgattcggttcggcggggaaggacgcgggcggggcgggattgttgaggtagttgcggtggggttgcggtcgttg

SEQ ID NO: 14572 - DNA, 511 bp, Artificial Sequence
  chemically treated genomic DNA (Homo sapiens) CpG-island No: 14572
caacgaccgcaaccccaccgcaactacctcaacaatcccgccccgcccgcgtccttccccgccgaaccgaatcgctcccttccccgcgcaccccgcacgacccgaacccatcttaaatatccgaaaaaaatacgaacgaacgtccgtccaaaaccgcctcgctccccgatttaaataccgttaacgcttacccgactctctataacctcgatcgaaccgcctacgtcgcccatactcttcgaaacgccgtattacgcgttcaccgaaccccctcgctacctcccctcgccgtcgccgaacccgtacgttcacccaataatacgatcctcgacgacccccgaaccaataacgctaacaaaaactaacaaaaacgacgacgacgaaaacaaaaacccgtattaaccccgacgctaaacgacgattaaaaatttaatctctacctcctcccccgaacgtaacttattttcttaaccgcgacgaaacctcctcctctcacccctcctcactcccc

SEQ ID NO: 14573 - DNA, 513 bp, Artificial Sequence
  chemically treated genomic DNA (Homo sapiens) CpG-island No: 14573
ttttttcgggtaatgtcgtttgcgttttggtttttatcgcgtttcgtttaatttggaatttttttaaagtcggtggttttgtttcgacggtttcgcgtgtttttcgcgtttgttttttcgcgtcgcggtcgtttcgattttaatgtcggttaatcgttgttgtataaggttcgtattgttttacgtttcgtcgttttgggttttatgttcgtagttttttttttcggttattttttcggttttgtttggtcgaggtgtcgaattttgttacgtttttttcgttagggattcgcggttcgttcgggttcgtcgtaaggtagtttgggatttgtagttttttttttgggtcgggtttttttgagcgaagagtatcgggaagacggttttttcggttagtgcgttttcgtttaggcgaagaggtcgggaggagaggagatttttttttgagaacgtttattgagcgtcgatgtgaaggttacggtattgagagatttggtagaattgtttttgttt

SEQ ID NO: 14574 - DNA, 513 bp, Artificial Sequence
  chemically treated genomic DNA (Homo sapiens) CpG-island No: 14574
aaacaaaaacaattctaccaaatctctcaataccgtaaccttcacatcgacgctcaataaacgttctcaaaaaaaaatctcctctcctcccgacctcttcgcctaaacgaaaacgcactaaccgaaaaaaccgtcttcccgatactcttcgctcaaaaaaacccgacccaaaaaaaaaactacaaatcccaaactaccttacgacgaacccgaacgaaccgcgaatccctaacgaaaaaaacgtaacaaaattcgacacctcgaccaaacaaaaccgaaaaaataaccgaaaaaaaaaactacgaacataaaacccaaaacgacgaaacgtaaaacaatacgaaccttatacaacaacgattaaccgacattaaaatcgaaacgaccgcgacgcgaaaaaacaaacgcgaaaaacacgcgaaaccgtcgaaacaaaaccaccgactttaaaaaaattccaaattaaacgaaacgcgataaaaaccaaaacgcaaacgacattacccgaaaaaa

SEQ ID NO: 14575 - DNA, 513 bp, Artificial Sequence
  chemically treated genomic DNA (Homo sapiens) CpG-island No: 14575
aaatagaaatagttttattaagttttttaatgtcgtggtttttatatcgacgtttaatgaacgtttttagaagggaatttttttttttttcggttttttcgtttgggcgggggcgtattggtcgagaaagtcgttttttcgatgtttttcgtttaggagagttcggtttaggagagggattataagttttaggttgttttgcggcgggttcgggcgggtcgcggatttttgacgaggaagacgtggtagagttcggtatttcggttaggtaaagtcggagaagtggtcgagagggagggttgcgaatataggatttaagacgacgggacgtaaggtagtacgaattttgtgtagtagcggttagtcggtattgagatcgagacggtcgcgacgcgaaaggataggcgcgaggaatacgcgagatcgtcggagtagagttatcggttttggggagattttaagttagacgaggcgcggtaagagttagagcgtagacggtattgttcgagaaaa

SEQ ID NO: 14576 - DNA, 513 bp, Artificial Sequence
  chemically treated genomic DNA (Homo sapiens) CpG-island No: 14576
ttttctcgaacaataccgtctacgctctaactcttaccgcgcctcgtctaacttaaaatctccccaaaaccgataactctactccgacgatctcgcgtattcctcgcgcctatcctttcgcgtcgcgaccgtctcgatctcaataccgactaaccgctactacacaaaattcgtactaccttacgtcccgtcgtcttaaatcctatattcgcaaccctccctctcgaccacttctccgactttacctaaccgaaataccgaactctaccacgtcttcctcgtcaaaaatccgcgacccgcccgaacccgccgcaaaacaacctaaaacttataatccctctcctaaaccgaactctcctaaacgaaaaacatcgaaaaaacgactttctcgaccaatacgcccccgcccaaacgaaaaaaccgaaaaaaaaaaaaattcccttctaaaaacgttcattaaacgtcgatataaaaaccacgacattaaaaaacttaataaaactatttctattt

SEQ ID NO: 14577 - DNA, 561 bp, Artificial Sequence
  chemically treated genomic DNA (Homo sapiens) CpG-island No: 14577
ggcgtggtcgggatcgcgtaattaggtcgggagcggggtgcggggtggttttcgaggggttcgggtttaaggggttgagagaagggggcggggtcggggttggcggggtcggggttggcggggttcgtagttcgcgtagagttttttattttttttcgggtcggtgatttcgttttttttttcgttagcgaggtcgtattttgggtttcggtattcggttttttattcgggtttttaaaaatattcgagcgtcgcggtgtcgggatttcgttttgttaggaaataagaagtttttcgtttattggtcgtggttgtagttggcgattcgtttagtaaagttcgttattattggttagtttttagggtttttcgtacgttagtgggtatttgagcgagtgtcgttcggggacgatggcgggtaggagcggtcggagggttttagtagcgtttttcggaagacggttaacggtttgtttgtcgggaggcgggaaagataaagcggtagaaattgggatttaattgcgaaataaaaagatatcgtgtgaaattttttatcgttta

SEQ ID NO: 14578 - DNA, 561 bp, Artificial Sequence
  chemically treated genomic DNA (Homo sapiens) CpG-island No: 14578
taaacgataaaaaatttcacacgatatctttttatttcgcaattaaatcccaatttctaccgctttatctttcccgcctcccgacaaacaaaccgttaaccgtcttccgaaaaacgctactaaaaccctccgaccgctcctacccgccatcgtccccgaacgacactcgctcaaatacccactaacgtacgaaaaaccctaaaaactaaccaataataacgaactttactaaacgaatcgccaactacaaccacgaccaataaacgaaaaacttcttatttcctaacaaaacgaaatcccgacaccgcgacgctcgaatatttttaaaaacccgaataaaaaaccgaataccgaaacccaaaatacgacctcgctaacgaaaaaaaaaacgaaatcaccgacccgaaaaaaaataaaaaactctacgcgaactacgaaccccgccaaccccgaccccgccaaccccgaccccgcccccttctctcaaccccttaaacccgaacccctcgaaaaccaccccgcaccccgctcccgacctaattacgcgatcccgaccacgcc

SEQ ID NO: 14579 - DNA, 561 bp, Artificial Sequence
  chemically treated genomic DNA (Homo sapiens) CpG-island No: 14579
taagcgataaggagttttatacgatgtttttttatttcgtagttgagttttagtttttgtcgttttatttttttcgtttttcggtaggtaggtcgttaatcgtttttcggaagacgttgttagaatttttcggtcgtttttgttcgttatcgttttcgaacgatattcgtttaggtatttattaacgtgcgaggaattttgagagttgattaatggtagcgagttttattgggcgggtcgttagttgtagttacggttaataggcgagagattttttgttttttggtagagcggggtttcggtatcgcggcgttcgggtgtttttgggggttcgggtggagggtcgggtgtcggggtttaaggtgcggtttcgttagcgggagagggagcgggattatcggttcggagagaggtgaggggttttgcgcggattacgggtttcgttagtttcggtttcgttagtttcggtttcgttttttttttttagttttttgagttcgagtttttcgaaggttatttcgtatttcgttttcgatttggttacgcggtttcgattacgtt

SEQ ID NO: 14580 - DNA, 561 bp, Artificial Sequence
  chemically treated genomic DNA (Homo sapiens) CpG-island No: 14580
aacgtaatcgaaaccgcgtaaccaaatcgaaaacgaaatacgaaataaccttcgaaaaactcgaactcaaaaaactaaaaaaaaaaaacgaaaccgaaactaacgaaaccgaaactaacgaaacccgtaatccgcgcaaaacccctcacctctctccgaaccgataatcccgctccctctcccgctaacgaaaccgcaccttaaaccccgacacccgaccctccacccgaacccccaaaaacacccgaacgccgcgataccgaaaccccgctctaccaaaaaacaaaaaatctctcgcctattaaccgtaactacaactaacgacccgcccaataaaactcgctaccattaatcaactctcaaaattcctcgcacgttaataaatacctaaacgaatatcgttcgaaaacgataacgaacaaaaacgaccgaaaaattctaacaacgtcttccgaaaaacgattaacgacctacctaccgaaaaacgaaaaaaataaaacgacaaaaactaaaactcaactacgaaataaaaaaacatcgtataaaactccttatcgctta

SEQ ID NO: 14581 - DNA, 595 bp, Artificial Sequence
  chemically treated genomic DNA (Homo sapiens) CpG-island No: 14581
tatttcgcggtggttttttttggatcgcgaacgtcgagttcgtcgtcgttttttggagtttcggggtagcgtttgtgtcgcggtatttgtatttataggggttttgcgatcgcgacgcgtaaattttgttcgagagtcgatgggttattttggttgtttttgttttatattttttttggttttttcggacgtgtttttttgacgcgaacgatattcgttcggttaattaatttaggttttgttaggttttattcgttttgattagtgtaagagagacggcgatcgcggggtgttgtaggtttcggcgcggcgtattatcgggttgtgtcgaatttttcgggtcgttttgggatcgcgggtttggcggcgtggtcgagggttcggggagagggttacgcgttaggagagggcggcggggttgtagtataggtttttttgttttcggaagcgttcgtaagtttgggggattttttgcggtagatttgggatggtgggcggcgcgtcggtcgggtaggtttttgtagttttcgaggtttacgtgaggtcggggtcggggcggttgtatagtgtttagtatagttattggttttttttg

SEQ ID NO: 14582 - DNA, 595 bp, Artificial Sequence
  chemically treated genomic DNA (Homo sapiens) CpG-island No: 14582
caaaaaaaaccaataactatactaaacactatacaaccgccccgaccccgacctcacgtaaacctcgaaaactacaaaaacctacccgaccgacgcgccgcccaccatcccaaatctaccgcaaaaaatcccccaaacttacgaacgcttccgaaaacaaaaaaacctatactacaaccccgccgccctctcctaacgcgtaaccctctccccgaaccctcgaccacgccgccaaacccgcgatcccaaaacgacccgaaaaattcgacacaacccgataatacgccgcgccgaaacctacaacaccccgcgatcgccgtctctcttacactaatcaaaacgaataaaacctaacaaaacctaaattaattaaccgaacgaatatcgttcgcgtcaaaaaaacacgtccgaaaaaaccaaaaaaaatataaaacaaaaacaaccaaaataacccatcgactctcgaacaaaatttacgcgtcgcgatcgcaaaacccctataaatacaaataccgcgacacaaacgctaccccgaaactccaaaaaacgacgacgaactcgacgttcgcgatccaaaaaaaaccaccgcgaaata

SEQ ID NO: 14583 - DNA, 595 bp, Artificial Sequence
  chemically treated genomic DNA (Homo sapiens) CpG-island No: 14583
taagggaggttagtggttgtgttgggtattgtatagtcgtttcgatttcgattttacgtgggtttcggaggttgtagggatttattcggtcggcgcgtcgtttattattttaggtttatcgtagggaattttttaggtttgcgagcgttttcgagggtaggaaagtttgtattgtagtttcgtcgtttttttttggcgcgtagtttttttttcgagttttcggttacgtcgttaggttcgcgattttagggcggttcggggggttcggtatagttcgataatgcgtcgcgtcgaagtttgtagtatttcgcggtcgtcgttttttttgtattggttaggacgaatagagtttgataaaatttgagttaattggtcgagcgaatgtcgttcgcgttaggagagtacgttcggagaagttaagggaaatgtggagtaggagtagttaaagtggtttatcggttttcgagtagggtttgcgcgtcgcggtcgtaaagtttttgtgagtgtaggtatcgcggtataagcgttgtttcggagttttaggaggcggcggcgggttcggcgttcgcggtttaggagaaattatcgcggggtg

SEQ ID NO: 14584 - DNA, 595 bp, Artificial Sequence
  chemically treated genomic DNA (Homo sapiens) CpG-island No: 14584
caccccgcgataatttctcctaaaccgcgaacgccgaacccgccgccgcctcctaaaactccgaaacaacgcttataccgcgatacctacactcacaaaaactttacgaccgcgacgcgcaaaccctactcgaaaaccgataaaccactttaactactcctactccacatttcccttaacttctccgaacgtactctcctaacgcgaacgacattcgctcgaccaattaactcaaattttatcaaactctattcgtcctaaccaatacaaaaaaaacgacgaccgcgaaatactacaaacttcgacgcgacgcattatcgaactataccgaaccccccgaaccgccctaaaatcgcgaacctaacgacgtaaccgaaaactcgaaaaaaaaactacgcgccaaaaaaaaacgacgaaactacaatacaaactttcctaccctcgaaaacgctcgcaaacctaaaaaattccctacgataaacctaaaataataaacgacgcgccgaccgaataaatccctacaacctccgaaacccacgtaaaatcgaaatcgaaacgactatacaatacccaacacaaccactaacctccctta

SEQ ID NO: 14585 - DNA, 530 bp, Artificial Sequence
  chemically treated genomic DNA (Homo sapiens) CpG-island No: 14585
tacgttttgggagggcggtttggcggtttttttagttcggagcgcgtggaggttgcgcgtaggggttcgggacgcgggatagggatttcgcgtagtttaggcgtcggggaatcgggttggagtcggggatttgagtttagcggacgtttttttcgtttggaggttcggtacggatcgggatattagggcgttcgtggtcgtggttcggtttttggttgttgcgggtcgcggtttttagtgggtttttaggatttttttttacggcgggtatttatcgaggttgagaggttacgtcgtgttgttggggtttttcgtcgattatatttttgggcgttagttcgggtagagatcgcggggattggttaggtcgggttaggtcgggtcgggggagggtcgcgttttcgggtttttgattttcggcggcgagaggaagcggtatttgggttatatttttttcgcgcgggtcgaggggaggggttttggttcggagataggtagattttatttattttttttttgtagatttggtt

SEQ ID NO: 14586 - DNA, 530 bp, Artificial Sequence
  chemically treated genomic DNA (Homo sapiens) CpG-island No: 14586
aaccaaatctacaaaaaaaaaataaataaaatctacctatctccgaaccaaaacccctcccctcgacccgcgcgaaaaaaatataacccaaataccgcttcctctcgccgccgaaaatcaaaaacccgaaaacgcgaccctcccccgacccgacctaacccgacctaaccaatccccgcgatctctacccgaactaacgcccaaaaatataatcgacgaaaaaccccaacaacacgacgtaacctctcaacctcgataaatacccgccgtaaaaaaaaatcctaaaaacccactaaaaaccgcgacccgcaacaaccaaaaaccgaaccacgaccacgaacgccctaatatcccgatccgtaccgaacctccaaacgaaaaaaacgtccgctaaactcaaatccccgactccaacccgattccccgacgcctaaactacgcgaaatccctatcccgcgtcccgaacccctacgcgcaacctccacgcgctccgaactaaaaaaaccgccaaaccgccctcccaaaacgta

SEQ ID NO: 14587 - DNA, 530 bp, Artificial Sequence
  chemically treated genomic DNA (Homo sapiens) CpG-island No: 14587
agttaagtttgtagaaaaaaaataaatgaagtttgtttattttcgggttagagttttttttttcggttcgcgcgggaggagtgtgatttaggtgtcgttttttttcgtcgtcgagggttaggagttcgggagcgcgattttttttcggttcggtttggttcggtttggttagttttcgcggtttttgttcgggttgacgtttaggaatgtggtcgacgagaagttttaatagtacggcgtggttttttagtttcggtgagtattcgtcgtggggaagggttttggggatttattggaggtcgcggttcgtagtagttaggggtcgagttacggttacggacgttttggtgtttcggttcgtgtcgggtttttaggcggaggaggcgttcgttgggtttagattttcgattttagttcggtttttcggcgtttgggttgcgcggagtttttgtttcgcgtttcggatttttacgcgtagtttttacgcgtttcgagttggagaagtcgttagatcgtttttttagggcgtg

SEQ ID NO: 14588 - DNA, 530 bp, Artificial Sequence
  chemically treated genomic DNA (Homo sapiens) CpG-island No: 14588
cacgccctaaaaaaacgatctaacgacttctccaactcgaaacgcgtaaaaactacgcgtaaaaatccgaaacgcgaaacaaaaactccgcgcaacccaaacgccgaaaaaccgaactaaaatcgaaaatctaaacccaacgaacgcctcctccgcctaaaaacccgacacgaaccgaaacaccaaaacgtccgtaaccgtaactcgacccctaactactacgaaccgcgacctccaataaatccccaaaacccttccccacgacgaatactcaccgaaactaaaaaaccacgccgtactattaaaacttctcgtcgaccacattcctaaacgtcaacccgaacaaaaaccgcgaaaactaaccaaaccgaaccaaaccgaaccgaaaaaaaatcgcgctcccgaactcctaaccctcgacgacgaaaaaaaacgacacctaaatcacactcctcccgcgcgaaccgaaaaaaaaaactctaacccgaaaataaacaaacttcatttattttttttctacaaacttaact

SEQ ID NO: 14589 - DNA, 649 bp, Artificial Sequence
  chemically treated genomic DNA (Homo sapiens) CpG-island No: 14589
acgttttttatagtttcggttttaggttcgcgttttttttttcgtcggcggttcggatgggtcgttaggggtcgttgcgcgtcgcgcgggcgaggatcggttttttttttttatttttatcgtttcgttgtttcgttttcgcggcgtagtcggcgttaaaattaaacgcgttttggtttgtttcgtttttttttttaagcgcgggttcggttagcggaagttttgcgttcgcgttatggtaaggattgaggttacggtttcgcgttttttttttttttagtgtgtgggtttcgcgtttttcggttgtatgtggatttcggttatgcgttgatcgttatttcgggcgcgggagcggtcgtacggttttcggttttatcgtgtaggggtttagttcgtttttcgtagttattcgatatttcgcgtttttcgtcgtttttgttcggagtttcgaggtcggggtatttcgttttttttcgtttatttcgcgtttgtttttagagtcgttcgggcgggttaggttagaacgcgggaagcgttcgcgaacgtgattcgagaattttattaatttggatttatttaaaagattacggggtttttgagaatttgggttttttacgtttttagtttcggtttcgcgtggtgtagtttt

SEQ ID NO: 14590 - DNA, 649 bp, Artificial Sequence
  chemically treated genomic DNA (Homo sapiens) CpG-island No: 14590
aaaactacaccacgcgaaaccgaaactaaaaacgtaaaaaacccaaattctcaaaaaccccgtaatcttttaaataaatccaaattaataaaattctcgaatcacgttcgcgaacgcttcccgcgttctaacctaacccgcccgaacgactctaaaaacaaacgcgaaataaacgaaaaaaaacgaaataccccgacctcgaaactccgaacaaaaacgacgaaaaacgcgaaatatcgaataactacgaaaaacgaactaaacccctacacgataaaaccgaaaaccgtacgaccgctcccgcgcccgaaataacgatcaacgcataaccgaaatccacatacaaccgaaaaacgcgaaacccacacactaaaaaaaaaaaaaacgcgaaaccgtaacctcaatccttaccataacgcgaacgcaaaacttccgctaaccgaacccgcgcttaaaaaaaaaaacgaaacaaaccaaaacgcgtttaattttaacgccgactacgccgcgaaaacgaaacaacgaaacgataaaaataaaaaaaaaaaaccgatcctcgcccgcgcgacgcgcaacgacccctaacgacccatccgaaccgccgacgaaaaaaaaaacgcgaacctaaaaccgaaactataaaaaacgt

SEQ ID NO: 14591 - DNA, 649 bp, Artificial Sequence
  chemically treated genomic DNA (Homo sapiens) CpG-island No: 14591
ggggttatattacgcggggtcgaagttggaggcgtagggagtttaggtttttaagggtttcgtggttttttagataaatttaggttggtgaagttttcgggttacgttcgcgaacgtttttcgcgttttaatttaattcgttcgaacggttttggggatagacgcggggtgagcggggggaggcgggatgtttcggtttcgggatttcggataggagcggcggggaacgcgaagtgtcgagtggttgcggggggcgggttgggtttttatacggtgaggtcgagagtcgtgcgatcgttttcgcgttcggaatggcggttaacgtatggtcgggatttatatgtagtcgaggggcgcgaagtttatatattagggaggaagaagacgcgggatcgtagttttagtttttattatggcgcgggcgtagggttttcgttggtcgggttcgcgtttggggagaggggcgggataggttaggacgcgtttgattttggcgtcgattacgtcgcgggggcggagtagcgagacggtggaggtgggggaaagaggtcggttttcgttcgcgcggcgcgtagcgatttttagcgatttattcgagtcgtcggcgggggaaggggcgcgggtttggggtcggggttgtggggagcgt

SEQ ID NO: 14592 - DNA, 649 bp, Artificial Sequence
  chemically treated genomic DNA (Homo sapiens) CpG-island No: 14592
acgctccccacaaccccgaccccaaacccgcgccccttcccccgccgacgactcgaataaatcgctaaaaatcgctacgcgccgcgcgaacgaaaaccgacctctttcccccacctccaccgtctcgctactccgcccccgcgacgtaatcgacgccaaaatcaaacgcgtcctaacctatcccgcccctctccccaaacgcgaacccgaccaacgaaaaccctacgcccgcgccataataaaaactaaaactacgatcccgcgtcttcttcctccctaatatataaacttcgcgcccctcgactacatataaatcccgaccatacgttaaccgccattccgaacgcgaaaacgatcgcacgactctcgacctcaccgtataaaaacccaacccgccccccgcaaccactcgacacttcgcgttccccgccgctcctatccgaaatcccgaaaccgaaacatcccgcctccccccgctcaccccgcgtctatccccaaaaccgttcgaacgaattaaattaaaacgcgaaaaacgttcgcgaacgtaacccgaaaacttcaccaacctaaatttatctaaaaaaccacgaaacccttaaaaacctaaactccctacgcctccaacttcgaccccgcgtaatataacccc

SEQ ID NO: 14593 - DNA, 1354 bp, Artificial Sequence
  chemically treated genomic DNA (Homo sapiens) CpG-island No: 14593
tacgcgcgggtttttttttttttttcgcgttttttattcgcgtatagcgttagcgtttttaaggagttgtagcgtcgcgatcgtcgttttttcgtttattttcgcggattcgcgttttttttttttttttcgggtagcgtcgttggtttttagttttattttcgtcgaggggatttttgtgtttcgggggattttttgttttttttttttttttcgtttcgcgaggagatcggtttttttcgtagattaaagcggtagcgagtatcggaggcggcggcgtttatatttgtcggcgttttttgggaagtagttcgtagatatttatattttattcgagtttcggaaattttcgggcgatttaaggttttcgttggatcggagaggtgataggcgtacgttagtttttcgcgtcgcgttttttcgtttaatttttcgatcgggtttgagttattcgcgtttttagtagttttcgttttcgtttttgttttacgtacgttgtcggtttcgcggtcgattcgatattaggggaaagcgcggcgcggacgttagtcgttaatttattagtaagagcgatgatcgcgggtttcgaggcgaggcgaagagaggcgcggggggaagttgttcgcgtgagttcgcggcgatcggatgtaagttcgggttttagcggtcggtagacgtgagcgttttcgagcgtagttttcgtcgttatatgtcgttttgttttcgtcgcgggttcggagtttcgggaggggtcgcgggtgttttacgcgttgttaagtttttcggttaatatggtttcgcgtcgacgagtcgcgcggacggtttattaattttttcggagtagtcggtacgagcgcgcgggtcgacggcgggttgagattgtttggtcgggcgttggtttttttttcgcggttttgcggcggttcgcggggagtttaggagattgcgggcgagattgttcgttttttgcgtgggcgtcgtttttatattcggcggttgcggattgacgttttcgtttgtttttcggaggagagcgagtgtaagagaaaaaatatttttattgaaacgatttaattagcggcggcggagaaaagcgatcggtcgcgggagtttattttattttcgtttgagcggttcgtcgggggtagcgcgatttttgtcggcggcggcggaggcgggggcggggtcggcggtcggggcggggtttgtagggcggggcgggtgttttcgggaaattgttcgtttcgaaatgcgggcgtcgggggagcggcggagggggttaggggattttatcggaatgagtgtttgttcgtagcgattgggggagaaattatgtgaataatttagttttttt

SEQ ID NO: 14594 - DNA, 1354 bp, Artificial Sequence
  chemically treated genomic DNA (Homo sapiens) CpG-island No: 14594
aaaaaaactaaattattcacataatttctcccccaatcgctacgaacaaacactcattccgataaaatcccctaaccccctccgccgctcccccgacgcccgcatttcgaaacgaacaatttcccgaaaacacccgccccgccctacaaaccccgccccgaccgccgaccccgcccccgcctccgccgccgccgacaaaaatcgcgctacccccgacgaaccgctcaaacgaaaataaaataaactcccgcgaccgatcgcttttctccgccgccgctaattaaatcgtttcaataaaaatattttttctcttacactcgctctcctccgaaaaacaaacgaaaacgtcaatccgcaaccgccgaatataaaaacgacgcccacgcaaaaaacgaacaatctcgcccgcaatctcctaaactccccgcgaaccgccgcaaaaccgcgaaaaaaaaaccaacgcccgaccaaacaatctcaacccgccgtcgacccgcgcgctcgtaccgactactccgaaaaaattaataaaccgtccgcgcgactcgtcgacgcgaaaccatattaaccgaaaaacttaacaacgcgtaaaacacccgcgacccctcccgaaactccgaacccgcgacgaaaacaaaacgacatataacgacgaaaactacgctcgaaaacgctcacgtctaccgaccgctaaaacccgaacttacatccgatcgccgcgaactcacgcgaacaacttccccccgcgcctctcttcgcctcgcctcgaaacccgcgatcatcgctcttactaataaattaacgactaacgtccgcgccgcgctttcccctaatatcgaatcgaccgcgaaaccgacaacgtacgtaaaacaaaaacgaaaacgaaaactactaaaaacgcgaataactcaaacccgatcgaaaaattaaacgaaaaaacgcgacgcgaaaaactaacgtacgcctatcacctctccgatccaacgaaaaccttaaatcgcccgaaaatttccgaaactcgaataaaatataaatatctacgaactacttcccaaaaaacgccgacaaatataaacgccgccgcctccgatactcgctaccgctttaatctacgaaaaaaaccgatctcctcgcgaaacgaaaaaaaaaaaaaaaacaaaaaatcccccgaaacacaaaaatcccctcgacgaaaataaaactaaaaaccaacgacgctacccgaaaaaaaaaaaaaaaacgcgaatccgcgaaaataaacgaaaaaacgacgatcgcgacgctacaactccttaaaaacgctaacgctatacgcgaataaaaaacgcgaaaaaaaaaaaaaaacccgcgcgta

SEQ ID NO: 14595 - DNA, 1354 bp, Artificial Sequence
  chemically treated genomic DNA (Homo sapiens) CpG-island No: 14595
ggaggggttgaattatttatataattttttttttagtcgttgcggataggtatttatttcggtggggttttttggtttttttcgtcgttttttcgacgttcgtatttcggagcgggtagtttttcggggatattcgtttcgttttgtaggtttcgtttcggtcgtcggtttcgttttcgttttcgtcgtcgtcggtaggggtcgcgttgttttcggcgagtcgtttaggcgggggtggggtaagttttcgcggtcggtcgttttttttcgtcgtcgttggttggatcgttttaataaaagtgtttttttttttgtattcgttttttttcggggaataggcggaggcgttaattcgtagtcgtcgagtgtgaaagcgacgtttacgtaaggagcgaatagtttcgttcgtagttttttgagtttttcgcgggtcgtcgtagagtcgcggagaaggagttagcgttcggttagatagttttagttcgtcgtcggttcgcgcgttcgtgtcggttgtttcgaggggattagtgggtcgttcgcgcggttcgtcggcgcgaagttatgttgatcgagggatttggtaacgcgtgagatattcgcggtttttttcgaggtttcggattcgcggcgagagtaaggcggtatgtggcggcggaggttgcgttcggaagcgtttacgtttgtcggtcgttgagattcggatttgtattcggtcgtcgcgggtttacgcgagtagttttttttcgcgttttttttcgtttcgtttcgggattcgcggttatcgtttttgttggtgagttggcggttggcgttcgcgtcgcgtttttttttggtgtcgggtcggtcgcggggtcggtagcgtgcgtgggatagaggcgggggcgggggttattgggggcgcgggtggtttaggttcggtcgggaagttgagcgaggaggcgcggcgcggggggttagcgtgcgtttgttattttttcggtttagcgaggattttgggtcgttcggggattttcggggttcgggtggggtgtgagtgtttgcgagttgttttttaggaggcgtcgatagatatagacgtcgtcgttttcggtgttcgttgtcgttttggtttgcgggggaggtcggttttttcgcgaggcggaggaggggaaagaggtagaaagtttttcgagatataaaggttttttcggcgggggtggagttggaggttagcgacgttgttcgggagggaaggaaggggcgcgggttcgcggaggtgggcgaggaggcggcggtcgcggcgttgtagttttttggagacgttggcgttgtgcgcgggtggggagcgcggaggaggaggaggagttcgcgcgtg

SEQ ID NO: 14596 - DNA, 1354 bp, Artificial Sequence
  chemically treated genomic DNA (Homo sapiens) CpG-island No: 14596
cacgcgcgaactcctcctcctcctccgcgctccccacccgcgcacaacgccaacgtctccaaaaaactacaacgccgcgaccgccgcctcctcgcccacctccgcgaacccgcgccccttccttccctcccgaacaacgtcgctaacctccaactccacccccgccgaaaaaacctttatatctcgaaaaactttctacctctttcccctcctccgcctcgcgaaaaaaccgacctcccccgcaaaccaaaacgacaacgaacaccgaaaacgacgacgtctatatctatcgacgcctcctaaaaaacaactcgcaaacactcacaccccacccgaaccccgaaaatccccgaacgacccaaaatcctcgctaaaccgaaaaaataacaaacgcacgctaaccccccgcgccgcgcctcctcgctcaacttcccgaccgaacctaaaccacccgcgcccccaataacccccgcccccgcctctatcccacgcacgctaccgaccccgcgaccgacccgacaccaaaaaaaaacgcgacgcgaacgccaaccgccaactcaccaacaaaaacgataaccgcgaatcccgaaacgaaacgaaaaaaaacgcgaaaaaaaactactcgcgtaaacccgcgacgaccgaatacaaatccgaatctcaacgaccgacaaacgtaaacgcttccgaacgcaacctccgccgccacataccgccttactctcgccgcgaatccgaaacctcgaaaaaaaccgcgaatatctcacgcgttaccaaatccctcgatcaacataacttcgcgccgacgaaccgcgcgaacgacccactaatcccctcgaaacaaccgacacgaacgcgcgaaccgacgacgaactaaaactatctaaccgaacgctaactccttctccgcgactctacgacgacccgcgaaaaactcaaaaaactacgaacgaaactattcgctccttacgtaaacgtcgctttcacactcgacgactacgaattaacgcctccgcctattccccgaaaaaaaacgaatacaaaaaaaaaaacacttttattaaaacgatccaaccaacgacgacgaaaaaaaacgaccgaccgcgaaaacttaccccacccccgcctaaacgactcgccgaaaacaacgcgacccctaccgacgacgacgaaaacgaaaacgaaaccgacgaccgaaacgaaacctacaaaacgaaacgaatatccccgaaaaactacccgctccgaaatacgaacgtcgaaaaaacgacgaaaaaaaccaaaaaaccccaccgaaataaatacctatccgcaacgactaaaaaaaaaattatataaataattcaacccctcc

SEQ ID NO: 14597 - DNA, 643 bp, Artificial Sequence
  chemically treated genomic DNA (Homo sapiens) CpG-island No: 14597
ttaagcgttcgaaagaaagttttacgaatttataaaggttttttttcgtttttttttcgaagttttttttttattttgtatttcggttgtggatttattttttttttgttgattcggttatcggtttgtcgggtttggcgttttttagaaggtttagcgtcgggaaggggtttgtagttgtttcgttatcgtgcggttcgacgttatttcgcgttcgtgtgtaggttcggttcggtttttggttttcggtgcgagggttaacgcgaggtttcggtttcggttttcggattaggtcgtgatttcgggtgttatgaagtaggagggttcggcgcggcgtcgcggcgcggataaggcggagtcgtcgttcggcggaggagaataagaatttttatcgtcgtcggttttttaggatgtggagatgaaagaggaggtagcgacgggtggcgggtcgacgggggaggtagacggtaagacggcggcggtagcggttgagtatttttagcgagagttggatatagttattttggagggtacggtagtttaggtcgggaacgtgatcgatcgcgggtgatagcgatttttgtgatttggttttttgttgggaagttatagtagtttttattatttttagttttttgggatt

SEQ ID NO: 14598 - DNA, 643 bp, Artificial Sequence
  chemically treated genomic DNA (Homo sapiens) CpG-island No: 14598
aatcccaaaaaactaaaaataataaaaactactataacttcccaacaaaaaaccaaatcacaaaaatcgctatcacccgcgatcgatcacgttcccgacctaaactaccgtaccctccaaaataactatatccaactctcgctaaaaatactcaaccgctaccgccgccgtcttaccgtctacctcccccgtcgacccgccacccgtcgctacctcctctttcatctccacatcctaaaaaaccgacgacgataaaaattcttattctcctccgccgaacgacgactccgccttatccgcgccgcgacgccgcgccgaaccctcctacttcataacacccgaaatcacgacctaatccgaaaaccgaaaccgaaacctcgcgttaaccctcgcaccgaaaaccaaaaaccgaaccgaacctacacacgaacgcgaaataacgtcgaaccgcacgataacgaaacaactacaaaccccttcccgacgctaaaccttctaaaaaacgccaaacccgacaaaccgataaccgaatcaacaaaaaaaaaataaatccacaaccgaaatacaaaataaaaaaaaaacttcgaaaaaaaaacgaaaaaaaacctttataaattcgtaaaactttctttcgaacgcttaa

SEQ ID NO: 14599 - DNA, 643 bp, Artificial Sequence
  chemically treated genomic DNA (Homo sapiens) CpG-island No: 14599
gattttaaagaattgagggtggtggaggttgttgtggttttttagtaagaagttaaattataggggtcgttgttattcgcgatcggttacgttttcggtttgggttgtcgtattttttaaggtgattgtgtttagttttcgttgggagtgtttagtcgttgtcgtcgtcgttttgtcgtttgtttttttcgtcgattcgttattcgtcgttgtttttttttttatttttatattttggggggtcggcggcggtgggggtttttgttttttttcgtcgggcggcggtttcgttttgttcgcgtcgcggcgtcgcgtcgagtttttttgttttatggtattcggggttacggtttagttcggggatcgaggtcggggtttcgcgttaattttcgtatcggggattaggagtcgagtcgggtttgtatacgagcgcgagatagcgtcgggtcgtacgatgacggagtagttgtaaattttttttcggcgttgggttttttgggaaacgttaggttcggtaggtcgatggtcgagttaataaaggggaaataaatttatagtcgaggtgtaggatgaaggaggagtttcgaggaaggagcggggaggagtttttatgggttcgtggggttttttttcgagcgtttaa

SEQ ID NO: 14600 - DNA, 643 bp, Artificial Sequence
  chemically treated genomic DNA (Homo sapiens) CpG-island No: 14600
ttaaacgctcgaaaaaaaaccccacgaacccataaaaactcctccccgctccttcctcgaaactcctccttcatcctacacctcgactataaatttatttcccctttattaactcgaccatcgacctaccgaacctaacgtttcccaaaaaacccaacgccgaaaaaaaatttacaactactccgtcatcgtacgacccgacgctatctcgcgctcgtatacaaacccgactcgactcctaatccccgatacgaaaattaacgcgaaaccccgacctcgatccccgaactaaaccgtaaccccgaataccataaaacaaaaaaactcgacgcgacgccgcgacgcgaacaaaacgaaaccgccgcccgacgaaaaaaaacaaaaacccccaccgccgccgaccccccaaaatataaaaataaaaaaaaaaacaacgacgaataacgaatcgacgaaaaaaacaaacgacaaaacgacgacgacaacgactaaacactcccaacgaaaactaaacacaatcaccttaaaaaatacgacaacccaaaccgaaaacgtaaccgatcgcgaataacaacgacccctataatttaacttcttactaaaaaaccacaacaacctccaccaccctcaattctttaaaatc

SEQ ID NO: 14601 - DNA, 621 bp, Artificial Sequence
  chemically treated genomic DNA (Homo sapiens) CpG-island No: 14601
  unsure (367, 528)
cgtcgtttttcgcgtttacgtcgtcgttcgcgggtcggtagtatacgaaattttggtcgtaggttcgcgacgcggggtcgtagttttcgtattggttgacgaagggcgtttgcgggtaggggaattgttgcgggtaggagggttgttggcggtaggtgttggcgaaggtcgaagtcgcgatcgaggaggcggagttttcgtgtcgttgttgggagacggaggtgcgggttcgggttatgttcgtgttgttttcgacggttatttcgcgttagttgtcgggtatttggttaaagtcgaatgggtgtcgcgtttggtcgcgtacggtgttcgagtttacgcgtttcggtaggggtagggacggcgtttngtcgacgtcgggggttttcgtggttgcgtcgttgttgggtttggggcgcgtcggttagtagtattcgggagttattttcggagcgttgaggttcggtcggtacgtattttgagttcgagttgagtaagttgtatatttgttcgttgtttttttattggatntagttgtcgttagcgggcggggttcgagttttgttcgggttgcgtttgttgttcgtgtattagtacgtataggtaggcgttttatattagggt

SEQ ID NO: 14602 - DNA, 621 bp, Artificial Sequence
  chemically treated genomic DNA (Homo sapiens) CpG-island No: 14602
  unsure (94, 255)
accctaatataaaacgcctacctatacgtactaatacacgaacaacaaacgcaacccgaacaaaactcgaaccccgcccgctaacgacaactanatccaataaaaaaacaacgaacaaatatacaacttactcaactcgaactcaaaatacgtaccgaccgaacctcaacgctccgaaaataactcccgaatactactaaccgacgcgccccaaacccaacaacgacgcaaccacgaaaacccccgacgtcgacnaaacgccgtccctacccctaccgaaacgcgtaaactcgaacaccgtacgcgaccaaacgcgacacccattcgactttaaccaaatacccgacaactaacgcgaaataaccgtcgaaaacaacacgaacataacccgaacccgcacctccgtctcccaacaacgacacgaaaactccgcctcctcgatcgcgacttcgaccttcgccaacacctaccgccaacaaccctcctacccgcaacaattcccctacccgcaaacgcccttcgtcaaccaatacgaaaactacgaccccgcgtcgcgaacctacgaccaaaatttcgtatactaccgacccgcgaacgacgacgtaaacgcgaaaaacgacg

SEQ ID NO: 14603 - DNA, 621 bp, Artificial Sequence
  chemically treated genomic DNA (Homo sapiens) CpG-island No: 14603
  unsure (94, 255)
gttttggtgtggggcgtttgtttgtgcgtgttggtgtacgggtagtaggcgtagttcgggtagggttcggatttcgttcgttggcggtagttgnatttagtgggagaataacgggtaggtgtatagtttgtttaattcgggtttagagtacgtgtcggtcggattttagcgtttcgagagtagttttcgggtgttgttggtcggcgcgttttaggtttagtagcggcgtagttacgggagttttcggcgtcggtnaggcgtcgtttttgtttttgtcggggcgcgtgggttcggatatcgtgcgcggttaggcgcggtatttattcggttttggttaggtgttcgataattggcgcgaggtggtcgtcggggatagtacgggtatggttcgggttcgtattttcgttttttagtaacggtacgggggtttcgttttttcggtcgcggtttcggttttcgttagtatttatcgttagtagtttttttattcgtagtagtttttttattcgtaggcgtttttcgttagttagtacgagaattacgatttcgcgtcgcggatttacgattagggtttcgtgtattatcggttcgcgggcggcggcgtgggcgcggggggcggcg

SEQ ID NO: 14604 - DNA, 621 bp, Artificial Sequence
  chemically treated genomic DNA (Homo sapiens) CpG-island No: 14604
  unsure (367, 528)
cgccgccccccgcgcccacgccgccgcccgcgaaccgataatacacgaaaccctaatcgtaaatccgcgacgcgaaatcgtaattctcgtactaactaacgaaaaacgcctacgaataaaaaaactactacgaataaaaaaactactaacgataaatactaacgaaaaccgaaaccgcgaccgaaaaaacgaaacccccgtaccgttactaaaaaacgaaaatacgaacccgaaccatacccgtactatccccgacgaccacctcgcgccaattatcgaacacctaaccaaaaccgaataaataccgcgcctaaccgcgcacgatatccgaacccacgcgccccgacaaaaacaaaaacgacgcctnaccgacgccgaaaactcccgtaactacgccgctactaaacctaaaacgcgccgaccaacaacacccgaaaactactctcgaaacgctaaaatccgaccgacacgtactctaaacccgaattaaacaaactatacacctacccgttattctcccactaaatncaactaccgccaacgaacgaaatccgaaccctacccgaactacgcctactacccgtacaccaacacgcacaaacaaacgccccacaccaaaac

SEQ ID NO: 14605 - DNA, 546 bp, Artificial Sequence
  chemically treated genomic DNA (Homo sapiens) CpG-island No: 14605
  unsure (8)
cgaagttnatcggtgcgtacggtagtttgtaggttttggggttttttttggcgtaggcggtagagcgtttggcgtaggaaatcgtgtatgtttagtattttttggttcgaggcgtagtattttattttttgtattagcgcgttgttcgtgcggatgcgttgtagtatagtatttaggcggtttagtcgattggttattttttcgtagtcgcgttggtatcgcgcgtttatagtttttagtagttcgcgtttttgagttcgtacgtgagttattatttggcgtacgcgttcgcggattagtttttcggtttcggtacgcgcgcggtttagttggtcgacggtcgcgtgtatttgcgcgtgaatcgcgttaaaggtattattttgtttttgtagcgtttgcgttatggcgtttagttttttttgtcgttgttggatttttgcgttgatgtcgtatttgagtttattgtggttgttgttaaggagcgcgtacgagtagtatagcggtttggaatattttcggtagtagatgttgtggatatataaggtt

SEQ ID NO: 14606 - DNA, 546 bp, Artificial Sequence
  chemically treated genomic DNA (Homo sapiens) CpG-island No: 14606
  unsure (539)
aaccttatatatccacaacatctactaccgaaaatattccaaaccgctatactactcgtacgcgctccttaacaacaaccacaataaactcaaatacgacatcaacgcaaaaatccaacaacgacaaaaaaaactaaacgccataacgcaaacgctacaaaaacaaaataatacctttaacgcgattcacgcgcaaatacacgcgaccgtcgaccaactaaaccgcgcgcgtaccgaaaccgaaaaactaatccgcgaacgcgtacgccaaataataactcacgtacgaactcaaaaacgcgaactactaaaaactataaacgcgcgataccaacgcgactacgaaaaaataaccaatcgactaaaccgcctaaatactatactacaacgcatccgcacgaacaacgcgctaatacaaaaaataaaatactacgcctcgaaccaaaaaatactaaacatacacgatttcctacgccaaacgctctaccgcctacgccaaaaaaaaccccaaaacctacaaactaccgtacgcaccgatnaacttcg

SEQ ID NO: 14607 - DNA, 546 bp, Artificial Sequence
  chemically treated genomic DNA (Homo sapiens) CpG-island No: 14607
  unsure (539)
aattttgtgtgtttatagtatttattgtcgaggatgttttaagtcgttgtgttgttcgtgcgcgttttttgatagtagttatagtgagtttaagtgcgatattagcgtagagatttagtagcgataggaggagttggacgttatgacgtaggcgttgtaggagtaggatagtgtttttggcgcggtttacgcgtagatgtacgcggtcgtcggttagttgggtcgcgcgcgtgtcgagatcgaggagttgattcgcgagcgcgtgcgttaggtggtagtttacgtgcgggtttaggagcgcgagttgttggaggttgtggacgcgcggtattagcgcgattacgaggagatggttagtcggttgggtcgtttggatgttgtgttgtagcgtattcgtacgggtagcgcgttggtgtagaggatgaagtgttacgtttcggattaggaggtgttggatatgtacggttttttgcgttaggcgttttgtcgtttgcgttaggaggagttttagagtttgtaagttgtcgtgcgtatcgatnggtttcg

SEQ ID NO: 14608 - DNA, 546 bp, Artificial Sequence
  chemically treated genomic DNA (Homo sapiens) CpG-island No: 14608
  unsure (8)
cgaaaccnatcgatacgcacgacaacttacaaactctaaaactcctcctaacgcaaacgacaaaacgcctaacgcaaaaaaccgtacatatccaacacctcctaatccgaaacgtaacacttcatcctctacaccaacgcgctacccgtacgaatacgctacaacacaacatccaaacgacccaaccgactaaccatctcctcgtaatcgcgctaataccgcgcgtccacaacctccaacaactcgcgctcctaaacccgcacgtaaactaccacctaacgcacgcgctcgcgaatcaactcctcgatctcgacacgcgcgcgacccaactaaccgacgaccgcgtacatctacgcgtaaaccgcgccaaaaacactatcctactcctacaacgcctacgtcataacgtccaactcctcctatcgctactaaatctctacgctaatatcgcacttaaactcactataactactatcaaaaaacgcgcacgaacaacacaacgacttaaaacatcctcgacaataaatactataaacacacaaaatt

SEQ ID NO: 14609 - DNA, 528 bp, Artificial Sequence
  chemically treated genomic DNA (Homo sapiens) CpG-island No: 14609
  unsure (183)
ttttatcgtaaggggagttatgcgacggcggaagcgggtttcggtcggtattttttttttgcgttcgcgtcgtcgcgggtggtcgcgcgggtgaagtcggaagtagtagttaggagggcggggtcgcgtagggtttattggttagggagggcgtcgcgcggaggcgcggggcgtgttttttgnttaaaagttatgttcggtaggtttgggtatcgggcgttgtttttgggtgattttgatcgtttttagtagtcgagtttcggttttttgggttcgtagaagggttgtttgttttcggagcggggcggcgtggggataggggtcggtgagtggtcgtttggtacggcggagtcgggggggatcggtcggtaatttttaggttcgaatttttgttttcgaggagtcggtcggttcggtgtcgtcgtattttacgaggggggattgagaaagggatacgatgtggagagggggttggattcggcgtttggtgttagcgtcgattcgttttttttagggttatggggtttt

SEQ ID NO: 14610 - DNA, 528 bp, Artificial Sequence
  chemically treated genomic DNA (Homo sapiens) CpG-island No: 14610
  unsure (346)
aaaaccccataaccctaaaaaaaacgaatcgacgctaacaccaaacgccgaatccaaccccctctccacatcgtatccctttctcaatcccccctcgtaaaatacgacgacaccgaaccgaccgactcctcgaaaacaaaaattcgaacctaaaaattaccgaccgatcccccccgactccgccgtaccaaacgaccactcaccgacccctatccccacgccgccccgctccgaaaacaaacaacccttctacgaacccaaaaaaccgaaactcgactactaaaaacgatcaaaatcacccaaaaacaacgcccgatacccaaacctaccgaacataacttttaancaaaaaacacgccccgcgcctccgcgcgacgccctccctaaccaataaaccctacgcgaccccgccctcctaactactacttccgacttcacccgcgcgaccacccgcgacgacgcgaacgcaaaaaaaaaataccgaccgaaacccgcttccgccgtcgcataactccccttacgataaaa

SEQ ID NO: 14611 - DNA, 528 bp, Artificial Sequence
  chemically treated genomic DNA (Homo sapiens) CpG-island No: 14611
  unsure (346)
aaagttttatgattttagggagggcggatcggcgttagtattaggcgtcgggtttagttttttttttatatcgtattttttttttagttttttttcgtagggtgcgacggtatcgggtcggtcgatttttcggaggtagagattcgggtttgggggttgtcggtcggtttttttcggtttcgtcgtgttaggcggttatttatcggtttttgtttttacgtcgtttcgtttcggggataagtagtttttttgcgagtttagaaagtcgaagttcgattgttggaagcggttaaaattatttaggggtagcgttcggtatttagatttgtcgagtatggtttttgantaggagatacgtttcgcgttttcgcgcggcgttttttttggttagtgggttttacgcggtttcgtttttttggttgttgttttcggttttattcgcgcggttattcgcggcggcgcgggcgtaggaagaggatgtcggtcggggttcgttttcgtcgtcgtatggttttttttgcggtggga

SEQ ID NO: 14612 - DNA, 528 bp, Artificial Sequence
  chemically treated genomic DNA (Homo sapiens) CpG-island No: 14612
  unsure (183)
tcccaccgcaaaaaaaaccatacgacgacgaaaacgaaccccgaccgacatcctcttcctacgcccgcgccgccgcgaataaccgcgcgaataaaaccgaaaacaacaaccaaaaaaacgaaaccgcgtaaaacccactaaccaaaaaaaacgccgcgcgaaaacgcgaaacgtatctcctantcaaaaaccatactcgacaaatctaaataccgaacgctacccctaaataattttaaccgcttccaacaatcgaacttcgactttctaaactcgcaaaaaaactacttatccccgaaacgaaacgacgtaaaaacaaaaaccgataaataaccgcctaacacgacgaaaccgaaaaaaaccgaccgacaacccccaaacccgaatctctacctccgaaaaatcgaccgacccgataccgtcgcaccctacgaaaaaaaactaaaaaaaaaatacgatataaaaaaaaaactaaacccgacgcctaatactaacgccgatccgccctccctaaaatcataaaacttt

SEQ ID NO: 14613 - DNA, 764 bp, Artificial Sequence
  chemically treated genomic DNA (Homo sapiens) CpG-island No: 14613
attcgttttttatcgagtttcgtgtcgtttttaaatcgtacgataagttttatagggagtgcgttataggtcggggcgcgttacggggtcggggcggggcggagttcggacgtcgggagtaggatggcggcggagtaggatttcgaggcgcgcgcggggcggtcgttgtttattgatttttattaggttattatggcgttgggttattggcgcgcgggtcgggcgcgggacgtcgtcgagttcgagtttttttttcgtcgttgttcgttcggcggcgttttcgttttggtagtcggtttgcgcgattgtgtgcgttttttgcgcgtttttcgtttgcgggacgtcggtagtatttcgttcgcgcgacgagttttttacgttcggtagaaatttttatttatggtcggtggaagtttttgttttttcgtggaattttttatgttttacgatcggtttgttttcgcgttggttttagcgtagttatttcgtttttagacgtgtagtttttggtttcggtgttgtttttagatacggattttgcgtttttcgagtattttcgggttttcgattgtttcgaggtgacggtgcgagttttgttcgaggttttttcgtttttttcggagtgagtaggggtaagcgggcggcgcggcggttacggggtgttgggtcgagcgcggagttgattttttttttcgtaggtgtcgtttttgtaggtgttcgggtcgtttttggtggtgtagttgttggagatatcgttgttttgt

SEQ ID NO: 14614 - DNA, 764 bp, Artificial Sequence
  chemically treated genomic DNA (Homo sapiens) CpG-island No: 14614
acaaaacaacgatatctccaacaactacaccaccaaaaacgacccgaacacctacaaaaacgacacctacgaaaaaaaaaatcaactccgcgctcgacccaacaccccgtaaccgccgcgccgcccgcttacccctactcactccgaaaaaaacgaaaaaacctcgaacaaaactcgcaccgtcacctcgaaacaatcgaaaacccgaaaatactcgaaaaacgcaaaatccgtatctaaaaacaacaccgaaaccaaaaactacacgtctaaaaacgaaataactacgctaaaaccaacgcgaaaacaaaccgatcgtaaaacataaaaaattccacgaaaaaacaaaaacttccaccgaccataaataaaaatttctaccgaacgtaaaaaactcgtcgcgcgaacgaaatactaccgacgtcccgcaaacgaaaaacgcgcaaaaaacgcacacaatcgcgcaaaccgactaccaaaacgaaaacgccgccgaacgaacaacgacgaaaaaaaaactcgaactcgacgacgtcccgcgcccgacccgcgcgccaataacccaacgccataataacctaataaaaatcaataaacaacgaccgccccgcgcgcgcctcgaaatcctactccgccgccatcctactcccgacgtccgaactccgccccgccccgaccccgtaacgcgccccgacctataacgcactccctataaaacttatcgtacgatttaaaaacgacacgaaactcgataaaaaacgaat

SEQ ID NO: 14615 - DNA, 764 bp, Artificial Sequence
  chemically treated genomic DNA (Homo sapiens) CpG-island No: 14615
gtagagtagcggtgtttttagtagttgtattattaggagcggttcggatatttgtaggagcggtatttgcggggagagaagttagtttcgcgttcggtttagtatttcgtggtcgtcgcgtcgttcgtttatttttatttatttcggggaaggcgagggagtttcgggtagggttcgtatcgttatttcggagtagtcgagggttcgaaggtgttcgaagaacgtaggattcgtgtttgggggtagtatcgaggttaggaattgtacgtttggaaacgaggtaattgcgttgagattagcgcggggatagatcggtcgtgggatatggggggttttacgggggggtaaggatttttatcggttataggtgggggtttttgtcgggcgtggggggttcgtcgcgcggacggggtattatcggcgtttcgtaggcggaaggcgcgtaggaagcgtatatagtcgcgtaagtcggttattaaggcgaaggcgtcgtcgaacgggtagcggcggaagaagagttcgaattcggcggcgtttcgcgttcggttcgcgcgttaatagtttaacgttatggtggtttggtagaggttagtgagtagcggtcgtttcgcgcgcgtttcggggttttgtttcgtcgttattttgttttcgacgttcggatttcgtttcgtttcggtttcgtgacgcgtttcggtttatggcgtattttttgtggggtttatcgtgcggtttgggagcggtacgggattcgatggaggacgggt

SEQ ID NO: 14616 - DNA, 764 bp, Artificial Sequence
  chemically treated genomic DNA (Homo sapiens) CpG-island No: 14616
acccgtcctccatcgaatcccgtaccgctcccaaaccgcacgataaaccccacaaaaaatacgccataaaccgaaacgcgtcacgaaaccgaaacgaaacgaaatccgaacgtcgaaaacaaaataacgacgaaacaaaaccccgaaacgcgcgcgaaacgaccgctactcactaacctctaccaaaccaccataacgttaaactattaacgcgcgaaccgaacgcgaaacgccgccgaattcgaactcttcttccgccgctacccgttcgacgacgccttcgccttaataaccgacttacgcgactatatacgcttcctacgcgccttccgcctacgaaacgccgataataccccgtccgcgcgacgaaccccccacgcccgacaaaaacccccacctataaccgataaaaatccttacccccccgtaaaaccccccatatcccacgaccgatctatccccgcgctaatctcaacgcaattacctcgtttccaaacgtacaattcctaacctcgatactacccccaaacacgaatcctacgttcttcgaacaccttcgaaccctcgactactccgaaataacgatacgaaccctacccgaaactccctcgccttccccgaaataaataaaaataaacgaacgacgcgacgaccacgaaatactaaaccgaacgcgaaactaacttctctccccgcaaataccgctcctacaaatatccgaaccgctcctaataatacaactactaaaaacaccgctactctac

SEQ ID NO: 14617 - DNA, 757 bp, Artificial Sequence
  chemically treated genomic DNA (Homo sapiens) CpG-island No: 14617
ttagttcggttcggtttcgtttcgtttttgcgttgcgtcgtttcgtgcgttattcggcgtttgtcgttgtcggattcgtttttatcggcgatattattggtcgcgaagtaggggggcggcgcgcgtttgtcgttcgtttttagtatttgtgtaaattttttcggggaagagcggttttcgggtgtatttttaacggaattttgtttttgaagcgtcggggtacggcgcgtcgagggttttggcggttaggcggggcgtgtgtaagggtcgcgtttttttttcgggttttcggttcgtgtttttggtagagtttagtgttttatttttcgtgcgcggttcgggcggtttttttttttattagttttttcgcgttcgtcgattttttttttttggtcgtcgcgtttttggttggcgtgtgagtatcgcggttttcgtcggaaggagtcgggcgcgatagagacgttcgaggggtcgggagggcgggcggttcgcgtgcgttagaagttcgcgtcgttagggattgaggtataagtgcgttagcgcgggtttaggggtcgtgggttaagtgcggtatttggggcgagcgtagagaggcggggcgacggaggttacgtggtcggtttggagggcgttcgcgggacgggggcgtcgggagtattgttttacggcgtatttcggtcgtggaagtttttcggttaggttgttggggtttaaggtttgtgtttgttgtcgttttcgtgggagattagatatttgt

SEQ ID NO: 14618 - DNA, 757 bp, Artificial Sequence
  chemically treated genomic DNA (Homo sapiens) CpG-island No: 14618
acaaatatctaatctcccacgaaaacgacaacaaacacaaaccttaaaccccaacaacctaaccgaaaaacttccacgaccgaaatacgccgtaaaacaatactcccgacgcccccgtcccgcgaacgccctccaaaccgaccacgtaacctccgtcgccccgcctctctacgctcgccccaaataccgcacttaacccacgacccctaaacccgcgctaacgcacttatacctcaatccctaacgacgcgaacttctaacgcacgcgaaccgcccgccctcccgacccctcgaacgtctctatcgcgcccgactccttccgacgaaaaccgcgatactcacacgccaaccaaaaacgcgacgaccaaaaaaaaaaaatcgacgaacgcgaaaaaactaataaaaaaaaaaaccgcccgaaccgcgcacgaaaaataaaacactaaactctaccaaaaacacgaaccgaaaacccgaaaaaaaaacgcgacccttacacacgccccgcctaaccgccaaaaccctcgacgcgccgtaccccgacgcttcaaaaacaaaattccgttaaaaatacacccgaaaaccgctcttccccgaaaaaatttacacaaatactaaaaacgaacgacaaacgcgcgccgcccccctacttcgcgaccaataatatcgccgataaaaacgaatccgacaacgacaaacgccgaataacgcacgaaacgacgcaacgcaaaaacgaaacgaaaccgaaccgaactaa

SEQ ID NO: 14619 - DNA, 757 bp, Artificial Sequence
  chemically treated genomic DNA (Homo sapiens) CpG-island No: 14619
gtagatgtttggttttttacggagacggtagtaaatataggttttaggttttagtagtttggtcgaggggtttttacgatcgggatgcgtcgtgagatagtgttttcggcgttttcgtttcgcggacgttttttaagtcggttacgtggttttcgtcgtttcgtttttttgcgttcgttttaagtgtcgtatttggtttacggtttttaagttcgcgttggcgtatttgtgttttagtttttaacggcgcgagtttttggcgtacgcgggtcgttcgttttttcggtttttcgggcgtttttgtcgcgttcgatttttttcggcgggggtcgcggtatttatacgttagttaaggacgcggcgattaaggaggaggaatcggcggacgcgggaagattgatgaaagggagggtcgttcgggtcgcgtacgggaaatgaagtattgggttttattaagagtacgggtcgggggttcgggggggggacgcgatttttgtatacgtttcgtttggtcgttaggattttcgacgcgtcgtgtttcgacgttttaaagatagaatttcgttggagatgtattcggaggtcgttttttttcggaggagtttgtataagtgttgggaacgggcggtaggcgcgcgtcgtttttttgtttcgcggttagtggtgtcgtcggtgggggcgggttcggtagcggtaagcgtcgagtgacgtacgaggcggcgtagcgtaggagcggggcggggtcgggtcgggttag

SEQ ID NO: 14620 - DNA, 757 bp, Artificial Sequence
  chemically treated genomic DNA (Homo sapiens) CpG-island No: 14620
ctaacccgacccgaccccgccccgctcctacgctacgccgcctcgtacgtcactcgacgcttaccgctaccgaacccgcccccaccgacgacaccactaaccgcgaaacaaaaaaacgacgcgcgcctaccgcccgttcccaacacttatacaaactcctccgaaaaaaaacgacctccgaatacatctccaacgaaattctatctttaaaacgtcgaaacacgacgcgtcgaaaatcctaacgaccaaacgaaacgtatacaaaaatcgcgtcccccccccgaacccccgacccgtactcttaataaaacccaatacttcatttcccgtacgcgacccgaacgaccctccctttcatcaatcttcccgcgtccgccgattcctcctccttaatcgccgcgtccttaactaacgtataaataccgcgacccccgccgaaaaaaatcgaacgcgacaaaaacgcccgaaaaaccgaaaaaacgaacgacccgcgtacgccaaaaactcgcgccgttaaaaactaaaacacaaatacgccaacgcgaacttaaaaaccgtaaaccaaatacgacacttaaaacgaacgcaaaaaaacgaaacgacgaaaaccacgtaaccgacttaaaaaacgtccgcgaaacgaaaacgccgaaaacactatctcacgacgcatcccgatcgtaaaaacccctcgaccaaactactaaaacctaaaacctatatttactaccgtctccgtaaaaaaccaaacatctac

SEQ ID NO: 14621 - DNA, 769 bp, Artificial Sequence
  chemically treated genomic DNA (Homo sapiens) CpG-island No: 14621
gtcgcgattttttttgattcgtcgtgatttatcgtgattcgatgtgattttttttaattcgtcgtgattcgttgttatttatagttatttaacgtgattcgtcgtaattttggtgttgtttgttgtttgttgttcgagtttgggcgtatttatgggcgcgggtgatagtgtaagtgtttgggacgataattcgggttttttatcgcggtcggaatttaagaggttgcggcgcgaggtttgggtattcgggggcggaattttgggagggaaggggagtaaagggagacgtcgtagttaacgtcgtttggttttagcgtcggcgaggtttttttcgacgtcgcgggtatttcgcggatttgcggttggtttttttttcgtgttttttcgtcgttttaagtagggtttgggttagcgtttcgggtttaaagaggttgcggttcgggatttcgtcggggattcgttcgcgcgcggtcggcggacgagattgcgttttttaagcggttttgcggtcgcggattttaagttttagttgtgttcgggacgttgcgcgttttcgggattttattttttagagtgtttcgttttagtttttcggtttcgttttttatttggtttcgcgggtagtcggagcgtattcggtcggaagtcgttgtcggggagtcggcggtggggttggacgtaggtgaggtggtatcggatttagtcgcgttttgggttttggatgtttcgtgagagttagggagcgttgtgggggtttgggatcgagggg

SEQ ID NO: 14622 - DNA, 769 bp, Artificial Sequence
  chemically treated genomic DNA (Homo sapiens) CpG-island No: 14622
cccctcgatcccaaacccccacaacgctccctaactctcacgaaacatccaaaacccaaaacgcgactaaatccgataccacctcacctacgtccaaccccaccgccgactccccgacaacgacttccgaccgaatacgctccgactacccgcgaaaccaaataaaaaacgaaaccgaaaaactaaaacgaaacactctaaaaaataaaatcccgaaaacgcgcaacgtcccgaacacaactaaaacttaaaatccgcgaccgcaaaaccgcttaaaaaacgcaatctcgtccgccgaccgcgcgcgaacgaatccccgacgaaatcccgaaccgcaacctctttaaacccgaaacgctaacccaaaccctacttaaaacgacgaaaaaacacgaaaaaaaaaccaaccgcaaatccgcgaaatacccgcgacgtcgaaaaaaacctcgccgacgctaaaaccaaacgacgttaactacgacgtctccctttactccccttccctcccaaaattccgcccccgaatacccaaacctcgcgccgcaacctcttaaattccgaccgcgataaaaaacccgaattatcgtcccaaacacttacactatcacccgcgcccataaatacgcccaaactcgaacaacaaacaacaaacaacaccaaaattacgacgaatcacgttaaataactataaataacaacgaatcacgacgaattaaaaaaaatcacatcgaatcacgataaatcacgacgaatcaaaaaaaatcgcgac

SEQ ID NO: 14623 - DNA, 769 bp, Artificial Sequence
  chemically treated genomic DNA (Homo sapiens) CpG-island No: 14623
tttttcgattttagatttttatagcgttttttgatttttacggagtatttagggtttagggcgcggttgagttcggtgttattttatttgcgtttagttttatcgtcggtttttcgatagcggttttcggtcgggtgcgtttcggttgttcgcggagttaggtggggggcggggtcgggaggttggggcggggtattttgggaaatggagtttcgggggcgcgtagcgtttcgggtatagttgggatttggagttcgcggtcgtaaagtcgtttgggaagcgtagtttcgttcgtcggtcgcgcgcgggcgggttttcgacgaagtttcgggtcgtaatttttttaggttcggggcgttggtttaggttttgtttgggacggcggaaggatacgagaggagggttagtcgtaggttcgcgggatgttcgcggcgtcggaaggagtttcgtcggcgttggggttaggcggcgttagttgcggcgtttttttttgtttttttttttttttagggtttcgttttcgaatatttagatttcgcgtcgtagttttttggatttcggtcgcgatgaggagttcgggttgtcgttttaagtatttgtattgttattcgcgtttatgggtacgtttaggttcgggtagtaagtagtaaataatattagagttacggcgaattacgttgggtgattgtgggtgatagcgggttacggcgggttaagaaggattatatcggattacgatgggttacggcgagttaaggagggtcgcggt

SEQ ID NO: 14624 - DNA, 769 bp, Artificial Sequence
  chemically treated genomic DNA (Homo sapiens) CpG-island No: 14624
accgcgaccctccttaactcgccgtaacccatcgtaatccgatataatccttcttaacccgccgtaacccgctatcacccacaatcacccaacgtaattcgccgtaactctaatattatttactacttactacccgaacctaaacgtacccataaacgcgaataacaatacaaatacttaaaacgacaacccgaactcctcatcgcgaccgaaatccaaaaaactacgacgcgaaatctaaatattcgaaaacgaaaccctaaaaaaaaaaaaaaacaaaaaaaaacgccgcaactaacgccgcctaaccccaacgccgacgaaactccttccgacgccgcgaacatcccgcgaacctacgactaaccctcctctcgtatccttccgccgtcccaaacaaaacctaaaccaacgccccgaacctaaaaaaattacgacccgaaacttcgtcgaaaacccgcccgcgcgcgaccgacgaacgaaactacgcttcccaaacgactttacgaccgcgaactccaaatcccaactatacccgaaacgctacgcgcccccgaaactccatttcccaaaataccccgccccaacctcccgaccccgccccccacctaactccgcgaacaaccgaaacgcacccgaccgaaaaccgctatcgaaaaaccgacgataaaactaaacgcaaataaaataacaccgaactcaaccgcgccctaaaccctaaatactccgtaaaaatcaaaaaacgctataaaaatctaaaatcgaaaaa

SEQ ID NO: 14625 - DNA, 794 bp, Artificial Sequence
  chemically treated genomic DNA (Homo sapiens) CpG-island No: 14625
gtacgttttggattagtttcgtaattcgtttcgttatttttttttttcggaaaattaatatgtgtttttcgtacgcgcgatcgggattttttttcgttttttcggttttttcgagcgcgagtatttcgtcggtttcgttttttacggtttcgtttttagttttttttagttaatgggtagtgaggggcggtatagtttttcgggttaataagtagcgagaggcggggttttcgtttttgcgaatttgtagagtgcggataaaaagtcggtcggagtgtgtcgttttagtaattaatcggcgagggtggggacggggaggcgagttttattggagggcgggggtggggtttagatttgtgggcggggcgcggtttgtggatgggcggtgacgtagcggcgttcgaggtaataagatggtagttgcggatcgttttcgcggcgcgtgggtttcgtgggcgcgggcgtatggcggggttatcgcgtagggttttattagagtaggtggggcggcgcggggttaggtttgcggtttggagtgggagtagtttcgtgggaggtgttttgtcgcgagagtggggtcggggcgcgggttagttaatcgggttttcgtttcgttgggcgtagtcgggttacgtttgtttgtttttatttttttgacgtggttgcgggaagatttgagttatacgtggttaggtgtcgttttcgtggtcggttttttggtcgcgtggtttggttaggtttattttttttagtttttgattttttttttgcgcgttagttttttttatggggag

SEQ ID NO: 14626 - DNA, 794 bp, Artificial Sequence
  chemically treated genomic DNA (Homo sapiens) CpG-island No: 14626
ctccccataaaaaaaactaacgcgcaaaaaaaaaatcaaaaactaaaaaaaataaacctaaccaaaccacgcgaccaaaaaaccgaccacgaaaacgacacctaaccacgtataactcaaatcttcccgcaaccacgtcaaaaaaataaaaacaaacaaacgtaacccgactacgcccaacgaaacgaaaacccgattaactaacccgcgccccgaccccactctcgcgacaaaacacctcccacgaaactactcccactccaaaccgcaaacctaaccccgcgccgccccacctactctaataaaaccctacgcgataaccccgccatacgcccgcgcccacgaaacccacgcgccgcgaaaacgatccgcaactaccatcttattacctcgaacgccgctacgtcaccgcccatccacaaaccgcgccccgcccacaaatctaaaccccacccccgccctccaataaaactcgcctccccgtccccaccctcgccgattaattactaaaacgacacactccgaccgactttttatccgcactctacaaattcgcaaaaacgaaaaccccgcctctcgctacttattaacccgaaaaactataccgcccctcactacccattaactaaaaaaaactaaaaacgaaaccgtaaaaaacgaaaccgacgaaatactcgcgctcgaaaaaaccgaaaaaacgaaaaaaaatcccgatcgcgcgtacgaaaaacacatattaattttccgaaaaaaaaaaataacgaaacgaattacgaaactaatccaaaacgtac

SEQ ID NO: 14627 - DNA, 794 bp, Artificial Sequence
  chemically treated genomic DNA (Homo sapiens) CpG-island No: 14627
ttttttatgagaggggttggcgcgtaaagagaaaattagaggttggaagaggtgagtttggttaagttacgcggttaggaagtcggttacggaagcggtatttagttacgtgtgatttaaattttttcgtagttacgttaaaaaagtaagagtaaataggcgtggttcggttgcgtttagcggagcggagattcggttggttggttcgcgtttcggttttattttcgcggtaggatattttttacggggttgtttttattttagatcgtaggtttagtttcgcgtcgttttatttgttttgatgaggttttgcgcgatggtttcgttatgcgttcgcgtttacgaagtttacgcgtcgcggagacggttcgtagttgttattttgttgtttcggacgtcgttgcgttatcgtttatttataggtcgcgtttcgtttatagatttaggttttattttcgttttttaataggattcgttttttcgtttttattttcgtcgattggttattgggacggtatatttcggtcggttttttgttcgtattttataagttcgtaagggcgggaatttcgtttttcgttgtttattggttcgaaaggttatgtcgttttttattgtttattggttgagagaaattgggggcggggtcgtaaggggcggggtcggcggggtattcgcgttcggagaggtcggaggagcggggaggggtttcggtcgcgcgtgcgaggagtatatgttggtttttcggaggggaggggtagcgaagcgggttgcggggttggtttagagcgtgt

SEQ ID NO: 14628 - DNA, 794 bp, Artificial Sequence
  chemically treated genomic DNA (Homo sapiens) CpG-island No: 14628
acacgctctaaaccaaccccgcaacccgcttcgctacccctcccctccgaaaaaccaacatatactcctcgcacgcgcgaccgaaacccctccccgctcctccgacctctccgaacgcgaataccccgccgaccccgccccttacgaccccgcccccaatttctctcaaccaataaacaataaaaaacgacataacctttcgaaccaataaacaacgaaaaacgaaattcccgcccttacgaacttataaaatacgaacaaaaaaccgaccgaaatataccgtcccaataaccaatcgacgaaaataaaaacgaaaaaacgaatcctattaaaaaacgaaaataaaacctaaatctataaacgaaacgcgacctataaataaacgataacgcaacgacgtccgaaacaacaaaataacaactacgaaccgtctccgcgacgcgtaaacttcgtaaacgcgaacgcataacgaaaccatcgcgcaaaacctcatcaaaacaaataaaacgacgcgaaactaaacctacgatctaaaataaaaacaaccccgtaaaaaatatcctaccgcgaaaataaaaccgaaacgcgaaccaaccaaccgaatctccgctccgctaaacgcaaccgaaccacgcctatttactcttacttttttaacgtaactacgaaaaaatttaaatcacacgtaactaaataccgcttccgtaaccgacttcctaaccgcgtaacttaaccaaactcacctcttccaacctctaattttctctttacgcgccaacccctctcataaaaaa

SEQ ID NO: 14629 - DNA, 512 bp, Artificial Sequence
  chemically treated genomic DNA (Homo sapiens) CpG-island No: 14629
gttcgcgcggttttttagagtttaagtagtttttttttagtcgttattaggttatttttcggcgtttattagtgacgttttcgtttcgttttgcgcgtgcgggttttgttttttcgttgtcgttgttagggcgacggcgggttttcggcggtcggtagatattcgggtttgtttttggtagtttcgttttggttcgtttcgtttcgttcgcggaaaaaaggtcgcgtagcgatgacgtcgtgggggtttggcggtcgtcgcggattcgggagatggaggaaaaggagatattacggcggtagattcgtttattgtagggtaggttcggtcggggtcggacgcgagttttttttttttttttttatttcgcggcggttttttgtttttttgtcgaaggggtcgtttatcgttcgcgtgttttgggtggcggttggggtgggggacggtagggttcgttaggatttgtgggtcggtttagggttcgggttagttttcggttttagttttgtcga

SEQ ID NO: 14630 - DNA, 512 bp, Artificial Sequence
  chemically treated genomic DNA (Homo sapiens) CpG-island No: 14630
tcgacaaaactaaaaccgaaaactaacccgaaccctaaaccgacccacaaatcctaacgaaccctaccgtcccccaccccaaccgccacccaaaacacgcgaacgataaacgaccccttcgacaaaaaaacaaaaaaccgccgcgaaataaaaaaaaaaaaaaaaaactcgcgtccgaccccgaccgaacctaccctacaataaacgaatctaccgccgtaatatctccttttcctccatctcccgaatccgcgacgaccgccaaacccccacgacgtcatcgctacgcgaccttttttccgcgaacgaaacgaaacgaaccaaaacgaaactaccaaaaacaaacccgaatatctaccgaccgccgaaaacccgccgtcgccctaacaacgacaacgaaaaaacaaaacccgcacgcgcaaaacgaaacgaaaacgtcactaataaacgccgaaaaataacctaataacgactaaaaaaaaactacttaaactctaaaaaaccgcgcgaac

SEQ ID NO: 14631 - DNA, 512 bp, Artificial Sequence
  chemically treated genomic DNA (Homo sapiens) CpG-island No: 14631
tcgataaagttggagtcggggattgattcgggttttgagtcggtttataagttttggcggattttatcgttttttattttagtcgttatttagaatacgcgggcggtgagcgattttttcgataagggggtaggggatcgtcgcgaggtgagggggaaagaaggggattcgcgttcggtttcggtcggatttattttgtagtaggcggatttgtcgtcgtaatattttttttttttttatttttcgagttcgcgacggtcgttaggtttttacgacgttatcgttacgcgatttttttttcgcgggcggggcggagcgggttagggcggagttgttaggagtaggttcggatgtttgtcgatcgtcgaggattcgtcgtcgttttgataacggtagcggagaggtagagttcgtacgcgtagaacgaggcggggacgttattagtgagcgtcgggaagtggtttggtaacggttgggaagggattgtttgggttttgggaggtcgcgcgggt

SEQ ID NO: 14632 - DNA, 512 bp, Artificial Sequence
  chemically treated genomic DNA (Homo sapiens) CpG-island No: 14632
acccgcgcgacctcccaaaacccaaacaatcccttcccaaccgttaccaaaccacttcccgacgctcactaataacgtccccgcctcgttctacgcgtacgaactctacctctccgctaccgttatcaaaacgacgacgaatcctcgacgatcgacaaacatccgaacctactcctaacaactccgccctaacccgctccgccccgcccgcgaaaaaaaaatcgcgtaacgataacgtcgtaaaaacctaacgaccgtcgcgaactcgaaaaataaaaaaaaaaaaaatattacgacgacaaatccgcctactacaaaataaatccgaccgaaaccgaacgcgaatccccttctttccccctcacctcgcgacgatcccctacccccttatcgaaaaaatcgctcaccgcccgcgtattctaaataacgactaaaataaaaaacgataaaatccgccaaaacttataaaccgactcaaaacccgaatcaatccccgactccaactttatcga

SEQ ID NO: 14633 - DNA, 638 bp, Artificial Sequence
  chemically treated genomic DNA (Homo sapiens) CpG-island No: 14633
gagacgtcgtagtttcgcgggggcggtcgtggttgcgttcgggagattgattagttaaggtttcgtttttggacgttttagcggggggatagcggtttgcggatttcgttcggttttttcggcggattgtgttttggtaaggcggtcgggtttcggagttagtcggggttgcggttaaggcgttgttcgttttcgttcggaacgcgttatttattcggcgcgggcggggtagaggacggcgcgatcgtattttgtagtcgttgattggatttcgtcggcgcggttttatagattagtcgataaagtttgtatcgtcgttagttcgtcgcgatcggaagtcgtagaggtttcgtttgggaaattttttgcgtcgttttaggagcgttagggatcggttttttttttagtggtgcggattttcgggttcggggattaagattttcggaggtaggggtgttcggtagagcggcgttgttacgcggttgggagggttgcgggtcgggaagcgcgggttcggaaattcgggtttggagttcgcggcgaggttcgatcgtagtttaagattagttttttaggaggcgaggatttaggggaagtaaatatcgtgaggttaaattttatttttttgcgttttagag

SEQ ID NO: 14634 - DNA, 638 bp, Artificial Sequence
  chemically treated genomic DNA (Homo sapiens) CpG-island No: 14634
ctctaaaacgcaaaaaaataaaatttaacctcacgatatttacttcccctaaatcctcgcctcctaaaaaactaatcttaaactacgatcgaacctcgccgcgaactccaaacccgaatttccgaacccgcgcttcccgacccgcaaccctcccaaccgcgtaacaacgccgctctaccgaacacccctacctccgaaaatcttaatccccgaacccgaaaatccgcaccactaaaaaaaaaaccgatccctaacgctcctaaaacgacgcaaaaaatttcccaaacgaaacctctacgacttccgatcgcgacgaactaacgacgatacaaactttatcgactaatctataaaaccgcgccgacgaaatccaatcaacgactacaaaatacgatcgcgccgtcctctaccccgcccgcgccgaataaataacgcgttccgaacgaaaacgaacaacgccttaaccgcaaccccgactaactccgaaacccgaccgccttaccaaaacacaatccgccgaaaaaaccgaacgaaatccgcaaaccgctatccccccgctaaaacgtccaaaaacgaaaccttaactaatcaatctcccgaacgcaaccacgaccgcccccgcgaaactacgacgtctc

SEQ ID NO: 14635 - DNA, 638 bp, Artificial Sequence
  chemically treated genomic DNA (Homo sapiens) CpG-island No: 14635
ttttggggcgtagagaggtgaagtttggttttacggtatttattttttttggattttcgttttttgagaagttggttttgggttgcggtcggatttcgtcgcgagttttagattcgagttttcgagttcgcgtttttcggttcgtaatttttttaatcgcgtagtaacgtcgttttgtcggatatttttgttttcgggggttttagttttcgggttcggaagttcgtattattgagaggggagtcgatttttggcgtttttagaacggcgtaggaagttttttaggcggggtttttgcgattttcggtcgcggcgggttggcggcggtgtaggttttgtcggttgatttgtggggtcgcgtcggcggggtttagttagcggttgtagggtgcggtcgcgtcgttttttatttcgttcgcgtcgggtgagtggcgcgtttcggacgggggcgggtaacgttttagtcgtagtttcggttggtttcggagttcggtcgttttgttagggtatagttcgtcgagagggtcgggcggggttcgtaggtcgttgttttttcgttagggcgtttaggagcggggttttggttagttagtttttcggacgtagttacggtcgttttcgcgaggttgcggcgtttt

SEQ ID NO: 14636 - DNA, 638 bp, Artificial Sequence
  chemically treated genomic DNA (Homo sapiens) CpG-island No: 14636
aaaacgccgcaacctcgcgaaaacgaccgtaactacgtccgaaaaactaactaaccaaaaccccgctcctaaacgccctaacgaaaaaacaacgacctacgaaccccgcccgaccctctcgacgaactataccctaacaaaacgaccgaactccgaaaccaaccgaaactacgactaaaacgttacccgcccccgtccgaaacgcgccactcacccgacgcgaacgaaataaaaaacgacgcgaccgcaccctacaaccgctaactaaaccccgccgacgcgaccccacaaatcaaccgacaaaacctacaccgccgccaacccgccgcgaccgaaaatcgcaaaaaccccgcctaaaaaacttcctacgccgttctaaaaacgccaaaaatcgactcccctctcaataatacgaacttccgaacccgaaaactaaaacccccgaaaacaaaaatatccgacaaaacgacgttactacgcgattaaaaaaattacgaaccgaaaaacgcgaactcgaaaactcgaatctaaaactcgcgacgaaatccgaccgcaacccaaaaccaacttctcaaaaaacgaaaatccaaaaaaaataaataccgtaaaaccaaacttcacctctctacgccccaaaa

SEQ ID NO: 14637 - DNA, 1555 bp, Artificial Sequence
  chemically treated genomic DNA (Homo sapiens) CpG-island No: 14637
cgttatacgattttattattacgaagtttatatatagaatagtattcgttatacgattttattattacgaagtttagatatagaatagtattcgttatacggttttattattacgaagtttagatatagaatagtattcgttatacggttttattattacgaagtttagatatagaatagtattcgttatacgattttattattacgaagtttatatatagaatagtattcgttatacgattttattattacgaagtttatatatagaatagtattcgttatacgattttattattacgaagtttagatatagaatagtattcgttatacggttttattattacgaagtttatatatagaatagtattcgttatacggttttattattacgaagtttatatatagaatagtattcgttatacggttttattattacgaagtttagatatagaatagtattcgttatacggttttattattacgaagtttagatatataatagtattcgttatacggttttattattacgaagtttatatatagaatagtattcgttatacggttttattattacgaagtttagatatagaatagtattcgttatacggttttattattacgaagtttatatatagaatagtattcgttatacggttttattattacgaagtttatatatagaatagtattcgttatacggttttattattacgaagtttagatatagaatagtattcgttatacggttttattattacgaagtttatatatagaatagtattcgttatacggttttattattacgaagtttatatatagaatagtattcgttatacggttttattattacgaagtttagatatagaatagtattcgttatacggttttattattacgaagtttatatatagaatagtattcgttatacggttttattattacgaagtttatatatagaatagtattcgttatattgttttattattacgaagtttatatatagaatagtattcgttatacggttttattattacgaagtttagatatagaatagtattcgttatacggttttattattacgaagtttagatatagaatagtattcgttatacgattttattattacgaagtttatatatagaatagtattcgttttacgattttattattacgaagtttatatatagaatagtattcgttatacggttttattattatgaagtttatatatagaatagtattcgttatacggttttattattacgaagtttatatatagaatagtattcgttatacggttttattattacgaagtttatatatagaatagtattcgttatacggttttattattacgaagtttatatatagaatagtattcgttatacggttttattattacgaagtttatatatagaatagtattcgttatacggttttattattacgaagtttatatatagaatagtattcgttttacgattttattattacgaagtttagatatagaatagtattcgttatacggttttattattacgaagtttagatatag

SEQ ID NO: 14638 - DNA, 1555 bp, Artificial Sequence
  chemically treated genomic DNA (Homo sapiens) CpG-island No: 14638
ctatatctaaacttcgtaataataaaaccgtataacgaatactattctatatctaaacttcgtaataataaaatcgtaaaacgaatactattctatatataaacttcgtaataataaaaccgtataacgaatactattctatatataaacttcgtaataataaaaccgtataacgaatactattctatatataaacttcgtaataataaaaccgtataacgaatactattctatatataaacttcgtaataataaaaccgtataacgaatactattctatatataaacttcgtaataataaaaccgtataacgaatactattctatatataaacttcataataataaaaccgtataacgaatactattctatatataaacttcgtaataataaaatcgtaaaacgaatactattctatatataaacttcgtaataataaaatcgtataacgaatactattctatatctaaacttcgtaataataaaaccgtataacgaatactattctatatctaaacttcgtaataataaaaccgtataacgaatactattctatatataaacttcgtaataataaaacaatataacgaatactattctatatataaacttcgtaataataaaaccgtataacgaatactattctatatataaacttcgtaataataaaaccgtataacgaatactattctatatctaaacttcgtaataataaaaccgtataacgaatactattctatatataaacttcgtaataataaaaccgtataacgaatactattctatatataaacttcgtaataataaaaccgtataacgaatactattctatatctaaacttcgtaataataaaaccgtataacgaatactattctatatataaacttcgtaataataaaaccgtataacgaatactattctatatataaacttcgtaataataaaaccgtataacgaatactattctatatctaaacttcgtaataataaaaccgtataacgaatactattctatatataaacttcgtaataataaaaccgtataacgaatactattatatatctaaacttcgtaataataaaaccgtataacgaatactattctatatctaaacttcgtaataataaaaccgtataacgaatactattctatatataaacttcgtaataataaaaccgtataacgaatactattctatatataaacttcgtaataataaaaccgtataacgaatactattctatatctaaacttcgtaataataaaatcgtataacgaatactattctatatataaacttcgtaataataaaatcgtataacgaatactattctatatataaacttcgtaataataaaatcgtataacgaatactattctatatctaaacttcgtaataataaaaccgtataacgaatactattctatatctaaacttcgtaataataaaaccgtataacgaatactattctatatctaaacttcgtaataataaaatcgtataacgaatactattctatatataaacttcgtaataataaaatcgtataacg

SEQ ID NO: 14639 - DNA, 1555 bp, Artificial Sequence
  chemically treated genomic DNA (Homo sapiens) CpG-island No: 14639
ttgtgtttgagtttcgtggtgatggggtcgtgtagcgggtgttgttttgtgtttgagtttcgtggtgatggggtcgtggagcgggtgttgttttgtgtgtgagtttcgtggtgatggggtcgtgtagcgggtgttgttttgtgtgtgagtttcgtggtgatggggtcgtgtagcgggtgttgttttgtgtgtgagtttcgtggtgatggggtcgtgtagcgggtgttgttttgtgtgtgagtttcgtggtgatggggtcgtgtagcgggtgttgttttgtgtgtgagtttcgtggtgatggggtcgtgtagcgggtgttgttttgtgtgtgagttttatggtgatggggtcgtgtagcgggtgttgttttgtgtgtgagtttcgtggtgatggggtcgtggagcgggtgttgttttgtgtgtgagtttcgtggtgatggggtcgtgtagcgggtgttgttttgtgtttgagtttcgtggtgatggggtcgtgtagcgggtgttgttttgtgtttgagtttcgtggtgatggggtcgtgtagcgggtgttgttttgtgtgtgagtttcgtggtgatggggtagtgtagcgggtgttgttttgtgtgtgagtttcgtggtgatggggtcgtgtagcgggtgttgttttgtgtgtgagtttcgtggtggtggggtcgtgtagcgggtgttgttttgtgtttgagtttcgtggtggtggggtcgtgtagcgggtgttgttttgtgtgtgagtttcgtggtgatggggtcgtgtagcgggtgttgttttgtgtgtgagtttcgtggtggtggggtcgtgtagcgggtgttgttttgtgtttgagtttcgtggtggtggggtcgtgtagcgggtgttgttttgtgtgtgagtttcgtggtgatggggtcgtgtagcgggtgttgttttgtgtgtgagtttcgtggtgatggggtcgtgtagcgggtgttgttttgtgtttgagtttcgtggtgatggggtcgtgtagcgggtgttgttttgtgtgtgagtttcgtggtgatggggtcgtgtagcgggtgttgttgtgtgtttgagtttcgtggtggtggggtcgtgtagcgggtgttgttttgtgtttgagtttcgtggtggtggggtcgtgtagcgggtgttgttttgtgtgtgagtttcgtggtggtggggtcgtgtagcgggtgttgttttgtgtgtgagtttcgtggtgatggggtcgtgtagcgggtgttgttttgtgtttgagtttcgtggtgatggggtcgtgtagcgggtgttgttttgtgtgtgagtttcgtggtggtggggtcgtgtagcgggtgttgttttgtatgtgagtttcgtggtggtggggtcgtgtagcgggtgttgttttgtgtttgagtttcgtgatgatggggtcgtgtagcgggtgttgttttgtgtttgagtttcgtggtgatggggtcgtgtagcgggtgttgttttgtgtttgagtttcgtggtgatggggtcgtgtagcgggtgttgttttgtgtgtgagtttcgtggtgatggggtcgtgtagcg

SEQ ID NO: 14640 - DNA, 1555 bp, Artificial Sequence
  chemically treated genomic DNA (Homo sapiens) CpG-island No: 14640
cgctacacgaccccatcaccacgaaactcacacacaaaacaacacccgctacacgaccccatcaccacgaaactcaaacacaaaacaacacccgctacacgaccccatcaccacgaaactcaaacacaaaacaacacccgctacacgaccccatcatcacgaaactcaaacacaaaacaacacccgctacacgaccccaccaccacgaaactcacatacaaaacaacacccgctacacgaccccaccaccacgaaactcacacacaaaacaacacccgctacacgaccccatcaccacgaaactcaaacacaaaacaacacccgctacacgaccccatcaccacgaaactcacacacaaaacaacacccgctacacgaccccaccaccacgaaactcacacacaaaacaacacccgctacacgaccccaccaccacgaaactcaaacacaaaacaacacccgctacacgaccccaccaccacgaaactcaaacacacaacaacacccgctacacgaccccatcaccacgaaactcacacacaaaacaacacccgctacacgaccccatcaccacgaaactcaaacacaaaacaacacccgctacacgaccccatcaccacgaaactcacacacaaaacaacacccgctacacgaccccatcaccacgaaactcacacacaaaacaacacccgctacacgaccccaccaccacgaaactcaaacacaaaacaacacccgctacacgaccccaccaccacgaaactcacacacaaaacaacacccgctacacgaccccatcaccacgaaactcacacacaaaacaacacccgctacacgaccccaccaccacgaaactcaaacacaaaacaacacccgctacacgaccccaccaccacgaaactcacacacaaaacaacacccgctacacgaccccatcaccacgaaactcacacacaaaacaacacccgctacactaccccatcaccacgaaactcacacacaaaacaacacccgctacacgaccccatcaccacgaaactcaaacacaaaacaacacccgctacacgaccccatcaccacgaaactcaaacacaaaacaacacccgctacacgaccccatcaccacgaaactcacacacaaaacaacacccgctccacgaccccatcaccacgaaactcacacacaaaacaacacccgctacacgaccccatcaccataaaactcacacacaaaacaacacccgctacacgaccccatcaccacgaaactcacacacaaaacaacacccgctacacgaccccatcaccacgaaactcacacacaaaacaacacccgctacacgaccccatcaccacgaaactcacacacaaaacaacacccgctacacgaccccatcaccacgaaactcacacacaaaacaacacccgctacacgaccccatcaccacgaaactcacacacaaaacaacacccgctccacgaccccatcaccacgaaactcaaacacaaaacaacacccgctacacgaccccatcaccacgaaactcaaacacaa

SEQ ID NO: 14641 - DNA, 983 bp, Artificial Sequence
  chemically treated genomic DNA (Homo sapiens) CpG-island No: 14641
taattatttttaaattaacgtatattatatttatatcgtttcgtatcgcgtcgttatgaaatattgtttttcgaaaagtttattatatttaaggataagttgtaggttatcgagtcgcgttaatgggcggcgagcgtaaggtttagacgtgtgtcgcgatatttagcgtgtcggcgcgggtatgcgcggttggtttaaggacgatgtttatatgcgttggtttttggagtagttgggcggtgaggtgggtatttagcgtaagaagatgcggttggttaacgaggaggagatcgatcgcgtcgtgtacgtttggtttttggcgttgcgttacgacggggtgtcgttgtttggttcgtttatttaggcgtagtcgaggttttcgcgcgttagatttacgggttcgagtgtatttttaaggttagttacggttggttttggcgttggtagaagcgttacggtatttttagttagcgtttttacggcgaggcgggtttttagtttcgagtttcgcgttcggttcgttcgttaaggaggagttcgcgttgtttttcggcgtcggttttttgttcgatcgcgtttcggtttcgcgttttcggtcgagggcggttacggggacgagtagatttatagcgttagcgttatcggtttttattggaagttgttttcggagtaggttgcgttcggttaggggatttcggggcgggggttgtggcggcgttggcggggcgatcgcgtaacggtgttgttggtcgtaaatttgatcggtagttataagttgaagtcgttggttatcgggcggttgtcggattcgtttagtttgcgttattataattaggataagttttcggttttttatcgttatagtttcgacgtttggtttagcgtacgttgttgcggggttggttttttgaggaatttgttttaggcgttaaatttatttgcgtcgaagttgtttgtagagaaggtcgtgttgttggtggttt

SEQ ID NO: 14642 - DNA, 983 bp, Artificial Sequence
  chemically treated genomic DNA (Homo sapiens) CpG-island No: 14642
aaaccaccaacaacacgaccttctctacaaacaacttcgacgcaaataaatttaacgcctaaaacaaattcctcaaaaaaccaaccccgcaacaacgtacgctaaaccaaacgtcgaaactataacgataaaaaaccgaaaacttatcctaattataataacgcaaactaaacgaatccgacaaccgcccgataaccaacgacttcaacttataactaccgatcaaatttacgaccaacaacaccgttacgcgatcgccccgccaacgccgccacaacccccgccccgaaatcccctaaccgaacgcaacctactccgaaaacaacttccaataaaaaccgataacgctaacgctataaatctactcgtccccgtaaccgccctcgaccgaaaacgcgaaaccgaaacgcgatcgaacaaaaaaccgacgccgaaaaacaacgcgaactcctccttaacgaacgaaccgaacgcgaaactcgaaactaaaaacccgcctcgccgtaaaaacgctaactaaaaataccgtaacgcttctaccaacgccaaaaccaaccgtaactaaccttaaaaatacactcgaacccgtaaatctaacgcgcgaaaacctcgactacgcctaaataaacgaaccaaacaacgacaccccgtcgtaacgcaacgccaaaaaccaaacgtacacgacgcgatcgatctcctcctcgttaaccaaccgcatcttcttacgctaaatacccacctcaccgcccaactactccaaaaaccaacgcatataaacatcgtccttaaaccaaccgcgcatacccgcgccgacacgctaaatatcgcgacacacgtctaaaccttacgctcgccgcccattaacgcgactcgataacctacaacttatccttaaatataataaacttttcgaaaaacaatatttcataacgacgcgatacgaaacgatataaatataatatacgttaatttaaaaataatta

SEQ ID NO: 14643 - DNA, 983 bp, Artificial Sequence
  chemically treated genomic DNA (Homo sapiens) CpG-island No: 14643
gggttattagtagtacggttttttttgtaggtagtttcggcgtaggtaggtttgacgtttgggataaattttttaaagaattagtttcgtagtagcgtgcgttgagttaggcgtcggggttgtagcggtaggaggtcgggaatttgttttggttgtggtggcgtaggttgggcgggttcggtagtcgttcgatgattagcggttttagtttgtggttgtcggttaggtttgcggttagtagtatcgttacgcggtcgtttcgttagcgtcgttatagttttcgtttcggggttttttggtcgggcgtagtttgtttcggaagtagtttttagtagaggtcggtgacgttggcgttgtaaatttgttcgttttcgtagtcgttttcggtcgggggcgcggggtcggggcgcggtcgggtagggggtcggcgtcggagggtagcgcgggtttttttttgacgggcgggtcgggcgcggggttcggggttgggggttcgtttcgtcgtagaagcgttggttggagatgtcgtggcgtttttgttagcgttagaattagtcgtggttggttttgaaggtgtattcgggttcgtagatttggcgcgcgaaggtttcggttgcgtttggatgagcgggttagatagcggtatttcgtcgtggcgtagcgttaggaattaggcgtatacggcgcggtcgatttttttttcgttggttagtcgtatttttttgcgttgagtgtttattttatcgtttagttgttttaggaattagcgtatgtgggtatcgtttttgagttagtcgcgtatgttcgcgtcggtacgttgaatgtcgcggtatacgtttgggttttgcgttcgtcgtttattgacgcggttcgatggtttgtaatttgtttttggatgtagtaggtttttcggaaggtaatgttttatggcgacgcggtgcggggcggtgtgggtgtgatgtgcgttggtttaagggtggtta

SEQ ID NO: 14644 - DNA, 983 bp, Artificial Sequence
  chemically treated genomic DNA (Homo sapiens) CpG-island No: 14644
taaccacccttaaaccaacgcacatcacacccacaccgccccgcaccgcgtcgccataaaacattaccttccgaaaaacctactacatccaaaaacaaattacaaaccatcgaaccgcgtcaataaacgacgaacgcaaaacccaaacgtataccgcgacattcaacgtaccgacgcgaacatacgcgactaactcaaaaacgatacccacatacgctaattcctaaaacaactaaacgataaaataaacactcaacgcaaaaaaatacgactaaccaacgaaaaaaaaatcgaccgcgccgtatacgcctaattcctaacgctacgccacgacgaaataccgctatctaacccgctcatccaaacgcaaccgaaaccttcgcgcgccaaatctacgaacccgaatacaccttcaaaaccaaccacgactaattctaacgctaacaaaaacgccacgacatctccaaccaacgcttctacgacgaaacgaacccccaaccccgaaccccgcgcccgacccgcccgtcaaaaaaaaacccgcgctaccctccgacgccgaccccctacccgaccgcgccccgaccccgcgcccccgaccgaaaacgactacgaaaacgaacaaatttacaacgccaacgtcaccgacctctactaaaaactacttccgaaacaaactacgcccgaccaaaaaaccccgaaacgaaaactataacgacgctaacgaaacgaccgcgtaacgatactactaaccgcaaacctaaccgacaaccacaaactaaaaccgctaatcatcgaacgactaccgaacccgcccaacctacgccaccacaaccaaaacaaattcccgacctcctaccgctacaaccccgacgcctaactcaacgcacgctactacgaaactaattctttaaaaaatttatcccaaacgtcaaacctacctacgccgaaactacctacaaaaaaaaccgtactactaataaccc

SEQ ID NO: 14645 - DNA, 546 bp, Artificial Sequence
  chemically treated genomic DNA (Homo sapiens) CpG-island No: 14645
ggttttttgttttttgttttgggtttgtttcggttggcgggattgttcgtattgtttttttggttttcgcgtttgcggtgggtgttcgttttttttttattatttttttttcgtttgtttttcgtcgttatttttttattcgttttgtgttttttttttttttttttcgttttcgtttgtttttgcgttggtcgtttttttgtttttcgtcggttttttgcggttgtgggtgtgtgtcgtttttttgttcgcgttttttttttttttattgtttcgaaggtttttttttttttcgtttttttcgcgttttttttttcgcgtttttttcgcgttttttatcgttttgtttcgcgttttcgtggcgcggcgtcggggggagtttttttttttttttcgttgtttcgttttcggtttcgttggttggcgcgcgcgcgtcggcgggtgtttcgtttcgttatttttcggataggtatttaatttcgtttttgtattaaatgttttgaggtgttcggttttcgggtcgcgttgcgagaaatgaaagaaaaa

SEQ ID NO: 14646 - DNA, 546 bp, Artificial Sequence
  chemically treated genomic DNA (Homo sapiens) CpG-island No: 14646
tttttctttcatttctcgcaacgcgacccgaaaaccgaacacctcaaaacatttaatacaaaaacgaaattaaatacctatccgaaaaataacgaaacgaaacacccgccgacgcgcgcgcgccaaccaacgaaaccgaaaacgaaacaacgaaaaaaaaaaaaaaactccccccgacgccgcgccacgaaaacgcgaaacaaaacgataaaaaacgcgaaaaaaacgcgaaaaaaaaaacgcgaaaaaaacgaaaaaaaaaaaaaccttcgaaacaataaaaaaaaaaaaaacgcgaacaaaaaaacgacacacacccacaaccgcaaaaaaccgacgaaaaacaaaaaaacgaccaacgcaaaaacaaacgaaaacgaaaaaaaaaaaaaaaaaacacaaaacgaataaaaaaataacgacgaaaaacaaacgaaaaaaaaataataaaaaaaaaacgaacacccaccgcaaacgcgaaaaccaaaaaaacaatacgaacaatcccgccaaccgaaacaaacccaaaacaaaaaacaaaaaacc

SEQ ID NO: 14647 - DNA, 546 bp, Artificial Sequence
  chemically treated genomic DNA (Homo sapiens) CpG-island No: 14647
ttttttttttatttttcgtaacgcggttcgagagtcgggtattttaagatatttgatataagaacgagattaaatgtttgttcgagaggtggcggggcgagatattcgtcggcgcgcgcgcgttagttagcgaagtcgaagacggaatagcggaggagggaagagagtttttttcggcgtcgcgttacgagagcgcgggataagacggtgaaggacgcgaagagagcgcgggggggagggcgcggggggggcggggaaggggaaggttttcgaggtaataaagagaaaaaaggcgcgggtaaagagacgatatatatttataatcgtaaggggtcgacgggggatagggagacgattaacgtaagaataagcggaaacggggggaggggggaggggatataaaacgaatgagagggtggcggcggagggtaagcggggaggaaataatagaagagaagcgggtatttatcgtaggcgcggaaattaggggggtagtacggatagtttcgttagtcgaaataaatttaaggtagagagtaggaaatt

SEQ ID NO: 14648 - DNA, 546 bp, Artificial Sequence
  chemically treated genomic DNA (Homo sapiens) CpG-island No: 14648
aatttcctactctctaccttaaatttatttcgactaacgaaactatccgtactacccccctaatttccgcgcctacgataaatacccgcttctcttctattatttcctccccgcttaccctccgccgccaccctctcattcgttttatatcccctcccccctccccccgtttccgcttattcttacgttaatcgtctccctatcccccgtcgaccccttacgattataaatatatatcgtctctttacccgcgccttttttctctttattacctcgaaaaccttccccttccccgccccccccgcgccctcccccccgcgctctcttcgcgtccttcaccgtcttatcccgcgctctcgtaacgcgacgccgaaaaaaactctcttccctcctccgctattccgtcttcgacttcgctaactaacgcgcgcgcgccgacgaatatctcgccccgccacctctcgaacaaacatttaatctcgttcttatatcaaatatcttaaaatacccgactctcgaaccgcgttacgaaaaataaaaaaaaaa

SEQ ID NO: 14649 - DNA, 542 bp, Artificial Sequence
  chemically treated genomic DNA (Homo sapiens) CpG-island No: 14649
tttcgtagggattcgacggacggttcggcgtttttagcgtttagattcgagtttcgtcggtgttgcggatgtggaggttcgcgacgttcgggttgttttttttttcggcgtcgttatttgttttcggtagttcgtatatttggcggttttcgtttagcgcggggaatcggttttagaacgcggaggtttagcgcggttacgcgatttcgtatagttcgttttcgttttagtttatatggtcgcggcgggtggcgttttcgttttcgcgtgagtttagcgcggttttcgaggatttagggattttaggaggtaggagggggcggtggcgacgcgggtggggggaggaggaaacgcggtcggggggaagaggaggagcgcgtttcgattcgtcgtaagggcgggaggagttagtaggggagaagcgaggaggggttcgtagcggcggtatattcgcggggtagcgggcgtttatttgcgagtagaagtacgagttttggatgtttagtttgatgtaagtgggatattggagtttggttttattg

SEQ ID NO: 14650 - DNA, 542 bp, Artificial Sequence
  chemically treated genomic DNA (Homo sapiens) CpG-island No: 14650
caataaaaccaaactccaatatcccacttacatcaaactaaacatccaaaactcgtacttctactcgcaaataaacgcccgctaccccgcgaatataccgccgctacgaacccctcctcgcttctcccctactaactcctcccgcccttacgacgaatcgaaacgcgctcctcctcttccccccgaccgcgtttcctcctccccccacccgcgtcgccaccgccccctcctacctcctaaaatccctaaatcctcgaaaaccgcgctaaactcacgcgaaaacgaaaacgccacccgccgcgaccatataaactaaaacgaaaacgaactatacgaaatcgcgtaaccgcgctaaacctccgcgttctaaaaccgattccccgcgctaaacgaaaaccgccaaatatacgaactaccgaaaacaaataacgacgccgaaaaaaaaaacaacccgaacgtcgcgaacctccacatccgcaacaccgacgaaactcgaatctaaacgctaaaaacgccgaaccgtccgtcgaatccctacgaaa

SEQ ID NO: 14651 - DNA, 542 bp, Artificial Sequence
  chemically treated genomic DNA (Homo sapiens) CpG-island No: 14651
tagtgaggttaagttttagtgttttatttgtattaagttgggtatttagggttcgtatttttgttcgtaggtaggcgttcgttgtttcgcggatatgtcgtcgttgcggattttttttcgttttttttttgttggtttttttcgtttttgcggcgagtcgggacgcgttttttttttttttttcggtcgcgtttttttttttttttattcgcgtcgttatcgtttttttttgttttttggggtttttgggttttcgggaatcgcgttgggtttacgcgggggcgggggcgttattcgtcgcggttatgtgggttggggcggaagcgggttgtgcggggtcgcgtggtcgcgttagattttcgcgttttggggtcggtttttcgcgttgggcgggggtcgttaggtgtgcgggttgtcggaggtaggtagcggcgtcgggaaggagggtagttcgagcgtcgcgagtttttatattcgtagtatcggcggggttcgggtttgggcgttggaggcgtcgggtcgttcgtcgggtttttgcgggg

SEQ ID NO: 14652 - DNA, 542 bp, Artificial Sequence
  chemically treated genomic DNA (Homo sapiens) CpG-island No: 14652
ccccgcaaaaacccgacgaacgacccgacgcctccaacgcccaaacccgaaccccgccgatactacgaatataaaaactcgcgacgctcgaactaccctccttcccgacgccgctacctacctccgacaacccgcacacctaacgacccccgcccaacgcgaaaaaccgaccccaaaacgcgaaaatctaacgcgaccacgcgaccccgcacaacccgcttccgccccaacccacataaccgcgacgaataacgcccccgcccccgcgtaaacccaacgcgattcccgaaaacccaaaaaccccaaaaaacaaaaaaaaacgataacgacgcgaataaaaaaaaaaaaaaacgcgaccgaaaaaaaaaaaaaaaacgcgtcccgactcgccgcaaaaacgaaaaaaaccaacaaaaaaaaaacgaaaaaaaatccgcaacgacgacatatccgcgaaacaacgaacgcctacctacgaacaaaaatacgaaccctaaatacccaacttaatacaaataaaacactaaaacttaacctcacta

SEQ ID NO: 14653 - DNA, 561 bp, Artificial Sequence
  chemically treated genomic DNA (Homo sapiens) CpG-island No: 14653
gtttgttcgttggaagagcgttttatcgaggaagaggcggcggcgggagggaggaattgtcgggcggaggggaggggagagagatcgagtcgggggaggagttgggttcgtcgttggtttgggcgcgggagggggaggagttagggtcggtcgggattacgtagcgttttcgttttcgttttcgttttcgtttcgcgcgcgtagtgggtgtttcgtttcgtcggtttcgttcggtttttcgtcgggggtgttgcgttttaaaattttcggggcgtatattggggttgtaagggagttcggtagggtttttttaattcggcgttttcggggttcggttagtagagaacgcgatttgtcggcgtttgacggtgaggagtcgttttttcgcgcgtatttttattgtgttatagttagataagatagtcgtttttattagtgaatatttaggacgtttgattattttcgatattacgtagaagttagagaaggcgttgttttttttgcgtttggatttttcgtcgttattttgagaaaaagtttattggttaagtgttgtttttt

SEQ ID NO: 14654 - DNA, 561 bp, Artificial Sequence
  chemically treated genomic DNA (Homo sapiens) CpG-island No: 14654
aaaaaacaacacttaaccaataaactttttctcaaaataacgacgaaaaatccaaacgcaaaaaaaacaacgccttctctaacttctacgtaatatcgaaaataatcaaacgtcctaaatattcactaataaaaacgactatcttatctaactataacacaataaaaatacgcgcgaaaaaacgactcctcaccgtcaaacgccgacaaatcgcgttctctactaaccgaaccccgaaaacgccgaattaaaaaaaccctaccgaactcccttacaaccccaatatacgccccgaaaattttaaaacgcaacacccccgacgaaaaaccgaacgaaaccgacgaaacgaaacacccactacgcgcgcgaaacgaaaacgaaaacgaaaacgaaaacgctacgtaatcccgaccgaccctaactcctccccctcccgcgcccaaaccaacgacgaacccaactcctcccccgactcgatctctctcccctcccctccgcccgacaattcctccctcccgccgccgcctcttcctcgataaaacgctcttccaacgaacaaac

SEQ ID NO: 14655 - DNA, 561 bp, Artificial Sequence
  chemically treated genomic DNA (Homo sapiens) CpG-island No: 14655
gagaaatagtatttaattaatggatttttttttaaagtagcggcggagaatttaaacgtagaggaggtagcgttttttttagtttttgcgtggtgtcgaggatgattaggcgttttgggtgtttattagtgaagacgattgttttatttgattgtagtatagtagagatgcgcgcgagagggcggttttttatcgttaggcgtcggtaggtcgcgttttttgttggtcgagtttcgaaggcgtcgaattgggggggttttgtcgagtttttttatagttttaatgtgcgtttcggagattttgaaacgtagtattttcggcggggggtcgggcgaagtcggcggggcggggtatttattgcgcgcgcggggcgggggcgggggcggggacggggacgttgcgtggtttcggtcggttttggtttttttttttttcgcgtttaggttagcggcgggtttagtttttttttcgattcggttttttttttttttttttcgttcggtagtttttttttttcgtcgtcgtttttttttcggtgaggcgtttttttagcgggtaggt

SEQ ID NO: 14656 - DNA, 561 bp, Artificial Sequence
  chemically treated genomic DNA (Homo sapiens) CpG-island No: 14656
acctacccgctaaaaaaacgcctcaccgaaaaaaaaacgacgacgaaaaaaaaaaactaccgaacgaaaaaaaaaaaaaaaaaaccgaatcgaaaaaaaaactaaacccgccgctaacctaaacgcgaaaaaaaaaaaaaccaaaaccgaccgaaaccacgcaacgtccccgtccccgcccccgcccccgccccgcgcgcgcaataaataccccgccccgccgacttcgcccgaccccccgccgaaaatactacgtttcaaaatctccgaaacgcacattaaaactataaaaaaactcgacaaaacccccccaattcgacgccttcgaaactcgaccaacaaaaaacgcgacctaccgacgcctaacgataaaaaaccgccctctcgcgcgcatctctactatactacaatcaaataaaacaatcgtcttcactaataaacacccaaaacgcctaatcatcctcgacaccacgcaaaaactaaaaaaaacgctacctcctctacgtttaaattctccgccgctactttaaaaaaaaatccattaattaaatactatttctc

SEQ ID NO: 14657 - DNA, 712 bp, Artificial Sequence
  chemically treated genomic DNA (Homo sapiens) CpG-island No: 14657
ggtgttcgggtcgtcgttttcgtcgttgttatcgttcgcgttattgttcgtatcggtttttgggtcgaattgcgttttttcgggtgggtatatagtcgcggggaagtcgtcggggggtagtatggagtcgtaggggtagcgcgtttcgttaggagtcgggtatataggttcgtggggcgttttagtcgtcgtttggtacgggaagagtgagtagggcgtagttagtttcgatttttgaggatcgggggattggaggtagtatcgttcggagtttaggttgtttatggagtagcgcgtagtggtcgtagtcgcggcggcggcggcggcggcggttgtagcggcggagggtagtttttttttttcgtagggggagtttttgcggtcgttcgggggtttcggtttggttattgtcgtagcgttggtaaatgcgttttcggcgtcggtgttattaagtatggtcgcgggggtttttgcgttggcggttgcgggtttttcgtttatcgtttcgtaggagagattgtcggaaaattttttggacgttttgtttaagtttaatttttgaggagagggggtcgcgttggggaggtggttagcgttttcgtcgttgtcgtttcgcgtattttttagcgggtagaagtgcgcgttaggtaggtttattgagtttattaagagttgtttttttaattgtatgttttgtaaagcgtagacggta

SEQ ID NO: 14658 - DNA, 712 bp, Artificial Sequence
  chemically treated genomic DNA (Homo sapiens) CpG-island No: 14658
taccgtctacgctttacaaaacatacaattaaaaaaacaactcttaataaactcaataaacctacctaacgcgcacttctacccgctaaaaaatacgcgaaacgacaacgacgaaaacgctaaccacctccccaacgcgaccccctctcctcaaaaattaaacttaaacaaaacgtccaaaaaattttccgacaatctctcctacgaaacgataaacgaaaaacccgcaaccgccaacgcaaaaacccccgcgaccatacttaataacaccgacgccgaaaacgcatttaccaacgctacgacaataaccaaaccgaaacccccgaacgaccgcaaaaactccccctacgaaaaaaaaaaactaccctccgccgctacaaccgccgccgccgccgccgccgcgactacgaccactacgcgctactccataaacaacctaaactccgaacgatactacctccaatcccccgatcctcaaaaatcgaaactaactacgccctactcactcttcccgtaccaaacgacgactaaaacgccccacgaacctatatacccgactcctaacgaaacgcgctacccctacgactccatactaccccccgacgacttccccgcgactatatacccacccgaaaaaacgcaattcgacccaaaaaccgatacgaacaataacgcgaacgataacaacgacgaaaacgacgacccgaacacc

SEQ ID NO: 14659 - DNA, 712 bp, Artificial Sequence
  chemically treated genomic DNA (Homo sapiens) CpG-island No: 14659
tgtcgtttgcgttttgtaaagtatgtagttaggggagtagtttttggtgagtttagtgaatttgtttggcgcgtatttttattcgttggagagtgcgcgaggcggtagcggcgggagcgttggttatttttttagcgcggttttttttttttagaagttggatttagataaagcgtttaagaagtttttcggtagttttttttgcgaggcggtgagcggggagttcgtagtcgttagcgtaggggttttcgcggttatgtttagtgatatcgacgtcggggacgtatttgttagcgttgcggtagtggttaagtcggggttttcggacggtcgtaagggttttttttgcggggaggaggagttgtttttcgtcgttgtagtcgtcgtcgtcgtcgtcgtcgcggttgcggttattgcgcgttattttatggatagtttgagtttcgagcggtattatttttagtttttcggtttttaggggtcggagttggttgcgttttgtttatttttttcgtattaggcggcggttggggcgttttacggatttgtgtattcggtttttaacggggcgcgttatttttacggttttatgttgtttttcggcggttttttcgcggttgtgtgtttattcgggagggcgtagttcggtttaggagtcggtgcgggtagtggcgcgggcggtagtagcggcgggggcggcggttcgggtatt

SEQ ID NO: 14660 - DNA, 712 bp, Artificial Sequence
  chemically treated genomic DNA (Homo sapiens) CpG-island No: 14660
aatacccgaaccgccgcccccgccgctactaccgcccgcgccactacccgcaccgactcctaaaccgaactacgccctcccgaataaacacacaaccgcgaaaaaaccgccgaaaaacaacataaaaccgtaaaaataacgcgccccgttaaaaaccgaatacacaaatccgtaaaacgccccaaccgccgcctaatacgaaaaaaataaacaaaacgcaaccaactccgacccctaaaaaccgaaaaactaaaaataataccgctcgaaactcaaactatccataaaataacgcgcaataaccgcaaccgcgacgacgacgacgacgacgactacaacgacgaaaaacaactcctcctccccgcaaaaaaaacccttacgaccgtccgaaaaccccgacttaaccactaccgcaacgctaacaaatacgtccccgacgtcgatatcactaaacataaccgcgaaaacccctacgctaacgactacgaactccccgctcaccgcctcgcaaaaaaaactaccgaaaaacttcttaaacgctttatctaaatccaacttctaaaaaaaaaaaaccgcgctaaaaaaataaccaacgctcccgccgctaccgcctcgcgcactctccaacgaataaaaatacgcgccaaacaaattcactaaactcaccaaaaactactcccctaactacatactttacaaaacgcaaacgaca

SEQ ID NO: 14661 - DNA, 522 bp, Artificial Sequence
  chemically treated genomic DNA (Homo sapiens) CpG-island No: 14661
ggttacgtttagtacgaattttattttgttgttttagtggtcgcgttcgtggatcgttttgtcgcgtttgacgcgcgggtggcgcgcgggcgtcgcgttttcgttgttgtagtcgttattcggcgtttcggattttcgcgtttttttagtagtttttttattgtttaggggtagcgtttttttcgtcgttatggtcgcgttggttgtttcgtgcgtcggttcggttttgcgtcgtcgtttcgggcgagttggttttttaggaggcgcgagcgggcgggagggggaggtagggggtggagttgagggatcgggttagattagcgcggagattgggattgggacgcgtcgcggaggttcggttcgtagggcgtttacgttattttagttcggttgggttcgggagttcgcgagtattttgagcgcgcggagtttttgtagcgttcgtttttttcgcggttttgtttattggtttgttgggttaagagtggaagcgtttatttcggtttaggtcggttttattta

SEQ ID NO: 14662 - DNA, 522 bp, Artificial Sequence
  chemically treated genomic DNA (Homo sapiens) CpG-island No: 14662
taaataaaaccgacctaaaccgaaataaacgcttccactcttaacccaacaaaccaataaacaaaaccgcgaaaaaaacgaacgctacaaaaactccgcgcgctcaaaatactcgcgaactcccgaacccaaccgaactaaaataacgtaaacgccctacgaaccgaacctccgcgacgcgtcccaatcccaatctccgcgctaatctaacccgatccctcaactccaccccctacctccccctcccgcccgctcgcgcctcctaaaaaaccaactcgcccgaaacgacgacgcaaaaccgaaccgacgcacgaaacaaccaacgcgaccataacgacgaaaaaaacgctacccctaaacaataaaaaaactactaaaaaaacgcgaaaatccgaaacgccgaataacgactacaacaacgaaaacgcgacgcccgcgcgccacccgcgcgtcaaacgcgacaaaacgatccacgaacgcgaccactaaaacaacaaaataaaattcgtactaaacgtaacc

SEQ ID NO: 14663 - DNA, 522 bp, Artificial Sequence
  chemically treated genomic DNA (Homo sapiens) CpG-island No: 14663
tgagtggagtcggtttaggtcggaatgggcgtttttatttttggtttagtaggttagtgggtagggtcgcgggaaggacgggcgttgtaggggtttcgcgcgtttaaggtgttcgcgggttttcgggtttagtcgggttgaggtggcgtgggcgttttgcgggtcgggttttcgcggcgcgttttagttttagttttcgcgttggtttggttcggttttttagttttattttttgtttttttttttcgttcgttcgcgttttttgaaaagttagttcgttcggggcggcggcgtagagtcgggtcggcgtacgaggtagttagcgcggttatgacggcggagaaggcgttgtttttgggtaatgggaaggttgttgaggaggcgcgggagttcgaggcgtcgggtggcggttgtagtagcgggggcgcggcgttcgcgcgttattcgcgcgttaagcgcgataaggcggtttacgagcgcggttattggaataataaggtggagttcgtgttgagcgtggtt

SEQ ID NO: 14664 - DNA, 522 bp, Artificial Sequence
  chemically treated genomic DNA (Homo sapiens) CpG-island No: 14664
aaccacgctcaacacgaactccaccttattattccaataaccgcgctcgtaaaccgccttatcgcgcttaacgcgcgaataacgcgcgaacgccgcgcccccgctactacaaccgccacccgacgcctcgaactcccgcgcctcctcaacaaccttcccattacccaaaaacaacgccttctccgccgtcataaccgcgctaactacctcgtacgccgacccgactctacgccgccgccccgaacgaactaacttttcaaaaaacgcgaacgaacgaaaaaaaaaaacaaaaaataaaactaaaaaaccgaaccaaaccaacgcgaaaactaaaactaaaacgcgccgcgaaaacccgacccgcaaaacgcccacgccacctcaacccgactaaacccgaaaacccgcgaacaccttaaacgcgcgaaacccctacaacgcccgtccttcccgcgaccctacccactaacctactaaaccaaaaataaaaacgcccattccgacctaaaccgactccactca

SEQ ID NO: 14665 - DNA, 909 bp, Artificial Sequence
  chemically treated genomic DNA (Homo sapiens) CpG-island No: 14665
cgttttcggtcggtttttgtcgttcgcgtttttttttttcgggtttcggaagtgacgtaagcgtttttttatcgtcgttagattcgttgttgttgtcgcggcgggtagatttgtaggaggcggcggcggcggcggcggcgtaggttgaaggaagatggcggacggcgtggattatatagatatttacgcggatgtcggcgaagagtttaattaggtacgtgagagtttaggttttcgtcgtcgacgcggcgttatgcggtcgggaagttgattcggggttcgttgcggcgcgagtcgaagcgattgtagagtgtgcgtttttgtcgtttttgggtcgcgtcgtcgatttttggcgtggcgttttttcgtttttcgttttatcgcgtcgttttacgggtcgcgggcgcgtaagtcgcggagattcggatgcgcggacgcggtcgttgtgtagttgtcgtcggttttttttcgtcggcgttgtttcgttttttattgttggcggtattcggttggcgtttttcgtcgcgttaggttcgggcggtggggcgcgtgtaagcggcggagagaattggtcgtcgtcgcgttttttttttcgtcgttggtcggaggaggaagttttggcggggcgcgtgttcgtcgtcgtcgtttttttttcgtcgttgtcgttcgggtttcgattttttttatcgttttattttgtttttttgttcgcgtattgtcgttttatggaaggtcgcgtttacggttttttgtatttcgcgcgtttagttttcggggttttttttttcgggtttgcgataggtttcggcgtggcgttttttttttttttttatattttttgaaggcgattgaggtgcgggtttatttgtaataagttttttgatttttggagttatagataaaagtcgg

SEQ ID NO: 14666 - DNA, 909 bp, Artificial Sequence
  chemically treated genomic DNA (Homo sapiens) CpG-island No: 14666
ccgacttttatctataactccaaaaatcaaaaaacttattacaaataaacccgcacctcaatcgccttcaaaaaatataaaaaaaaaaaaaaaacgccacgccgaaacctatcgcaaacccgaaaaaaaaaaccccgaaaactaaacgcgcgaaatacaaaaaaccgtaaacgcgaccttccataaaacgacaatacgcgaacaaaaaaacaaaataaaacgataaaaaaaatcgaaacccgaacgacaacgacgaaaaaaaaacgacgacgacgaacacgcgccccgccaaaacttcctcctccgaccaacgacgaaaaaaaaaacgcgacgacgaccaattctctccgccgcttacacgcgccccaccgcccgaacctaacgcgacgaaaaacgccaaccgaataccgccaacaataaaaaacgaaacaacgccgacgaaaaaaaaccgacgacaactacacaacgaccgcgtccgcgcatccgaatctccgcgacttacgcgcccgcgacccgtaaaacgacgcgataaaacgaaaaacgaaaaaacgccacgccaaaaatcgacgacgcgacccaaaaacgacaaaaacgcacactctacaatcgcttcgactcgcgccgcaacgaaccccgaatcaacttcccgaccgcataacgccgcgtcgacgacgaaaacctaaactctcacgtacctaattaaactcttcgccgacatccgcgtaaatatctatataatccacgccgtccgccatcttccttcaacctacgccgccgccgccgccgccgcctcctacaaatctacccgccgcgacaacaacaacgaatctaacgacgataaaaaaacgcttacgtcacttccgaaacccgaaaaaaaaaaacgcgaacgacaaaaaccgaccgaaaacg

SEQ ID NO: 14667 - DNA, 909 bp, Artificial Sequence
  chemically treated genomic DNA (Homo sapiens) CpG-island No: 14667
tcgatttttatttgtggttttaaaagttaaaggatttgttgtaaatgagttcgtattttagtcgtttttagaaagtgtgaggggaggaggaaggcgttacgtcgaaatttgtcgtaaattcgagaaggagagtttcggggattgggcgcgcgggatataaagggtcgtgaacgcggttttttatgaggcgatagtgcgcgggtagggagataaaatggagcgatgggaggaatcggagttcgagcggtagcggcggggaaggggcggcggcggcgggtacgcgtttcgttagggttttttttttcgattagcgacgggggagggggcgcggcggcggttagtttttttcgtcgtttatacgcgttttatcgttcgggtttagcgcggcgggaagcgttagtcgggtgtcgttaataatagggagcgaggtagcgtcggcgagggaggatcggcggtagttgtatagcggtcgcgttcgcgtattcgggttttcgcgatttacgcgttcgcggttcgtgaaacgacgcggtagaacgaggggcgggggggcgttacgttaggggtcggcggcgcggtttagaggcggtaagggcgtatattttgtagtcgtttcggttcgcgtcgtagcgggtttcgggttagtttttcggtcgtatggcgtcgcgtcggcggcggggatttgggtttttacgtatttggttgaatttttcgtcgatattcgcgtaaatgtttatgtggtttacgtcgttcgttatttttttttagtttgcgtcgtcgtcgtcgtcgtcgttttttgtaggtttgttcgtcgcggtagtagtagcggatttagcggcggtgggggggcgtttgcgttattttcgaggttcgagggagggaggcgcgggcgataggggtcggtcgggggcg

SEQ ID NO: 14668 - DNA, 909 bp, Artificial Sequence
  chemically treated genomic DNA (Homo sapiens) CpG-island No: 14668
cgcccccgaccgacccctatcgcccgcgcctccctccctcgaacctcgaaaataacgcaaacgcccccccaccgccgctaaatccgctactactaccgcgacgaacaaacctacaaaaaacgacgacgacgacgacgacgcaaactaaaaaaaaataacgaacgacgtaaaccacataaacatttacgcgaatatcgacgaaaaattcaaccaaatacgtaaaaacccaaatccccgccgccgacgcgacgccatacgaccgaaaaactaacccgaaacccgctacgacgcgaaccgaaacgactacaaaatatacgcccttaccgcctctaaaccgcgccgccgacccctaacgtaacgcccccccgcccctcgttctaccgcgtcgtttcacgaaccgcgaacgcgtaaatcgcgaaaacccgaatacgcgaacgcgaccgctatacaactaccgccgatcctccctcgccgacgctacctcgctccctattattaacgacacccgactaacgcttcccgccgcgctaaacccgaacgataaaacgcgtataaacgacgaaaaaaactaaccgccgccgcgccccctcccccgtcgctaatcgaaaaaaaaaaccctaacgaaacgcgtacccgccgccgccgccccttccccgccgctaccgctcgaactccgattcctcccatcgctccattttatctccctacccgcgcactatcgcctcataaaaaaccgcgttcacgaccctttatatcccgcgcgcccaatccccgaaactctccttctcgaatttacgacaaatttcgacgtaacgccttcctcctcccctcacactttctaaaaacgactaaaatacgaactcatttacaacaaatcctttaacttttaaaaccacaaataaaaatcga

SEQ ID NO: 14669 - DNA, 526 bp, Artificial Sequence
  chemically treated genomic DNA (Homo sapiens) CpG-island No: 14669
ttttgtatcgtcggttcggttttatttatagtatgattcgcgagacgtgtagtcgtatcgggacgtttttgtttttgaaggcggtggtgatgaagtagtcgaaggtgagcgtcgttattacgtttagcgagaaggcgaatagtgagttcgttcgcgatagtatcgtgtttatcgcgatcgttttttacgagttcggattttatacgtatatttaggttttcgtttcggcggcggatcggttttttgcgattcgcgtcgtttgcggtgcgcgcgtttcgggagcgcgcgtcgtcgtagtttcgtttttttttcggtttttcgacgcgagcgcgcgcgcgttcgtttttcgaaatatatttatagcgcgtacggggcggcgcggaaagggagagatttagtcgcgggttcgttttttcgtcgcggtttaacgtcgttattaattagcgacgagtgagggaggggcggggtttgttgtggaagatttattttttttttttttaaattgttttttcgatttttgggttta

SEQ ID NO: 14670 - DNA, 526 bp, Artificial Sequence
  chemically treated genomic DNA (Homo sapiens) CpG-island No: 14670
taaacccaaaaatcgaaaaaacaatttaaaaaaaaaaaaaataaatcttccacaacaaaccccgcccctccctcactcgtcgctaattaataacgacgttaaaccgcgacgaaaaaacgaacccgcgactaaatctctccctttccgcgccgccccgtacgcgctataaatatatttcgaaaaacgaacgcgcgcgcgctcgcgtcgaaaaaccgaaaaaaaaacgaaactacgacgacgcgcgctcccgaaacgcgcgcaccgcaaacgacgcgaatcgcaaaaaaccgatccgccgccgaaacgaaaacctaaatatacgtataaaatccgaactcgtaaaaaacgatcgcgataaacacgatactatcgcgaacgaactcactattcgccttctcgctaaacgtaataacgacgctcaccttcgactacttcatcaccaccgccttcaaaaacaaaaacgtcccgatacgactacacgtctcgcgaatcatactataaataaaaccgaaccgacgatacaaaa

SEQ ID NO: 14671 - DNA, 526 bp, Artificial Sequence
  chemically treated genomic DNA (Homo sapiens) CpG-island No: 14671
tgaatttaaaggtcggagaagtaatttagaagaggagggggtgggttttttataataaatttcgttttttttttattcgtcgttgattggtggcggcgttaggtcgcgacggaggggcgggttcgcggttgagttttttttttttcgcgtcgtttcgtgcgcgttgtgggtgtgtttcgggaagcgggcgcgcgcgcgttcgcgtcggaggatcggaaaggaggcggggttgcggcggcgcgcgttttcggaacgcgcgtatcgtagacggcgcggatcgtagggagtcggttcgtcgtcggaacgggagtttgggtgtgcgtgtggagttcggattcgtgggagacgatcgcgatgaatacggtgttgtcgcgggcgaatttattgttcgttttttcgttgagcgtgatggcggcgtttattttcggttgttttattattatcgtttttaaagataggagcgtttcggtgcggttgtacgtttcgcggattatgttgtgagtgaggtcgggtcggcggtgtagga

SEQ ID NO: 14672 - DNA, 526 bp, Artificial Sequence
  chemically treated genomic DNA (Homo sapiens) CpG-island No: 14672
tcctacaccgccgacccgacctcactcacaacataatccgcgaaacgtacaaccgcaccgaaacgctcctatctttaaaaacgataataataaaacaaccgaaaataaacgccgccatcacgctcaacgaaaaaacgaacaataaattcgcccgcgacaacaccgtattcatcgcgatcgtctcccacgaatccgaactccacacgcacacccaaactcccgttccgacgacgaaccgactccctacgatccgcgccgtctacgatacgcgcgttccgaaaacgcgcgccgccgcaaccccgcctcctttccgatcctccgacgcgaacgcgcgcgcgcccgcttcccgaaacacacccacaacgcgcacgaaacgacgcgaaaaaaaaaaaactcaaccgcgaacccgcccctccgtcgcgacctaacgccgccaccaatcaacgacgaataaaaaaaaaacgaaatttattataaaaaacccaccccctcctcttctaaattacttctccgacctttaaattca

SEQ ID NO: 14673 - DNA, 678 bp, Artificial Sequence
  chemically treated genomic DNA (Homo sapiens) CpG-island No: 14673
gaggtggggttacgcgtggagggtggagaaggggagcgaggtgggtttacgcgcggagggtggaggagaaggggagcgaggtgggtttacgcgcggagggtggaggagaaggggagcgaggtggggttacgcgcggagggtggaggagaaggggagcgaggtggggttacgcgcggagggtggaggagaaggggagcgaggtggggttacgcgcggagggtggaggagaaggggagcgaggtggggttacgcgcggagggtggaggagaaggggagcgaggtggggttacgcgcggagggtggaggagaaggggagcgaggtggggttacgcgcggagggtggaggagaaggggagcgaggtggggttacgcgcggagggtggaggagaaggggagcgaggtggggttacgcgcggagggtggaggagaaggggagcgaggtggggttacgcgcggagggtggaggagaaggggagcgaggtggggttacgcgcggagggtggaggagaaggggagcgaggtggggttacgcgcggagggtggaggagaaggggagcgaggtggggttacgtgcggagcgtggaggagaaggggagcgaggtggggttacgcgtggagcgtggaggagaaggggagcgaggttggattttttgggtgttttttttaggatgagggtgg

SEQ ID NO: 14674 - DNA, 678 bp, Artificial Sequence
  chemically treated genomic DNA (Homo sapiens) CpG-island No: 14674
ccaccctcatcctaaaaaaaacacccaaaaaatccaacctcgctccccttctcctccacgctccacgcgtaaccccacctcgctccccttctcctccacgctccgcacgtaaccccacctcgctccccttctcctccaccctccgcgcgtaaccccacctcgctccccttctcctccaccctccgcgcgtaaccccacctcgctccccttctcctccaccctccgcgcgtaaccccacctcgctccccttctcctccaccctccgcgcgtaaccccacctcgctccccttctcctccaccctccgcgcgtaaccccacctcgctccccttctcctccaccctccgcgcgtaaccccacctcgctccccttctcctccaccctccgcgcgtaaccccacctcgctccccttctcctccaccctccgcgcgtaaccccacctcgctccccttctcctccaccctccgcgcgtaaccccacctcgctccccttctcctccaccctccgcgcgtaaccccacctcgctccccttctcctccaccctccgcgcgtaaccccacctcgctccccttctcctccaccctccgcgcgtaaacccacctcgctccccttctcctccaccctccgcgcgtaaacccacctcgctccccttctccaccctccacgcgtaaccccacctc

SEQ ID NO: 14675 - DNA, 678 bp, Artificial Sequence
  chemically treated genomic DNA (Homo sapiens) CpG-island No: 14675
ttatttttattttagagggagtatttagagggtttagtttcgtttttttttttttttacgttttacgcgtgattttatttcgtttttttttttttttacgtttcgtacgtgattttatttcgtttttttttttttttatttttcgcgcgtgattttatttcgtttttttttttttttatttttcgcgcgtgattttatttcgtttttttttttttttatttttcgcgcgtgattttatttcgtttttttttttttttatttttcgcgcgtgattttatttcgtttttttttttttttatttttcgcgcgtgattttatttcgtttttttttttttttatttttcgcgcgtgattttatttcgtttttttttttttttatttttcgcgcgtgattttatttcgtttttttttttttttatttttcgcgcgtgattttatttcgtttttttttttttttatttttcgcgcgtgattttatttcgtttttttttttttttatttttcgcgcgtgattttatttcgtttttttttttttttatttttcgcgcgtgattttatttcgtttttttttttttttatttttcgcgcgtgaatttatttcgtttttttttttttttatttttcgcgcgtgaatttatttcgttttttttttttattttttacgcgtgattttatttt

SEQ ID NO: 14676 - DNA, 678 bp, Artificial Sequence
  chemically treated genomic DNA (Homo sapiens) CpG-island No: 14676
aaaataaaatcacgcgtaaaaaataaaaaaaaaaaacgaaataaattcacgcgcgaaaaataaaaaaaaaaaaaaacgaaataaattcacgcgcgaaaaataaaaaaaaaaaaaaacgaaataaaatcacgcgcgaaaaataaaaaaaaaaaaaaacgaaataaaatcacgcgcgaaaaataaaaaaaaaaaaaaacgaaataaaatcacgcgcgaaaaataaaaaaaaaaaaaaacgaaataaaatcacgcgcgaaaaataaaaaaaaaaaaaaacgaaataaaatcacgcgcgaaaaataaaaaaaaaaaaaaacgaaataaaatcacgcgcgaaaaataaaaaaaaaaaaaaacgaaataaaatcacgcgcgaaaaataaaaaaaaaaaaaaacgaaataaaatcacgcgcgaaaaataaaaaaaaaaaaaaacgaaataaaatcacgcgcgaaaaataaaaaaaaaaaaaaacgaaataaaatcacgcgcgaaaaataaaaaaaaaaaaaaacgaaataaaatcacgcgcgaaaaataaaaaaaaaaaaaaacgaaataaaatcacgtacgaaacgtaaaaaaaaaaaaaaacgaaataaaatcacgcgtaaaacgtaaaaaaaaaaaaaaacgaaactaaaccctctaaatactccctctaaaataaaaataa

SEQ ID NO: 14677 - DNA, 874 bp, Artificial Sequence
  chemically treated genomic DNA (Homo sapiens) CpG-island No: 14677
cggttaattttttgttcgcgttttattgttcgcgcggtttttgtttttcgttcggtttcgcgttttcgggttttttcgcgaagtcgtagtcggcggcgtcggattttttttagtttttttcgcgtttcgtttatataggtagtttgggttaacggttgtagtcgttcggttagtttcgcgcgtagcggcgcggtttgggagtatagtaggatttaggtcgcgtcgtcggtttcggtttcgcgtagggtttggtttaggtcgcgtagtcgtcgtattaggcgtagagttcggagtaatcgcgcgcgtatttcgttaaggttgggttcggtatgcgtgcgttggggtatcggatagtttgttcgtcgcggggtttcgaatatcgtttttagttattgtcggtcgcgtaggcgttggagggtcgtattttcgagtacgtcggtcggcggcggcggcgttttaggttatcgcgggttttagggcggtttcgggtcgggaggcggtggtcgcggtcgttcgtcggcgtcggttttcgggaagggtcgatattggggcggcggaggaggtagcggcggtggtggtatcgggtagaaggcgttagcgtcgttttcgtcgcgggaggtttgcgcggaggttcggggttgtagagttagcggaggttgaaggaagggggcggaggttttcggaaaagggtcgggtcgttgggggagaggcggcgggaaagtcggggagggtagcggcggtggcggatagtcgaaaagagtaagaggcggcggttgcgggggcggtgggtttgggcgattttggtcgaagaatggtggtagggttatgtttacgacggagatgttttgagaagtgataggaatttgagtggttt

SEQ ID NO: 14678 - DNA, 874 bp, Artificial Sequence
  chemically treated genomic DNA (Homo sapiens) CpG-island No: 14678
aaaccactcaaattcctatcacttctcaaaacatctccgtcgtaaacataaccctaccaccattcttcgaccaaaatcgcccaaacccaccgcccccgcaaccgccgcctcttactcttttcgactatccgccaccgccgctaccctccccgactttcccgccgcctctcccccaacgacccgacccttttccgaaaacctccgcccccttccttcaacctccgctaactctacaaccccgaacctccgcgcaaacctcccgcgacgaaaacgacgctaacgccttctacccgataccaccaccgccgctacctcctccgccgccccaatatcgacccttcccgaaaaccgacgccgacgaacgaccgcgaccaccgcctcccgacccgaaaccgccctaaaacccgcgataacctaaaacgccgccgccgccgaccgacgtactcgaaaatacgaccctccaacgcctacgcgaccgacaataactaaaaacgatattcgaaaccccgcgacgaacaaactatccgataccccaacgcacgcataccgaacccaaccttaacgaaatacgcgcgcgattactccgaactctacgcctaatacgacgactacgcgacctaaaccaaaccctacgcgaaaccgaaaccgacgacgcgacctaaatcctactatactcccaaaccgcgccgctacgcgcgaaactaaccgaacgactacaaccgttaacccaaactacctatataaacgaaacgcgaaaaaaactaaaaaaaatccgacgccgccgactacgacttcgcgaaaaaacccgaaaacgcgaaaccgaacgaaaaacaaaaaccgcgcgaacaataaaacgcgaacaaaaaattaaccg

SEQ ID NO: 14679 - DNA, 874 bp, Artificial Sequence
  chemically treated genomic DNA (Homo sapiens) CpG-island No: 14679
gagttatttagatttttgttattttttaaagtattttcgtcgtgaatatggttttgttattatttttcggttagggtcgtttaggtttatcgttttcgtagtcgtcgttttttgtttttttcggttgttcgttatcgtcgttgtttttttcggttttttcgtcgttttttttttagcggttcggttttttttcgggggttttcgttttttttttttagttttcgttggttttgtagtttcgagttttcgcgtaggtttttcgcggcggaggcggcgttggcgttttttattcggtgttattatcgtcgttgtttttttcgtcgttttagtgtcggtttttttcggggatcgacgtcggcgagcggtcgcggttatcgtttttcggttcggggtcgttttggagttcgcggtggtttgaggcgtcgtcgtcgtcggtcgacgtgttcggggatgcggttttttaacgtttgcgcgatcggtagtggttggaggcggtgttcgggatttcgcggcgggtaggttgttcggtgttttagcgtacgtatgtcgggtttagttttggcgaagtgcgcgcgcgattgtttcgggttttgcgtttggtgcggcggttgcgcggtttgagttaggttttgcgcgaggtcgaagtcgacggcgcggtttgggttttgttgtatttttagatcgcgtcgttgcgcgcggaattggtcgagcggttatagtcgttgatttaggttgtttatgtgggcgaggcgcggaggaggttggagagggttcggcgtcgtcggttgcggtttcgcgagagggttcgggaacgcgaggtcgagcgggaggtagaggtcgcgcgggtagtggaacgcgagtaggagattgatcg

SEQ ID NO: 14680 - DNA, 874 bp, Artificial Sequence
  chemically treated genomic DNA (Homo sapiens) CpG-island No: 14680
cgatcaatctcctactcgcgttccactacccgcgcgacctctacctcccgctcgacctcgcgttcccgaaccctctcgcgaaaccgcaaccgacgacgccgaaccctctccaacctcctccgcgcctcgcccacataaacaacctaaatcaacgactataaccgctcgaccaattccgcgcgcaacgacgcgatctaaaaatacaacaaaacccaaaccgcgccgtcgacttcgacctcgcgcaaaacctaactcaaaccgcgcaaccgccgcaccaaacgcaaaacccgaaacaatcgcgcgcgcacttcgccaaaactaaacccgacatacgtacgctaaaacaccgaacaacctacccgccgcgaaatcccgaacaccgcctccaaccactaccgatcgcgcaaacgttaaaaaaccgcatccccgaacacgtcgaccgacgacgacgacgcctcaaaccaccgcgaactccaaaacgaccccgaaccgaaaaacgataaccgcgaccgctcgccgacgtcgatccccgaaaaaaaccgacactaaaacgacgaaaaaaacaacgacgataataacaccgaataaaaaacgccaacgccgcctccgccgcgaaaaacctacgcgaaaactcgaaactacaaaaccaacgaaaactaaaaaaaaaaaacgaaaacccccgaaaaaaaaccgaaccgctaaaaaaaaaacgacgaaaaaaccgaaaaaaacaacgacgataacgaacaaccgaaaaaaacaaaaaacgacgactacgaaaacgataaacctaaacgaccctaaccgaaaaataataacaaaaccatattcacgacgaaaatactttaaaaaataacaaaaatctaaataactc

SEQ ID NO: 14681 - DNA, 1231 bp, Artificial Sequence
  chemically treated genomic DNA (Homo sapiens) CpG-island No: 14681
gttttcgatggcgtagagtagcgtgaatatgcggttgatcgtatagacggtgttatcgcgtattacggtcgtgaagagcgtttttttgttgttgacgaattggtcgggtagcgtcgtttattggttcgtggttaggttgagatagtcgatggcgtagtgtaggaagtcgtcggaaggttcgttgcgtattatatagaggttgtcgcggtgggttattatgtagtggttatagttttgcggacgtcgtagttcggttattggtagttacgcgtcggttcgtattgcgtattttattacggcggtggtgtcggtcggtcgttataggtatacgaagagacggttataagtttgggcgtagggtacgtcggcggtcggttgcggtaggtcggttacgaaattttagtagttcgcggttgggtcgtagcgttttacggagttgatgggcgttttttggaattcgtcgtcgatggcgtagaggcggtcgtcgaagtcggttagcgttgtgttatagcgcggttggtgcgggttggggaattcgtgttacgtgtcgtcgtcggggtcgtagtagaagtttagttttattatttttttgttggcgtcgcgtacgttttttacgatgtaaagtttgttgtttagcgtggttatttcggttagtaacgtgttggtttttaggggtagcgtagttagcgtgcgttacgcgttttttttttcgtttaggtaatatagcgtgcgcgaggcgttttttaggaagtcgggcgcgggcgtgtgcgtgtttacggtcgcgtagttgttgggtcgtagggtcgttacgtaggcgcgggttttaggtagcgttagttcggtcgttagttcgcgttcgtcgtcgtagatgaagagcgcggtattgtggaatacgtcgcgtaggtcgaaggcggcggtcgcgtcgtatagtaatgcgtagttgttcgacgtgaggttgtgttttagaaagcgagttagcgtcggcgtttggaggaaggcggcgtattttacggtttgtagtagttcgtttttcgtcgttagcgtcggtcggtcgtcgcgtagtatttgtagcgtggcgcggaaatttttcgcgtttagaacgtttaggcgtatttttgttgcgcgggtttttcgtatgtcggagcggaagaggtttcggaagaagttatagtgttttattagtagggcgcggtcggtttggaagagttggtcgtttatttatatttgtatt

SEQ ID NO: 14682 - DNA, 1231 bp, Artificial Sequence
  chemically treated genomic DNA (Homo sapiens) CpG-island No: 14682
aatacaaatataaataaacgaccaactcttccaaaccgaccgcgccctactaataaaacactataacttcttccgaaacctcttccgctccgacatacgaaaaacccgcgcaacaaaaatacgcctaaacgttctaaacgcgaaaaatttccgcgccacgctacaaatactacgcgacgaccgaccgacgctaacgacgaaaaacgaactactacaaaccgtaaaatacgccgccttcctccaaacgccgacgctaactcgctttctaaaacacaacctcacgtcgaacaactacgcattactatacgacgcgaccgccgccttcgacctacgcgacgtattccacaataccgcgctcttcatctacgacgacgaacgcgaactaacgaccgaactaacgctacctaaaacccgcgcctacgtaacgaccctacgacccaacaactacgcgaccgtaaacacgcacacgcccgcgcccgacttcctaaaaaacgcctcgcgcacgctatattacctaaacgaaaaaaaaaacgcgtaacgcacgctaactacgctacccctaaaaaccaacacgttactaaccgaaataaccacgctaaacaacaaactttacatcgtaaaaaacgtacgcgacgccaacaaaaaaataataaaactaaacttctactacgaccccgacgacgacacgtaacacgaattccccaacccgcaccaaccgcgctataacacaacgctaaccgacttcgacgaccgcctctacgccatcgacgacgaattccaaaaaacgcccatcaactccgtaaaacgctacgacccaaccgcgaactactaaaatttcgtaaccgacctaccgcaaccgaccgccgacgtaccctacgcccaaacttataaccgtctcttcgtatacctataacgaccgaccgacaccaccgccgtaataaaatacgcaatacgaaccgacgcgtaactaccaataaccgaactacgacgtccgcaaaactataaccactacataataacccaccgcgacaacctctatataatacgcaacgaaccttccgacgacttcctacactacgccatcgactatctcaacctaaccacgaaccaataaacgacgctacccgaccaattcgtcaacaacaaaaaaacgctcttcacgaccgtaatacgcgataacaccgtctatacgatcaaccgcatattcacgctactctacgccatcgaaaac

SEQ ID NO: 14683 - DNA, 1231 bp, Artificial Sequence
  chemically treated genomic DNA (Homo sapiens) CpG-island No: 14683
ggtgtaggtgtgggtgggcggttagtttttttaagtcgatcgcgttttgttggtggagtattgtggtttttttcgaggtttttttcgtttcggtatgcgggagattcgcgtagtagaggtgcgtttgggcgttttgagcgcgggaggttttcgcgttacgttgtaggtgttgcgcggcgatcggtcggcgttggcggcggaggacgagttgttgtaggtcgtggagtgcgtcgtttttttttaggcgtcggcgttggttcgttttttggagtataattttacgtcggataattgcgtattgttgtgcgacgcggtcgtcgttttcggtttgcgcgacgtgttttatagtgtcgcgttttttatttgcgacggcgagcgcgagttggcggtcgaattggcgttgtttgaggttcgcgtttacgtggcggttttgcggtttagtagttacgcggtcgtgagtacgtatacgttcgcgttcggttttttggaggacgtttcgcgtacgttgtgttatttggacgaggaagaggacgcgtggcgtacgttggttgcgttgtttttggaggttagtacgttgttggtcggggtggttacgttgggtaataagttttatatcgtggggggcgtgcgcggcgttagtaaggaggtggtagagttgggtttttgttacgatttcgacggcggtacgtggtacgagttttttagttcgtattagtcgcgttatgatatagcgttggtcggtttcgacggtcgtttttacgttatcggcggcgaattttagaggacgtttattagtttcgtggagcgttacgatttagtcgcgggttgttggagtttcgtggtcgatttgtcgtagtcggtcgtcggcgtgttttgcgtttaggtttgtggtcgttttttcgtgtgtttgtggcggtcggtcgatattatcgtcgtggtggagtacgtagtgcggatcgacgcgtggttgttagtggtcgagttgcggcgttcgtagagttatggttattgtatggtggtttatcgcgatagtttttatgtggtgcgtaacggatttttcgacgattttttgtattgcgttatcgattgttttaatttggttacgggttagtggacggcgttgttcggttagttcgttaatagtaagggagcgttttttacggtcgtggtgcgcggtgatatcgtttatacggttaatcgtatgtttacgttgttttacgttatcgagggt

SEQ ID NO: 14684 - DNA, 1231 bp, Artificial Sequence
  chemically treated genomic DNA (Homo sapiens) CpG-island No: 14684
accctcgataacgtaaaacaacgtaaacatacgattaaccgtataaacgatatcaccgcgcaccacgaccgtaaaaaacgctcccttactattaacgaactaaccgaacaacgccgtccactaacccgtaaccaaattaaaacaatcgataacgcaatacaaaaaatcgtcgaaaaatccgttacgcaccacataaaaactatcgcgataaaccaccatacaataaccataactctacgaacgccgcaactcgaccactaacaaccacgcgtcgatccgcactacgtactccaccacgacgataatatcgaccgaccgccacaaacacacgaaaaaacgaccacaaacctaaacgcaaaacacgccgacgaccgactacgacaaatcgaccacgaaactccaacaacccgcgactaaatcgtaacgctccacgaaactaataaacgtcctctaaaattcgccgccgataacgtaaaaacgaccgtcgaaaccgaccaacgctatatcataacgcgactaatacgaactaaaaaactcgtaccacgtaccgccgtcgaaatcgtaacaaaaacccaactctaccacctccttactaacgccgcgcacgccccccacgatataaaacttattacccaacgtaaccaccccgaccaacaacgtactaacctccaaaaacaacgcaaccaacgtacgccacgcgtcctcttcctcgtccaaataacacaacgtacgcgaaacgtcctccaaaaaaccgaacgcgaacgtatacgtactcacgaccgcgtaactactaaaccgcaaaaccgccacgtaaacgcgaacctcaaacaacgccaattcgaccgccaactcgcgctcgccgtcgcaaataaaaaacgcgacactataaaacacgtcgcgcaaaccgaaaacgacgaccgcgtcgcacaacaatacgcaattatccgacgtaaaattatactccaaaaaacgaaccaacgccgacgcctaaaaaaaaacgacgcactccacgacctacaacaactcgtcctccgccgccaacgccgaccgatcgccgcgcaacacctacaacgtaacgcgaaaacctcccgcgctcaaaacgcccaaacgcacctctactacgcgaatctcccgcataccgaaacgaaaaaaacctcgaaaaaaaccacaatactccaccaacaaaacgcgatcgacttaaaaaaactaaccgcccacccacacctacacc

SEQ ID NO: 14685 - DNA, 683 bp, Artificial Sequence
  chemically treated genomic DNA (Homo sapiens) CpG-island No: 14685
tcgtagcgcgtttcgcggtgatttgtttaaggttattatcgtttcgggttcgtggcgttcggttcgggaggatacgggttaggcgggcgcggggttttggggtgggggtcggcgcggggcgttcggggcgttgcgcgttgacgtcggggttcgatgcggcggggattgggcgcggggggaggcgcgtcgtaggcgagcgttttttttttgtgcgagcgtcggcgttcggtttttcgaaggtaaatagcgtttttttttttttttcgtcgcgttttttttttttatagttatttttcgtttggtattcgttcgggttgttgttgttgttgttgttgtcgtcgcgcgggagtagttcgtaaatttgtggcggtgacgtgagtttcgttaattcggaaacggcggcggcggcggtatcggtagtttcgaggtttttgcgttttcgcgcgcgtttttttcgttcgttcgcgcgttagtacgtgtcggggttttgaaggcgtcgtatcggtcggtcgcgcgcggtttttggattcgatttgttttcggagagggcggggtttcgggttttggaattggggtgtcggggagaggcggaggtattattcgggtcgtcggcgacgttttgcgcgggttggatagggggcgttttttggttggggttttcgggtcggttcgggcgtttttta

SEQ ID NO: 14686 - DNA, 683 bp, Artificial Sequence
  chemically treated genomic DNA (Homo sapiens) CpG-island No: 14686
taaaaaacgcccgaaccgacccgaaaaccccaaccaaaaaacgccccctatccaacccgcgcaaaacgtcgccgacgacccgaataatacctccgcctctccccgacaccccaattccaaaacccgaaaccccgccctctccgaaaacaaatcgaatccaaaaaccgcgcgcgaccgaccgatacgacgccttcaaaaccccgacacgtactaacgcgcgaacgaacgaaaaaaacgcgcgcgaaaacgcaaaaacctcgaaactaccgataccgccgccgccgccgtttccgaattaacgaaactcacgtcaccgccacaaatttacgaactactcccgcgcgacgacaacaacaacaacaacaacaacccgaacgaataccaaacgaaaaataactataaaaaaaaaaaacgcgacgaaaaaaaaaaaaaaacgctatttaccttcgaaaaaccgaacgccgacgctcgcacaaaaaaaaaacgctcgcctacgacgcgcctccccccgcgcccaatccccgccgcatcgaaccccgacgtcaacgcgcaacgccccgaacgccccgcgccgacccccaccccaaaaccccgcgcccgcctaacccgtatcctcccgaaccgaacgccacgaacccgaaacgataataaccttaaacaaatcaccgcgaaacgcgctacga

SEQ ID NO: 14687 - DNA, 683 bp, Artificial Sequence
  chemically treated genomic DNA (Homo sapiens) CpG-island No: 14687
tgggggacgttcgggtcggttcgaaggttttaattaaggggcgttttttgtttaattcgcgtaaggcgtcgtcggcggttcggatggtattttcgttttttttcggtattttaattttagggttcggaatttcgtttttttcgggggtaaatcggatttaggggtcgcgcgcggtcggtcggtgcggcgtttttagagtttcggtacgtattggcgcgcgggcgggcgaggggagcgcgcgcgggagcgtaggagtttcggagttatcggtgtcgtcgtcgtcgtcgttttcgggttggcggggtttacgttatcgttataggtttgcgagttgttttcgcgcggcggtagtagtagtagtagtagtagttcgggcgagtgttaggcgagaaataattataaaaggaagaggcgcggcgaggaggaagaggaagcgttgtttattttcgagaagtcgagcgtcggcgttcgtataaaaggaggacgttcgtttgcgacgcgttttttttcgcgtttagttttcgtcgtatcgggtttcggcgttagcgcgtagcgtttcggacgtttcgcgtcggtttttattttagaatttcgcgttcgtttggttcgtgttttttcgagtcgggcgttacgggttcgggacggtggtgattttgggtaagttatcgcggggcgcgttgcga

SEQ ID NO: 14688 - DNA, 683 bp, Artificial Sequence
  chemically treated genomic DNA (Homo sapiens) CpG-island No: 14688
tcgcaacgcgccccgcgataacttacccaaaatcaccaccgtcccgaacccgtaacgcccgactcgaaaaaacacgaaccaaacgaacgcgaaattctaaaataaaaaccgacgcgaaacgtccgaaacgctacgcgctaacgccgaaacccgatacgacgaaaactaaacgcgaaaaaaaacgcgtcgcaaacgaacgtcctccttttatacgaacgccgacgctcgacttctcgaaaataaacaacgcttcctcttcctcctcgccgcgcctcttccttttataattatttctcgcctaacactcgcccgaactactactactactactactaccgccgcgcgaaaacaactcgcaaacctataacgataacgtaaaccccgccaacccgaaaacgacgacgacgacgacaccgataactccgaaactcctacgctcccgcgcgcgctcccctcgcccgcccgcgcgccaatacgtaccgaaactctaaaaacgccgcaccgaccgaccgcgcgcgacccctaaatccgatttacccccgaaaaaaacgaaattccgaaccctaaaattaaaataccgaaaaaaaacgaaaataccatccgaaccgccgacgacgccttacgcgaattaaacaaaaaacgccccttaattaaaaccttcgaaccgacccgaacgtccccca

SEQ ID NO: 14689 - DNA, 506 bp, Artificial Sequence
  chemically treated genomic DNA (Homo sapiens) CpG-island No: 14689
  unsure (178)
tcgtatcggaggtttcgtgtataggcgggatatatttcgtatcggaggtttcgtgtataggcgggatatatttcgtatcggaggtttcgtgtataggcgggatatattcgatcggaggtttcgtgtataggcgggatatattcgattcggaggtttcgtgtataggcgggatatattncgtatcggaggtttcgtgtataggcgggatatattcgatcggaggtttcgtgtataggcgggatatattcgtatcggaggtttcgtgtataggcgggatatattcgtatcggaggtttcgtgtataggcgggatatattcgtatcggaggtttcgtgtataggcgggatatacgtatatcggaggtttcgtgtataggcgggatatatttgtacgagaggtttattgtacgtggagggcgggggcgggaaatatttatattagaggtttcgtgtataggcgggatatatttatacgagaggttttgtgtataagcgggatatatttgt

SEQ ID NO: 14690 - DNA, 506 bp, Artificial Sequence
  chemically treated genomic DNA (Homo sapiens) CpG-island No: 14690
  unsure (329)
acaaatatatcccgcttatacacaaaacctctcgtataaatatatcccgcctatacacgaaacctctaatataaatatttcccgcccccgccctccacgtacaataaacctctcgtacaaatatatcccgcctatacacgaaacctccgatatacgtatatcccgcctatacacgaaacctccgatacgaatatatcccgcctatacacgaaacctccgatacgaatatatcccgcctatacacgaaacctccgatacgaatatatcccgcctatacacgaaacctccgatcgaatatatcccgcctatacacgaaacctccgatacgnaatatatcccgcctatacacgaaacctccgaatcgaatatatcccgcctatacacgaaacctccgatcgaatatatcccgcctatacacgaaacctccgatacgaaatatatcccgcctatacacgaaacctccgatacgaaatatatcccgcctatacacgaaacctccgatacga

SEQ ID NO: 14691 - DNA, 506 bp, Artificial Sequence
  chemically treated genomic DNA (Homo sapiens) CpG-island No: 14691
  unsure (329)
gtagatgtgtttcgtttgtgtatagggtttttcgtgtgggtgtgtttcgtttgtgtacggaatttttgatgtggatgtttttcgttttcgttttttacgtgtagtgaatttttcgtgtagatgtgtttcgtttgtgtacggagttttcggtgtgcgtgtgtttcgtttgtgtacggagttttcggtgcgggtgtgtttcgtttgtgtacggagttttcggtgcgggtgtgtttcgtttgtgtacggagttttcggtgcgggtgtgtttcgtttgtgtacggagttttcggtcgggtgtgtttcgtttgtgtacggagttttcggtgcgnggtgtgtttcgtttgtgtacggagttttcggatcgggtgtgtttcgtttgtgtacggagttttcggtcgggtgtgtttcgtttgtgtacggagttttcggtgcggggtgtgtttcgtttgtgtacggagttttcggtgcggggtgtgtttcgtttgtgtacggagttttcggtgcgg

SEQ ID NO: 14692 - DNA, 506 bp, Artificial Sequence
  chemically treated genomic DNA (Homo sapiens) CpG-island No: 14692
  unsure (178)
ccgcaccgaaaactccgtacacaaacgaaacacaccccgcaccgaaaactccgtacacaaacgaaacacaccccgcaccgaaaactccgtacacaaacgaaacacacccgaccgaaaactccgtacacaaacgaaacacacccgatccgaaaactccgtacacaaacgaaacacaccncgcaccgaaaactccgtacacaaacgaaacacacccgaccgaaaactccgtacacaaacgaaacacacccgcaccgaaaactccgtacacaaacgaaacacacccgcaccgaaaactccgtacacaaacgaaacacacccgcaccgaaaactccgtacacaaacgaaacacacgcacaccgaaaactccgtacacaaacgaaacacatctacacgaaaaattcactacacgtaaaaaacgaaaacgaaaaacatccacatcaaaaattccgtacacaaacgaaacacacccacacgaaaaaccctatacacaaacgaaacacatctac

SEQ ID NO: 14693 - DNA, 745 bp, Artificial Sequence
  chemically treated genomic DNA (Homo sapiens) CpG-island No: 14693
aagttgcgattcgcgtattaaaaatattcgtcgcgatttttaaatagcgaggagagagggggagagaaagttgcgttcggcgattttcggttcgcggaagaaggcgtaggggagcgttcggagcggcgcgtcgggaggagcgttcgtttagtagtagcgcggcggcggggaggcggtagtatggagcgcgggtcgcgggtcggttcgtcgagcgttcgttgttgcgttcgcggttcgcgtcggggatgatttcgggttcggcgtttaggtttcgcgcgtttcgttcgtagttcggcggtcgggacgcggttcgcgtcggtcgtcgtcgtcgttttttggagcggtttcgggcgcggcggtttatgcgagcggtttttcgcggttcgcggcgcgttcggagttcggagttcgcggggacgaggttaaagttgggcgcgtcgcggagttgcgttcgcgttcggggtttcgcgttttcgcgtttcgcgaatttcggcggcggttgaggcgacggttgcggcggtcgagtagtatgtcgaggaggaagtagtaggtttttcggcgttcggtaggtaacgggcgcgcggttcgcgtcgcggggagtgggcgtcgggaggagtaggaggagggggtttcgcgggtcgaggtgcgggacgtgggtcgcgggtcgttttaagttggggaggggaggtttagtttgcgttggttatagtcgtttggaggttgcggtcgtcgtttttttttatat

SEQ ID NO: 14694 - DNA, 745 bp, Artificial Sequence
  chemically treated genomic DNA (Homo sapiens) CpG-island No: 14694
atataaaaaaaaacgacgaccgcaacctccaaacgactataaccaacgcaaactaaacctcccctccccaacttaaaacgacccgcgacccacgtcccgcacctcgacccgcgaaaccccctcctcctactcctcccgacgcccactccccgcgacgcgaaccgcgcgcccgttacctaccgaacgccgaaaaacctactacttcctcctcgacatactactcgaccgccgcaaccgtcgcctcaaccgccgccgaaattcgcgaaacgcgaaaacgcgaaaccccgaacgcgaacgcaactccgcgacgcgcccaactttaacctcgtccccgcgaactccgaactccgaacgcgccgcgaaccgcgaaaaaccgctcgcataaaccgccgcgcccgaaaccgctccaaaaaacgacgacgacgaccgacgcgaaccgcgtcccgaccgccgaactacgaacgaaacgcgcgaaacctaaacgccgaacccgaaatcatccccgacgcgaaccgcgaacgcaacaacgaacgctcgacgaaccgacccgcgacccgcgctccatactaccgcctccccgccgccgcgctactactaaacgaacgctcctcccgacgcgccgctccgaacgctcccctacgccttcttccgcgaaccgaaaatcgccgaacgcaactttctctccccctctctcctcgctatttaaaaatcgcgacgaatatttttaatacgcgaatcgcaactt

SEQ ID NO: 14695 - DNA, 745 bp, Artificial Sequence
  chemically treated genomic DNA (Homo sapiens) CpG-island No: 14695
gtgtgggggaggacggcgatcgtagtttttagacgattgtggttagcgtaggttgggttttttttttttagtttggggcggttcgcggtttacgtttcgtatttcggttcgcgaagttttttttttttgtttttttcggcgtttatttttcgcggcgcgggtcgcgcgttcgttatttgtcgagcgtcggggggtttgttgtttttttttcggtatgttgttcggtcgtcgtagtcgtcgttttagtcgtcgtcggagttcgcggggcgcggggacgcggggtttcgggcgcgggcgtaatttcgcggcgcgtttaattttggtttcgttttcgcgggtttcgggtttcgggcgcgtcgcggatcgcggggagtcgttcgtatggatcgtcgcgttcggggtcgttttaggaggcggcggcggcggtcggcgcgggtcgcgtttcggtcgtcgggttgcgggcggagcgcgcggggtttgggcgtcgagttcggagttattttcggcgcgggtcgcgggcgtagtagcgggcgttcggcgggtcggttcgcggttcgcgttttatgttgtcgttttttcgtcgtcgcgttgttgttgggcgggcgtttttttcggcgcgtcgtttcgggcgtttttttgcgttttttttcgcgagtcgagagtcgtcgagcgtaatttttttttttttttttttttcgttgtttgggggtcgcggcgagtgtttttagtgcgcgggtcgtagttt

SEQ ID NO: 14696 - DNA, 745 bp, Artificial Sequence
  chemically treated genomic DNA (Homo sapiens) CpG-island No: 14696
aaactacgacccgcgcactaaaaacactcgccgcgacccccaaacaacgaaaaaaaaaaaaaaaaaaaaattacgctcgacgactctcgactcgcgaaaaaaaacgcaaaaaaacgcccgaaacgacgcgccgaaaaaaacgcccgcccaacaacaacgcgacgacgaaaaaacgacaacataaaacgcgaaccgcgaaccgacccgccgaacgcccgctactacgcccgcgacccgcgccgaaaataactccgaactcgacgcccaaaccccgcgcgctccgcccgcaacccgacgaccgaaacgcgacccgcgccgaccgccgccgccgcctcctaaaacgaccccgaacgcgacgatccatacgaacgactccccgcgatccgcgacgcgcccgaaacccgaaacccgcgaaaacgaaaccaaaattaaacgcgccgcgaaattacgcccgcgcccgaaaccccgcgtccccgcgccccgcgaactccgacgacgactaaaacgacgactacgacgaccgaacaacataccgaaaaaaaaacaacaaaccccccgacgctcgacaaataacgaacgcgcgacccgcgccgcgaaaaataaacgccgaaaaaaacaaaaaaaaaaaacttcgcgaaccgaaatacgaaacgtaaaccgcgaaccgccccaaactaaaaaaaaaaaacccaacctacgctaaccacaatcgtctaaaaactacgatcgccgtcctcccccacac

SEQ ID NO: 14697 - DNA, 731 bp, Artificial Sequence
  chemically treated genomic DNA (Homo sapiens) CpG-island No: 14697
gcgcgtttaggagtgtttgttttacgcggtttaggtgttatgttggcggtggcgcgttgttagtaggcgtttttttacgggttcggggaggcgttggtttttatcgaggtcgttcgtttttttttgcggtaggagcgcgacgcgcgttagcgtttggtttgtttcgtcgtttacggggagtcgttgtaggtcgtcgttagcgttttgggcgtcgcggtgcgtttgtatttcgagttgggttagtcggtcgtcgtcgtcgttttttgtttcgagttggtcgtcgttttgcgcgatttgggttagtcggtcgtcgtcgtcggttatttttagcgcgtcgtttagttttagttgttttagttgtttttggtcgcgttgtaggcgtttggcgaggtcgttttttgttcgttgttggcgcgcgattatatcggcgttttggcggtttttacgcgtatgtagcgtttggcgcgggagtacggtagttattcggtgtagttattgtcgtcgttttcgtcgtcggattttagttcgggttcggggcgacgttcgttttatcggtcgcgttgtttttttcgaatttcggttcggcggcgttttttttcgtcgttttgggcgttttttcggacgtgttggttcgttgcgaggtgtttcgcgtgttgttgttgttttttttgtaattatcgttcgttaagttgttgtcggagtacgtttagattttggagaagtatttttgg

SEQ ID NO: 14698 - DNA, 731 bp, Artificial Sequence
  chemically treated genomic DNA (Homo sapiens) CpG-island No: 14698
ccaaaaatacttctccaaaatctaaacgtactccgacaacaacttaacgaacgataattacaaaaaaaacaacaacaacacgcgaaacacctcgcaacgaaccaacacgtccgaaaaaacgcccaaaacgacgaaaaaaaacgccgccgaaccgaaattcgaaaaaaacaacgcgaccgataaaacgaacgtcgccccgaacccgaactaaaatccgacgacgaaaacgacgacaataactacaccgaataactaccgtactcccgcgccaaacgctacatacgcgtaaaaaccgccaaaacgccgatataatcgcgcgccaacaacgaacaaaaaacgacctcgccaaacgcctacaacgcgaccaaaaacaactaaaacaactaaaactaaacgacgcgctaaaaataaccgacgacgacgaccgactaacccaaatcgcgcaaaacgacgaccaactcgaaacaaaaaacgacgacgacgaccgactaacccaactcgaaatacaaacgcaccgcgacgcccaaaacgctaacgacgacctacaacgactccccgtaaacgacgaaacaaaccaaacgctaacgcgcgtcgcgctcctaccgcaaaaaaaaacgaacgacctcgataaaaaccaacgcctccccgaacccgtaaaaaaacgcctactaacaacgcgccaccgccaacataacacctaaaccgcgtaaaacaaacactcctaaacgcgc

SEQ ID NO: 14699 - DNA, 731 bp, Artificial Sequence
  chemically treated genomic DNA (Homo sapiens) CpG-island No: 14699
ttaggagtatttttttagggtttgggcgtgtttcggtagtagtttggcgggcggtggttgtaggaggagtagtagtagtacgcgggatatttcgtagcggattagtacgttcgagaaggcgtttagggcggcgggagagggcgtcgtcgagtcggagttcggaggaagtagcgcggtcggtagggcgggcgtcgtttcgggttcgggttggggttcggcggcgggggcggcggtagtgattgtatcgggtggttgtcgtgttttcgcgttaggcgttgtatgcgcgtgaagatcgttagggcgtcggtgtagtcgcgcgttagtagcgggtaggaggcggtttcgttaagcgtttgtagcgcggttaggggtagttggggtagttggagttgggcggcgcgttggaagtgatcggcggcggcggtcggttggtttaggtcgcgtagggcggcggttagttcgaggtagagggcggcggcggcggtcggttggtttagttcgaggtgtagacgtatcgcggcgtttagggcgttggcggcggtttgtagcggtttttcgtaggcggcggggtagattaggcgttggcgcgcgtcgcgtttttgtcgtaggaagaggcgggcggtttcggtgagggttagcgttttttcgggttcgtggaagagcgtttgttggtagcgcgttatcgttagtatggtatttaggtcgcgtagggtagatatttttgggcgcgt

SEQ ID NO: 14700 - DNA, 731 bp, Artificial Sequence
  chemically treated genomic DNA (Homo sapiens) CpG-island No: 14700
acgcgcccaaaaatatctaccctacgcgacctaaataccatactaacgataacgcgctaccaacaaacgctcttccacgaacccgaaaaaacgctaaccctcaccgaaaccgcccgcctcttcctacgacaaaaacgcgacgcgcgccaacgcctaatctaccccgccgcctacgaaaaaccgctacaaaccgccgccaacgccctaaacgccgcgatacgtctacacctcgaactaaaccaaccgaccgccgccgccgccctctacctcgaactaaccgccgccctacgcgacctaaaccaaccgaccgccgccgccgatcacttccaacgcgccgcccaactccaactaccccaactacccctaaccgcgctacaaacgcttaacgaaaccgcctcctacccgctactaacgcgcgactacaccgacgccctaacgatcttcacgcgcatacaacgcctaacgcgaaaacacgacaaccacccgatacaatcactaccgccgcccccgccgccgaaccccaacccgaacccgaaacgacgcccgccctaccgaccgcgctacttcctccgaactccgactcgacgacgccctctcccgccgccctaaacgccttctcgaacgtactaatccgctacgaaatatcccgcgtactactactactcctcctacaaccaccgcccgccaaactactaccgaaacacgcccaaaccctaaaaaaatactcctaa

SEQ ID NO: 14701 - DNA, 561 bp, Artificial Sequence
  chemically treated genomic DNA (Homo sapiens) CpG-island No: 14701
tcggcgttcgattggtttaggagttgttcgtagggaggtgaggagaggggttcggacgttcgcggggaaggtggggacgggggttcgacgttcgcggggaagtggggatttagtcgagtcgttcgggtagcggtcgatttttagagtcgtttgtcgggtaggtagcggacgggcgcggcgagttgttggttattaggcgtttttaggtcgtcggttcgcgttagcgttttagtcgtatttttagttagaaagcggtgaggtttgcggcgcgttcgggcgtagggcgggtttagtttttcgcgaggtgggatcggttgggcgttcggttcgtttttaaagtcggttgattggtgttcggtttttgtgttttgtgtttcggtgtgtggcgttttttgagcgagcgttgggggggacgtatttatttgtttgagtcgcgggttttatagcggtgggaggaaacgggattcggggggtggagtgacgcgttttagcgtttcgtttttgtgttattttcggggttttaaggtttttgttttggatttaggatattttttttaggaa

SEQ ID NO: 14702 - DNA, 561 bp, Artificial Sequence
  chemically treated genomic DNA (Homo sapiens) CpG-island No: 14702
ttcctaaaaaaaatatcctaaatccaaaacaaaaaccttaaaaccccgaaaataacacaaaaacgaaacgctaaaacgcgtcactccaccccccgaatcccgtttcctcccaccgctataaaacccgcgactcaaacaaataaatacgtcccccccaacgctcgctcaaaaaacgccacacaccgaaacacaaaacacaaaaaccgaacaccaatcaaccgactttaaaaacgaaccgaacgcccaaccgatcccacctcgcgaaaaactaaacccgccctacgcccgaacgcgccgcaaacctcaccgctttctaactaaaaatacgactaaaacgctaacgcgaaccgacgacctaaaaacgcctaataaccaacaactcgccgcgcccgtccgctacctacccgacaaacgactctaaaaatcgaccgctacccgaacgactcgactaaatccccacttccccgcgaacgtcgaacccccgtccccaccttccccgcgaacgtccgaacccctctcctcacctccctacgaacaactcctaaaccaatcgaacgccga

SEQ ID NO: 14703 - DNA, 561 bp, Artificial Sequence
  chemically treated genomic DNA (Homo sapiens) CpG-island No: 14703
tttttaaggagaatattttaaatttaaggtagaggttttagggtttcgagagtggtataagaacggggcgttggggcgcgttattttatttttcgggtttcgtttttttttatcgttgtgaaattcgcggtttagatagatgggtacgttttttttagcgttcgtttagggggcgttatatatcggaatataagatataggaatcgaatattaattagtcgattttaggggcgggtcggacgtttagtcggttttatttcgcggggagttgggttcgttttgcgttcgagcgcgtcgtaggttttatcgttttttgattggaaatgcggttgaggcgttggcgcgggtcggcggtttggagacgtttggtgattaataattcgtcgcgttcgttcgttgtttgttcggtagacggttttagagatcgatcgttgttcggacggttcggttgggtttttattttttcgcgggcgtcgggttttcgtttttatttttttcgcgggcgttcgggtttttttttttatttttttgcggatagtttttaggttagtcgagcgtcga

SEQ ID NO: 14704 - DNA, 561 bp, Artificial Sequence
  chemically treated genomic DNA (Homo sapiens) CpG-island No: 14704
tcgacgctcgactaacctaaaaactatccgcaaaaaaataaaaaaaaaaacccgaacgcccgcgaaaaaaataaaaacgaaaacccgacgcccgcgaaaaaataaaaacccaaccgaaccgtccgaacaacgatcgatctctaaaaccgtctaccgaacaaacaacgaacgaacgcgacgaattattaatcaccaaacgtctccaaaccgccgacccgcgccaacgcctcaaccgcatttccaatcaaaaaacgataaaacctacgacgcgctcgaacgcaaaacgaacccaactccccgcgaaataaaaccgactaaacgtccgacccgcccctaaaatcgactaattaatattcgattcctatatcttatattccgatatataacgccccctaaacgaacgctaaaaaaaacgtacccatctatctaaaccgcgaatttcacaacgataaaaaaaaacgaaacccgaaaaataaaataacgcgccccaacgccccgttcttataccactctcgaaaccctaaaacctctaccttaaatttaaaatattctccttaaaaa

SEQ ID NO: 14705 - DNA, 659 bp, Artificial Sequence
  chemically treated genomic DNA (Homo sapiens) CpG-island No: 14705
tgcgcgcgttttttttttcgtttttttttttttcgtagtttcgtcgttttggtgtttttttgttcggttcggcgtcgttcgttttcggtttcggtttcgttagttcgggttttcgcgttcggagtagtttagttttgtagtggttcgggattcgatgttatgagagggaagcgagtcgggcgtttagatttttaggaggcgtcggatgcgcggcgggttttgggatcgggtttttttttcggttcgttttgttttcgggtgattatttggtttcgtttatagttttgtttttttcggaggagttatcggtgtcgcgtgcgtgtggagtatttgtagatatgattgcgtggaggagattttagtcgttgtttttgtttttcgggttgttggtgttgtgcgcgaggttttttattgtagcgaagggtaagacggatttgtttttggtcggggaggcggtagagttttcggaggtttcgtgtgcggacgcgagtgtgcgttttggggatcgtagggtacggagtggtcgtttttgttcggcgttgttttatcgtcgaagttcggggaacgcgatgtacgggagggagtttttatcgcgttttttttagtttttttgggttttcgttttatttcgttatttttttttttttttttgggtttat

SEQ ID NO: 14706 - DNA, 659 bp, Artificial Sequence
  chemically treated genomic DNA (Homo sapiens) CpG-island No: 14706
ataaacccaaaaaaaaaaaaaaaaataacgaaataaaacgaaaacccaaaaaaactaaaaaaaacgcgataaaaactccctcccgtacatcgcgttccccgaacttcgacgataaaacaacgccgaacaaaaacgaccactccgtaccctacgatccccaaaacgcacactcgcgtccgcacacgaaacctccgaaaactctaccgcctccccgaccaaaaacaaatccgtcttacccttcgctacaataaaaaacctcgcgcacaacaccaacaacccgaaaaacaaaaacaacgactaaaatctcctccacgcaatcatatctacaaatactccacacgcacgcgacaccgataactcctccgaaaaaaacaaaactataaacgaaaccaaataatcacccgaaaacaaaacgaaccgaaaaaaaaacccgatcccaaaacccgccgcgcatccgacgcctcctaaaaatctaaacgcccgactcgcttccctctcataacatcgaatcccgaaccactacaaaactaaactactccgaacgcgaaaacccgaactaacgaaaccgaaaccgaaaacgaacgacgccgaaccgaacaaaaaaacaccaaaacgacgaaactacgaaaaaaaaaaaaacgaaaaaaaaaacgcgcgca

SEQ ID NO: 14707 - DNA, 659 bp, Artificial Sequence
  chemically treated genomic DNA (Homo sapiens) CpG-island No: 14707
gtgagtttaagagagggggaaggaatggcggggtggggcgggggtttaggagggttggggagagcgcgatggaagttttttttcgtgtatcgcgtttttcgagtttcggcgatggagtagcgtcgggtagaggcggttatttcgtattttgcggtttttaaaacgtatattcgcgttcgtatacggggttttcgagggttttatcgttttttcggttaggagtaagttcgttttatttttcgttgtagtgaggagtttcgcgtatagtattagtagttcgagaagtaggagtagcgattggaattttttttacgtagttatgtttgtagatattttatacgtacgcgatatcgatggttttttcgaggaaggtagggttatgagcggagttaaataattattcgagggtaaggcgagtcggagagagagttcggttttaagattcgtcgcgtattcgacgttttttgaaggtttgggcgttcggttcgttttttttttatagtatcgggtttcgagttattgtagggttgagttgtttcgagcgcggagattcgggttggcggggtcggggtcggggacgagcggcgtcgagtcgggtaggaaggtattaaggcggcgaggttgcgggagggggagaagcggggagaggagcgcgcgta

SEQ ID NO: 14708 - DNA, 659 bp, Artificial Sequence
  chemically treated genomic DNA (Homo sapiens) CpG-island No: 14708
tacgcgcgctcctctccccgcttctccccctcccgcaacctcgccgccttaataccttcctacccgactcgacgccgctcgtccccgaccccgaccccgccaacccgaatctccgcgctcgaaacaactcaaccctacaataactcgaaacccgatactataaaaaaaaaacgaaccgaacgcccaaaccttcaaaaaacgtcgaatacgcgacgaatcttaaaaccgaactctctctccgactcgccttaccctcgaataattatttaactccgctcataaccctaccttcctcgaaaaaaccatcgatatcgcgtacgtataaaatatctacaaacataactacgtaaaaaaaattccaatcgctactcctacttctcgaactactaatactatacgcgaaactcctcactacaacgaaaaataaaacgaacttactcctaaccgaaaaaacgataaaaccctcgaaaaccccgtatacgaacgcgaatatacgttttaaaaaccgcaaaatacgaaataaccgcctctacccgacgctactccatcgccgaaactcgaaaaacgcgatacacgaaaaaaaacttccatcgcgctctccccaaccctcctaaacccccgccccaccccgccattccttccccctctcttaaactcac

SEQ ID NO: 14709 - DNA, 874 bp, Artificial Sequence
  chemically treated genomic DNA (Homo sapiens) CpG-island No: 14709
ggggcgtgtgttcgttttcgttttttttcggcggtattaggtttatggggggcgtgtgttcgttttcgttttttttcggtcgtattaggtttatggggggcgtgtgttcgttttcgttttttttcggcggtattaggtcgatggggggtatgtgttcgttttcgttttttttcggcggtattaggtcgatggggggcgtgtgttcgttttcgttttttttcggcggtattaggtttatggggggcgtgtgttcgttttcgttttttttcggcggtattaggtcgatggggggcgtgtgttcgttttcgttttttttcggcggtattaggtcgatggggggcgtgtgttcgttttcgttttttttcggcggtattaggtcgatggggggcgtgtgttcgttttcgttttttttcggtcgtattaggtttatggggggcgtgtgttcgttttcgtttttttttggcggtattaggtcgatggggggcgtgtgttcgttttcgttttttttcggcggtattaggttgatggggggcgtgtgttcgttttcgttttttttcggtcgtattaggttgatggggggcgtgtgttcgttttcgtttttttcgggtcgtattaggtttatggggggcgtgtgttcgttttcgttttttttcggttatattaggttgatggggggcgtgtgttcgttttcgttttttttattgtttttcgcggtcgttggttgagattaggtggtagcgagttttttcgagaggaattgaaacgcgtgagtcgacgtgtgagttttagttatacgttgtttggcgtataggtttggacgcggtttttggtggtcgttttatttcgggtacgttatagggtgggttttttgagg

SEQ ID NO: 14710 - DNA, 874 bp, Artificial Sequence
  chemically treated genomic DNA (Homo sapiens) CpG-island No: 14710
cctcaaaaaacccaccctataacgtacccgaaataaaacgaccaccaaaaaccgcgtccaaacctatacgccaaacaacgtataactaaaactcacacgtcgactcacgcgtttcaattcctctcgaaaaaactcgctaccacctaatctcaaccaacgaccgcgaaaaacaataaaaaaaacgaaaacgaacacacgccccccatcaacctaatataaccgaaaaaaaacgaaaacgaacacacgccccccataaacctaatacgacccgaaaaaaacgaaaacgaacacacgccccccatcaacctaatacgaccgaaaaaaaacgaaaacgaacacacgccccccatcaacctaataccgccgaaaaaaaacgaaaacgaacacacgccccccatcgacctaataccgccaaaaaaaaacgaaaacgaacacacgccccccataaacctaatacgaccgaaaaaaaacgaaaacgaacacacgccccccatcgacctaataccgccgaaaaaaaacgaaaacgaacacacgccccccatcgacctaataccgccgaaaaaaaacgaaaacgaacacacgccccccatcgacctaataccgccgaaaaaaaacgaaaacgaacacacgccccccataaacctaataccgccgaaaaaaaacgaaaacgaacacacgccccccatcgacctaataccgccgaaaaaaaacgaaaacgaacacataccccccatcgacctaataccgccgaaaaaaaacgaaaacgaacacacgccccccataaacctaatacgaccgaaaaaaaacgaaaacgaacacacgccccccataaacctaataccgccgaaaaaaaacgaaaacgaacacacgcccc

SEQ ID NO: 14711 - DNA, 874 bp, Artificial Sequence
  chemically treated genomic DNA (Homo sapiens) CpG-island No: 14711
ttttagggagtttattttgtgacgtgttcgaggtgaggcggttattagaggtcgcgtttaaatttgtgcgttaggtagcgtgtggttgaggtttatacgtcgatttacgcgttttagtttttttcgagaaaattcgttgttatttggttttagttagcgatcgcgagggatagtgagaaaggcgagagcgggtatacgttttttattaatttggtgtggtcgggggaaggcgagagcgggtatacgttttttatgaatttggtacggttcggggaaggcgagagcgggtatacgttttttattaatttggtgcggtcgggggaaggcgagagcgggtatacgttttttattaatttggtatcgtcgggggaaggcgagagcgggtatacgttttttatcgatttggtatcgttaggggaaggcgagagcgggtatacgttttttatgaatttggtgcggtcgggggaaggcgagagcgggtatacgttttttatcgatttggtatcgtcgggggaaggcgagagcgggtatacgttttttatcgatttggtatcgtcgggggaaggcgagagcgggtatacgttttttatcgatttggtatcgtcgggggaaggcgagagcgggtatacgttttttatgaatttggtatcgtcgggggaaggcgagagcgggtatacgttttttatcgatttggtatcgtcgggggaaggcgagagcgggtatatgttttttatcgatttggtatcgtcgggggaaggcgagagcgggtatacgttttttatgaatttggtgcggtcgggggaaggcgagagcgggtatacgttttttatgaatttggtatcgtcgggggaaagcgagagcgggtatacgtttt

SEQ ID NO: 14712 - DNA, 874 bp, Artificial Sequence
  chemically treated genomic DNA (Homo sapiens) CpG-island No: 14712
aaaacgtatacccgctctcgctttcccccgacgataccaaattcataaaaaacgtatacccgctctcgccttcccccgaccgcaccaaattcataaaaaacgtatacccgctctcgccttcccccgacgataccaaatcgataaaaaacatatacccgctctcgccttcccccgacgataccaaatcgataaaaaacgtatacccgctctcgccttcccccgacgataccaaattcataaaaaacgtatacccgctctcgccttcccccgacgataccaaatcgataaaaaacgtatacccgctctcgccttcccccgacgataccaaatcgataaaaaacgtatacccgctctcgccttcccccgacgataccaaatcgataaaaaacgtatacccgctctcgccttcccccgaccgcaccaaattcataaaaaacgtatacccgctctcgccttcccctaacgataccaaatcgataaaaaacgtatacccgctctcgccttcccccgacgataccaaattaataaaaaacgtatacccgctctcgccttcccccgaccgcaccaaattaataaaaaacgtatacccgctctcgccttccccgaaccgtaccaaattcataaaaaacgtatacccgctctcgccttcccccgaccacaccaaattaataaaaaacgtatacccgctctcgcctttctcactatccctcgcgatcgctaactaaaaccaaataacaacgaattttctcgaaaaaaactaaaacgcgtaaatcgacgtataaacctcaaccacacgctacctaacgcacaaatttaaacgcgacctctaataaccgcctcacctcgaacacgtcacaaaataaactccctaaaa

SEQ ID NO: 14713 - DNA, 512 bp, Artificial Sequence
  chemically treated genomic DNA (Homo sapiens) CpG-island No: 14713
ttcggagtagtttcggtttaggaggggcgggcgaggggttcgtttatagtttagattgcggcggatacgtttcggtcgtttcgtttatttgttcgttgttttaatgatatggagattttaaatttaagtgtttttgagggattgaaagggtcgatcgtggtagaggtcgtgcggcggtttaggggatacggggaggcgttcgtggtagattagtttcgcgtcgagggacggtcgttgtttttacgaggttggaggaggggtgtttattttagcggtatagattcgcgggtatcgtagtaggtttcgagcgttttcgtttcggaagatataggttttataaacgtttttagcgcgcgagcgcgtggtacggggcggttttcgttgacgcgtaatttatcgcgagttcgtttttagcggagtttttttacggtttttttttacgatgcggaatgcgtggagattatattagaaaaggagttatacggagttttgtggtatttttttaaatttat

SEQ ID NO: 14714 - DNA, 512 bp, Artificial Sequence
  chemically treated genomic DNA (Homo sapiens) CpG-island No: 14714
ataaatttaaaaaaataccacaaaactccgtataactccttttctaatataatctccacgcattccgcatcgtaaaaaaaaaccgtaaaaaaactccgctaaaaacgaactcgcgataaattacgcgtcaacgaaaaccgccccgtaccacgcgctcgcgcgctaaaaacgtttataaaacctatatcttccgaaacgaaaacgctcgaaacctactacgatacccgcgaatctataccgctaaaataaacacccctcctccaacctcgtaaaaacaacgaccgtccctcgacgcgaaactaatctaccacgaacgcctccccgtatcccctaaaccgccgcacgacctctaccacgatcgaccctttcaatccctcaaaaacacttaaatttaaaatctccatatcattaaaacaacgaacaaataaacgaaacgaccgaaacgtatccgccgcaatctaaactataaacgaacccctcgcccgcccctcctaaaccgaaactactccgaa

SEQ ID NO: 14715 - DNA, 512 bp, Artificial Sequence
  chemically treated genomic DNA (Homo sapiens) CpG-island No: 14715
gtagatttgaaaaaatgttatagagtttcgtgtggttttttttttaatgtgatttttacgtatttcgtatcgtggagaagggtcgtgaggaggtttcgttgggggcggattcgcggtggattacgcgttagcgagggtcgtttcgtgttacgcgttcgcgcgttgagagcgtttgtggggtttgtgtttttcgaaacggaggcgttcggggtttgttgcggtgttcgcgggtttgtgtcgttgaagtgggtattttttttttagtttcgtgaggatagcggtcgtttttcggcgcggggttggtttgttacgggcgttttttcgtgttttttgggtcgtcgtacggtttttgttacggtcggtttttttagttttttagaagtatttgggtttaaagtttttatgttattaaaataacgagtaggtagacgaggcggtcggagcgtgttcgtcgtagtttgggttgtgaacgggtttttcgttcgttttttttgagtcggagttgtttcgga

SEQ ID NO: 14716 - DNA, 512 bp, Artificial Sequence
  chemically treated genomic DNA (Homo sapiens) CpG-island No: 14716
tccgaaacaactccgactcaaaaaaaacgaacgaaaaacccgttcacaacccaaactacgacgaacacgctccgaccgcctcgtctacctactcgttattttaataacataaaaactttaaacccaaatacttctaaaaaactaaaaaaaccgaccgtaacaaaaaccgtacgacgacccaaaaaacacgaaaaaacgcccgtaacaaaccaaccccgcgccgaaaaacgaccgctatcctcacgaaactaaaaaaaaaatacccacttcaacgacacaaacccgcgaacaccgcaacaaaccccgaacgcctccgtttcgaaaaacacaaaccccacaaacgctctcaacgcgcgaacgcgtaacacgaaacgaccctcgctaacgcgtaatccaccgcgaatccgcccccaacgaaacctcctcacgacccttctccacgatacgaaatacgtaaaaatcacattaaaaaaaaaaccacacgaaactctataacattttttcaaatctac

SEQ ID NO: 14717 - DNA, 667 bp, Artificial Sequence
  chemically treated genomic DNA (Homo sapiens) CpG-island No: 14717
ggaagcgtgtttttacgtttattgtcgatattgtaaatttgagggaagcgtgttttcgcgtttattgtcgacgttgcgagggaagcgtttttatatttattgtcgacgtaaatttgagggaagcgtgtttttacgttcgttgttaacgtaaatttgagggaagcgtgtttttacgtttattgtcgacgttgtaaatttgagggaagcgtgtttttacgttcgttgtcgacgtaaatttgagggaagcgtgtttttacgttcgttgtcgacgtaaatttgagggaagcgtgtttttatgtttattgtcgacgttgtaaatttgagggaagcgtgttttcgcgtttattgtcgacgtaaatttgagggaagcgtgtttttacgtttattgtcgatattgtaaatttgagggaagcgtgttttcgcgtttattgtcgacgttgtaaatttgagggaagcgtgtttttacgtttatcgtcgacgtaaatttgagggaagcgtgtttttttattgttaattttgtaagggaagcgtgttttcgcgtttattgtcgacgttgtaaatttgagggaagcgtgtttttatatttattgtcgacgttgtaagggaagcgtgtttttatatttattgtcgatattgtgagggaagtgtatttttacgttgtcgatat

SEQ ID NO: 14718 - DNA, 667 bp, Artificial Sequence
  chemically treated genomic DNA (Homo sapiens) CpG-island No: 14718
atatcgacaacgtaaaaatacacttccctcacaatatcgacaataaatataaaaacacgcttcccttacaacgtcgacaataaatataaaaacacgcttccctcaaatttacaacgtcgacaataaacgcgaaaacacgcttcccttacaaaattaacaataaaaaaacacgcttccctcaaatttacgtcgacgataaacgtaaaaacacgcttccctcaaatttacaacgtcgacaataaacgcgaaaacacgcttccctcaaatttacaatatcgacaataaacgtaaaaacacgcttccctcaaatttacgtcgacaataaacgcgaaaacacgcttccctcaaatttacaacgtcgacaataaacataaaaacacgcttccctcaaatttacgtcgacaacgaacgtaaaaacacgcttccctcaaatttacgtcgacaacgaacgtaaaaacacgcttccctcaaatttacaacgtcgacaataaacgtaaaaacacgcttccctcaaatttacgttaacaacgaacgtaaaaacacgcttccctcaaatttacgtcgacaataaatataaaaacgcttccctcgcaacgtcgacaataaacgcgaaaacacgcttccctcaaatttacaatatcgacaataaacgtaaaaacacgcttcc

SEQ ID NO: 14719 - DNA, 667 bp, Artificial Sequence
  chemically treated genomic DNA (Homo sapiens) CpG-island No: 14719
atgtcgatagcgtgagaatatattttttttataatgtcgatagtgagtgtgagaatacgttttttttgtaacgtcgatagtgagtgtgagaatacgttttttttaggtttataacgtcgatagtgagcgcgagaatacgttttttttgtaaagttgatagtgagagaatacgttttttttaggtttacgtcgacggtgagcgtgagaatacgttttttttaggtttataacgtcgatagtgagcgcgagaatacgttttttttaggtttataatgtcgatagtgagcgtgagaatacgttttttttaggtttacgtcgatagtgagcgcgagaatacgttttttttaggtttataacgtcgatagtgagtatgagaatacgttttttttaggtttacgtcgatagcgagcgtgagaatacgttttttttaggtttacgtcgatagcgagcgtgagaatacgttttttttaggtttataacgtcgatagtgagcgtgagaatacgttttttttaggtttacgttgatagcgagcgtgagaatacgttttttttaggtttacgtcgatagtgagtgtgaaaacgtttttttcgtaacgtcgatagtgagcgcgagaatacgttttttttaggtttataatgtcgatagtgagcgtgagaatacgttttt

SEQ ID NO: 14720 - DNA, 667 bp, Artificial Sequence
  chemically treated genomic DNA (Homo sapiens) CpG-island No: 14720
aaaaacgtattctcacgctcactatcgacattataaacctaaaaaaaacgtattctcgcgctcactatcgacgttacgaaaaaaacgttttcacactcactatcgacgtaaacctaaaaaaaacgtattctcacgctcgctatcaacgtaaacctaaaaaaaacgtattctcacgctcactatcgacgttataaacctaaaaaaaacgtattctcacgctcgctatcgacgtaaacctaaaaaaaacgtattctcacgctcgctatcgacgtaaacctaaaaaaaacgtattctcatactcactatcgacgttataaacctaaaaaaaacgtattctcgcgctcactatcgacgtaaacctaaaaaaaacgtattctcacgctcactatcgacattataaacctaaaaaaaacgtattctcgcgctcactatcgacgttataaacctaaaaaaaacgtattctcacgctcaccgtcgacgtaaacctaaaaaaaacgtattctctcactatcaactttacaaaaaaaacgtattctcgcgctcactatcgacgttataaacctaaaaaaaacgtattctcacactcactatcgacgttacaaaaaaaacgtattctcacactcactatcgacattataaaaaaaatatattctcacgctatcgacat

SEQ ID NO: 14721 - DNA, 978 bp, Artificial Sequence
  chemically treated genomic DNA (Homo sapiens) CpG-island No: 14721
ggaagcgtgtttttacgtttattgtcgatattgtaaatttgagggaagcgtgtttttacgtttattgtcgacgttgcgagggaagcgtttttatattgtcgacgtaaatttgagggaagcgtgtttttacgttcgttgttaacgtaaatttgagggaagcgtgtttttacgtttattgtcgacgttgtaaatttgagggaagcgtgtttttacgttcgttgttaacgtaaatttgagggaagcgtgtttttacgtttattgtcgacgtaaatttgagggaagcgtgtttttacgttcgttgtcgacgtaaatttgagggaagcgtgtttttacgtttattgtcgacgttgtaaatttgagggaagtgtgtttttatatttattcgacgtgagggaagcgtgtttttacgtttattgtcgatattgtaaatttgagggaagtatgtttttatatttattgtcgacgttgtaaatttgagggaagcgtgtttttacgtttatcgtcgacgttgtaaatttgagggaagtgtgtttttacgtttatcgtcgacgttgtaaatttgagggaagcgtgtttttacgtttattgttaacgttgtaaatttgagggaagcgtgtttttacgtttattgttaacgttgtgagggaagggtgtttttacgtttattgtcgacgttgcgagggaagcgtgtttttacgtttatcgtcgacgttgtaaattcgagggaagcgtgtttttacgtttattgttaacgttgtgagggaagggtgtttttacgtttattgtcgacgttgcgatggaagcgtgtttttatgtttatcgtcgatattgtaaatttgagtgaagtgtgtttttacgtttattgtcgacgttgcgagggaagcgtgtttttatgtttattgtcgacgttgtgagggaagcgtgtttttacgtttattgttaacgttgtaaatttgagggaaaggaatttttttttat

SEQ ID NO: 14722 - DNA, 978 bp, Artificial Sequence
  chemically treated genomic DNA (Homo sapiens) CpG-island No: 14722
ataaaaaaaaattcctttccctcaaatttacaacgttaacaataaacgtaaaaacacgcttccctcacaacgtcgacaataaacataaaaacacgcttccctcgcaacgtcgacaataaacgtaaaaacacacttcactcaaatttacaatatcgacgataaacataaaaacacgcttccatcgcaacgtcgacaataaacgtaaaaacacccttccctcacaacgttaacaataaacgtaaaaacacgcttccctcgaatttacaacgtcgacgataaacgtaaaaacacgcttccctcgcaacgtcgacaataaacgtaaaaacacccttccctcacaacgttaacaataaacgtaaaaacacgcttccctcaaatttacaacgttaacaataaacgtaaaaacacgcttccctcaaatttacaacgtcgacgataaacgtaaaaacacacttccctcaaatttacaacgtcgacgataaacgtaaaaacacgcttccctcaaatttacaacgtcgacaataaatataaaaacatacttccctcaaatttacaatatcgacaataaacgtaaaaacacgcttccctcacgtcgaataaatataaaaacacacttccctcaaatttacaacgtcgacaataaacgtaaaaacacgcttccctcaaatttacgtcgacaacgaacgtaaaaacacgcttccctcaaatttacgtcgacaataaacgtaaaaacacgcttccctcaaatttacgttaacaacgaacgtaaaaacacgcttccctcaaatttacaacgtcgacaataaacgtaaaaacacgcttccctcaaatttacgttaacaacgaacgtaaaaacacgcttccctcaaatttacgtcgacaatataaaaacgcttccctcgcaacgtcgacaataaacgtaaaaacacgcttccctcaaatttacaatatcgacaataaacgtaaaaacacgcttcc

SEQ ID NO: 14723 - DNA, 978 bp, Artificial Sequence
  chemically treated genomic DNA (Homo sapiens) CpG-island No: 14723
gtgagagagaattttttttttttaggtttataacgttgatagtgagcgtgagaatacgttttttttataacgtcgatagtgagtatgagaatacgtttttttcgtaacgtcgatagtgagcgtgagaatatattttatttaggtttatagtgtcgacggtgagtatgagaatacgtttttatcgtaacgtcgatagtgagcgtgaaaatattttttttttataacgttgatagtgagcgtgagaatacgtttttttcgggtttataacgtcgacggtgagcgtgagaatacgtttttttcgtaacgtcgatagtgagcgtgaaaatattttttttttataacgttgatagtgaacgtgagaatacgttttttttaggtttataacgttgatagtgagcgtgagaatacgttttttttaggtttataacgtcgacggtgagcgtgagaatatattttttttaggtttataacgtcgacggtgagcgtgagaatacgttttttttaggtttataacgtcgatagtgagtgtgagaatatgttttttttaggtttataatgtcgatagtgagcgtgagaatacgttttttttacgtcgagtgagtgtgagaatatattttttttaggtttataacgtcgatagtgagcgtgagaatacgttttttttaggtttacgtcgatagcgagcgtgagaatacgttttttttaggtttacgtcgatagtgagcgtgagaatacgttttttttaggtttacgttgatagcgagcgtgagaatacgttttttttaggtttataacgtcgatagtgagcgtgagaatacgttttttttaggtttacgttgatagcgagcgtgagaatacgttttttttaggtttacgtcgatagtgtgaaaacgtttttttcgtaacgtcgatagtgagcgtgagaatacgttttttttaggtttataatgtcgatagtgagcgtgagaatacgttttt

SEQ ID NO: 14724 - DNA, 978 bp, Artificial Sequence
  chemically treated genomic DNA (Homo sapiens) CpG-island No: 14724
aaaaacgtattctcacgctcactatcgacattataaacctaaaaaaaacgtattctcacgctcactatcgacgttacgaaaaaaacgttttcacactatcgacgtaaacctaaaaaaaacgtattctcacgctcgctatcaacgtaaacctaaaaaaaacgtattctcacgctcactatcgacgttataaacctaaaaaaaacgtattctcacgctcgctatcaacgtaaacctaaaaaaaacgtattctcacgctcactatcgacgtaaacctaaaaaaaacgtattctcacgctcgctatcgacgtaaacctaaaaaaaacgtattctcacgctcactatcgacgttataaacctaaaaaaaatatattctcacactcactcgacgtaaaaaaaacgtattctcacgctcactatcgacattataaacctaaaaaaaacatattctcacactcactatcgacgttataaacctaaaaaaaacgtattctcacgctcaccgtcgacgttataaacctaaaaaaaatatattctcacgctcaccgtcgacgttataaacctaaaaaaaacgtattctcacgctcactatcaacgttataaacctaaaaaaaacgtattctcacgttcactatcaacgttataaaaaaaaaatattttcacgctcactatcgacgttacgaaaaaaacgtattctcacgctcaccgtcgacgttataaacccgaaaaaaacgtattctcacgctcactatcaacgttataaaaaaaaaatattttcacgctcactatcgacgttacgataaaaacgtattctcatactcaccgtcgacactataaacctaaataaaatatattctcacgctcactatcgacgttacgaaaaaaacgtattctcatactcactatcgacgttataaaaaaaacgtattctcacgctcactatcaacgttataaacctaaaaaaaaaaaattctctctcac

SEQ ID NO: 14725 - DNA, 713 bp, Artificial Sequence
  chemically treated genomic DNA (Homo sapiens) CpG-island No: 14725
ggttttcgagaaggtcgggaggaagtagttttttcggtcgcgtggaggatagttagtgagttaggtcgtcggtagggtagcgagttgttagttaggtgaaacggtcgaggtttcgttgttttcgtcggtttcgtttttttcggtgagaggcggcgcggcgttttgggtttatttggttggggcgttttgcgggcgcggggttcggtcgtttatcgttttgcggggcgttgcgcgggttttagtttttaggcggcgcgttattgttggggtgggagaggtcggcgggttagggcgggacgcgcgttttttcgaggtcggagcgaagttggttgagcgttaagagttcgttcgagtcgttttagtttcggtcggttcgtttttcgggtgcgtttttatttgcgggtttcggtttttagttcgcgggcgtcgtcgtcgtttttataaggtttagcgggcgtttagagtacggcggaggaggcggtggcgttgtagttttcgtttcgtggggtttattgggtagttatttggcgtttttcggagggagaggagtcgtcggggttggaaaaggaggaggagcggggtcgggcgtacgggtatcgttgttacgtcggtagcgtatttttaggttttttcggtcgagtttgtataaataaaacgttttaggaaaatttttttcgaagagaagttgggagggttgatttttttttttttat

SEQ ID NO: 14726 - DNA, 713 bp, Artificial Sequence
  chemically treated genomic DNA (Homo sapiens) CpG-island No: 14726
ataaaaaaaaaaaaatcaaccctcccaacttctcttcgaaaaaaattttcctaaaacgttttatttatacaaactcgaccgaaaaaacctaaaaatacgctaccgacgtaacaacgatacccgtacgcccgaccccgctcctcctccttttccaaccccgacgactcctctccctccgaaaaacgccaaataactacccaataaaccccacgaaacgaaaactacaacgccaccgcctcctccgccgtactctaaacgcccgctaaaccttataaaaacgacgacgacgcccgcgaactaaaaaccgaaacccgcaaataaaaacgcacccgaaaaacgaaccgaccgaaactaaaacgactcgaacgaactcttaacgctcaaccaacttcgctccgacctcgaaaaaacgcgcgtcccgccctaacccgccgacctctcccaccccaacaataacgcgccgcctaaaaactaaaacccgcgcaacgccccgcaaaacgataaacgaccgaaccccgcgcccgcaaaacgccccaaccaaataaacccaaaacgccgcgccgcctctcaccgaaaaaaacgaaaccgacgaaaacaacgaaacctcgaccgtttcacctaactaacaactcgctaccctaccgacgacctaactcactaactatcctccacgcgaccgaaaaaactacttcctcccgaccttctcgaaaacc

SEQ ID NO: 14727 - DNA, 713 bp, Artificial Sequence
  chemically treated genomic DNA (Homo sapiens) CpG-island No: 14727
gtgggaaaagagagattagtttttttaattttttttcgggaaaagtttttttagggcgttttgtttgtgtaaattcggtcggaggagtttgggagtgcgttgtcggcgtggtagcggtgttcgtgcgttcggtttcgttttttttttttttttagtttcggcggttttttttttttcgagaggcgttaaatggttatttagtaaattttacggggcgggggttgtagcgttatcgtttttttcgtcgtgttttgggcgttcgttagattttgtagagacggcggcggcgttcgcgggttgggagtcggggttcgtaggtggaagcgtattcgggaggcgggtcggtcggggttggagcggttcgggcgggtttttgacgtttagttagtttcgtttcggtttcgggaaggcgcgcgtttcgttttgattcgtcggttttttttattttagtagtgacgcgtcgtttgggagttggagttcgcgtagcgtttcgtagggcgatggacggtcgaatttcgcgttcgtaggacgttttagttaggtaagtttagagcgtcgcgtcgttttttatcggggagggcgaggtcggcgaggatagcgaggtttcggtcgttttatttggttggtaattcgttgttttgtcggcggtttgatttattgattgttttttacgcggtcggggaggttgttttttttcggttttttcggaggtt

SEQ ID NO: 14728 - DNA, 713 bp, Artificial Sequence
  chemically treated genomic DNA (Homo sapiens) CpG-island No: 14728
aacctccgaaaaaaccgaaaaaaaacaacctccccgaccgcgtaaaaaacaatcaataaatcaaaccgccgacaaaacaacgaattaccaaccaaataaaacgaccgaaacctcgctatcctcgccgacctcgccctccccgataaaaaacgacgcgacgctctaaacttacctaactaaaacgtcctacgaacgcgaaattcgaccgtccatcgccctacgaaacgctacgcgaactccaactcccaaacgacgcgtcactactaaaataaaaaaaaccgacgaatcaaaacgaaacgcgcgccttcccgaaaccgaaacgaaactaactaaacgtcaaaaacccgcccgaaccgctccaaccccgaccgacccgcctcccgaatacgcttccacctacgaaccccgactcccaacccgcgaacgccgccgccgtctctacaaaatctaacgaacgcccaaaacacgacgaaaaaaacgataacgctacaacccccgccccgtaaaatttactaaataaccatttaacgcctctcgaaaaaaaaaaaaccgccgaaactaaaaaaaaaaaaaaaacgaaaccgaacgcacgaacaccgctaccacgccgacaacgcactcccaaactcctccgaccgaatttacacaaacaaaacgccctaaaaaaacttttcccgaaaaaaaattaaaaaaactaatctctcttttcccac

SEQ ID NO: 14729 - DNA, 752 bp, Artificial Sequence
  chemically treated genomic DNA (Homo sapiens) CpG-island No: 14729
cgtgggaacgagaagatatttatggaggagtcggtagagtaggtatagcggcgcgacgagatgttgttttttagagttgttgtttaatttgtattcgcgtgggaattagaagatattcgtggaggagtcggtagagtaggtatagcggcgcgacgagattcgcgtgggaagaaatagatatttttggaggagtcggtagagtaggtatagcggcgcgacgagattcgcgtgggaacgagaagatatttttggaggcgtcggtagagtaggtagattaaggagtttattttttcggagttgttgtttaatttgtattcgcgtgggaacgagaagatattcgtggaggagtcggtagagtaggtatagcggcgcgacgagatgttgttttttagagttgttgtttaatttgtattcgcgtgggaacgagaagatattcgtggaggagtcggtagagtaggtatagcggcgcgacgagatgttgttttttagagttgttgtttaatttgtattcgtttgggaattagaagatattcgtggaggagtcggtagagtaggtatagcggcgcgacgagattcgcgtgggaagaaatagatatttttggaggagtcggtagagtaggtatagcggcgcgacgagattcgcgtgggaacgagaagatattcgtggaggagtcggtagagtaggtagattaaggagtttattttttcggagttgttgtttaatttgtattcgcgtagggataagaagatat

SEQ ID NO: 14730 - DNA, 752 bp, Artificial Sequence
  chemically treated genomic DNA (Homo sapiens) CpG-island No: 14730
atatcttcttatccctacgcgaatacaaattaaacaacaactccgaaaaaataaactccttaatctacctactctaccgactcctccacgaatatcttctcgttcccacgcgaatctcgtcgcgccgctatacctactctaccgactcctccaaaaatatctatttcttcccacgcgaatctcgtcgcgccgctatacctactctaccgactcctccacgaatatcttctaattcccaaacgaatacaaattaaacaacaactctaaaaaacaacatctcgtcgcgccgctatacctactctaccgactcctccacgaatatcttctcgttcccacgcgaatacaaattaaacaacaactctaaaaaacaacatctcgtcgcgccgctatacctactctaccgactcctccacgaatatcttctcgttcccacgcgaatacaaattaaacaacaactccgaaaaaataaactccttaatctacctactctaccgacgcctccaaaaatatcttctcgttcccacgcgaatctcgtcgcgccgctatacctactctaccgactcctccaaaaatatctatttcttcccacgcgaatctcgtcgcgccgctatacctactctaccgactcctccacgaatatcttctaattcccacgcgaatacaaattaaacaacaactctaaaaaacaacatctcgtcgcgccgctatacctactctaccgactcctccataaatatcttctcgttcccacg

SEQ ID NO: 14731 - DNA, 752 bp, Artificial Sequence
  chemically treated genomic DNA (Homo sapiens) CpG-island No: 14731
gtgtttttttgtttttacgcgagtgtaggttggatagtagtttcgagaagatgaattttttggtttgtttgttttgtcgatttttttacgagtgttttttcgtttttacgcgagtttcgtcgcgtcgttgtgtttgttttgtcgatttttttaggagtgtttatttttttttacgcgagtttcgtcgcgtcgttgtgtttgttttgtcgatttttttacgagtgttttttggtttttaagcgagtgtaggttggatagtagttttgagaagtagtatttcgtcgcgtcgttgtgtttgttttgtcgatttttttacgagtgttttttcgtttttacgcgagtgtaggttggatagtagttttgagaagtagtatttcgtcgcgtcgttgtgtttattttgtcgatttttttacgagtgttttttcgtttttacgcgagtgtaggttggatagtagtttcgagaagatgaattttttggtttgtttgttttgtcgacgtttttaggagtgttttttcgtttttacgcgagtttcgtcgcgtcgttgtgtttgttttgtcgatttttttaggagtgtttatttttttttacgcgagtttcgtcgcgtcgttgtgtttgttttgtcgatttttttacgagtgttttttggtttttacgcgagtgtaggttggatagtagttttgagaagtagtatttcgtcgcgtcgttgtgtttattttgtcgatttttttatgagtgttttttcgtttttacg

SEQ ID NO: 14732 - DNA, 752 bp, Artificial Sequence
  chemically treated genomic DNA (Homo sapiens) CpG-island No: 14732
cgtaaaaacgaaaaaacactcataaaaaaatcgacaaaataaacacaacgacgcgacgaaatactacttctcaaaactactatccaacctacactcgcgtaaaaaccaaaaaacactcgtaaaaaaatcgacaaaacaaacacaacgacgcgacgaaactcgcgtaaaaaaaaataaacactcctaaaaaaatcgacaaaacaaacacaacgacgcgacgaaactcgcgtaaaaacgaaaaaacactcctaaaaacgtcgacaaaacaaacaaaccaaaaaattcatcttctcgaaactactatccaacctacactcgcgtaaaaacgaaaaaacactcgtaaaaaaatcgacaaaataaacacaacgacgcgacgaaatactacttctcaaaactactatccaacctacactcgcgtaaaaacgaaaaaacactcgtaaaaaaatcgacaaaacaaacacaacgacgcgacgaaatactacttctcaaaactactatccaacctacactcgcttaaaaaccaaaaaacactcgtaaaaaaatcgacaaaacaaacacaacgacgcgacgaaactcgcgtaaaaaaaaataaacactcctaaaaaaatcgacaaaacaaacacaacgacgcgacgaaactcgcgtaaaaacgaaaaaacactcgtaaaaaaatcgacaaaacaaacaaaccaaaaaattcatcttctcgaaactactatccaacctacactcgcgtaaaaacaaaaaaacac

SEQ ID NO: 14733 - DNA, 571 bp, Artificial Sequence
  chemically treated genomic DNA (Homo sapiens) CpG-island No: 14733
  unsure (203)
cgtcgcgtattttttaggttagttttacgcgtggttattttttagggagattcgttcgtcggcgtttcgcggttatcgcgggggaatggcgtttagtttcgggttaatgagagtagcggaattttttttatttagcgcggggttaggtttttgttcggaaaggggcggggcgtcgcgtcgggggtggggtcgtcgcgcgcggngggagagggcggggtcggtttttttgtttggttaatcggcgtcgcgttcggggggggagagggggggtttaggttttttttttttttcgcgcggggattaatttcgattttataagtttgaatttttgttattttcggattagcgagcgcgttcgaggaggtatttcgtcgcgtcggttttaggggtaggagcggttttaatttttttcgcgtcgggcgttaggttgttgtcgtcgcgttttcgatttcgtttttaatttatttttattttcgcgtggaaatttttttagggaaagcgtgattttttatttatagtttttttcgaggtgcggagagtaaatttgagaagggagaggaagtattcggtt

SEQ ID NO: 14734 - DNA, 571 bp, Artificial Sequence
  chemically treated genomic DNA (Homo sapiens) CpG-island No: 14734
  unsure (369)
aaccgaatacttcctctcccttctcaaatttactctccgcacctcgaaaaaaactataaataaaaaatcacgctttccctaaaaaaatttccacgcgaaaataaaaataaattaaaaacgaaatcgaaaacgcgacgacaacaacctaacgcccgacgcgaaaaaaattaaaaccgctcctacccctaaaaccgacgcgacgaaatacctcctcgaacgcgctcgctaatccgaaaataacaaaaattcaaacttataaaatcgaaattaatccccgcgcgaaaaaaaaaaaaaacctaaaccccccctctccccccccgaacgcgacgccgattaaccaaacaaaaaaaccgaccccgccctctcccnccgcgcgcgacgaccccacccccgacgcgacgccccgcccctttccgaacaaaaacctaaccccgcgctaaataaaaaaaattccgctactctcattaacccgaaactaaacgccattcccccgcgataaccgcgaaacgccgacgaacgaatctccctaaaaaataaccacgcgtaaaactaacctaaaaaatacgcgacg

SEQ ID NO: 14735 - DNA, 571 bp, Artificial Sequence
  chemically treated genomic DNA (Homo sapiens) CpG-island No: 14735
  unsure (369)
ggtcgggtgttttttttttttttttaagtttatttttcgtatttcggagagggttgtaggtgagggattacgttttttttagagaggtttttacgcgaaaatgggggtgggttgggggcgggatcgggggcgcggcggtagtagtttgacgttcggcgcgggaagggttaaagtcgtttttgtttttggagtcggcgcggcggggtattttttcgggcgcgttcgttagttcgagggtggtaaaagtttaagtttgtaaagtcgggattggttttcgcgcggaggggaaaaaaggtttgggtttttttttttttttttcgggcgcggcgtcgattggttaggtagaggggtcggtttcgtttttttttntcgcgcgcggcggttttattttcggcgcggcgtttcgttttttttcgggtaggagtttggtttcgcgttgaatgaaagaaatttcgttatttttattggttcggggttgggcgttattttttcgcggtgatcgcggggcgtcggcgggcgggtttttttggagagtgattacgcgtggagttagtttggggagtgcgcggcg

SEQ ID NO: 14736 - DNA, 571 bp, Artificial Sequence
  chemically treated genomic DNA (Homo sapiens) CpG-island No: 14736
  unsure (203)
cgccgcgcactccccaaactaactccacgcgtaatcactctccaaaaaaacccgcccgccgacgccccgcgatcaccgcgaaaaaataacgcccaaccccgaaccaataaaaataacgaaatttctttcattcaacgcgaaaccaaactcctacccgaaaaaaaacgaaacgccgcgccgaaaataaaaccgccgcgcgcganaaaaaaaaacgaaaccgacccctctacctaaccaatcgacgccgcgcccgaaaaaaaaaaaaaaaaacccaaaccttttttcccctccgcgcgaaaaccaatcccgactttacaaacttaaacttttaccaccctcgaactaacgaacgcgcccgaaaaaataccccgccgcgccgactccaaaaacaaaaacgactttaacccttcccgcgccgaacgtcaaactactaccgccgcgcccccgatcccgcccccaacccacccccattttcgcgtaaaaacctctctaaaaaaaacgtaatccctcacctacaaccctctccgaaatacgaaaaataaacttaaaaaaaaaaaaaaaacacccgacc

SEQ ID NO: 14737 - DNA, 706 bp, Artificial Sequence
  chemically treated genomic DNA (Homo sapiens) CpG-island No: 14737
aaggttcgtcggtttatgtggggtttttttggcggcgcgtcgtttgtagtttttttaaagcgcgggggttggagttgttgagtagtttcgtcgttgtggtttatgtagtcgttggtcgcgcgcggattgcggttcggcgtgcgcgtgttttcggtcgtttcgtttcggcgagtttttttatgttgtcgttttgcggcgttttttcgacgataggttgtgcgcggtttgtacggcgtttcgcggcggagttttatgtggggttgcgattcgcgtagtcggcgtttcgttgagggaacggattttcggtaatcggagatcgttttttttttatttttggcgttaaaggatatcgtatgtttaggtttaaacgttcggggttggtgcggcgattttggcgaagtcgtgtggttttcgatcgggaggaaggcggtagcggcggcggcggtggcggcgacgaggatgggagtttgggtagtcgagttgagtcggtttcgcgggtaagagagggcggaggttgcggtcgtttcgaagttcgttcggtagtttcgcggcggtttcgggacgtagtgggatagcgaggcgtttagggcgcggggaggcgtcggcgcgtagggggtttttcgaggtttatgtcggagttaggggtcggcgttgggagttttttgttggacgtggcggagtcgggaggttcgggttggttgttcga

SEQ ID NO: 14738 - DNA, 706 bp, Artificial Sequence
  chemically treated genomic DNA (Homo sapiens) CpG-island No: 14738
tcgaacaaccaacccgaacctcccgactccgccacgtccaacaaaaaactcccaacgccgacccctaactccgacataaacctcgaaaaaccccctacgcgccgacgcctccccgcgccctaaacgcctcgctatcccactacgtcccgaaaccgccgcgaaactaccgaacgaacttcgaaacgaccgcaacctccgccctctcttacccgcgaaaccgactcaactcgactacccaaactcccatcctcgtcgccgccaccgccgccgccgctaccgccttcctcccgatcgaaaaccacacgacttcgccaaaatcgccgcaccaaccccgaacgtttaaacctaaacatacgatatcctttaacgccaaaaataaaaaaaaaacgatctccgattaccgaaaatccgttccctcaacgaaacgccgactacgcgaatcgcaaccccacataaaactccgccgcgaaacgccgtacaaaccgcgcacaacctatcgtcgaaaaaacgccgcaaaacgacaacataaaaaaactcgccgaaacgaaacgaccgaaaacacgcgcacgccgaaccgcaatccgcgcgcgaccaacgactacataaaccacaacgacgaaactactcaacaactccaacccccgcgctttaaaaaaactacaaacgacgcgccgccaaaaaaaccccacataaaccgacgaacctt

SEQ ID NO: 14739 - DNA, 706 bp, Artificial Sequence
  chemically treated genomic DNA (Homo sapiens) CpG-island No: 14739
tcgggtagttagttcgggtttttcggtttcgttacgtttagtagggagtttttagcgtcggtttttggtttcgatatgggtttcggggggttttttgcgcgtcggcgttttttcgcgttttgggcgtttcgttgttttattgcgtttcggggtcgtcgcggggttatcgggcggatttcggagcggtcgtagttttcgtttttttttgttcgcggggtcggtttagttcggttgtttaagtttttattttcgtcgtcgttatcgtcgtcgtcgttgtcgtttttttttcggtcggggattatacgatttcgttaaagtcgtcgtattagtttcgagcgtttggatttgaatatacgatattttttggcgttaggggtgggggggaggcggttttcggttatcgggggttcgtttttttagcgaggcgtcggttgcgcgggtcgtagttttatatgaagtttcgtcgcggagcgtcgtgtagatcgcgtatagtttgtcgtcgaaggggcgtcgtagggcgataatatgagggagttcgtcgaggcgggacggtcgggaatacgcgtacgtcgagtcgtagttcgcgcgcggttagcggttatatggattatagcggcggggttgtttaataattttagttttcgcgttttaggggggttgtaggcggcgcgtcgttagaaagattttatatgggtcggcgagtttt

SEQ ID NO: 14740 - DNA, 706 bp, Artificial Sequence
  chemically treated genomic DNA (Homo sapiens) CpG-island No: 14740
aaaactcgccgacccatataaaatctttctaacgacgcgccgcctacaacccccctaaaacgcgaaaactaaaattattaaacaaccccgccgctataatccatataaccgctaaccgcgcgcgaactacgactcgacgtacgcgtattcccgaccgtcccgcctcgacgaactccctcatattatcgccctacgacgccccttcgacgacaaactatacgcgatctacacgacgctccgcgacgaaacttcatataaaactacgacccgcgcaaccgacgcctcgctaaaaaaacgaacccccgataaccgaaaaccgcctcccccccacccctaacgccaaaaaatatcgtatattcaaatccaaacgctcgaaactaatacgacgactttaacgaaatcgtataatccccgaccgaaaaaaaaacgacaacgacgacgacgataacgacgacgaaaataaaaacttaaacaaccgaactaaaccgaccccgcgaacaaaaaaaaacgaaaactacgaccgctccgaaatccgcccgataaccccgcgacgaccccgaaacgcaataaaacaacgaaacgcccaaaacgcgaaaaaacgccgacgcgcaaaaaaccccccgaaacccatatcgaaaccaaaaaccgacgctaaaaactccctactaaacgtaacgaaaccgaaaaacccgaactaactacccga

SEQ ID NO: 14741 - DNA, 595 bp, Artificial Sequence
  chemically treated genomic DNA (Homo sapiens) CpG-island No: 14741
gtgattgcgagacggtgatttgttgttttttttcggagcgggacgtcgtcggcgcgtttcgggacgttagcgattttttggtcggggcggttttggagtcggcgggcggcgggcggagtcgcgaagcgcgttcgcggttgttgttgttggagtaggaatttaaaatcgttacgtattcgttgttgaagcggtttaaggagcgttcgttggatacgttgttggaggcggtggagtttcgcggcggcgtgtcgggcggttgcgtgttggtgtcgcgcgtcgattttcgtttgggcggttagttcgcgtcgtcgtagttgttgttcggtcgtttttttcgttggttcgatttgtagtacgtcgtggagttgaagtttttgtgcggttgttatagtttcgtcgtcgtcgtcgacggttttatcgtgtgttgtaatttttattattttagtcggttttgcgggttcggtgagcgcgttgcgtcggtcgggggggtttcgggttttcgtttttattttttttcgtgtttttttttttgtgatattgcgggtcggcgtagttgcgggtgttttttcgggtgtttttggagcgtgggagttat

SEQ ID NO: 14742 - DNA, 595 bp, Artificial Sequence
  chemically treated genomic DNA (Homo sapiens) CpG-island No: 14742
ataactcccacgctccaaaaacacccgaaaaaacacccgcaactacgccgacccgcaatatcacaaaaaaaaaaacacgaaaaaaaataaaaacgaaaacccgaaacccccccgaccgacgcaacgcgctcaccgaacccgcaaaaccgactaaaataataaaaattacaacacacgataaaaccgtcgacgacgacgacgaaactataacaaccgcacaaaaacttcaactccacgacgtactacaaatcgaaccaacgaaaaaaacgaccgaacaacaactacgacgacgcgaactaaccgcccaaacgaaaatcgacgcgcgacaccaacacgcaaccgcccgacacgccgccgcgaaactccaccgcctccaacaacgtatccaacgaacgctccttaaaccgcttcaacaacgaatacgtaacgattttaaattcctactccaacaacaacaaccgcgaacgcgcttcgcgactccgcccgccgcccgccgactccaaaaccgccccgaccaaaaaatcgctaacgtcccgaaacgcgccgacgacgtcccgctccgaaaaaaaacaacaaatcaccgtctcgcaatcac

SEQ ID NO: 14743 - DNA, 595 bp, Artificial Sequence
  chemically treated genomic DNA (Homo sapiens) CpG-island No: 14743
gtggtttttacgttttaagggtattcgggggagtattcgtagttgcgtcgattcgtagtgttatagagagaagggtacggaaggggatggggacggggattcggggttttttcggtcggcgtagcgcgtttatcgggttcgtagagtcggttgaagtggtaggggttgtagtatacggtagggtcgtcggcggcggcggcgaagttgtggtagtcgtataggggttttagttttacggcgtgttgtaggtcgggttagcgaaagaggcggtcgagtagtagttgcggcggcgcgggttggtcgtttaggcggaggtcggcgcgcggtattagtacgtagtcgttcggtacgtcgtcgcgggattttatcgtttttagtagcgtgtttagcgagcgttttttgagtcgttttagtagcgagtacgtgacggttttgagtttttgttttagtagtagtagtcgcgagcgcgtttcgcgatttcgttcgtcgttcgtcggttttagggtcgtttcggttagggggtcgttggcgtttcggggcgcgtcggcggcgtttcgtttcgaaaagagatagtaggttatcgtttcgtagttat

SEQ ID NO: 14744 - DNA, 595 bp, Artificial Sequence
  chemically treated genomic DNA (Homo sapiens) CpG-island No: 14744
ataactacgaaacgataacctactatctcttttcgaaacgaaacgccgccgacgcgccccgaaacgccaacgaccccctaaccgaaacgaccctaaaaccgacgaacgacgaacgaaatcgcgaaacgcgctcgcgactactactactaaaacaaaaactcaaaaccgtcacgtactcgctactaaaacgactcaaaaaacgctcgctaaacacgctactaaaaacgataaaatcccgcgacgacgtaccgaacgactacgtactaataccgcgcgccgacctccgcctaaacgaccaacccgcgccgccgcaactactactcgaccgcctctttcgctaacccgacctacaacacgccgtaaaactaaaacccctatacgactaccacaacttcgccgccgccgccgacgaccctaccgtatactacaacccctaccacttcaaccgactctacgaacccgataaacgcgctacgccgaccgaaaaaaccccgaatccccgtccccatccccttccgtacccttctctctataacactacgaatcgacgcaactacgaatactcccccgaatacccttaaaacgtaaaaaccac

SEQ ID NO: 14745 - DNA, 956 bp, Artificial Sequence
  chemically treated genomic DNA (Homo sapiens) CpG-island No: 14745
acgcggttttgtttttttatcggtgtaaaggggtattcggcgtttttagggttttgggcgtcggaaatacgtgtgtgtttatttacgtgtatatacgtgagtatatttatagtagtagggggcgttcgggtcggtagggggtagtatagattcggtttgtaattattcggcgtagtttcgagggaggagggcgtgttgtagtttcggcggtagcggcggcggcggcggcggcggcggttggaggtgtagttttttaggtgggaggcgggggttgcgggcgtaggaaaaggcgttttgggagcgggcgttcggcggggttttttcgggtttcgggcgcggcgcggcgagtgggagcgagcgcgttaggattacgtaggcgttttgtttcggttggttttcggtcggcgcgcggcgcgggagtagttcgtagttcgtttttcgcgttttcggtagttttttggtagttcgtagtcgttcgttcggagtagtttttcggtagttcgcgtaggtcgtcggttcgggagagcgcgcggcggcggcggcggcgggacggtttcgagcgcgttttttcgtttgcggttattcgtagtcggcgttggtcgggtcggcgcgtttcgtaggcggttagagcgcggtttcggtttcggcgcgggtttgtttcgggtcgtagttcgcgagaggcggcgcgggcggtcgagggtattgacggcgtcgcgggacgttttcgggcggcggcgtagcggtagcggtagcggtagcggtagcgtagggggcggaggtagggggcgtttttagttaggatgttgcggtttttgcgtcggatttttggtcgtcgttttatgtagcgttacgcgcggggcgcggcggggcgcggggtcgtcgggttggggaataagttattttgtttgtttagtgaaaaaggtggttttgggtttgttaattaatgatattttttt

SEQ ID NO: 14746 - DNA, 956 bp, Artificial Sequence
  chemically treated genomic DNA (Homo sapiens) CpG-island No: 14746
aaaaaaatatcattaattaacaaacccaaaaccacctttttcactaaacaaacaaaataacttattccccaacccgacgaccccgcgccccgccgcgccccgcgcgtaacgctacataaaacgacgaccaaaaatccgacgcaaaaaccgcaacatcctaactaaaaacgccccctacctccgccccctacgctaccgctaccgctaccgctaccgctacgccgccgcccgaaaacgtcccgcgacgccgtcaataccctcgaccgcccgcgccgcctctcgcgaactacgacccgaaacaaacccgcgccgaaaccgaaaccgcgctctaaccgcctacgaaacgcgccgacccgaccaacgccgactacgaataaccgcaaacgaaaaaacgcgctcgaaaccgtcccgccgccgccgccgccgcgcgctctcccgaaccgacgacctacgcgaactaccgaaaaactactccgaacgaacgactacgaactaccaaaaaactaccgaaaacgcgaaaaacgaactacgaactactcccgcgccgcgcgccgaccgaaaaccaaccgaaacaaaacgcctacgtaatcctaacgcgctcgctcccactcgccgcgccgcgcccgaaacccgaaaaaaccccgccgaacgcccgctcccaaaacgccttttcctacgcccgcaacccccgcctcccacctaaaaaactacacctccaaccgccgccgccgccgccgccgccgctaccgccgaaactacaacacgccctcctccctcgaaactacgccgaataattacaaaccgaatctatactaccccctaccgacccgaacgccccctactactataaatatactcacgtatatacacgtaaataaacacacacgtatttccgacgcccaaaaccctaaaaacgccgaatacccctttacaccgataaaaaaacaaaaccgcgt

SEQ ID NO: 14747 - DNA, 956 bp, Artificial Sequence
  chemically treated genomic DNA (Homo sapiens) CpG-island No: 14747
aggaaagtgttattggttggtaaatttaaggttattttttttattgagtaggtagaatggtttgttttttagttcggcggtttcgcgtttcgtcgcgtttcgcgcgtagcgttgtatggagcggcggttaaaggttcggcgtaggaatcgtagtattttggttgggggcgttttttgttttcgttttttgcgttgtcgttgtcgttgtcgttgtcgttgcgtcgtcgttcgggagcgtttcgcgacgtcgttagtgttttcggtcgttcgcgtcgtttttcgcgggttacggttcggggtaagttcgcgtcgaggtcgaggtcgcgttttagtcgtttgcggggcgcgtcggttcggttagcgtcggttgcgagtggtcgtaggcgggagggcgcgttcggggtcgtttcgtcgtcgtcgtcgtcgcgcgttttttcgggtcggcggtttgcgcgggttgtcgaggggttgtttcggacgggcggttgcgggttgttagggggttgtcgggggcgcgggaggcgggttgcgggttgttttcgcgtcgcgcgtcggtcgagggttagtcggagtagggcgtttgcgtggttttggcgcgttcgtttttattcgtcgcgtcgcgttcggggttcgaggaggtttcgtcgagcgttcgtttttaaggcgtttttttttgcgttcgtagttttcgttttttatttgggaggttgtatttttagtcgtcgtcgtcgtcgtcgtcgtcgttgtcgtcgggattgtagtacgtttttttttttcggggttgcgtcgggtaattgtaagtcgggtttgtgttgttttttgtcggttcgagcgttttttgttgttgtaggtgtgtttacgtgtgtatacgtaggtgagtatatacgtgttttcggcgtttagagttttggaggcgtcgagtgtttttttgtatcgataggaaaataaggtcgcgt

SEQ ID NO: 14748 - DNA, 956 bp, Artificial Sequence
  chemically treated genomic DNA (Homo sapiens) CpG-island No: 14748
acgcgaccttattttcctatcgatacaaaaaaacactcgacgcctccaaaactctaaacgccgaaaacacgtatatactcacctacgtatacacacgtaaacacacctacaacaacaaaaaacgctcgaaccgacaaaaaacaacacaaacccgacttacaattacccgacgcaaccccgaaaaaaaaaaacgtactacaatcccgacgacaacgacgacgacgacgacgacgacgactaaaaatacaacctcccaaataaaaaacgaaaactacgaacgcaaaaaaaaacgccttaaaaacgaacgctcgacgaaacctcctcgaaccccgaacgcgacgcgacgaataaaaacgaacgcgccaaaaccacgcaaacgccctactccgactaaccctcgaccgacgcgcgacgcgaaaacaacccgcaacccgcctcccgcgcccccgacaaccccctaacaacccgcaaccgcccgtccgaaacaacccctcgacaacccgcgcaaaccgccgacccgaaaaaacgcgcgacgacgacgacgacgaaacgaccccgaacgcgccctcccgcctacgaccactcgcaaccgacgctaaccgaaccgacgcgccccgcaaacgactaaaacgcgacctcgacctcgacgcgaacttaccccgaaccgtaacccgcgaaaaacgacgcgaacgaccgaaaacactaacgacgtcgcgaaacgctcccgaacgacgacgcaacgacaacgacaacgacaacgacaacgcaaaaaacgaaaacaaaaaacgcccccaaccaaaatactacgattcctacgccgaacctttaaccgccgctccatacaacgctacgcgcgaaacgcgacgaaacgcgaaaccgccgaactaaaaaacaaaccattctacctactcaataaaaaaaataaccttaaatttaccaaccaataacactttcct

SEQ ID NO: 14749 - DNA, 1215 bp, Artificial Sequence
  chemically treated genomic DNA (Homo sapiens) CpG-island No: 14749
ttcgcgcgcggttagttgtagtcgtcggcgagtcgattggggaggggtgtggacgtcgaggttcgcggagtggtgttcgtagttttatttatataacgttttaatttttttttcgggggggatttgcggagttattcggagtagattattttattatcgtttatggtgcgcgcgtttcgggtttcgggtcgggtagttgaggggcggcgggcgcgttttcgatatagtcgacgtttgtcgagcgcgtagtggcgagaatttagtttttttggtcgcgtatttcggacggattgggcggatagattttacggtgcgcgggttttacgagttcgagttttttttttgtaggtttacgaatttgaatagaacgcgagtcggggtcgcgggcgcgtcggtttttttttagtgcgttcgtttcgtttttagacgtgtcgtttcgttagttgttttagtagcgttcggatttagcgggattttgtttcgattcggtgtcggagtttttgttttttgcgtttcgttttttagggataagatttttttagagcgtttttcgaaatagatatagcgttgtttatatatatatatatatatatatatatatataatgtttcgcgcggtgttcgttcgttcgtttattcgttttcggtttcgatgcgttcggagcgatttttttttttttttttcgggggagggtgggttatttcgcggcgttcggtgaacgtcgaggaaaggggaagtcgcgagtcgtttacgggtagcgggcgcggggttggtttcgggttatagagggagtcgtagggttggtagcgaagcgcggggcgtttttgagcggcgggcgtagggaggtcgtaggttaagtcggagggtgggttcgttttcgcggtcgtcgaagagggcggggagtagtagaggaacgaggcgtttggcggtttggtttttgggagggatttcgttgtttcgttttttcgcgtttttttttcgtcgttttttttatttcggggttcgcggtaggttttgagcggttcggttttagatttcgatttttttttttttttttcggtcgtcgggtttttttttttttttttttttttttttttttttacgtttaggttcggtttcggtttttgtttagattttttttgaaatttcgtcggagtgtttttagttaaaataataagggtcgggggaggagacggacgaagggagggagtaagg

SEQ ID NO: 14750 - DNA, 1215 bp, Artificial Sequence
  chemically treated genomic DNA (Homo sapiens) CpG-island No: 14750
ccttactccctcccttcgtccgtctcctcccccgacccttattattttaactaaaaacactccgacgaaatttcaaaaaaaatctaaacaaaaaccgaaaccgaacctaaacgtaaaaaaaaaaaaaaaaaaaaaaaaaaaaaaaaacccgacgaccgaaaaaaaaaaaaaaaaatcgaaatctaaaaccgaaccgctcaaaacctaccgcgaaccccgaaataaaaaaaacgacgaaaaaaaaacgcgaaaaaacgaaacaacgaaatccctcccaaaaaccaaaccgccaaacgcctcgttcctctactactccccgccctcttcgacgaccgcgaaaacgaacccaccctccgacttaacctacgacctccctacgcccgccgctcaaaaacgccccgcgcttcgctaccaaccctacgactccctctataacccgaaaccaaccccgcgcccgctacccgtaaacgactcgcgacttcccctttcctcgacgttcaccgaacgccgcgaaataacccaccctcccccgaaaaaaaaaaaaaaaaatcgctccgaacgcatcgaaaccgaaaacgaataaacgaacgaacgaacaccgcgcgaaacattatatatatatatatatatatatatatatataaacaacgctatatctatttcgaaaaacgctctaaaaaaatcttatccctaaaaaacgaaacgcaaaaaacaaaaactccgacaccgaatcgaaacaaaatcccgctaaatccgaacgctactaaaacaactaacgaaacgacacgtctaaaaacgaaacgaacgcactaaaaaaaaaccgacgcgcccgcgaccccgactcgcgttctattcaaattcgtaaacctacaaaaaaaaaactcgaactcgtaaaacccgcgcaccgtaaaatctatccgcccaatccgtccgaaatacgcgaccaaaaaaactaaattctcgccactacgcgctcgacaaacgtcgactatatcgaaaacgcgcccgccgcccctcaactacccgacccgaaacccgaaacgcgcgcaccataaacgataataaaataatctactccgaataactccgcaaatcccccccgaaaaaaaaattaaaacgttatataaataaaactacgaacaccactccgcgaacctcgacgtccacacccctccccaatcgactcgccgacgactacaactaaccgcgcgcgaa

SEQ ID NO: 14751 - DNA, 1215 bp, Artificial Sequence
  chemically treated genomic DNA (Homo sapiens) CpG-island No: 14751
ttttgtttttttttttcgttcgttttttttttcggtttttgttgttttggttggaagtatttcggcggagttttagagaaagtttgggtagaaatcggagtcgggtttgaacgtgggaaggggaggaggagagggaggaagaaggagttcggcggtcgggagagggagggagggatcgggatttggggtcgagtcgtttaggatttgtcgcgagtttcggggtgggggaggcggcgggggaggagcgcgaggggacgggatagcgggattttttttaggagttaagtcgttaagcgtttcgtttttttgttgtttttcgtttttttcggcggtcgcgagagcggatttatttttcggtttgatttgcgatttttttgcgttcgtcgtttagaaacgtttcgcgtttcgttgttaattttgcggttttttttgtgattcgggattagtttcgcgttcgttgttcgtaggcggttcgcggtttttttttttttcggcgtttatcgagcgtcgcgaagtgatttattttttttcgaggagagggaaggaggatcgtttcgggcgtatcgaaatcgagggcgggtgggcgggcgagcgggtatcgcgcggggtattgtgtgtgtgtgtgtgtgtgtgtgtgtgtgtgagtagcgttgtgtttgtttcggaaagcgttttggggaggttttgtttttagggggcggagcgtaaaggatagaagtttcggtatcgagtcggggtagagtttcgttgagttcgagcgttgttgaggtagttggcgagacggtacgtttggaggcgaggcgggcgtattgaaaggaggtcggcgcgttcgcggtttcggttcgcgttttgtttaggttcgtgggtttgtagaggagagattcgaattcgtggaattcgcgtatcgtggagtttgttcgtttagttcgttcggggtgcgcgattaggagagttaggttttcgttattgcgcgttcggtaggcgtcggttgtgtcgggagcgcgttcgtcgttttttagttgttcggttcggagttcgagacgcgcgtattatgagcggtggtgaagtggtttgtttcggatggtttcgtaagtttttttcggagaaaaagttgaagcgttatgtaagtagagttgcgggtattatttcgcgggtttcggcgtttatatttttttttagtcggttcgtcggcggttgtagttggtcgcgcgcggg

SEQ ID NO: 14752 - DNA, 1215 bp, Artificial Sequence
  chemically treated genomic DNA (Homo sapiens) CpG-island No: 14752
cccgcgcgcgaccaactacaaccgccgacgaaccgactaaaaaaaaatataaacgccgaaacccgcgaaataatacccgcaactctacttacataacgcttcaactttttctccgaaaaaaacttacgaaaccatccgaaacaaaccacttcaccaccgctcataatacgcgcgtctcgaactccgaaccgaacaactaaaaaacgacgaacgcgctcccgacacaaccgacgcctaccgaacgcgcaataacgaaaacctaactctcctaatcgcgcaccccgaacgaactaaacgaacaaactccacgatacgcgaattccacgaattcgaatctctcctctacaaacccacgaacctaaacaaaacgcgaaccgaaaccgcgaacgcgccgacctcctttcaatacgcccgcctcgcctccaaacgtaccgtctcgccaactacctcaacaacgctcgaactcaacgaaactctaccccgactcgataccgaaacttctatcctttacgctccgccccctaaaaacaaaacctccccaaaacgctttccgaaacaaacacaacgctactcacacacacacacacacacacacacacacacaataccccgcgcgatacccgctcgcccgcccacccgccctcgatttcgatacgcccgaaacgatcctccttccctctcctcgaaaaaaaataaatcacttcgcgacgctcgataaacgccgaaaaaaaaaaaaaccgcgaaccgcctacgaacaacgaacgcgaaactaatcccgaatcacaaaaaaaaccgcaaaattaacaacgaaacgcgaaacgtttctaaacgacgaacgcaaaaaaatcgcaaatcaaaccgaaaaataaatccgctctcgcgaccgccgaaaaaaacgaaaaacaacaaaaaaacgaaacgcttaacgacttaactcctaaaaaaaatcccgctatcccgtcccctcgcgctcctcccccgccgcctcccccaccccgaaactcgcgacaaatcctaaacgactcgaccccaaatcccgatccctccctccctctcccgaccgccgaactccttcttcctccctctcctcctccccttcccacgttcaaacccgactccgatttctacccaaactttctctaaaactccgccgaaatacttccaaccaaaacaacaaaaaccgaaaaaaaaaacgaacgaaaaaaaaaaacaaaa

SEQ ID NO: 14753 - DNA, 722 bp, Artificial Sequence
  chemically treated genomic DNA (Homo sapiens) CpG-island No: 14753
tatttttattatttatttttttacgtttttgttgttttttttttttttcgggcggtttcgtttttaatatatttgtttatttttacggttgttagacgttaggtgtttacgttgtattttatttcgcgtttttttaattcgattggcgtttttttgttcgtttcgaaggttagtttgttcggagtattttttgttttttattttcgtgtttattcgtagatttttttttagtttttattttcgcgggcgtcgggagagaaattagtatcgtatttggcgagagttcggcggtcgttgcgagtagtaggagagtttggcggagcgttgagtagagcgttcgggttatcgttattaggcggtcgcgtcggggttgcgaggttttagagtagagcgaggtagtcggggtagtacggttcgttttgaagttttcgggtcgcgggaggggagcgcggtatcgatatttttttgaagtgcgcggttggttttagttagtgtgggcgttttttttttcggtcgtttttattttacgttttttgcggttggcggtgcgcggcgtttttgttattggtttcgtagtcgggcggggagcgggtggtggggcgggcggtagagttcgtttttgtcgcgttttcgttttttgcgttttttcgtagtcgttcgggtttgttgttgtagggtaggtaggtaaaggcggttttgtgttcggtagtgagatcgtttag

SEQ ID NO: 14754 - DNA, 722 bp, Artificial Sequence
  chemically treated genomic DNA (Homo sapiens) CpG-island No: 14754
ctaaacgatctcactaccgaacacaaaaccgcctttacctacctaccctacaacaacaaacccgaacgactacgaaaaaacgcaaaaaacgaaaacgcgacaaaaacgaactctaccgcccgccccaccacccgctccccgcccgactacgaaaccaataacaaaaacgccgcgcaccgccaaccgcaaaaaacgtaaaataaaaacgaccgaaaaaaaaaacgcccacactaactaaaaccaaccgcgcacttcaaaaaaatatcgataccgcgctcccctcccgcgacccgaaaacttcaaaacgaaccgtactaccccgactacctcgctctactctaaaacctcgcaaccccgacgcgaccgcctaataacgataacccgaacgctctactcaacgctccgccaaactctcctactactcgcaacgaccgccgaactctcgccaaatacgatactaatttctctcccgacgcccgcgaaaataaaaactaaaaaaaaatctacgaataaacacgaaaataaaaaacaaaaaatactccgaacaaactaaccttcgaaacgaacaaaaaaacgccaatcgaattaaaaaaacgcgaaataaaatacaacgtaaacacctaacgtctaacaaccgtaaaaataaacaaatatattaaaaacgaaaccgcccgaaaaaaaaaaaaaacaacaaaaacgtaaaaaaataaataataaaaata

SEQ ID NO: 14755 - DNA, 722 bp, Artificial Sequence
  chemically treated genomic DNA (Homo sapiens) CpG-island No: 14755
ttgggcgattttattgtcgggtatagggtcgtttttgtttgtttgttttgtagtagtaggttcgggcggttgcgagagggcgtagggggcggaggcgcggtaggggcgggttttgtcgttcgttttattattcgtttttcgttcggttgcggggttagtggtaggagcgtcgcgtatcgttagtcgtagggggcgtgggatgggggcggtcggggaggggggcgtttatattgattagagttaatcgcgtattttaaaagggtgtcggtgtcgcgtttttttttcgcggttcgggaattttaaagcgggtcgtgttgtttcggttgtttcgttttgttttggggtttcgtagtttcggcgcggtcgtttggtggcgatgattcgggcgttttgtttagcgtttcgttaggtttttttgttgttcgtagcggtcgtcgagttttcgttaggtacggtgttggtttttttttcgacgttcgcgagggtgggagttgggaggaggtttgcgggtgagtacgggggtgggggatagggggtgtttcgagtaaattgattttcggggcggatagggaagcgttagtcggattgagggggcgcgggatagggtgtagcgtgggtatttgacgtttggtagtcgtaggggtagataggtgtgttggggacgaagtcgttcggaagagggaaaaggtagtagggacgtgggggaataagtagtaggggtg

SEQ ID NO: 14756 - DNA, 722 bp, Artificial Sequence
  chemically treated genomic DNA (Homo sapiens) CpG-island No: 14756
cacccctactacttattcccccacgtccctactaccttttccctcttccgaacgacttcgtccccaacacacctatctacccctacgactaccaaacgtcaaatacccacgctacaccctatcccgcgccccctcaatccgactaacgcttccctatccgccccgaaaatcaatttactcgaaacaccccctatcccccacccccgtactcacccgcaaacctcctcccaactcccaccctcgcgaacgtcgaaaaaaaaaccaacaccgtacctaacgaaaactcgacgaccgctacgaacaacaaaaaaacctaacgaaacgctaaacaaaacgcccgaatcatcgccaccaaacgaccgcgccgaaactacgaaaccccaaaacaaaacgaaacaaccgaaacaacacgacccgctttaaaattcccgaaccgcgaaaaaaaaacgcgacaccgacacccttttaaaatacgcgattaactctaatcaatataaacgcccccctccccgaccgcccccatcccacgccccctacgactaacgatacgcgacgctcctaccactaaccccgcaaccgaacgaaaaacgaataataaaacgaacgacaaaacccgcccctaccgcgcctccgccccctacgccctctcgcaaccgcccgaacctactactacaaaacaaacaaacaaaaacgaccctatacccgacaataaaatcgcccaa

SEQ ID NO: 14757 - DNA, 673 bp, Artificial Sequence
  chemically treated genomic DNA (Homo sapiens) CpG-island No: 14757
gcgggcggggagttttttttcggagaaaaaattttaataagcggagagggtataaaggttttttacgtcgcgtttcgagttttttcggtattttaagggcggttcggggtggtgggaaagcgttaagttttgggagtgcgtcggtgggttcgggacggcggggttttcgttagggtttttggttttcgatgatttcggttgagatcgcgagtcgcgcggcggaaagcggaggaattttcgttcggttttgtagtcgttcgtatcgcgtttcgttattcgtcgttttttcgcgttcgggcgttttagtcgcggggtttcggaagtttttggtttttggttttttttgtttggttcggggcggttggtcgtggacgcgtttcgattttagtttttttcgtttagtcgttcgttttaggatgtttttttatcgtagtttcgtcgtggttaggaggtgtgggcggttacgttcggagggtttacggtggtttcggacgttcgttttttttaggttttggttcgggtcggggtgggtcgggacggtttttggtgtttaggtttttttttttttaggtttttttcgtacgtgttggtttcgattgtcgtgggattcggtttttgttttaggcgggatatggtcggttgtagcgtttggcgggggtttggtttttaggtt

SEQ ID NO: 14758 - DNA, 673 bp, Artificial Sequence
  chemically treated genomic DNA (Homo sapiens) CpG-island No: 14758
aacctaaaaaccaaacccccgccaaacgctacaaccgaccatatcccgcctaaaacaaaaaccgaatcccacgacaatcgaaaccaacacgtacgaaaaaaacctaaaaaaaaaaaaacctaaacaccaaaaaccgtcccgacccaccccgacccgaaccaaaacctaaaaaaaacgaacgtccgaaaccaccgtaaaccctccgaacgtaaccgcccacacctcctaaccacgacgaaactacgataaaaaaacatcctaaaacgaacgactaaacgaaaaaaactaaaatcgaaacgcgtccacgaccaaccgccccgaaccaaacaaaaaaaaccaaaaaccaaaaacttccgaaaccccgcgactaaaacgcccgaacgcgaaaaaacgacgaataacgaaacgcgatacgaacgactacaaaaccgaacgaaaattcctccgctttccgccgcgcgactcgcgatctcaaccgaaatcatcgaaaaccaaaaaccctaacgaaaaccccgccgtcccgaacccaccgacgcactcccaaaacttaacgctttcccaccaccccgaaccgcccttaaaataccgaaaaaactcgaaacgcgacgtaaaaaacctttataccctctccgcttattaaaattttttctccgaaaaaaaactccccgcccgc

SEQ ID NO: 14759 - DNA, 673 bp, Artificial Sequence
  chemically treated genomic DNA (Homo sapiens) CpG-island No: 14759
gatttgggggttaggttttcgttaggcgttgtaatcggttatgtttcgtttggggtaggggtcgggttttacggtagtcggggttagtacgtacgaagaaagtttgaaaaaaaaaaggtttaagtattaggaatcgtttcggtttatttcggttcgggttagggtttaggaagggcgggcgttcggagttatcgtgggtttttcgggcgtggtcgtttatattttttggttacggcggggttgcggtgggggaatattttggggcgggcggttggacggaagggattagagtcggggcgcgtttacggttaatcgtttcgaattaagtaggggaggttagggattaggagttttcggggtttcgcggttggagcgttcggacgcgaaggggcggcgggtgacggggcgcggtgcgggcggttatagggtcggacgggagttttttcgtttttcgtcgcgcggttcgcggttttagtcgaggttatcgagggttaggagttttggcggaggtttcgtcgtttcggatttatcgacgtatttttagggtttggcgtttttttattatttcggatcgtttttggggtgtcggaggggttcggggcgcggcgtggggagtttttgtgtttttttcgtttgttgaggtttttttttcggaggagagtttttcgttcgt

SEQ ID NO: 14760 - DNA, 673 bp, Artificial Sequence
  chemically treated genomic DNA (Homo sapiens) CpG-island No: 14760
acgaacgaaaaactctcctccgaaaaaaaaacctcaacaaacgaaaaaaacacaaaaactccccacgccgcgccccgaacccctccgacaccccaaaaacgatccgaaataataaaaaaacgccaaaccctaaaaatacgtcgataaatccgaaacgacgaaacctccgccaaaactcctaaccctcgataacctcgactaaaaccgcgaaccgcgcgacgaaaaacgaaaaaactcccgtccgaccctataaccgcccgcaccgcgccccgtcacccgccgccccttcgcgtccgaacgctccaaccgcgaaaccccgaaaactcctaatccctaacctcccctacttaattcgaaacgattaaccgtaaacgcgccccgactctaatcccttccgtccaaccgcccgccccaaaatattcccccaccgcaaccccgccgtaaccaaaaaatataaacgaccacgcccgaaaaacccacgataactccgaacgcccgcccttcctaaaccctaacccgaaccgaaataaaccgaaacgattcctaatacttaaaccttttttttttcaaactttcttcgtacgtactaaccccgactaccgtaaaacccgacccctaccccaaacgaaacataaccgattacaacgcctaacgaaaacctaacccccaaatc

SEQ ID NO: 14761 - DNA, 777 bp, Artificial Sequence
  chemically treated genomic DNA (Homo sapiens) CpG-island No: 14761
gtcggcgcggaggaaggacgtcgcgcggtttaggtttcggttgcggttcggttcgcgagttgttgttcgcgaggttttcgcgatttcggtttggcgatttcgttttcgcgttttttttttagtttttttttttgcgttttttgttcgcggggttgcgtttcggatttcggttcgtttgttttcgtcggcggtcgcggtttttcggattcggcgttcgtcggggtcggcgggagtagcgtaggcgatcggcggcgggagtcggagttacgcgttttttcgtattttcggcgttagttcggttggagtcgtcgggattatggtgttggattaggaggacggtaggtgttcggcgttcggtgtcggtgttcgggggtacgcgggacgtggggcggagattgcggcgttggttttgcggagtttatttcgttagcggcggtagagtttttagtattcgcgggtttttttcggttgatgggtggtttttcggaagcgcggcggttgatgtgtgcgtcggtgtcggggtcgcggtgttaggtttagcgttcgggtttcggcggcggcgggattaggaagtttttcggttttaacgaggtcgttagttttgcgcgtttcggttgggaatttttttacggatttttgtcgttttgcgggtattcggagcgtttttgcgattcgtatcgcgggtttttcggtagtgtttattgttagttagttttttagtttttttgggtgtttgtacgtttttttttcgtattttattgcggaacggattttagt

SEQ ID NO: 14762 - DNA, 777 bp, Artificial Sequence
  chemically treated genomic DNA (Homo sapiens) CpG-island No: 14762
actaaaatccgttccgcaataaaatacgaaaaaaaaacgtacaaacacccaaaaaaactaaaaaactaactaacaataaacactaccgaaaaacccgcgatacgaatcgcaaaaacgctccgaatacccgcaaaacgacaaaaatccgtaaaaaaattcccaaccgaaacgcgcaaaactaacgacctcgttaaaaccgaaaaacttcctaatcccgccgccgccgaaacccgaacgctaaacctaacaccgcgaccccgacaccgacgcacacatcaaccgccgcgcttccgaaaaaccacccatcaaccgaaaaaaacccgcgaatactaaaaactctaccgccgctaacgaaataaactccgcaaaaccaacgccgcaatctccgccccacgtcccgcgtacccccgaacaccgacaccgaacgccgaacacctaccgtcctcctaatccaacaccataatcccgacgactccaaccgaactaacgccgaaaatacgaaaaaacgcgtaactccgactcccgccgccgatcgcctacgctactcccgccgaccccgacgaacgccgaatccgaaaaaccgcgaccgccgacgaaaacaaacgaaccgaaatccgaaacgcaaccccgcgaacaaaaaacgcaaaaaaaaaaactaaaaaaaaaacgcgaaaacgaaatcgccaaaccgaaatcgcgaaaacctcgcgaacaacaactcgcgaaccgaaccgcaaccgaaacctaaaccgcgcgacgtccttcctccgcgccgac

SEQ ID NO: 14763 - DNA, 777 bp, Artificial Sequence
  chemically treated genomic DNA (Homo sapiens) CpG-island No: 14763
gttgggattcgtttcgtagtagggtgcggaaggggaacgtgtagatatttagagaggttgggagattggttggtagtgggtattgtcgggaagttcgcggtgcgggtcgtagaggcgtttcggatgttcgtaaggcggtaagagttcgtgagaaagtttttagtcggagcgcgtagggttggcggtttcgttgggatcgggagattttttaatttcgtcgtcgtcgaagttcgggcgttgagtttggtatcgcgatttcggtatcggcgtatatattagtcgtcgcgttttcgggaagttatttattagtcggaggaggttcgcgggtgttgagggttttgtcgtcgttagcggggtggatttcgtagggttagcgtcgtagttttcgttttacgtttcgcgtgttttcgggtatcggtatcgggcgtcgggtatttatcgtttttttggtttaatattatggtttcgacggttttagtcggattagcgtcgaggatacggaggggcgcgtggtttcgattttcgtcgtcggtcgtttgcgttgttttcgtcggtttcggcgggcgtcgagttcggagagtcgcgatcgtcgacgggggtagacggatcggagttcggagcgtagtttcgcgggtagggagcgtaggaggagggattggggggaaggcgcgggggcgagatcgttaggtcgggatcgcgggagtttcgcgagtagtagttcgcgggtcgggtcgtagtcggagtttgagtcgcgcggcgtttttttttcgcgtcggt

SEQ ID NO: 14764 - DNA, 777 bp, Artificial Sequence
  chemically treated genomic DNA (Homo sapiens) CpG-island No: 14764
accgacgcgaaaaaaaaacgccgcgcgactcaaactccgactacgacccgacccgcgaactactactcgcgaaactcccgcgatcccgacctaacgatctcgcccccgcgccttccccccaatccctcctcctacgctccctacccgcgaaactacgctccgaactccgatccgtctacccccgtcgacgatcgcgactctccgaactcgacgcccgccgaaaccgacgaaaacaacgcaaacgaccgacgacgaaaatcgaaaccacgcgcccctccgtatcctcgacgctaatccgactaaaaccgtcgaaaccataatattaaaccaaaaaaacgataaatacccgacgcccgataccgatacccgaaaacacgcgaaacgtaaaacgaaaactacgacgctaaccctacgaaatccaccccgctaacgacgacaaaaccctcaacacccgcgaacctcctccgactaataaataacttcccgaaaacgcgacgactaatatatacgccgataccgaaatcgcgataccaaactcaacgcccgaacttcgacgacgacgaaattaaaaaatctcccgatcccaacgaaaccgccaaccctacgcgctccgactaaaaactttctcacgaactcttaccgccttacgaacatccgaaacgcctctacgacccgcaccgcgaacttcccgacaatacccactaccaaccaatctcccaacctctctaaatatctacacgttccccttccgcaccctactacgaaacgaatcccaac

SEQ ID NO: 14765 - DNA, 925 bp, Artificial Sequence
  chemically treated genomic DNA (Homo sapiens) CpG-island No: 14765
cgaagatcggtcgtttttttaaagcgcgtttcgagtcggcgtttttttttcggtcgagtttagttgcggttggatacggagcgttcgagatgatggtgttggataaggaggacggtaggtggcgggtcggggtttcgacgttttttattttttcgttttttgtcgcggcgcgtaggtatatatacgcggggatacgggcgtatatttgttgggttgtgcggggattgcggggcgggcggcgcgttgggggtcggggttggggcggggggaagtatcgggggatagtcgggcggaatttgcggggggaggaggtcgagtttcgggttgtacgcgttcggtcgtacgtttttcgggtttcggtcgcgagtcgaggagttgtgtattggtcgtgtgttgcgtcgcggggtcgcgcggaggttggggtttttttgcgattttcgtcgcggaggttcgttttgagtatttcgtgtttgaggttgttgtttttatcgtagttattattttcgcgttagtcgtcgcgtaattcgagaggcgttgagcgtcgagtaaattagcggtttcggggagaatcgggttttagagttcggggtaagcgggagcgcgggaggacggcgcgagcgttagggtgttcggtaggcgaggggaaggcgggttggatttttcgggggatatttgtatgagcgtgattcggtgagaaagagagtcgttttttgtgtcggttcgttagttttttgtttttttgagcgcggaggcgggagtttggtttagaggaagaaagtgtttcgtcgtcggtcggtagtatttgtgcgggagcggtttgcgagagtggtacggatttttcgtggtcgagttttagtgcgttttagaaaattgtagggtacgggaaaggtcggaatagaggagtttatggttgttggaagttatt

SEQ ID NO: 14766 - DNA, 925 bp, Artificial Sequence
  chemically treated genomic DNA (Homo sapiens) CpG-island No: 14766
aataacttccaacaaccataaactcctctattccgacctttcccgtaccctacaattttctaaaacgcactaaaactcgaccacgaaaaatccgtaccactctcgcaaaccgctcccgcacaaatactaccgaccgacgacgaaacactttcttcctctaaaccaaactcccgcctccgcgctcaaaaaaacaaaaaactaacgaaccgacacaaaaaacgactctctttctcaccgaatcacgctcatacaaatatcccccgaaaaatccaacccgccttcccctcgcctaccgaacaccctaacgctcgcgccgtcctcccgcgctcccgcttaccccgaactctaaaacccgattctccccgaaaccgctaatttactcgacgctcaacgcctctcgaattacgcgacgactaacgcgaaaataataactacgataaaaacaacaacctcaaacacgaaatactcaaaacgaacctccgcgacgaaaatcgcaaaaaaaccccaacctccgcgcgaccccgcgacgcaacacacgaccaatacacaactcctcgactcgcgaccgaaacccgaaaaacgtacgaccgaacgcgtacaacccgaaactcgacctcctccccccgcaaattccgcccgactatcccccgatacttccccccgccccaaccccgacccccaacgcgccgcccgccccgcaatccccgcacaacccaacaaatatacgcccgtatccccgcgtatatatacctacgcgccgcgacaaaaaacgaaaaaataaaaaacgtcgaaaccccgacccgccacctaccgtcctccttatccaacaccatcatctcgaacgctccgtatccaaccgcaactaaactcgaccgaaaaaaaaacgccgactcgaaacgcgctttaaaaaaacgaccgatcttcg

SEQ ID NO: 14767 - DNA, 925 bp, Artificial Sequence
  chemically treated genomic DNA (Homo sapiens) CpG-island No: 14767
agtggtttttagtagttatgggtttttttgtttcgatttttttcgtgttttgtagttttttagggcgtattgaggttcgattacggaaggttcgtgttattttcgtaggtcgttttcgtataagtgttatcggtcggcggcgggatattttttttttttgggttaaattttcgttttcgcgtttagagagatagggagttagcgggtcggtataagaggcggtttttttttttatcgagttacgtttatgtagatgtttttcggagggtttaattcgtttttttttcgtttgtcgggtattttggcgttcgcgtcgttttttcgcgttttcgtttgtttcgagttttggagttcgatttttttcgaagtcgttgatttgttcggcgtttagcgtttttcgggttacgcggcggttggcgcgagggtgatggttgcggtgagagtagtagttttagatacgaaatgtttagagcgaattttcgcggcggagatcgtaagggagttttagttttcgcgcggtttcgcggcgtagtatacggttagtgtatagtttttcggttcgcggtcgggattcggggggcgtgcggtcgggcgcgtgtagttcggggttcgatttttttttttcgtaagtttcgttcggttgtttttcggtattttttttcgttttagtttcggtttttagcgcgtcgttcgtttcgtaattttcgtatagtttagtaggtgtgcgttcgtgttttcgcgtgtgtgtgtttgcgcgtcgcggtagggggcgagggggtgaggggcgtcgagatttcggttcgttatttatcgttttttttgtttagtattattatttcgggcgtttcgtgtttagtcgtagttaggttcggtcgggagaagggcgtcgattcggggcgcgttttggaggggcggtcggttttcg

SEQ ID NO: 14768 - DNA, 925 bp, Artificial Sequence
  chemically treated genomic DNA (Homo sapiens) CpG-island No: 14768
cgaaaaccgaccgcccctccaaaacgcgccccgaatcgacgcccttctcccgaccgaacctaactacgactaaacacgaaacgcccgaaataataatactaaacaaaaaaaacgataaataacgaaccgaaatctcgacgcccctcaccccctcgccccctaccgcgacgcgcaaacacacacacgcgaaaacacgaacgcacacctactaaactatacgaaaattacgaaacgaacgacgcgctaaaaaccgaaactaaaacgaaaaaaaataccgaaaaacaaccgaacgaaacttacgaaaaaaaaaaatcgaaccccgaactacacgcgcccgaccgcacgccccccgaatcccgaccgcgaaccgaaaaactatacactaaccgtatactacgccgcgaaaccgcgcgaaaactaaaactcccttacgatctccgccgcgaaaattcgctctaaacatttcgtatctaaaactactactctcaccgcaaccatcaccctcgcgccaaccgccgcgtaacccgaaaaacgctaaacgccgaacaaatcaacgacttcgaaaaaaatcgaactccaaaactcgaaacaaacgaaaacgcgaaaaaacgacgcgaacgccaaaatacccgacaaacgaaaaaaaaacgaattaaaccctccgaaaaacatctacataaacgtaactcgataaaaaaaaaaaccgcctcttataccgacccgctaactccctatctctctaaacgcgaaaacgaaaatttaacccaaaaaaaaaaaatatcccgccgccgaccgataacacttatacgaaaacgacctacgaaaataacacgaaccttccgtaatcgaacctcaatacgccctaaaaaactacaaaacacgaaaaaaatcgaaacaaaaaaacccataactactaaaaaccact

SEQ ID NO: 14769 - DNA, 883 bp, Artificial Sequence
  chemically treated genomic DNA (Homo sapiens) CpG-island No: 14769
ggtatcgattattagtagttcgggtttcgtcggcgttggcgcgggttcggggcgggggcggggcgggggcggagagcgggtgggggcggggcgggaggcgtcggtagagtcgcggcggtatcggcgtattcgtcgttatttcggggattttgcgtcggttcggtcggttcggtttcggtcgcgcgttttttttcgttttttcgtttcggcgttcgtttttcgtttttttttttcgtttttttttttcgtttttcgtttttcgtttttttgttcgcgttttttttttcgcgcgtttttagttttcggtcgtcgtttcgttgagtttagaacgagtcgggtcggggcggcggggtcgggcggggcgggcgggcgcgcggatttcgcggttatgaagtggttttcgggggttcggagttcgatagttttcggggagggagtcgtacgcggtttagggtagcggtttaggggcgtcggggtcggggcgtaggggtcgttgttcgcgatggatcgtatcggagacgtttcggattcgtcgtcgtaggttagtgtttttcgcgttttcgcgggcgtttcgtcgcgtatagagtttttttttgcgtttttatcggtgtttacgttatgttttttcgggcgcgcgttggggtgtgtgtgtgtgtgtgtgtgtgtgtgtgtgtgtgcgttgcgcgcgttgggggtagttggaaagggggtcgagaatcgagttcgggttgggaggcgttgttgtcgaggggttgcgaaataaaattcggtatagtttgttttcgtcgatcgggattaggggaagagttggtttttagtagtttttaataatcggttcgggtttttagtcgttagttttcggtttttttagtaggtggttttt

SEQ ID NO: 14770 - DNA, 883 bp, Artificial Sequence
  chemically treated genomic DNA (Homo sapiens) CpG-island No: 14770
aaaaaccacctactaaaaaaaccgaaaactaacgactaaaaacccgaaccgattattaaaaactactaaaaaccaactcttcccctaatcccgatcgacgaaaacaaactataccgaattttatttcgcaacccctcgacaacaacgcctcccaacccgaactcgattctcgaccccctttccaactacccccaacgcgcgcaacgcacacacacacacacacacacacacacacacacaccccaacgcgcgcccgaaaaaacataacgtaaacaccgataaaaacgcaaaaaaaaactctatacgcgacgaaacgcccgcgaaaacgcgaaaaacactaacctacgacgacgaatccgaaacgtctccgatacgatccatcgcgaacaacgacccctacgccccgaccccgacgcccctaaaccgctaccctaaaccgcgtacgactccctccccgaaaactatcgaactccgaacccccgaaaaccacttcataaccgcgaaatccgcgcgcccgcccgccccgcccgaccccgccgccccgacccgactcgttctaaactcaacgaaacgacgaccgaaaactaaaaacgcgcgaaaaaaaaaacgcgaacaaaaaaacgaaaaacgaaaaacgaaaaaaaaaaacgaaaaaaaaaaacgaaaaacgaacgccgaaacgaaaaaacgaaaaaaaacgcgcgaccgaaaccgaaccgaccgaaccgacgcaaaatccccgaaataacgacgaatacgccgataccgccgcgactctaccgacgcctcccgccccgcccccacccgctctccgcccccgccccgcccccgccccgaacccgcgccaacgccgacgaaacccgaactactaataatcgatacc

SEQ ID NO: 14771 - DNA, 883 bp, Artificial Sequence
  chemically treated genomic DNA (Homo sapiens) CpG-island No: 14771
agaaattatttgttgagggggtcgggaattgacgattgagagttcgggtcgattgttagaagttgttgagaattagttttttttttaatttcggtcgacgagggtaggttgtgtcgggttttgtttcgtagtttttcggtagtagcgttttttagttcgagttcggttttcggttttttttttagttgtttttagcgcgcgtagcgtatatatatatatatatatatatatatatatatattttagcgcgcgttcgggaggatatggcgtgggtatcgatggggacgtagaaaggggttttgtgcgcggcggggcgttcgcgggggcgcggggagtattgatttgcggcgacgagttcggagcgttttcggtgcggtttatcgcgggtaacggtttttacgtttcggtttcggcgtttttagatcgttgttttgggtcgcgtgcggtttttttttcggggattgtcgggtttcgggttttcgggggttattttatagtcgcggggttcgcgcgttcgttcgtttcgttcggtttcgtcgtttcggttcggttcgttttgggtttagcgaggcggcggtcgaaggttgggagcgcgcgggagggagggcgcgggtagggaggcggggggcggggggcggggagggggagcggggagggggagcggggagcgggcgtcggggcgagagggcgagggggggcgcgcggtcggagtcgagtcgatcgggtcggcgtagagttttcgaggtggcggcggatgcgtcggtgtcgtcgcggttttgtcggcgtttttcgtttcgtttttattcgtttttcgttttcgtttcgttttcgtttcgagttcgcgttagcgtcggcgggattcgagttgttaatggtcggtatt

SEQ ID NO: 14772 - DNA, 883 bp, Artificial Sequence
  chemically treated genomic DNA (Homo sapiens) CpG-island No: 14772
aataccgaccattaacaactcgaatcccgccgacgctaacgcgaactcgaaacgaaaacgaaacgaaaacgaaaaacgaataaaaacgaaacgaaaaacgccgacaaaaccgcgacgacaccgacgcatccgccgccacctcgaaaactctacgccgacccgatcgactcgactccgaccgcgcgccccccctcgccctctcgccccgacgcccgctccccgctccccctccccgctccccctccccgccccccgccccccgcctccctacccgcgccctccctcccgcgcgctcccaaccttcgaccgccgcctcgctaaacccaaaacgaaccgaaccgaaacgacgaaaccgaacgaaacgaacgaacgcgcgaaccccgcgactataaaataacccccgaaaacccgaaacccgacaatccccgaaaaaaaaaccgcacgcgacccaaaacaacgatctaaaaacgccgaaaccgaaacgtaaaaaccgttacccgcgataaaccgcaccgaaaacgctccgaactcgtcgccgcaaatcaatactccccgcgcccccgcgaacgccccgccgcgcacaaaacccctttctacgtccccatcgatacccacgccatatcctcccgaacgcgcgctaaaatatatatatatatatatatatatatatatatatacgctacgcgcgctaaaaacaactaaaaaaaaaaccgaaaaccgaactcgaactaaaaaacgctactaccgaaaaactacgaaacaaaacccgacacaacctaccctcgtcgaccgaaattaaaaaaaaaactaattctcaacaacttctaacaatcgacccgaactctcaatcgtcaattcccgaccccctcaacaaataatttct

SEQ ID NO: 14773 - DNA, 591 bp, Artificial Sequence
  chemically treated genomic DNA (Homo sapiens) CpG-island No: 14773
ggtttttcgatttcgtagatgagggtagtgattttcgacgcgaaacgtcgttcggcgtcgattttagggagtattgtacgtttgatcgcgatatcgtggaggtggtgcgtatcgagtacgtgtatacgcggttttcgttatggttcgatacgttgtttattatttacgtggtgacgtttatttatagtcgttcggtgtagaaggtcgagttgacgcgtatggttaatacgttgttgtacgtgtttaatttttattggttggtggtggaggatgcgtcgcgtcggacgtcgttgatcgcgcgtttgttgcgcgatatcggttttaattatacgtatttgtacgtggagacgtttcgtaattataagttgcgcggagacgttcgcgatttacgtatttcgcggggtattatgtagcgtaatttggttttgcgttggttgcgcgagattttttcgcgtaattttagttagtttggcgtggtttatttcgtcgacgacgataatatttatagtttggagtttttcgaagaggtgagggagggttcgatagtgagtagcgggattttcggttgcggggagtggaggggtttttcga

SEQ ID NO: 14774 - DNA, 591 bp, Artificial Sequence
  chemically treated genomic DNA (Homo sapiens) CpG-island No: 14774
tcgaaaaacccctccactccccgcaaccgaaaatcccgctactcactatcgaaccctccctcacctcttcgaaaaactccaaactataaatattatcgtcgtcgacgaaataaaccacgccaaactaactaaaattacgcgaaaaaatctcgcgcaaccaacgcaaaaccaaattacgctacataataccccgcgaaatacgtaaatcgcgaacgtctccgcgcaacttataattacgaaacgtctccacgtacaaatacgtataattaaaaccgatatcgcgcaacaaacgcgcgatcaacgacgtccgacgcgacgcatcctccaccaccaaccaataaaaattaaacacgtacaacaacgtattaaccatacgcgtcaactcgaccttctacaccgaacgactataaataaacgtcaccacgtaaataataaacaacgtatcgaaccataacgaaaaccgcgtatacacgtactcgatacgcaccacctccacgatatcgcgatcaaacgtacaatactccctaaaatcgacgccgaacgacgtttcgcgtcgaaaatcactaccctcatctacgaaatcgaaaaacc

SEQ ID NO: 14775 - DNA, 591 bp, Artificial Sequence
  chemically treated genomic DNA (Homo sapiens) CpG-island No: 14775
tcgggaagtttttttatttttcgtagtcggaggtttcgttgtttattgtcgggtttttttttattttttcgaagagttttaggttgtaggtgttgtcgtcgtcggcgaagtagattacgttaggttggttggagttgcgcgggaaggtttcgcgtagttagcgtagggttaggttgcgttgtatggtgtttcgcgggatgcgtgggtcgcgggcgttttcgcgtagtttgtagttgcggggcgtttttacgtgtaggtgcgtgtagttgaggtcggtgtcgcgtagtaggcgcgcggttagcggcgttcggcgcggcgtattttttattattagttagtggaggttgggtacgtgtagtagcgtgttggttatgcgcgttagttcggttttttgtatcgggcggttgtaggtgggcgttattacgtggatggtgggtagcgtgtcggattatggcgggggtcgcgtgtatacgtattcggtgcgtattatttttacgatgtcgcggttagacgtgtagtattttttggggtcggcgtcgggcggcgtttcgcgtcgggggttattgtttttatttgcggagtcgggagatt

SEQ ID NO: 14776 - DNA, 591 bp, Artificial Sequence
  chemically treated genomic DNA (Homo sapiens) CpG-island No: 14776
aatctcccgactccgcaaataaaaacaataacccccgacgcgaaacgccgcccgacgccgaccccaaaaaatactacacgtctaaccgcgacatcgtaaaaataatacgcaccgaatacgtatacacgcgacccccgccataatccgacacgctacccaccatccacgtaataacgcccacctacaaccgcccgatacaaaaaaccgaactaacgcgcataaccaacacgctactacacgtacccaacctccactaactaataataaaaaatacgccgcgccgaacgccgctaaccgcgcgcctactacgcgacaccgacctcaactacacgcacctacacgtaaaaacgccccgcaactacaaactacgcgaaaacgcccgcgacccacgcatcccgcgaaacaccatacaacgcaacctaaccctacgctaactacgcgaaaccttcccgcgcaactccaaccaacctaacgtaatctacttcgccgacgacgacaacacctacaacctaaaactcttcgaaaaaataaaaaaaaacccgacaataaacaacgaaacctccgactacgaaaaataaaaaaacttcccga

SEQ ID NO: 14777 - DNA, 582 bp, Artificial Sequence
  chemically treated genomic DNA (Homo sapiens) CpG-island No: 14777
tgcgggtcggttttcgtcggaggttttacgtggttatcgcgtgttttttaagcgcggggattcgggtttttattttagttcgtatttagtcgcgcgcgggagtttcgtcgcggggggcggagtcgcgcgttggtcgtttgggtaatcggttcgtcggcgtttattggttggggttcgcggtttcgcgtttgtagttttaggtttcgcgtaggcgggggcggggttggtcggggtcggggcggggtttttgtcgggggggggggcggggcggggttggtgggcggggcgaggtttcggtaggaaagggggttggcgggggcggggttggcggggcggggtttcggttaggggcggggcggggataaggtttcggtaggggaggggtttggtcggggcgggtttttagtgtcgtggagcggtgtagagttcgtcgtttttttgttcgcgaggcgtaggcgggtgcgggaatgttgcgtatttgttaaacgtcgaggtaaagtcgtttttcgtagcgttatattaggaagaacgtataaaaggcgttcgtaaagtaggggtaattaatagaattttttaaaataa

SEQ ID NO: 14778 - DNA, 582 bp, Artificial Sequence
  chemically treated genomic DNA (Homo sapiens) CpG-island No: 14778
ttattttaaaaaattctattaattacccctactttacgaacgccttttatacgttcttcctaatataacgctacgaaaaacgactttacctcgacgtttaacaaatacgcaacattcccgcacccgcctacgcctcgcgaacaaaaaaacgacgaactctacaccgctccacgacactaaaaacccgccccgaccaaacccctcccctaccgaaaccttatccccgccccgcccctaaccgaaaccccgccccgccaaccccgcccccgccaaccccctttcctaccgaaacctcgccccgcccaccaaccccgccccgcccccccccccgacaaaaaccccgccccgaccccgaccaaccccgcccccgcctacgcgaaacctaaaactacaaacgcgaaaccgcgaaccccaaccaataaacgccgacgaaccgattacccaaacgaccaacgcgcgactccgccccccgcgacgaaactcccgcgcgcgactaaatacgaactaaaataaaaacccgaatccccgcgcttaaaaaacacgcgataaccacgtaaaacctccgacgaaaaccgacccgca

SEQ ID NO: 14779 - DNA, 582 bp, Artificial Sequence
  chemically treated genomic DNA (Homo sapiens) CpG-island No: 14779
ttgttttaaaagattttgttggttgtttttgttttgcggacgttttttgtacgttttttttgatgtagcgttgcgaggggcgattttatttcggcgtttgataggtacgtagtattttcgtattcgtttgcgtttcgcgagtagaaagacggcggattttgtatcgttttacgatattggggattcgtttcggttagattttttttttatcgagattttgttttcgtttcgtttttggtcggggtttcgtttcgttagtttcgttttcgttagtttttttttttatcgagatttcgtttcgtttattagtttcgtttcgttttttttttcgatagaggtttcgtttcggtttcggttagtttcgttttcgtttgcgcgaggtttagggttgtaggcgcggagtcgcgagttttagttaatgagcgtcggcgggtcggttgtttaggcgattagcgcgcggtttcgtttttcgcggcgaggttttcgcgcgcggttgagtgcggattggagtgggaattcgggttttcgcgtttagagaatacgcgatgattacgtggagttttcggcggaggtcggttcgta

SEQ ID NO: 14780 - DNA, 582 bp, Artificial Sequence
  chemically treated genomic DNA (Homo sapiens) CpG-island No: 14780
tacgaaccgacctccgccgaaaactccacgtaatcatcgcgtattctctaaacgcgaaaacccgaattcccactccaatccgcactcaaccgcgcgcgaaaacctcgccgcgaaaaacgaaaccgcgcgctaatcgcctaaacaaccgacccgccgacgctcattaactaaaactcgcgactccgcgcctacaaccctaaacctcgcgcaaacgaaaacgaaactaaccgaaaccgaaacgaaacctctatcgaaaaaaaaaacgaaacgaaactaataaacgaaacgaaatctcgataaaaaaaaaaactaacgaaaacgaaactaacgaaacgaaaccccgaccaaaaacgaaacgaaaacaaaatctcgataaaaaaaaaatctaaccgaaacgaatccccaatatcgtaaaacgatacaaaatccgccgtctttctactcgcgaaacgcaaacgaatacgaaaatactacgtacctatcaaacgccgaaataaaatcgcccctcgcaacgctacatcaaaaaaaacgtacaaaaaacgtccgcaaaacaaaaacaaccaacaaaatcttttaaaacaa

SEQ ID NO: 14781 - DNA, 519 bp, Artificial Sequence
  chemically treated genomic DNA (Homo sapiens) CpG-island No: 14781
tttataacgtttattggttaatggttgcgtgaaattagtgcgaagtgggcgggatagagagcgtgggcgggggggttagtttcgtgcgggttttttaagtagcggttgcgtggtttttttggtacgttatttttacgacgttacggttaggtggtgtagagttggacggtaacgacgtcggacgcgtttttttttggaataatgttttattacggaggagtttttaaggtttttacgtgggtcgttgttagtcggcgaagttcgatagtgtttcgagcgttagagaggaggtcggcggaggagttgaatcgaataggttttgagggatatagtgtcggtagaggtggtcgttggagaggtatttttaggttttcggaggtcgtggtcgttggttacgaggaattgtcgttgtgttttgttttgaagagttattttgttggcgcggtaatcggtgagaatgggagtggttggtagggtaggataggtggggttaggggcggagtttgggcgaaggtattt

SEQ ID NO: 14782 - DNA, 519 bp, Artificial Sequence
  chemically treated genomic DNA (Homo sapiens) CpG-island No: 14782
aaataccttcgcccaaactccgcccctaaccccacctatcctaccctaccaaccactcccattctcaccgattaccgcgccaacaaaataactcttcaaaacaaaacacaacgacaattcctcgtaaccaacgaccacgacctccgaaaacctaaaaatacctctccaacgaccacctctaccgacactatatccctcaaaacctattcgattcaactcctccgccgacctcctctctaacgctcgaaacactatcgaacttcgccgactaacaacgacccacgtaaaaaccttaaaaactcctccgtaataaaacattattccaaaaaaaaacgcgtccgacgtcgttaccgtccaactctacaccacctaaccgtaacgtcgtaaaaataacgtaccaaaaaaaccacgcaaccgctacttaaaaaacccgcacgaaactaacccccccgcccacgctctctatcccgcccacttcgcactaatttcacgcaaccattaaccaataaacgttataaa

SEQ ID NO: 14783 - DNA, 519 bp, Artificial Sequence
  chemically treated genomic DNA (Homo sapiens) CpG-island No: 14783
aaatgttttcgtttaggtttcgtttttggttttatttattttgttttgttagttatttttatttttatcgattatcgcgttaataaagtggttttttaaagtaaaatatagcggtagtttttcgtgattagcggttacggttttcgggggtttagaggtgtttttttagcgattatttttgtcgatattatattttttaggatttgttcgatttaattttttcgtcggttttttttttggcgttcgggatattgtcgagtttcgtcgattagtaacgatttacgtagaggttttgggagttttttcgtggtgggatattgttttaagaaggggcgcgttcgacgtcgttgtcgtttagttttgtattatttgatcgtgacgtcgtaagagtagcgtgttagggaagttacgtagtcgttatttaaggagttcgtacgaggttagttttttcgtttacgttttttatttcgtttatttcgtattgattttacgtagttattggttagtgagcgttgtggg

SEQ ID NO: 14784 - DNA, 519 bp, Artificial Sequence
  chemically treated genomic DNA (Homo sapiens) CpG-island No: 14784
cccacaacgctcactaaccaataactacgtaaaatcaatacgaaataaacgaaataaaaaacgtaaacgaaaaaactaacctcgtacgaactccttaaataacgactacgtaacttccctaacacgctactcttacgacgtcacgatcaaataatacaaaactaaacgacaacgacgtcgaacgcgccccttcttaaaacaatatcccaccacgaaaaaactcccaaaacctctacgtaaatcgttactaatcgacgaaactcgacaatatcccgaacgccaaaaaaaaaaccgacgaaaaaattaaatcgaacaaatcctaaaaaatataatatcgacaaaaataatcgctaaaaaaacacctctaaacccccgaaaaccgtaaccgctaatcacgaaaaactaccgctatattttactttaaaaaaccactttattaacgcgataatcgataaaaataaaaataactaacaaaacaaaataaataaaaccaaaaacgaaacctaaacgaaaacattt

SEQ ID NO: 14785 - DNA, 537 bp, Artificial Sequence
  chemically treated genomic DNA (Homo sapiens) CpG-island No: 14785
ttcggcgtgacgttattttagcgggcgattaatgggagtgcggtttattggtaggcggcgtaggcggtcgttgttaaaggggaagtgatttggggttggagcgatggttcggggttggagttcgcggtcgtcgtcgtcgtagtcgtcgttattaacgttaataataacgtgtcgggagtagtcgcggtcgaagtcggagtaggggtcggagtcgcggttggagtggggtttgcgcgtgtgagtggtcgagagttgttcgtgtcggagattttaaatttcgggcgggagcgttttcggtcggtcgagtcgtcgtcgttcgcggtatcgtgtttttaaggtttagatagcggggcgggggtttattaggcgcgggattggttttttttaggtcgatttttttagtcgggtttcggatttttttcggtttcgggttttttttacgtttaggacggaggtcggagaacggtgattattatatattttagtcggttttttggttagggtattttttttgcggttaagtagtgttgggattgt

SEQ ID NO: 14786 - DNA, 537 bp, Artificial Sequence
  chemically treated genomic DNA (Homo sapiens) CpG-island No: 14786
acaatcccaacactacttaaccgcaaaaaaaataccctaaccaaaaaaccgactaaaatatataataatcaccgttctccgacctccgtcctaaacgtaaaaaaaacccgaaaccgaaaaaaatccgaaacccgactaaaaaaatcgacctaaaaaaaaccaatcccgcgcctaataaacccccgccccgctatctaaaccttaaaaacacgataccgcgaacgacgacgactcgaccgaccgaaaacgctcccgcccgaaatttaaaatctccgacacgaacaactctcgaccactcacacgcgcaaaccccactccaaccgcgactccgacccctactccgacttcgaccgcgactactcccgacacgttattattaacgttaataacgacgactacgacgacgacgaccgcgaactccaaccccgaaccatcgctccaaccccaaatcacttcccctttaacaacgaccgcctacgccgcctaccaataaaccgcactcccattaatcgcccgctaaaataacgtcacgccgaa

SEQ ID NO: 14787 - DNA, 537 bp, Artificial Sequence
  chemically treated genomic DNA (Homo sapiens) CpG-island No: 14787
ataattttaatattgtttggtcgtagagaaaatgttttggttaggaagtcggttggggtgtgtgatgattatcgtttttcggttttcgttttgaacgtgaagggggttcgaggtcgaggaagattcggagttcggttagaagggtcggtttgagagaagttagtttcgcgtttgatagattttcgtttcgttgtttgggttttggggatacggtgtcgcgggcgacggcggttcggtcgatcgaaagcgttttcgttcggagtttgaggttttcggtacgggtaattttcggttatttatacgcgtaggttttattttagtcgcgatttcggtttttgtttcggtttcggtcgcggttgttttcgatacgttgttgttggcgttggtggcggcggttgcggcggcggcggtcgcgagttttagtttcgggttatcgttttagttttagattattttttttttggtagcggtcgtttgcgtcgtttgttagtaagtcgtatttttattggtcgttcgttggggtgacgttacgtcggg

SEQ ID NO: 14788 - DNA, 537 bp, Artificial Sequence
  chemically treated genomic DNA (Homo sapiens) CpG-island No: 14788
cccgacgtaacgtcaccccaacgaacgaccaataaaaatacgacttactaacaaacgacgcaaacgaccgctaccaaaaaaaaaataatctaaaactaaaacgataacccgaaactaaaactcgcgaccgccgccgccgcaaccgccgccaccaacgccaacaacaacgtatcgaaaacaaccgcgaccgaaaccgaaacaaaaaccgaaatcgcgactaaaataaaacctacgcgtataaataaccgaaaattacccgtaccgaaaacctcaaactccgaacgaaaacgctttcgatcgaccgaaccgccgtcgcccgcgacaccgtatccccaaaacccaaacaacgaaacgaaaatctatcaaacgcgaaactaacttctctcaaaccgacccttctaaccgaactccgaatcttcctcgacctcgaacccccttcacgttcaaaacgaaaaccgaaaaacgataatcatcacacaccccaaccgacttcctaaccaaaacattttctctacgaccaaacaatattaaaattat

SEQ ID NO: 14789 - DNA, 1137 bp, Artificial Sequence
  chemically treated genomic DNA (Homo sapiens) CpG-island No: 14789
ggtagggcgcgggtttaaggggtttcgggagtttttttcggggtcgggtcgggacgcggttggtgagtttcggtttcggtttttgaattggggggttcgcgtttgttttaaacgtcgttttttttcgttttttatgttattttttgtattaataagatggtggttaaagtaggggaggagagtagtagcgagtcgtcgtcgtcgtcgcgtcgaggttggcgttgaaattttgtttcgtcggggattagcgcgttcgtagcgcggtcgttttcgtcgcgggggtcgttagtcgaggtcgcgtcgttttcgtcgagtcgttcgtcgggtcgttttcgtcgttcgggtttcgcggttgtcgtagtattttcgggaaggtgagttagtttcggtagttaatgtggttattgaaaatggtttcggagagcgttcggtagtttgttagcgagcgcgggggtcgtcggtgcgggggtcgggagcggcggttgggggcgggggcggtcgggggtttcggcgcgggcgcggggcgggggttcggacggcgtcggcgcggggtggggggcggttcgtcgtggtcgcgaggtgggtgaattttcggtaggtagttgtcgtcgtcgcgggagtcgggggtcgtttttcgtttttttttttttagttcgttcgtttttcgttttgttataatgtagtttttttttttcgtaagcggcgcgttcgttgacggacgtggtcgtcgattaatgggagtggcggttcgggtcgagcgttcggaatgagaacgcggtgatacggacggggcggggcgcggacgtcgacgttagagggttcgtcgcggtcgtcggtttagttttcgcggacgttttcggtttcgcgtcgggggttgttgcggggtgttcggggatgaaggtgggaggcgttttttgggatgcgacgaagttttttttatcgcggttcgcgattgttcgcgaagcgtggtcgagtcggagggtatttttggaatgcgttttaagtgttagttgcggtgtagatttttcgggaaattttttcggagcgtagtttttattttttattcgtagtttttaaggtatttttttatgtagaaattgtagaaatttagcggttaatgattttttttcggttaag

SEQ ID NO: 14790 - DNA, 1137 bp, Artificial Sequence
  chemically treated genomic DNA (Homo sapiens) CpG-island No: 14790
cttaaccgaaaaaaaatcattaaccgctaaatttctacaatttctacataaaaaaataccttaaaaactacgaataaaaaataaaaactacgctccgaaaaaatttcccgaaaaatctacaccgcaactaacacttaaaacgcattccaaaaataccctccgactcgaccacgcttcgcgaacaatcgcgaaccgcgataaaaaaaacttcgtcgcatcccaaaaaacgcctcccaccttcatccccgaacaccccgcaacaacccccgacgcgaaaccgaaaacgtccgcgaaaactaaaccgacgaccgcgacgaaccctctaacgtcgacgtccgcgccccgccccgtccgtatcaccgcgttctcattccgaacgctcgacccgaaccgccactcccattaatcgacgaccacgtccgtcaacgaacgcgccgcttacgaaaaaaaaaaactacattataacaaaacgaaaaacgaacgaactaaaaaaaaaaaaacgaaaaacgacccccgactcccgcgacgacgacaactacctaccgaaaattcacccacctcgcgaccacgacgaaccgccccccaccccgcgccgacgccgtccgaacccccgccccgcgcccgcgccgaaacccccgaccgcccccgcccccaaccgccgctcccgacccccgcaccgacgacccccgcgctcgctaacaaactaccgaacgctctccgaaaccattttcaataaccacattaactaccgaaactaactcaccttcccgaaaatactacgacaaccgcgaaacccgaacgacgaaaacgacccgacgaacgactcgacgaaaacgacgcgacctcgactaacgacccccgcgacgaaaacgaccgcgctacgaacgcgctaatccccgacgaaacaaaatttcaacgccaacctcgacgcgacgacgacgacgactcgctactactctcctcccctactttaaccaccatcttattaatacaaaaaataacataaaaaacgaaaaaaaacgacgtttaaaacaaacgcgaaccccccaattcaaaaaccgaaaccgaaactcaccaaccgcgtcccgacccgaccccgaaaaaaactcccgaaaccccttaaacccgcgccctacc

SEQ ID NO: 14791 - DNA, 1137 bp, Artificial Sequence
  chemically treated genomic DNA (Homo sapiens) CpG-island No: 14791
tttgatcggagagaggttattggtcgttaagtttttgtagtttttgtataggagagtattttggggattgcgagtggggggtggaggttacgtttcggagaggtttttcgaagagtttatatcgtaattgatatttaaaacgtattttagaaatgtttttcggttcggttacgtttcgcgggtaatcgcgaatcgcgatggagaaggtttcgtcgtattttaaaggacgttttttatttttattttcgagtatttcgtagtagttttcggcgcggggtcgagggcgttcgcgagaattaggtcggcggtcgcggcgagttttttggcgtcggcgttcgcgtttcgtttcgttcgtgttatcgcgtttttatttcgagcgttcggttcgggtcgttatttttattggtcggcggttacgttcgttagcgggcgcgtcgtttgcggagagaaaaggttatattgtaataaggcgaggagcgagcgagttgggaggaaggaggcggagggcggttttcggttttcgcggcggcggtagttatttgtcgagggtttatttatttcgcggttacggcgggtcgttttttatttcgcgtcggcgtcgttcggattttcgtttcgcgttcgcgtcgagattttcggtcgttttcgtttttagtcgtcgttttcggttttcgtatcggcggttttcgcgttcgttggtaaattgtcgagcgtttttcgaagttatttttaatggttatattggttatcggggttgatttattttttcgggaatgttgcggtagtcgcggggttcgggcggcgagagcggttcggcgggcggttcggcggaggcggcgcggtttcggttggcggttttcgcggcgggagcggtcgcgttgcgggcgcgttggttttcggcgaggtaaagttttagcgttagtttcggcgcggcggcggcggcgattcgttgttgttttttttttttgttttgattattattttattagtataggaaatgatatggaaaacggaagaaagcggcgtttggggtagacgcggattttttaatttaggggtcggagtcgagatttattagtcgcgtttcgattcggtttcggagaaaattttcggggttttttaggttcgcgttttgtt

SEQ ID NO: 14792 - DNA, 1137 bp, Artificial Sequence
  chemically treated genomic DNA (Homo sapiens) CpG-island No: 14792
aacaaaacgcgaacctaaaaaaccccgaaaattttctccgaaaccgaatcgaaacgcgactaataaatctcgactccgacccctaaattaaaaaatccgcgtctaccccaaacgccgctttcttccgttttccatatcatttcctatactaataaaataataatcaaaacaaaaaaaaaaaacaacaacgaatcgccgccgccgccgcgccgaaactaacgctaaaactttacctcgccgaaaaccaacgcgcccgcaacgcgaccgctcccgccgcgaaaaccgccaaccgaaaccgcgccgcctccgccgaaccgcccgccgaaccgctctcgccgcccgaaccccgcgactaccgcaacattcccgaaaaaataaatcaaccccgataaccaatataaccattaaaaataacttcgaaaaacgctcgacaatttaccaacgaacgcgaaaaccgccgatacgaaaaccgaaaacgacgactaaaaacgaaaacgaccgaaaatctcgacgcgaacgcgaaacgaaaatccgaacgacgccgacgcgaaataaaaaacgacccgccgtaaccgcgaaataaataaaccctcgacaaataactaccgccgccgcgaaaaccgaaaaccgccctccgcctccttcctcccaactcgctcgctcctcgccttattacaatataaccttttctctccgcaaacgacgcgcccgctaacgaacgtaaccgccgaccaataaaaataacgacccgaaccgaacgctcgaaataaaaacgcgataacacgaacgaaacgaaacgcgaacgccgacgccaaaaaactcgccgcgaccgccgacctaattctcgcgaacgccctcgaccccgcgccgaaaactactacgaaatactcgaaaataaaaataaaaaacgtcctttaaaatacgacgaaaccttctccatcgcgattcgcgattacccgcgaaacgtaaccgaaccgaaaaacatttctaaaatacgttttaaatatcaattacgatataaactcttcgaaaaacctctccgaaacgtaacctccaccccccactcgcaatccccaaaatactctcctatacaaaaactacaaaaacttaacgaccaataacctctctccgatcaaa

SEQ ID NO: 14793 - DNA, 687 bp, Artificial Sequence
  chemically treated genomic DNA (Homo sapiens) CpG-island No: 14793
ggtcgcggttgagcgagcgggtgttcggtgttcgtacgggtggtagcgtaggttttgtcgtcgtcgttatattaaggtagttcggaggttggggatattcgttcggttttcgcggcgttgtcgtttagttttggtatttttcgggtcgagtgcgtatcgggtttcgtgggaggttttggaatgcgtttatcgtttgattcggagcgatttttcgcggcgtttttttttatcgtttcgttcgggcgttcgttttttttcgttttttgcgcgtttttttttcggtcgttagttaattgcgtgtttttagggtcggtaagaagttatatgttttcgtaaggaatgtcgggtttggcgggcggggggcgggcgttgggtagggtcgggcgggtcgggtcgggtagggagtttttcgtcgggaaggttggcgagagggggagagttcgttcgcgttcgtttcggtcgtagtttatatcggttcgagacggggcggttacggggtagggggcggcgcgttcggtttgggtagttttttttttttttatcgcgcgttttcggttttgttggttcggaggagggggtaggtcgttacgttttttcgtattttttttagtcgtcgtcgtcggttttggggtttcggtggggagtagggggttgattagtcgaggagtaggggtgtggttagcgggg

SEQ ID NO: 14794 - DNA, 687 bp, Artificial Sequence
  chemically treated genomic DNA (Homo sapiens) CpG-island No: 14794
ccccgctaaccacacccctactcctcgactaatcaaccccctactccccaccgaaaccccaaaaccgacgacgacgactaaaaaaaatacgaaaaaacgtaacgacctaccccctcctccgaaccaacaaaaccgaaaacgcgcgataaaaaaaaaaaaaactacccaaaccgaacgcgccgccccctaccccgtaaccgccccgtctcgaaccgatataaactacgaccgaaacgaacgcgaacgaactctccccctctcgccaaccttcccgacgaaaaactccctacccgacccgacccgcccgaccctacccaacgcccgccccccgcccgccaaacccgacattccttacgaaaacatataacttcttaccgaccctaaaaacacgcaattaactaacgaccgaaaaaaaaacgcgcaaaaaacgaaaaaaaacgaacgcccgaacgaaacgataaaaaaaaacgccgcgaaaaatcgctccgaatcaaacgataaacgcattccaaaacctcccacgaaacccgatacgcactcgacccgaaaaataccaaaactaaacgacaacgccgcgaaaaccgaacgaatatccccaacctccgaactaccttaatataacgacgacgacaaaacctacgctaccacccgtacgaacaccgaacacccgctcgctcaaccgcgacc

SEQ ID NO: 14795 - DNA, 687 bp, Artificial Sequence
  chemically treated genomic DNA (Homo sapiens) CpG-island No: 14795
tttcgttggttatatttttgtttttcggttaattagttttttgttttttatcggggttttaaagtcggcggcggcgattgggaggggtgcggggaaacgtgacggtttgttttttttttcgagttagtagggtcgggggcgcgcggtggggaaggggagggttgtttaggtcgggcgcgtcgttttttgtttcgtggtcgtttcgtttcgggtcggtgtaggttgcggtcggggcgggcgcgggcgggttttttttttttcgttagttttttcggcggggagttttttgttcggttcggttcgttcggttttgtttagcgttcgtttttcgttcgttaggttcggtattttttgcgggggtatgtggttttttgtcggttttgggggtacgtagttggttggcggtcgggaggggggcgcgtagggagcgggaggaagcgggcgttcgggcggggcggtgggagagggcgtcgcggggggtcgtttcgggttaggcggtggacgtattttagggttttttacggggttcgatgcgtattcggttcggggggtgttagggttgggcgatagcgtcgcggaggtcgggcgggtgtttttagttttcgagttgttttggtgtggcggcgacgatagggtttgcgttgttattcgtgcggatatcggatattcgttcgtttagtcgcggtt

SEQ ID NO: 14796 - DNA, 687 bp, Artificial Sequence
  chemically treated genomic DNA (Homo sapiens) CpG-island No: 14796
aaccgcgactaaacgaacgaatatccgatatccgcacgaataacaacgcaaaccctatcgtcgccgccacaccaaaacaactcgaaaactaaaaacacccgcccgacctccgcgacgctatcgcccaaccctaacaccccccgaaccgaatacgcatcgaaccccgtaaaaaaccctaaaatacgtccaccgcctaacccgaaacgaccccccgcgacgccctctcccaccgccccgcccgaacgcccgcttcctcccgctccctacgcgcccccctcccgaccgccaaccaactacgtacccccaaaaccgacaaaaaaccacatacccccgcaaaaaataccgaacctaacgaacgaaaaacgaacgctaaacaaaaccgaacgaaccgaaccgaacaaaaaactccccgccgaaaaaactaacgaaaaaaaaaaaacccgcccgcgcccgccccgaccgcaacctacaccgacccgaaacgaaacgaccacgaaacaaaaaacgacgcgcccgacctaaacaaccctccccttccccaccgcgcgcccccgaccctactaactcgaaaaaaaaaacaaaccgtcacgtttccccgcacccctcccaatcgccgccgccgactttaaaaccccgataaaaaacaaaaaactaattaaccgaaaaacaaaaatataaccaacgaaa

SEQ ID NO: 14797 - DNA, 1063 bp, Artificial Sequence
  chemically treated genomic DNA (Homo sapiens) CpG-island No: 14797
gttagacgtttttcggttttgtagtatttaataaaaattgagaaatatttgggttgaaatcgttgttttatttggaggagttatagcgtcgggagagattattgttgcgcggggggagttcggggttttagtggttcgggtacgcggggtcgtcgcgttttagcgttcgcgttgttttcgggtgattttacgggcgcggtgtggggatttcgggttcgcggcggcgcgcggtcgtcgggggtcgggacgcgcgcggggggcggtggtttggcgaggtttttttcgcgttcgcggtttaggtgggtcgtgtttagcgttggcggagttcgggttttcgttttgttcgggttggatggtttattttgttggttgcgcggtggcggcggttgtgtgtgcgtcgcgttttgtcgttttttttggtttttcgagttcggggcgcgcgttttcgttcgggtcgttcgggtttcgcggcgtcgcggttcgaggtttcgggaagcgtagttatggttttgcggaggttgggggtcgcgttgttgttgttgtcgttgttcgtcgtcgtggaaggtgagcgagcgggcgggcgggcgggcgatgggggcggggagcggtcgggtacgggcggtcgtcggcgtttattttcgtttcgcggttcgtaaagtttgttcgggggtcggcgtcgggcgtaggtggtcgcggggaggtgtgttcggtcgcgtcgggaggagcgggtttcgcgggcgttcggggagcggcgggcgttgattgattgtgttaggaggaggcgaagggattattttgtcgaggttttgtagttagttcggcgagcgtcgtttagggttgggggttgtttacgcgcgttcgtcgttttcggttcgggtagtcgtttcgcgtcggtttggttttgtttcgtatagggtggaggggcgcgggttcggtcgtggcggggggcggggggggcgtcggcgttcggtcggggttggaaagtttggtagggagtagagggagggaggtatcgttttcggtcggggtgggggttttaggttcgcgtttttcgagatggggt

SEQ ID NO: 14798 - DNA, 1063 bp, Artificial Sequence
  chemically treated genomic DNA (Homo sapiens) CpG-island No: 14798
accccatctcgaaaaacgcgaacctaaaacccccaccccgaccgaaaacgatacctccctccctctactccctaccaaactttccaaccccgaccgaacgccgacgccccccccgccccccgccacgaccgaacccgcgcccctccaccctatacgaaacaaaaccaaaccgacgcgaaacgactacccgaaccgaaaacgacgaacgcgcgtaaacaacccccaaccctaaacgacgctcgccgaactaactacaaaacctcgacaaaataatcccttcgcctcctcctaacacaatcaatcaacgcccgccgctccccgaacgcccgcgaaacccgctcctcccgacgcgaccgaacacacctccccgcgaccacctacgcccgacgccgacccccgaacaaactttacgaaccgcgaaacgaaaataaacgccgacgaccgcccgtacccgaccgctccccgcccccatcgcccgcccgcccgcccgctcgctcaccttccacgacgacgaacaacgacaacaacaacaacgcgacccccaacctccgcaaaaccataactacgcttcccgaaacctcgaaccgcgacgccgcgaaacccgaacgacccgaacgaaaacgcgcgccccgaactcgaaaaaccaaaaaaaacgacaaaacgcgacgcacacacaaccgccgccaccgcgcaaccaacaaaataaaccatccaacccgaacaaaacgaaaacccgaactccgccaacgctaaacacgacccacctaaaccgcgaacgcgaaaaaaacctcgccaaaccaccgccccccgcgcgcgtcccgacccccgacgaccgcgcgccgccgcgaacccgaaatccccacaccgcgcccgtaaaatcacccgaaaacaacgcgaacgctaaaacgcgacgaccccgcgtacccgaaccactaaaaccccgaactccccccgcgcaacaataatctctcccgacgctataactcctccaaataaaacaacgatttcaacccaaatatttctcaatttttattaaatactacaaaaccgaaaaacgtctaac

SEQ ID NO: 14799 - DNA, 1063 bp, Artificial Sequence
  chemically treated genomic DNA (Homo sapiens) CpG-island No: 14799
gttttatttcggggggcgcgggtttggagtttttatttcggtcgggggcggtgtttttttttttttgttttttgttaaattttttagtttcgatcgagcgtcggcgtttttttcgtttttcgttacggtcgggttcgcgtttttttattttgtgcggagtaagattaggtcggcgcgaggcggttgttcgagtcgggggcggcgagcgcgcgtgggtagtttttagttttgggcggcgttcgtcgggttggttataaagtttcggtaagatggttttttcgtttttttttggtatagttaattagcgttcgtcgtttttcgggcgttcgcggggttcgtttttttcggcgcggtcggatatattttttcgcggttatttgcgttcggcgtcggttttcgggtaaattttgcgggtcgcggagcggaggtgggcgtcggcggtcgttcgtgttcggtcgtttttcgtttttatcgttcgttcgttcgttcgttcgtttattttttacggcggcgagtagcggtagtagtagtagcgcggtttttagttttcgtagagttatggttgcgtttttcggggtttcgggtcgcggcgtcgcggggttcggacggttcgggcgggagcgcgcgtttcgggttcggggggttagggggggcggtaaggcgcggcgtatatatagtcgtcgttatcgcgtagttagtagaatgagttatttagttcgggtagaacggggattcgggtttcgttagcgttgggtacggtttatttgagtcgcgggcgcggggggagtttcgttaggttatcgtttttcgcgcgcgtttcggttttcggcggtcgcgcgtcgtcgcgagttcggggtttttatatcgcgttcgtagggttattcgggggtagcgcgggcgttggagcgcggcgatttcgcgtgttcgggttattgagatttcgggtttttttcgcgtagtagtggtttttttcggcgttgtggtttttttagataaagtagcgattttagtttaaatgttttttaatttttattgaatgttgtaaagtcggagagcgtttggt

SEQ ID NO: 14800 - DNA, 1063 bp, Artificial Sequence
  chemically treated genomic DNA (Homo sapiens) CpG-island No: 14800
accaaacgctctccgactttacaacattcaataaaaattaaaaaacatttaaactaaaatcgctactttatctaaaaaaaccacaacgccgaaaaaaaccactactacgcgaaaaaaacccgaaatctcaataacccgaacacgcgaaatcgccgcgctccaacgcccgcgctacccccgaataaccctacgaacgcgatataaaaaccccgaactcgcgacgacgcgcgaccgccgaaaaccgaaacgcgcgcgaaaaacgataacctaacgaaactccccccgcgcccgcgactcaaataaaccgtacccaacgctaacgaaacccgaatccccgttctacccgaactaaataactcattctactaactacgcgataacgacgactatatatacgccgcgccttaccgccccccctaaccccccgaacccgaaacgcgcgctcccgcccgaaccgtccgaaccccgcgacgccgcgacccgaaaccccgaaaaacgcaaccataactctacgaaaactaaaaaccgcgctactactactaccgctactcgccgccgtaaaaaataaacgaacgaacgaacgaacgaacgataaaaacgaaaaacgaccgaacacgaacgaccgccgacgcccacctccgctccgcgacccgcaaaatttacccgaaaaccgacgccgaacgcaaataaccgcgaaaaaatatatccgaccgcgccgaaaaaaacgaaccccgcgaacgcccgaaaaacgacgaacgctaattaactataccaaaaaaaaacgaaaaaaccatcttaccgaaactttataaccaacccgacgaacgccgcccaaaactaaaaactacccacgcgcgctcgccgcccccgactcgaacaaccgcctcgcgccgacctaatcttactccgcacaaaataaaaaaacgcgaacccgaccgtaacgaaaaacgaaaaaaacgccgacgctcgatcgaaactaaaaaatttaacaaaaaacaaaaaaaaaaaaacaccgcccccgaccgaaataaaaactccaaacccgcgccccccgaaataaaac

SEQ ID NO: 14801 - DNA, 506 bp, Artificial Sequence
  chemically treated genomic DNA (Homo sapiens) CpG-island No: 14801
gtcggttttcgttttttcgtttttcgagtcggcgtttggtcggcggtttttcggagtttttagagcgtcgtttttttttttttggaggtcgtgagtagttcgtcggggtgaggcggggtttagttgggttgtttgcgtttcgggcggcgggtttttagtttagattgcgttcggttttgaatgtggtcgtaggttggagggttagcgcggcgcgaggcgggtagggtgggtgggttgggattggagatttttgttcgaggtttcggaagcgaggatgttgcggggtgggtgtcgcgttgtttttcgggcgagggaaacgtggcgataacgggttcggtacgtttagagggaggttgggaggcggagatttggcggtagaaggtgtcgagggagtttagttatttgcgaggtttcgtaggtaggcgggcgtgtgttttttttatcgtgtgttattttgattattcgtttgttagggttagcgagtcgaggttaggattttgagttgt

SEQ ID NO: 14802 - DNA, 506 bp, Artificial Sequence
  chemically treated genomic DNA (Homo sapiens) CpG-island No: 14802
acaactcaaaatcctaacctcgactcgctaaccctaacaaacgaataatcaaaataacacacgataaaaaaaacacacgcccgcctacctacgaaacctcgcaaataactaaactccctcgacaccttctaccgccaaatctccgcctcccaacctccctctaaacgtaccgaacccgttatcgccacgtttccctcgcccgaaaaacaacgcgacacccaccccgcaacatcctcgcttccgaaacctcgaacaaaaatctccaatcccaacccacccaccctacccgcctcgcgccgcgctaaccctccaacctacgaccacattcaaaaccgaacgcaatctaaactaaaaacccgccgcccgaaacgcaaacaacccaactaaaccccgcctcaccccgacgaactactcacgacctccaaaaaaaaaaaaacgacgctctaaaaactccgaaaaaccgccgaccaaacgccgactcgaaaaacgaaaaaacgaaaaccgac

SEQ ID NO: 14803 - DNA, 506 bp, Artificial Sequence
  chemically treated genomic DNA (Homo sapiens) CpG-island No: 14803
atagtttaggattttggtttcggttcgttggttttgataggcgggtggttagggtgatatacggtgggaagaatatacgttcgtttgtttgcgaagtttcgtaaatagttgggttttttcggtattttttgtcgttaggttttcgttttttaatttttttttgggcgtatcgagttcgttgtcgttacgtttttttcgttcgggaggtaacgcggtatttatttcgtagtattttcgttttcggggtttcgggtaagggtttttagttttagtttatttattttgttcgtttcgcgtcgcgttggttttttagtttgcggttatatttaaggtcgagcgtagtttgggttggaaattcgtcgttcggggcgtaggtagtttagttgggtttcgttttatttcgacgagttgtttacgatttttaaagggaagaaagcgacgttttgagaatttcgagaggtcgtcggttaagcgtcgattcggggggcgggggaacggaaatcgat

SEQ ID NO: 14804 - DNA, 506 bp, Artificial Sequence
  chemically treated genomic DNA (Homo sapiens) CpG-island No: 14804
atcgatttccgttcccccgccccccgaatcgacgcttaaccgacgacctctcgaaattctcaaaacgtcgctttcttccctttaaaaatcgtaaacaactcgtcgaaataaaacgaaacccaactaaactacctacgccccgaacgacgaatttccaacccaaactacgctcgaccttaaatataaccgcaaactaaaaaaccaacgcgacgcgaaacgaacaaaataaataaactaaaactaaaaacccttacccgaaaccccgaaaacgaaaatactacgaaataaataccgcgttacctcccgaacgaaaaaaacgtaacgacaacgaactcgatacgcccaaaaaaaaattaaaaaacgaaaacctaacgacaaaaaataccgaaaaaacccaactatttacgaaacttcgcaaacaaacgaacgtatattcttcccaccgtatatcaccctaaccacccgcctatcaaaaccaacgaaccgaaaccaaaatcctaaactat

SEQ ID NO: 14805 - DNA, 676 bp, Artificial Sequence
  chemically treated genomic DNA (Homo sapiens) CpG-island No: 14805
tttcgggtttcgtcggtgtttttttgtttttattgattcgtttgtaaatttttattcgttttgtttttttaggtcgcggtcgcggtttttcgattttttcggttatttggttttagtttgggatcgttttcgtttttagtcgttggaaagtatttttaggttggtggcgcggagtaagcgtcggttttaaggacgttcgaagtcgggagaaagagaatttggagtttgttcgcggtttttagttttttttcgcggagcgttcggtcgggagttttttgtattcgggttcgggtcggcgtgtttgtttttattttcgggttttttggcgtttttggcgtatagtttttcgttcgttcgttacggggttgggttcgcggcgattcgagttcgtagttcggttttttgtattcgaggataatgcgcggtcggttacgggtttaagcgcggcgaggcggcggcggcggcggcggcggggttgagcgttggtcgggtaggggagcgggcggttcgcggggttttcgtagttttcgtgttcggtttcgtcgtttttcgcgttgtttcgtttcgcgttttttcggcgtttttttagtttttttttgtacgttttcgtcgtttttcgttgttttttgttttttttttttttgttgttttttttttttttttttttgttgttttt

SEQ ID NO: 14806 - DNA, 676 bp, Artificial Sequence
  chemically treated genomic DNA (Homo sapiens) CpG-island No: 14806
aaaaacaacaaaaaaaaaaaaaaaaaaaacaacaaaaaaaaaaaaaacaaaaaacaacgaaaaacgacgaaaacgtacaaaaaaaaactaaaaaaacgccgaaaaaacgcgaaacgaaacaacgcgaaaaacgacgaaaccgaacacgaaaactacgaaaaccccgcgaaccgcccgctcccctacccgaccaacgctcaaccccgccgccgccgccgccgccgcctcgccgcgcttaaacccgtaaccgaccgcgcattatcctcgaatacaaaaaaccgaactacgaactcgaatcgccgcgaacccaaccccgtaacgaacgaacgaaaaactatacgccaaaaacgccaaaaaacccgaaaataaaaacaaacacgccgacccgaacccgaatacaaaaaactcccgaccgaacgctccgcgaaaaaaaactaaaaaccgcgaacaaactccaaattctctttctcccgacttcgaacgtccttaaaaccgacgcttactccgcgccaccaacctaaaaatactttccaacgactaaaaacgaaaacgatcccaaactaaaaccaaataaccgaaaaaatcgaaaaaccgcgaccgcgacctaaaaaaacaaaacgaataaaaatttacaaacgaatcaataaaaacaaaaaaacaccgacgaaacccgaaa

SEQ ID NO: 14807 - DNA, 676 bp, Artificial Sequence
  chemically treated genomic DNA (Homo sapiens) CpG-island No: 14807
ggaggtagtagggaggagagagagggaggtagtagggaggagggaggtagggagtagcgagggacggcgggagcgtgtagagagaagttggggaagcgtcgggagagcgcggagcggagtagcgcgaggggcggcgaggtcgggtacggaggttgcgagagtttcgcgggtcgttcgtttttttgttcggttagcgtttagtttcgtcgtcgtcgtcgtcgtcgtttcgtcgcgtttgggttcgtggtcggtcgcgtattgttttcgggtgtaaggagtcgggttgcggattcgaatcgtcgcgggtttaatttcgtagcgggcgggcggggagttgtgcgttaggagcgttaggggattcgagaataggaataggtacgtcggttcgagttcgggtgtagaaggttttcggtcgggcgtttcgcggggagaggttgggaatcgcgggtaggttttaggttttttttttttcggtttcgggcgtttttggggtcggcgtttatttcgcgttattagtttggagatgttttttagcggttggaggcgggagcggttttaggttggggttaggtgatcggaggagtcgaggagtcgcggtcgcggtttggggaggtagggcgaatgagggtttgtagacggattagtggagataggggaatatcggcggggttcggga

SEQ ID NO: 14808 - DNA, 676 bp, Artificial Sequence
  chemically treated genomic DNA (Homo sapiens) CpG-island No: 14808
tcccgaaccccgccgatattcccctatctccactaatccgtctacaaaccctcattcgccctacctccccaaaccgcgaccgcgactcctcgactcctccgatcacctaaccccaacctaaaaccgctcccgcctccaaccgctaaaaaacatctccaaactaataacgcgaaataaacgccgaccccaaaaacgcccgaaaccgaaaaaaaaaaaacctaaaacctacccgcgattcccaacctctccccgcgaaacgcccgaccgaaaaccttctacacccgaactcgaaccgacgtacctattcctattctcgaatcccctaacgctcctaacgcacaactccccgcccgcccgctacgaaattaaacccgcgacgattcgaatccgcaacccgactccttacacccgaaaacaatacgcgaccgaccacgaacccaaacgcgacgaaacgacgacgacgacgacgacgaaactaaacgctaaccgaacaaaaaaacgaacgacccgcgaaactctcgcaacctccgtacccgacctcgccgcccctcgcgctactccgctccgcgctctcccgacgcttccccaacttctctctacacgctcccgccgtccctcgctactccctacctccctcctccctactacctccctctctctcctccctactacctcc

SEQ ID NO: 14809 - DNA, 1056 bp, Artificial Sequence
  chemically treated genomic DNA (Homo sapiens) CpG-island No: 14809
gacgtttcgtaataagtgaagttaaagtcggcgtttttttattagacggggttcgcgttcggggacgttagttcgattttcggtttttcgtaattcggttttaaaggtttaaaaataggtttagcgtggcggtcggggtcggggcgggcggcggaggagtcgggcggaggtcgtagtattttcgtttcggagtttttgttttttggggtttcgggtcgttagaggtcggggtagttttttacgatgtcgttgcgtttcggattttcgtttggaatttttaggggaatcggttttttatttttatacggtttcgtcgtagttgtttcgttcgtcggtttttcgtcgtgagagtaagaggaaggacgaggagacggaagtaggaacgagagtttcggtcgagggttcgggttttgttcggttgttttatttttgtattttggggggcggcggggcggtagttgacgtaggtagaaatacgttcggttgcggttagttagtaattttgcggcggtttcgttttgtcgggaatatttcggggttgagggcggaggagaagggaggcggcggttgggtaggaagtcggggtttcggggttggcggcggcgggttgcgcggcggtatttgttatggtgttgtcgggtgcgtaggcggtcggggtagttttaggttggtgatttagagaagtcggtatcgggagggagcgcggttagcgaggaggtacggcggggaatcgagcgtttgtttcgtgcgtttttatagcggtcgttacgtggtcgcgtacgttttcgttgtcgttcgtatttttttagttgcgcggtcggtaggggcggtggttcgcggggtttcgggtttcgcgtttttttcggttttttttttttttttcggggttaggttgtcgttgcggttgcggtttatcggcgtttttgtttttattttttcggggcgtttgtttttgttaatcgcgcgttttttgtcgtcgttaaatttgggagttaagggggattttggggttgagtgcggtattaaattttttaagaagttaagggttagggaatt

SEQ ID NO: 14810 - DNA, 1056 bp, Artificial Sequence
  chemically treated genomic DNA (Homo sapiens) CpG-island No: 14810
aattccctaacccttaacttcttaaaaaatttaataccgcactcaaccccaaaatcccccttaactcccaaatttaacgacgacaaaaaacgcgcgattaacaaaaacaaacgccccgaaaaaataaaaacaaaaacgccgataaaccgcaaccgcaacgacaacctaaccccgaaaaaaaaaaaaaaaaccgaaaaaaacgcgaaacccgaaaccccgcgaaccaccgcccctaccgaccgcgcaactaaaaaaatacgaacgacaacgaaaacgtacgcgaccacgtaacgaccgctataaaaacgcacgaaacaaacgctcgattccccgccgtacctcctcgctaaccgcgctccctcccgataccgacttctctaaatcaccaacctaaaactaccccgaccgcctacgcacccgacaacaccataacaaataccgccgcgcaacccgccgccgccaaccccgaaaccccgacttcctacccaaccgccgcctcccttctcctccgccctcaaccccgaaatattcccgacaaaacgaaaccgccgcaaaattactaactaaccgcaaccgaacgtatttctacctacgtcaactaccgccccgccgccccccaaaatacaaaaataaaacaaccgaacaaaacccgaaccctcgaccgaaactctcgttcctacttccgtctcctcgtccttcctcttactctcacgacgaaaaaccgacgaacgaaacaactacgacgaaaccgtataaaaataaaaaaccgattcccctaaaaattccaaacgaaaatccgaaacgcaacgacatcgtaaaaaactaccccgacctctaacgacccgaaaccccaaaaaacaaaaactccgaaacgaaaatactacgacctccgcccgactcctccgccgcccgccccgaccccgaccgccacgctaaacctatttttaaacctttaaaaccgaattacgaaaaaccgaaaatcgaactaacgtccccgaacgcgaaccccgtctaataaaaaaacgccgactttaacttcacttattacgaaacgtc

SEQ ID NO: 14811 - DNA, 1056 bp, Artificial Sequence
  chemically treated genomic DNA (Homo sapiens) CpG-island No: 14811
ggttttttaatttttggttttttggggagtttgatgtcgtatttagttttaaagttttttttaatttttaggtttagcggcgatagggggcgcgcggttgataagggtaggcgtttcggggaagtaggagtaggggcgtcggtgagtcgtagtcgtagcggtagtttagtttcgagggagggaggaggagtcgagggagacgcgggattcggagtttcgcgggttatcgtttttgtcggtcgcgtagttgggaggatgcggacggtagcgagagcgtgcgcggttacgtgacggtcgttataagagcgtacggggtagacgttcggtttttcgtcgtgttttttcgttggtcgcgttttttttcggtgtcggtttttttgagttattaatttgaggttgtttcggtcgtttgcgtattcggtagtattatgataggtatcgtcgcgtagttcgtcgtcgttagtttcgggatttcggttttttgtttagtcgtcgttttttttttttttcgtttttagtttcggagtgttttcggtaggacgaaatcgtcgtaaagttgttggttggtcgtagtcgggcgtgtttttgtttgcgttagttgtcgtttcgtcgttttttagagtgtagggatggggtagtcgggtagagttcgggttttcggtcggagttttcgtttttgttttcgttttttcgtttttttttttgtttttacggcgaagggtcggcgggcggagtagttgcggcggggtcgtgtgggggtggggagtcggtttttttgggggttttaggcgggagttcggggcgtagcggtatcgtggggagttgtttcggtttttggcggttcggaattttaggaagtaggggtttcgaggcggggatattgcggttttcgttcggttttttcgtcgttcgtttcggtttcggtcgttacgttgagtttatttttaggtttttggggtcgggttgcgggaagtcgggagtcggattagcgttttcgggcgcgagtttcgtttggtgggagggcgtcggttttggttttatttgttgcgaggcgtt

SEQ ID NO: 14812 - DNA, 1056 bp, Artificial Sequence
  chemically treated genomic DNA (Homo sapiens) CpG-island No: 14812
aacgcctcgcaacaaataaaaccaaaaccgacgccctcccaccaaacgaaactcgcgcccgaaaacgctaatccgactcccgacttcccgcaacccgaccccaaaaacctaaaaataaactcaacgtaacgaccgaaaccgaaacgaacgacgaaaaaaccgaacgaaaaccgcaatatccccgcctcgaaacccctacttcctaaaattccgaaccgccaaaaaccgaaacaactccccacgataccgctacgccccgaactcccgcctaaaacccccaaaaaaaccgactccccacccccacacgaccccgccgcaactactccgcccgccgacccttcgccgtaaaaacaaaaaaaaaaacgaaaaaacgaaaacaaaaacgaaaactccgaccgaaaacccgaactctacccgactaccccatccctacactctaaaaaacgacgaaacgacaactaacgcaaacaaaaacacgcccgactacgaccaaccaacaactttacgacgatttcgtcctaccgaaaacactccgaaactaaaaacgaaaaaaaaaaaaaacgacgactaaacaaaaaaccgaaatcccgaaactaacgacgacgaactacgcgacgatacctatcataatactaccgaatacgcaaacgaccgaaacaacctcaaattaataactcaaaaaaaccgacaccgaaaaaaaacgcgaccaacgaaaaaacacgacgaaaaaccgaacgtctaccccgtacgctcttataacgaccgtcacgtaaccgcgcacgctctcgctaccgtccgcatcctcccaactacgcgaccgacaaaaacgataacccgcgaaactccgaatcccgcgtctccctcgactcctcctccctccctcgaaactaaactaccgctacgactacgactcaccgacgcccctactcctacttccccgaaacgcctacccttatcaaccgcgcgccccctatcgccgctaaacctaaaaattaaaaaaaactttaaaactaaatacgacatcaaactccccaaaaaaccaaaaattaaaaaacc

SEQ ID NO: 14813 - DNA, 689 bp, Artificial Sequence
  chemically treated genomic DNA (Homo sapiens) CpG-island No: 14813
tgttggtggcggcgttttcggtgttgacggttttttggtcgtttaataaagttggcggggaatttttatcgtagattaatgaaggcgatttgttgtatatgttatcgacgttgtcggggattttcgtagtagaggcggcgagtatgttgtaaaaaatcgataagttaattatgagcgtatttgaagtggcgcgggtatttggtaaaatcgggaaacggaaatcgttatcgattttgtttcgttggagatggtagaaacgattatttagtttaagtcgtaggagtagtggcggttaggtatgacgatggataaaattattgaggaattggataatatcgtgcggttgtcggggttggcgaatttgtgggtgtcgttaattcgtaatcgtatcgatatgtttttaatcggtattaaaagttttatcggtattaaagttttcggtattgtgttggcggatatcgacgcgatggttgagtaaattgaagaagtagcgcgaacggtgttaggcgtagtttttgcgttttcgagcggttggaaggtgggcgttatattaacgttgagattaatcgtgaaaaagtcgtacgttacggtatgacggtggcggatgtgtagttgtttgtgatttttgcggtgggcggggcgatggttggcgaaacggtggaagggattgttcgttatttaattaattt

SEQ ID NO: 14814 - DNA, 689 bp, Artificial Sequence
  chemically treated genomic DNA (Homo sapiens) CpG-island No: 14814
aaattaattaaataacgaacaatcccttccaccgtttcgccaaccatcgccccgcccaccgcaaaaatcacaaacaactacacatccgccaccgtcataccgtaacgtacgactttttcacgattaatctcaacgttaatataacgcccaccttccaaccgctcgaaaacgcaaaaactacgcctaacaccgttcgcgctacttcttcaatttactcaaccatcgcgtcgatatccgccaacacaataccgaaaactttaataccgataaaacttttaataccgattaaaaacatatcgatacgattacgaattaacgacacccacaaattcgccaaccccgacaaccgcacgatattatccaattcctcaataattttatccatcgtcatacctaaccgccactactcctacgacttaaactaaataatcgtttctaccatctccaacgaaacaaaatcgataacgatttccgtttcccgattttaccaaatacccgcgccacttcaaatacgctcataattaacttatcgattttttacaacatactcgccgcctctactacgaaaatccccgacaacgtcgataacatatacaacaaatcgccttcattaatctacgataaaaattccccgccaactttattaaacgaccaaaaaaccgtcaacaccgaaaacgccgccaccaaca

SEQ ID NO: 14815 - DNA, 689 bp, Artificial Sequence
  chemically treated genomic DNA (Homo sapiens) CpG-island No: 14815
agattaattggataacgggtaattttttttatcgtttcgttaattatcgtttcgtttatcgtagaagttataaataattgtatattcgttatcgttatatcgtaacgtgcggtttttttacggttaattttaacgttgatatagcgtttattttttagtcgttcggaagcgtagaagttacgtttggtatcgttcgcgttatttttttaatttgtttagttatcgcgtcgatattcgttagtatagtgtcggaaattttaatgtcgatggggtttttaatgtcggttgagagtatatcgatacggttacgaattggcggtatttatagattcgttagtttcggtagtcgtacggtgttatttagttttttaatgattttgtttatcgttatgtttggtcgttattgtttttgcggtttaagttggatggtcgtttttattatttttagcggagtagaatcggtggcggttttcgtttttcggttttgttaaatattcgcgttattttaggtacgtttataattagtttgtcggttttttgtagtatattcgtcgtttttgttgcggaaattttcggtagcgtcgatggtatatataataagtcgtttttattgatttgcggtaaaaatttttcgttaattttattgagcggttagagaatcgttagtatcgaaagcgtcgttattagta

SEQ ID NO: 14816 - DNA, 689 bp, Artificial Sequence
  chemically treated genomic DNA (Homo sapiens) CpG-island No: 14816
tactaataacgacgctttcgatactaacgattctctaaccgctcaataaaattaacgaaaaatttttaccgcaaatcaataaaaacgacttattatatataccatcgacgctaccgaaaatttccgcaacaaaaacgacgaatatactacaaaaaaccgacaaactaattataaacgtacctaaaataacgcgaatatttaacaaaaccgaaaaacgaaaaccgccaccgattctactccgctaaaaataataaaaacgaccatccaacttaaaccgcaaaaacaataacgaccaaacataacgataaacaaaatcattaaaaaactaaataacaccgtacgactaccgaaactaacgaatctataaataccgccaattcgtaaccgtatcgatatactctcaaccgacattaaaaaccccatcgacattaaaatttccgacactatactaacgaatatcgacgcgataactaaacaaattaaaaaaataacgcgaacgataccaaacgtaacttctacgcttccgaacgactaaaaaataaacgctatatcaacgttaaaattaaccgtaaaaaaaccgcacgttacgatataacgataacgaatatacaattatttataacttctacgataaacgaaacgataattaacgaaacgataaaaaaaattacccgttatccaattaatct

SEQ ID NO: 14817 - DNA, 503 bp, Artificial Sequence
  chemically treated genomic DNA (Homo sapiens) CpG-island No: 14817
gcgttacgttattacggagacgagtacgaaggtcgtggaggttatttcgatggttttggggttatcgaggagaatggtttttttatgaggttttagaggcggcgtttgcgggtcgtagaagcgtatgtcgcgaagagttttttcgttttttcgatttgcgtttgcgcgcgttcgtgttggattttgagtcgttcgtttagttcgtcgcgtcgtttttcgaagtagatgcgttagcgtggcgtgtatttgagtcgtacgttttagtagtttagtttttttaggaagcggcgcgtatatagttcgtcgagtattagtagtatttcggataggtagaaattgtagattagttggaagacggtcgggtcgcggtcgaagaagtattcgtttgtttgtttttcgtagtcgtcgtataggtttagttggcggttgcggttggtggaggtggttaggcgatttaggcgttttggggaagtcggttagttcgtagtagtttagttggtagt

SEQ ID NO: 14818 - DNA, 503 bp, Artificial Sequence
  chemically treated genomic DNA (Homo sapiens) CpG-island No: 14818
actaccaactaaactactacgaactaaccgacttccccaaaacgcctaaatcgcctaaccacctccaccaaccgcaaccgccaactaaacctatacgacgactacgaaaaacaaacaaacgaatacttcttcgaccgcgacccgaccgtcttccaactaatctacaatttctacctatccgaaatactactaatactcgacgaactatatacgcgccgcttcctaaaaaaactaaactactaaaacgtacgactcaaatacacgccacgctaacgcatctacttcgaaaaacgacgcgacgaactaaacgaacgactcaaaatccaacacgaacgcgcgcaaacgcaaatcgaaaaaacgaaaaaactcttcgcgacatacgcttctacgacccgcaaacgccgcctctaaaacctcataaaaaaaccattctcctcgataaccccaaaaccatcgaaataacctccacgaccttcgtactcgtctccgtaataacgtaacgc

SEQ ID NO: 14819 - DNA, 503 bp, Artificial Sequence
  chemically treated genomic DNA (Homo sapiens) CpG-island No: 14819
gttattagttggattattgcgagttggtcggtttttttaagacgtttaggtcgtttggttatttttattagtcgtagtcgttagttaagtttgtgcgacgattacgaggagtagatagacgaatattttttcgatcgcgattcggtcgttttttagttggtttataatttttatttgttcggggtgttgttggtgttcgacgggttgtgtacgcgtcgttttttggaggagttgggttattggggcgtgcggtttaagtatacgttacgttggcgtatttgtttcgaggagcggcgcgacgagttgagcgaacggtttaagatttagtacgagcgcgcgtaggcgtaggtcgaggaggcggaggaatttttcgcgatatgcgtttttacggttcgtaggcgtcgtttttggaattttatggagaagttatttttttcggtggttttaaggttatcggggtggtttttacgattttcgtgttcgttttcgtggtggcgtggcgt

SEQ ID NO: 14820 - DNA, 503 bp, Artificial Sequence
  chemically treated genomic DNA (Homo sapiens) CpG-island No: 14820
acgccacgccaccacgaaaacgaacacgaaaatcgtaaaaaccaccccgataaccttaaaaccaccgaaaaaaataacttctccataaaattccaaaaacgacgcctacgaaccgtaaaaacgcatatcgcgaaaaattcctccgcctcctcgacctacgcctacgcgcgctcgtactaaatcttaaaccgttcgctcaactcgtcgcgccgctcctcgaaacaaatacgccaacgtaacgtatacttaaaccgcacgccccaataacccaactcctccaaaaaacgacgcgtacacaacccgtcgaacaccaacaacaccccgaacaaataaaaattataaaccaactaaaaaacgaccgaatcgcgatcgaaaaaatattcgtctatctactcctcgtaatcgtcgcacaaacttaactaacgactacgactaataaaaataaccaaacgacctaaacgtcttaaaaaaaccgaccaactcgcaataatccaactaataac

SEQ ID NO: 14821 - DNA, 518 bp, Artificial Sequence
  chemically treated genomic DNA (Homo sapiens) CpG-island No: 14821
cggtagcggatattcgtatcggcgcggcgaagtagcggggtgagtagcggggagggggtcggaggggcgtggttaacgggaggcgcggcgggcgggcgggacgcggcggttttcggtttttttttttttcgacgcgttttttttgtacgcgtcgggtagtcgggtgttcgcgcggggagcgtgtcgagtgtgagcgtgcgtgagtgatcgcggtcgtggtcgtgtgtcgtcgtcgttattcggatcgttttaggggttcggttttcgcgtttttggggtttacgggggtcggggcgatcgttggttgtcgggtcgttttcgtttttaatttcgggtgtttgttttaattttttgatttagggaatttgtcgtagcgtgtgcgttttttatagttattattgtattttttcggtattcggagaatacgtagtagtagtagtagttagcgttgagattatcgttgttgttgttatcgtttttttattgacggggcgtgtatttggggggtatttgtagtt

SEQ ID NO: 14822 - DNA, 518 bp, Artificial Sequence
  chemically treated genomic DNA (Homo sapiens) CpG-island No: 14822
aactacaaataccccccaaatacacgccccgtcaataaaaaaacgataacaacaacaacgataatctcaacgctaactactactactactacgtattctccgaataccgaaaaaatacaataataactataaaaaacgcacacgctacgacaaattccctaaatcaaaaaattaaaacaaacacccgaaattaaaaacgaaaacgacccgacaaccaacgatcgccccgacccccgtaaaccccaaaaacgcgaaaaccgaacccctaaaacgatccgaataacgacgacgacacacgaccacgaccgcgatcactcacgcacgctcacactcgacacgctccccgcgcgaacacccgactacccgacgcgtacaaaaaaaacgcgtcgaaaaaaaaaaaaaccgaaaaccgccgcgtcccgcccgcccgccgcgcctcccgttaaccacgcccctccgaccccctccccgctactcaccccgctacttcgccgcgccgatacgaatatccgctaccg

SEQ ID NO: 14823 - DNA, 518 bp, Artificial Sequence
  chemically treated genomic DNA (Homo sapiens) CpG-island No: 14823
aattgtaagtattttttaggtgtacgtttcgttagtggggaggcggtggtaatagtaacgatagttttagcgttaattgttgttgttgttgcgtgtttttcgggtgtcgggagggtatagtaatgattgtagggagcgtatacgttgcggtaggttttttggattaggaaattaggataggtattcgggattggaggcgagggcggttcgataattagcggtcgtttcggttttcgtgagttttagaagcgcggaagtcgggtttttagagcggttcgggtggcggcggcggtatacgattacgatcgcggttatttacgtacgtttatattcgatacgtttttcgcgcgggtattcggttgttcggcgcgtgtaagaggagcgcgtcgagggaaaggagggtcgaagatcgtcgcgtttcgttcgttcgtcgcgtttttcgttgattacgttttttcggtttttttttcgttgtttatttcgttatttcgtcgcgtcggtgcgggtgttcgttatcg

SEQ ID NO: 14824 - DNA, 518 bp, Artificial Sequence
  chemically treated genomic DNA (Homo sapiens) CpG-island No: 14824
cgataacgaacacccgcaccgacgcgacgaaataacgaaataaacaacgaaaaaaaaaccgaaaaaacgtaatcaacgaaaaacgcgacgaacgaacgaaacgcgacgatcttcgaccctcctttccctcgacgcgctcctcttacacgcgccgaacaaccgaatacccgcgcgaaaaacgtatcgaatataaacgtacgtaaataaccgcgatcgtaatcgtataccgccgccgccacccgaaccgctctaaaaacccgacttccgcgcttctaaaactcacgaaaaccgaaacgaccgctaattatcgaaccgccctcgcctccaatcccgaatacctatcctaatttcctaatccaaaaaacctaccgcaacgtatacgctccctacaatcattactataccctcccgacacccgaaaaacacgcaacaacaacaacaattaacgctaaaactatcgttactattaccaccgcctccccactaacgaaacgtacacctaaaaaatacttacaatt

SEQ ID NO: 14825 - DNA, 584 bp, Artificial Sequence
  chemically treated genomic DNA (Homo sapiens) CpG-island No: 14825
cgcgggtagggaggacgtcgcgggagttcgggttcgaggttgggttgtggggttgcgggggcgtacgggcgaggtaggcggggcgcggggttttcgcggcggtataaagaggtcggtcgcggtagttttgaaaatattaaggaagttgatttgggtcggggtttaagaagtgacgaggagggagggaggtttgcgagcgagggaggaaaggagggagagggagaggagaaggcgggaaggagggagggaggaagggtgcgcggggcgaggggcggcggtagatttcgcggggttttagcgggaagcgcgggcggcggcgggatgcgcgttttgggcggcggggcgcggcgttaggcgttcggcggggtttttttaggttgcgatttcgcgggattttttatttttttcgtcgttttcgtagttcgcgcgtcggagtatgagtttcggtcggagttttacggtcgcgggcggcgtttaggacggcgattcgcgttttggaggattcgtcggtcgttcggttttattatagttttagtcgtttgtagcggggtttttttgaggttttagaggaagagattatgaaa

SEQ ID NO: 14826 - DNA, 584 bp, Artificial Sequence
  chemically treated genomic DNA (Homo sapiens) CpG-island No: 14826
tttcataatctcttcctctaaaacctcaaaaaaaccccgctacaaacgactaaaactataataaaaccgaacgaccgacgaatcctccaaaacgcgaatcgccgtcctaaacgccgcccgcgaccgtaaaactccgaccgaaactcatactccgacgcgcgaactacgaaaacgacgaaaaaaataaaaaatcccgcgaaatcgcaacctaaaaaaaccccgccgaacgcctaacgccgcgccccgccgcccaaaacgcgcatcccgccgccgcccgcgcttcccgctaaaaccccgcgaaatctaccgccgcccctcgccccgcgcacccttcctccctccctccttcccgccttctcctctccctctccctcctttcctccctcgctcgcaaacctccctccctcctcgtcacttcttaaaccccgacccaaatcaacttccttaatattttcaaaactaccgcgaccgacctctttataccgccgcgaaaaccccgcgccccgcctacctcgcccgtacgcccccgcaaccccacaacccaacctcgaacccgaactcccgcgacgtcctccctacccgcg

SEQ ID NO: 14827 - DNA, 584 bp, Artificial Sequence
  chemically treated genomic DNA (Homo sapiens) CpG-island No: 14827
ttttatggtttttttttttggggttttaggagggtttcgttgtaggcggttggagttgtagtggagtcgggcggtcggcggattttttagggcgcggatcgtcgttttaggcgtcgttcgcggtcgtggggtttcggtcgggatttatgtttcggcgcgcgggttgcggaggcggcgggaggagtggagggtttcgcggggtcgtagtttggggaagtttcgtcgggcgtttagcgtcgcgtttcgtcgtttagagcgcgtatttcgtcgtcgttcgcgtttttcgttggggtttcgcgaggtttgtcgtcgtttttcgtttcgcgtattttttttttttttttttttttcgtttttttttttttttttttttttttttttttttcgttcgtaagttttttttttttttcgttattttttgggtttcggtttagattaatttttttggtatttttaaaattgtcgcggtcggtttttttgtgtcgtcgcgggggtttcgcgtttcgtttatttcgttcgtgcgttttcgtagttttatagtttagtttcgaattcgggttttcgcggcgttttttttgttcgcg

SEQ ID NO: 14828 - DNA, 584 bp, Artificial Sequence
  chemically treated genomic DNA (Homo sapiens) CpG-island No: 14828
cgcgaacaaaaaaaacgccgcgaaaacccgaattcgaaactaaactataaaactacgaaaacgcacgaacgaaataaacgaaacgcgaaacccccgcgacgacacaaaaaaaccgaccgcgacaattttaaaaataccaaaaaaattaatctaaaccgaaacccaaaaaataacgaaaaaaaaaaaaaacttacgaacgaaaaaaaaaaaaaaaaaaaaaaaaaaaaaaaaacgaaaaaaaaaaaaaaaaaaaaaatacgcgaaacgaaaaacgacgacaaacctcgcgaaaccccaacgaaaaacgcgaacgacgacgaaatacgcgctctaaacgacgaaacgcgacgctaaacgcccgacgaaacttccccaaactacgaccccgcgaaaccctccactcctcccgccgcctccgcaacccgcgcgccgaaacataaatcccgaccgaaaccccacgaccgcgaacgacgcctaaaacgacgatccgcgccctaaaaaatccgccgaccgcccgactccactacaactccaaccgcctacaacgaaaccctcctaaaaccccaaaaaaaaaaaccataaaa

SEQ ID NO: 14829 - DNA, 523 bp, Artificial Sequence
  chemically treated genomic DNA (Homo sapiens) CpG-island No: 14829
gggaaggagtgggtgcggcgtttcggggtttttcgagagtttttttcgtacgcggttcgtagagtagttttggagcgtttgggtttggatagggttcgaggtggtcggttaagcgtttggtttacggttttcgagagttttcgcgtgttttgggttcgggttcgggtttcgtatttattttggtcgtcgtttcggcggggtcgcgcgggattagggcgagagaaatttgtaattagtcgtttttttttgtttgcgtcgtttcgttgtttggtaacggcgtgcgttagtttcgttttcggcgttcgtcgtcgtggcgttagtacgtattcggggcgaggttagcgtcggttttcgtcgtttaggattcgtttcggattcgttttttttgtttcgggtcgttttcgttgcgggtgggatcgggtttttatattggtcgagttttgggcgtcgggtcgttcgagttttttgttcgtgtttagttcgtcgttcgagtggtttttttttttttttttttttttttttt

SEQ ID NO: 14830 - DNA, 523 bp, Artificial Sequence
  chemically treated genomic DNA (Homo sapiens) CpG-island No: 14830
aaaaaaaaaaaaaaaaaaaaaaaaaaaaccactcgaacgacgaactaaacacgaacaaaaaactcgaacgacccgacgcccaaaactcgaccaatataaaaacccgatcccacccgcaacgaaaacgacccgaaacaaaaaaaacgaatccgaaacgaatcctaaacgacgaaaaccgacgctaacctcgccccgaatacgtactaacgccacgacgacgaacgccgaaaacgaaactaacgcacgccgttaccaaacaacgaaacgacgcaaacaaaaaaaaacgactaattacaaatttctctcgccctaatcccgcgcgaccccgccgaaacgacgaccaaaataaatacgaaacccgaacccgaacccaaaacacgcgaaaactctcgaaaaccgtaaaccaaacgcttaaccgaccacctcgaaccctatccaaacccaaacgctccaaaactactctacgaaccgcgtacgaaaaaaactctcgaaaaaccccgaaacgccgcacccactccttccc

SEQ ID NO: 14831 - DNA, 523 bp, Artificial Sequence
  chemically treated genomic DNA (Homo sapiens) CpG-island No: 14831
aaaaaagaaaaaaaaaaaaaagaaagaattattcgggcggcgaattgagtacggatagaaagttcgagcggttcggcgtttagggttcggttagtgtggaagttcgattttattcgtagcggaggcggttcggggtagggagggcgggttcggggcgggttttggacggcgggggtcggcgttggtttcgtttcggatgcgtgttgacgttacggcgacggacgtcggaagcggagttggcgtacgtcgttgttaggtaacggggcggcgtaggtaggagggaacggttggttgtaggtttttttcgttttggtttcgcgcggtttcgtcgaggcggcgattaaggtgggtgcggggttcgggttcgggtttaggatacgcggggattttcgggagtcgtgggttaggcgtttagtcggttatttcgggttttgtttaggtttaggcgttttagggttgttttgcgggtcgcgtgcgagagggattttcgggaggtttcggggcgtcgtatttattttttttt

SEQ ID NO: 14832 - DNA, 523 bp, Artificial Sequence
  chemically treated genomic DNA (Homo sapiens) CpG-island No: 14832
aaaaaaaaataaatacgacgccccgaaacctcccgaaaatccctctcgcacgcgacccgcaaaacaaccctaaaacgcctaaacctaaacaaaacccgaaataaccgactaaacgcctaacccacgactcccgaaaatccccgcgtatcctaaacccgaacccgaaccccgcacccaccttaatcgccgcctcgacgaaaccgcgcgaaaccaaaacgaaaaaaacctacaaccaaccgttccctcctacctacgccgccccgttacctaacaacgacgtacgccaactccgcttccgacgtccgtcgccgtaacgtcaacacgcatccgaaacgaaaccaacgccgacccccgccgtccaaaacccgccccgaacccgccctccctaccccgaaccgcctccgctacgaataaaatcgaacttccacactaaccgaaccctaaacgccgaaccgctcgaactttctatccgtactcaattcgccgcccgaataattctttcttttttttttttttctttttt

SEQ ID NO: 14833 - DNA, 536 bp, Artificial Sequence
  chemically treated genomic DNA (Homo sapiens) CpG-island No: 14833
acgggtagggagttgacgttgtaggtgggaatcgagagttaggacgcgtagggagttgtcgttgtaggtgggaattattagttaggacgggtagggagttgtcgttgtaggtgggaatcgcgagttaggacgggtagggagttgacgttgtaagtgggaatcgagagttaggacgcgtagggagttgtcgttgtaggtgggaattattagttaggacgggtagggagttgacgttgtaggtgggaatcgcgagttaggacgcgtagggagttgacgttgtaggtgggaatcgagagttaggacgcgtagggagttgtcgttgtaggtgggaattattagttaggacgggtagggagttgtcgttgtaggtgggaatcgcgagttaggacgggtagggagttgacgttgtaggtgggaatcgagagttaggacgcgtagggagttgtcgttgtaggtgggaatcgagagttaggaagtttagggagttgtcgttgtaggtgggaatcgcgagtcgggacgggtagggtagggagttg

SEQ ID NO: 14834 - DNA, 536 bp, Artificial Sequence
  chemically treated genomic DNA (Homo sapiens) CpG-island No: 14834
caactccctaccctacccgtcccgactcgcgattcccacctacaacgacaactccctaaacttcctaactctcgattcccacctacaacgacaactccctacgcgtcctaactctcgattcccacctacaacgtcaactccctacccgtcctaactcgcgattcccacctacaacgacaactccctacccgtcctaactaataattcccacctacaacgacaactccctacgcgtcctaactctcgattcccacctacaacgtcaactccctacgcgtcctaactcgcgattcccacctacaacgtcaactccctacccgtcctaactaataattcccacctacaacgacaactccctacgcgtcctaactctcgattcccacttacaacgtcaactccctacccgtcctaactcgcgattcccacctacaacgacaactccctacccgtcctaactaataattcccacctacaacgacaactccctacgcgtcctaactctcgattcccacctacaacgtcaactccctacccgt

SEQ ID NO: 14835 - DNA, 536 bp, Artificial Sequence
  chemically treated genomic DNA (Homo sapiens) CpG-island No: 14835
tagttttttgttttgttcgtttcggttcgcggtttttatttgtagcgatagttttttgggttttttggttttcggtttttatttgtagcgatagttttttgcgcgttttggttttcggtttttatttgtagcgttagttttttgttcgttttggttcgcggtttttatttgtagcgatagttttttgttcgttttggttgatggtttttatttgtagcgatagttttttgcgcgttttggttttcggtttttatttgtagcgttagttttttgcgcgttttggttcgcggtttttatttgtagcgttagttttttgttcgttttggttgatggtttttatttgtagcgatagttttttgcgcgttttggttttcggtttttatttgtagcgttagttttttgttcgttttggttcgcggtttttatttgtagcgatagttttttgttcgttttggttgatggtttttatttgtagcgatagttttttgcgcgttttggttttcggtttttatttgtagcgttagttttttgttcgt

SEQ ID NO: 14836 - DNA, 536 bp, Artificial Sequence
  chemically treated genomic DNA (Homo sapiens) CpG-island No: 14836
acgaacaaaaaactaacgctacaaataaaaaccgaaaaccaaaacgcgcaaaaaactatcgctacaaataaaaaccatcaaccaaaacgaacaaaaaactatcgctacaaataaaaaccgcgaaccaaaacgaacaaaaaactaacgctacaaataaaaaccgaaaaccaaaacgcgcaaaaaactatcgctacaaataaaaaccatcaaccaaaacgaacaaaaaactaacgctacaaataaaaaccgcgaaccaaaacgcgcaaaaaactaacgctacaaataaaaaccgaaaaccaaaacgcgcaaaaaactatcgctacaaataaaaaccatcaaccaaaacgaacaaaaaactatcgctacaaataaaaaccgcgaaccaaaacgaacaaaaaactaacgctacaaataaaaaccgaaaaccaaaacgcgcaaaaaactatcgctacaaataaaaaccgaaaaccaaaaaacccaaaaaactatcgctacaaataaaaaccgcgaaccgaaacgaacaaaacaaaaaacta

SEQ ID NO: 14837 - DNA, 647 bp, Artificial Sequence
  chemically treated genomic DNA (Homo sapiens) CpG-island No: 14837
tttattcgttattttcggtatcgtttttattttcgattttttacgagggtttttattcgttattttcggtatcgtttttattttttcgttttttacgagggtttttattcgttattttcggtattatttttattttcggttttttacgagggtttttattcgttattttcggtattatttttatttttcgttttttacgagggtttttattcgttattttcggtatcgtttttatttttcgttttttacgagtgtttttattcgttattttcggtatcgtttttattttcggttttttacgagggtttttattcgttattttcggtattatttttatttttcgttttttacgagggtttttattcgttattttcggtatcgtttttatttttcgttttttacgagggtttttattcgttattttcggtatcgtttttatttttcgttttttacgagggtttttattcgtcgttgggttgtatttggtcgattatttttcgggttttttttattttcgtgttttgcgtttcggtttcgatggtgtatgtttttgcgttattgaggttgtcgttttttttttgttttcgtgttttggttagttgggggttcgtgggggcgggcggtggggtcggggggtttacggggtt

SEQ ID NO: 14838 - DNA, 647 bp, Artificial Sequence
  chemically treated genomic DNA (Homo sapiens) CpG-island No: 14838
aaccccgtaaaccccccgaccccaccgcccgcccccacgaacccccaactaaccaaaacacgaaaacaaaaaaaaaacgacaacctcaataacgcaaaaacatacaccatcgaaaccgaaacgcaaaacacgaaaataaaaaaaacccgaaaaataatcgaccaaatacaacccaacgacgaataaaaaccctcgtaaaaaacgaaaaataaaaacgataccgaaaataacgaataaaaaccctcgtaaaaaacgaaaaataaaaacgataccgaaaataacgaataaaaaccctcgtaaaaaacgaaaaataaaaataataccgaaaataacgaataaaaaccctcgtaaaaaaccgaaaataaaaacgataccgaaaataacgaataaaaacactcgtaaaaaacgaaaaataaaaacgataccgaaaataacgaataaaaaccctcgtaaaaaacgaaaaataaaaataataccgaaaataacgaataaaaaccctcgtaaaaaaccgaaaataaaaataataccgaaaataacgaataaaaaccctcgtaaaaaacgaaaaaataaaaacgataccgaaaataacgaataaaaaccctcgtaaaaaatcgaaaataaaaacgataccgaaaataacgaataaa

SEQ ID NO: 14839 - DNA, 647 bp, Artificial Sequence
  chemically treated genomic DNA (Homo sapiens) CpG-island No: 14839
agtttcgtgggtttttcgattttatcgttcgtttttacggatttttagttgattaaggtacggaaataggaggaggacgatagttttagtgacgtagggatatatattatcgagatcgaggcgtaggatacggaggtggaggaggttcggaagatgatcgattaggtgtagtttagcggcgagtgagagttttcgtggggaacggggggtggaggcgatgtcgggggtggcgagtgagagttttcgtggggaacggggggtggaggcgatgtcgggggtggcgagtgagagttttcgtggggaacggggggtggaggtgatgtcgggggtggcgagtgagagttttcgtggggaatcgggggtggaggcgatgtcgggggtggcgagtgagagtattcgtggggaacggggggtggaggcgatgtcgggggtggcgagtgagagttttcgtggggaacggggggtggaggtgatgtcgggggtggcgagtgagagttttcgtggggaatcgggggtggaggtgatgtcgggggtggcgagtgagagttttcgtggggaacgggggggtggaggcgatgtcgggggtggcgagtgagagttttcgtggggaatcgggggtggaggcgatgtcgggggtggcgagtgag

SEQ ID NO: 14840 - DNA, 647 bp, Artificial Sequence
  chemically treated genomic DNA (Homo sapiens) CpG-island No: 14840
ctcactcgccacccccgacatcgcctccacccccgattccccacgaaaactctcactcgccacccccgacatcgcctccacccccccgttccccacgaaaactctcactcgccacccccgacatcacctccacccccgattccccacgaaaactctcactcgccacccccgacatcacctccaccccccgttccccacgaaaactctcactcgccacccccgacatcgcctccaccccccgttccccacgaatactctcactcgccacccccgacatcgcctccacccccgattccccacgaaaactctcactcgccacccccgacatcacctccaccccccgttccccacgaaaactctcactcgccacccccgacatcgcctccaccccccgttccccacgaaaactctcactcgccacccccgacatcgcctccaccccccgttccccacgaaaactctcactcgccgctaaactacacctaatcgatcatcttccgaacctcctccacctccgtatcctacgcctcgatctcgataatatatatccctacgtcactaaaactatcgtcctcctcctatttccgtaccttaatcaactaaaaatccgtaaaaacgaacgataaaatcgaaaaacccacgaaact

SEQ ID NO: 14841 - DNA, 1253 bp, Artificial Sequence
  chemically treated genomic DNA (Homo sapiens) CpG-island No: 14841
tcggcggtggaaggagcgtataggtcgggagaggtagggatagcggggagacggcggcgaagggaaatgaggagagaggggaggaggaggaagacggagggagggatcgcgggaggagagattaggttaggagggaggcggtcgggttcggcgggggagggagcggcgttttttgaattagcgtttttcgggggcggttatggtcgagtcggtgtcggggcggggattcgggtgtttaggtttgtcgtttttttcgtaggtcgcgtagaaacggggcggtttttttcggtttggcgtagattagggtcgttttcgcggcggcggggattcgtttgattaggtgcgtcgggcggtttttaattttcgcgtttttgttcggtttcggtcgggatttcgcgtttcgtgagattttatagtcgtgtaggtgcgggcgataggaggttcgggtcgcggttagcgttgggtcggcgcgttttatttgttgttcgggttttgttttcggttcgttttagttttcggtttggttttcggtttggttttcggtttgttttttagttcggttcggttcggtttttgttttcgcgttcgttcgttcgttcggtcgagcgttgggcggggtcgtcgtttaggatatgttcggcgaggttcgtacgttcgtggtagttcgggtcgagtttacggtagagcggtcgtcggcggtttcgcgcgcgggtttttgacgtttgcgggaggtttagtttcgttttcggaacgtttcgtttcgggtacgttttcgttcgtttcgttttcgttcggtcgcgtcgtatttcgcgtcgtttcgtcggaaattaggttagggcgggttttcggtcgttaggtgagcgcgtttcggtagtttcgcgcgtggttcggtcggtagaggtttggcgagtcgttatttcgtttttgttttaggtttatttttttttatcgtttaggtttcgttggttttttcggtttatttcgtattcggcgtagattttatgttttttcgtttcggtagcgtttttcgtttcgtttttcggttcggttttagttcgacgggcggaatcgggtgcgtatagtagtttcgcgttttggtttagggttagcgggttaacgtttaattacgttttaggagttgtaggttttagtcgcgtttcgagtttttaatttttggtttcggaagttaaaaagaggagcggacggtgaaggagttagggtgagttttagaggtcgtttttagattttttttt

SEQ ID NO: 14842 - DNA, 1253 bp, Artificial Sequence
  chemically treated genomic DNA (Homo sapiens) CpG-island No: 14842
aaaaaaaaatctaaaaacgacctctaaaactcaccctaactccttcaccgtccgctcctctttttaacttccgaaaccaaaaattaaaaactcgaaacgcgactaaaacctacaactcctaaaacgtaattaaacgttaacccgctaaccctaaaccaaaacgcgaaactactatacgcacccgattccgcccgtcgaactaaaaccgaaccgaaaaacgaaacgaaaaacgctaccgaaacgaaaaaacataaaatctacgccgaatacgaaataaaccgaaaaaaccaacgaaacctaaacgataaaaaaaaataaacctaaaacaaaaacgaaataacgactcgccaaacctctaccgaccgaaccacgcgcgaaactaccgaaacgcgctcacctaacgaccgaaaacccgccctaacctaatttccgacgaaacgacgcgaaatacgacgcgaccgaacgaaaacgaaacgaacgaaaacgtacccgaaacgaaacgttccgaaaacgaaactaaacctcccgcaaacgtcaaaaacccgcgcgcgaaaccgccgacgaccgctctaccgtaaactcgacccgaactaccacgaacgtacgaacctcgccgaacatatcctaaacgacgaccccgcccaacgctcgaccgaacgaacgaacgaacgcgaaaacaaaaaccgaaccgaaccgaactaaaaaacaaaccgaaaaccaaaccgaaaaccaaaccgaaaactaaaacgaaccgaaaacaaaacccgaacaacaaataaaacgcgccgacccaacgctaaccgcgacccgaacctcctatcgcccgcacctacacgactataaaatctcacgaaacgcgaaatcccgaccgaaaccgaacaaaaacgcgaaaattaaaaaccgcccgacgcacctaatcaaacgaatccccgccgccgcgaaaacgaccctaatctacgccaaaccgaaaaaaaccgccccgtttctacgcgacctacgaaaaaaacgacaaacctaaacacccgaatccccgccccgacaccgactcgaccataaccgcccccgaaaaacgctaattcaaaaaacgccgctccctcccccgccgaacccgaccgcctccctcctaacctaatctctcctcccgcgatccctccctccgtcttcctcctcctcccctctctcctcatttcccttcgccgccgtctccccgctatccctacctctcccgacctatacgctccttccaccgccga

SEQ ID NO: 14843 - DNA, 1253 bp, Artificial Sequence
  chemically treated genomic DNA (Homo sapiens) CpG-island No: 14843
gagggaaaatttgggagcggtttttggaatttattttgatttttttatcgttcgtttttttttttggttttcggggttaaaggttggggattcgaggcgcggttggagtttatagtttttggagcgtagttaagcgttaattcgttggttttgggttagggcgcggggttgttgtgcgtattcggtttcgttcgtcgagttggggtcggatcgggaggcgaagcggggggcgttgtcgagacgggagggtatggggtttgcgtcgggtgcgagatgagtcggggaggttagcggggtttgggcggtgggggaaggtgggtttggggtaggggcgggatggcggttcgttaagtttttgtcgatcggattacgcgcggggttatcggggcgcgtttatttggcggtcgaggattcgttttaatttggttttcggcggggcggcgcggggtgcggcgcggtcgggcgggggcggggcgggcgggggcgtgttcggggcggggcgtttcgggggcggggttgagtttttcgtagacgttagggattcgcgcgcgaggtcgtcggcggtcgttttgtcgtgggttcggttcgggttgttacgagcgtgcgggtttcgtcgggtatgttttaggcggcggtttcgtttagcgttcggtcgggcgggcgggcgggcgcgagggtagggatcgagtcgggtcgagttggggaataagtcggggattaagtcggggattaagtcggggattaaggcgagtcggagatagagttcgaatagtaggtaggacgcgtcggtttagcgttggtcgcggttcgggttttttatcgttcgtatttgtacggttgtggggttttacggggcgcggggtttcggtcgaggtcggataaaggcgcgggggttgggggtcgttcggcgtatttggttaggcgggttttcgtcgtcgcggaggcggttttggtttgcgttaggtcgggaggagtcgtttcgtttttacgcggtttgcggagggggcggtaagtttgggtattcgggttttcgtttcggtatcggttcggttatggtcgttttcggagagcgttgatttagaaggcgtcgttttttttttcgtcgggttcggtcgttttttttttggtttggttttttttttcgcggttttttttttcgttttttttttttttttttttttttttattttttttcgtcgtcgttttttcgttgtttttgtttttttcggtttgtgcgttttttttatcgtcgg

SEQ ID NO: 14844 - DNA, 1253 bp, Artificial Sequence
  chemically treated genomic DNA (Homo sapiens) CpG-island No: 14844
ccgacgataaaaaaaacgcacaaaccgaaaaaaacaaaaacaacgaaaaaacgacgacgaaaaaaaataaaaaaaaaaaaaaaaaaaaaaaaaacgaaaaaaaaaaccgcgaaaaaaaaaaccaaaccaaaaaaaaaacgaccgaacccgacgaaaaaaaaaacgacgccttctaaatcaacgctctccgaaaacgaccataaccgaaccgataccgaaacgaaaacccgaatacccaaacttaccgccccctccgcaaaccgcgtaaaaacgaaacgactcctcccgacctaacgcaaaccaaaaccgcctccgcgacgacgaaaacccgcctaaccaaatacgccgaacgacccccaacccccgcgcctttatccgacctcgaccgaaaccccgcgccccgtaaaaccccacaaccgtacaaatacgaacgataaaaaacccgaaccgcgaccaacgctaaaccgacgcgtcctacctactattcgaactctatctccgactcgccttaatccccgacttaatccccgacttaatccccgacttattccccaactcgacccgactcgatccctaccctcgcgcccgcccgcccgcccgaccgaacgctaaacgaaaccgccgcctaaaacatacccgacgaaacccgcacgctcgtaacaacccgaaccgaacccacgacaaaacgaccgccgacgacctcgcgcgcgaatccctaacgtctacgaaaaactcaaccccgcccccgaaacgccccgccccgaacacgcccccgcccgccccgcccccgcccgaccgcgccgcaccccgcgccgccccgccgaaaaccaaattaaaacgaatcctcgaccgccaaataaacgcgccccgataaccccgcgcgtaatccgatcgacaaaaacttaacgaaccgccatcccgcccctaccccaaacccaccttcccccaccgcccaaaccccgctaacctccccgactcatctcgcacccgacgcaaaccccataccctcccgtctcgacaacgccccccgcttcgcctcccgatccgaccccaactcgacgaacgaaaccgaatacgcacaacaaccccgcgccctaacccaaaaccaacgaattaacgcttaactacgctccaaaaactataaactccaaccgcgcctcgaatccccaacctttaaccccgaaaaccaaaaaaaaaaacgaacgataaaaaaatcaaaataaattccaaaaaccgctcccaaattttccctc

SEQ ID NO: 14845 - DNA, 956 bp, Artificial Sequence
  chemically treated genomic DNA (Homo sapiens) CpG-island No: 14845
agggttcgtttttatgcgttcgtttttgcgaaattgcgtcgcgcgatcgtcgtggtagcgttttagttagtttcgggttcgcgagaatttggggcggggcggggcggggattagacgggttttttaggcggagcgaattttttattttttatttcgcgtcgggttgtcgcgtttcggaatttaaattttcgtttcgaggttgtcgggggaagcgagaggcgcggagtttacgttcgggattttagcggaggaaacgtagattaaggcgtagcgtcgcgtatttatcgttagggggtagtttttacggcgtcggataggggcggcgcgggaggggagcggggttgaggggatcgggagggcgggaggggatttgcgattgaggggatagggagggcgggaggcgattcgcggttgagtgagggaagggcgggaggggattcgcggttgaggggatcgggagggcgggaggcgattcgcggttgagtgaggggagggtgggaggggattcgcggttgaggggatagggagggcgggaggggattcgcggttgaggggatcgggagggcgggaggcgattcggggttgagtgaggggagggcgggaggggagcggggttgaggggatcgggagggcgggaggggatttgcgattgaggggacggggaggatgtgaggcgattcggggttgagtgaggggagggcgggaggggattcgcggttgaggggatcgggagggcgggaggggagcggggttgaggggacggggagggcgggaggcgattcggggttgaggggacggggagggcgggaggcgattcggggttgaggggacggggagggcgggaggcgattcggggttgaggggacggggagggcgggaggggattcgcggttgaggggataggttttgcgtgcgggttggggagataggcgggcgagggtaggggtgtataaggt

SEQ ID NO: 14846 - DNA, 956 bp, Artificial Sequence
  chemically treated genomic DNA (Homo sapiens) CpG-island No: 14846
accttatacacccctaccctcgcccgcctatctccccaacccgcacgcaaaacctatcccctcaaccgcgaatcccctcccgccctccccgtcccctcaaccccgaatcgcctcccgccctccccgtcccctcaaccccgaatcgcctcccgccctccccgtcccctcaaccccgaatcgcctcccgccctccccgtcccctcaaccccgctcccctcccgccctcccgatcccctcaaccgcgaatcccctcccgccctcccctcactcaaccccgaatcgcctcacatcctccccgtcccctcaatcgcaaatcccctcccgccctcccgatcccctcaaccccgctcccctcccgccctcccctcactcaaccccgaatcgcctcccgccctcccgatcccctcaaccgcgaatcccctcccgccctccctatcccctcaaccgcgaatcccctcccaccctcccctcactcaaccgcgaatcgcctcccgccctcccgatcccctcaaccgcgaatcccctcccgcccttccctcactcaaccgcgaatcgcctcccgccctccctatcccctcaatcgcaaatcccctcccgccctcccgatcccctcaaccccgctcccctcccgcgccgcccctatccgacgccgtaaaaactaccccctaacgataaatacgcgacgctacgccttaatctacgtttcctccgctaaaatcccgaacgtaaactccgcgcctctcgcttcccccgacaacctcgaaacgaaaatttaaattccgaaacgcgacaacccgacgcgaaataaaaaataaaaaattcgctccgcctaaaaaacccgtctaatccccgccccgccccgccccaaattctcgcgaacccgaaactaactaaaacgctaccacgacgatcgcgcgacgcaatttcgcaaaaacgaacgcataaaaacgaaccct

SEQ ID NO: 14847 - DNA, 956 bp, Artificial Sequence
  chemically treated genomic DNA (Homo sapiens) CpG-island No: 14847
gttttgtgtatttttattttcgttcgtttgtttttttagttcgtacgtaggatttgtttttttagtcgcgggttttttttcgtttttttcgtttttttagtttcgggtcgtttttcgtttttttcgtttttttagtttcgggtcgtttttcgtttttttcgtttttttagtttcgggtcgtttttcgtttttttcgtttttttagtttcgtttttttttcgttttttcggtttttttagtcgcgggttttttttcgttttttttttatttagtttcggatcgttttatatttttttcgtttttttagtcgtaggttttttttcgttttttcggtttttttagtttcgtttttttttcgttttttttttatttagtttcgggtcgtttttcgttttttcggtttttttagtcgcgggttttttttcgttttttttgtttttttagtcgcgggtttttttttattttttttttatttagtcgcgggtcgtttttcgttttttcggtttttttagtcgcgggttttttttcgttttttttttatttagtcgcgggtcgtttttcgttttttttgtttttttagtcgtaggttttttttcgttttttcggtttttttagtttcgtttttttttcgcgtcgtttttgttcggcgtcgtaggagttgttttttggcggtgggtgcgcggcgttgcgttttggtttgcgtttttttcgttggagtttcgggcgtgggtttcgcgtttttcgtttttttcggtagtttcggggcgggaatttgggtttcggagcgcggtagttcggcgcggggtgggaggtggagggttcgtttcgtttgggaggttcgtttggttttcgtttcgtttcgttttaggttttcgcggattcggggttagttgaggcgttgttacggcggtcgcgcggcgtagtttcgtaggggcgggcgtatagaggcgggtttt

SEQ ID NO: 14848 - DNA, 956 bp, Artificial Sequence
  chemically treated genomic DNA (Homo sapiens) CpG-island No: 14848
aaaacccgcctctatacgcccgcccctacgaaactacgccgcgcgaccgccgtaacaacgcctcaactaaccccgaatccgcgaaaacctaaaacgaaacgaaacgaaaaccaaacgaacctcccaaacgaaacgaaccctccacctcccaccccgcgccgaactaccgcgctccgaaacccaaattcccgccccgaaactaccgaaaaaaacgaaaaacgcgaaacccacgcccgaaactccaacgaaaaaaacgcaaaccaaaacgcaacgccgcgcacccaccgccaaaaaacaactcctacgacgccgaacaaaaacgacgcgaaaaaaaaacgaaactaaaaaaaccgaaaaaacgaaaaaaaacctacgactaaaaaaacaaaaaaaacgaaaaacgacccgcgactaaataaaaaaaaaacgaaaaaaaacccgcgactaaaaaaaccgaaaaaacgaaaaacgacccgcgactaaataaaaaaaaaataaaaaaaaacccgcgactaaaaaaacaaaaaaaacgaaaaaaaacccgcgactaaaaaaaccgaaaaaacgaaaaacgacccgaaactaaataaaaaaaaaacgaaaaaaaaacgaaactaaaaaaaccgaaaaaacgaaaaaaaacctacgactaaaaaaacgaaaaaaatataaaacgatccgaaactaaataaaaaaaaaacgaaaaaaaacccgcgactaaaaaaaccgaaaaaacgaaaaaaaaacgaaactaaaaaaacgaaaaaaacgaaaaacgacccgaaactaaaaaaacgaaaaaaacgaaaaacgacccgaaactaaaaaaacgaaaaaaacgaaaaacgacccgaaactaaaaaaacgaaaaaaacgaaaaaaaacccgcgactaaaaaaacaaatcctacgtacgaactaaaaaaacaaacgaacgaaaataaaaatacacaaaac

SEQ ID NO: 14849 - DNA, 1042 bp, Artificial Sequence
  chemically treated genomic DNA (Homo sapiens) CpG-island No: 14849
ttgcgtttcgggagtcgttgggagttcggtcggtttcggtcgcggggaggaaaagtaacggtttgggttttttattcgtgacgcgcgtttttttgcgttttcggggtttttcgtgggtttcgtgcggggataaagttagcgttagtaggaagagtgcgggtaaaggggcgtcgggtttaaggggtcgtatgttcgtaagtcgggaggagagagcgggagatttcgggaggatttcgacgtaggttcggagggtgcgcggtttaagagaaggttagcgggattatagcgcggttacgcggtcggtcgtagtttttatcgcgcgtttgtttttgtttacgtttcgggggtcggttggagttgtattgggattcggtttttagtgtgtcgaagtttaagcgttgcggggcgcggggcgggaacgggaggcggtgtttggggttacggggtcgttttttaggatgagggcgtgttttagcgcgcgggattttcggaagttcgcgttgggtcgggcgggtattagtttcggatttagcgggttttagggttttttgcgtaacgtttgtttcggattcggatttcgggttcgttttttggtcgtcgttttcgggaggatttagtagggtaattgtcgcgtcgtttcggcggttttttttgggttttgtttttcgtcgtttttatttttcgagtttcggggttcgttacggttttttttggttggcggggttagtagaattcgcggcgtttaggttcggacggaaaaaagtagggtcggggtgcggtttggatgagcggagattttcgcgttttgggtttaaaggtgcggggtgcgttttgttgtcgagtttttgttcgtttaggaatattggttacgtcgttacgttagtcgtttttgttttaggtttggaggttcgatttgtttttttaggcgtagtatcgcgttttttttcgcgtgggggagcggcgggcggaagaggtttggggttgggtatcggggatacgcgtttagtttttttggtttttttggggggagtggtcggtttta

SEQ ID NO: 14850 - DNA, 1042 bp, Artificial Sequence
  chemically treated genomic DNA (Homo sapiens) CpG-island No: 14850
taaaaccgaccactccccccaaaaaaaccaaaaaaactaaacgcgtatccccgatacccaaccccaaacctcttccgcccgccgctcccccacgcgaaaaaaaacgcgatactacgcctaaaaaaacaaatcgaacctccaaacctaaaacaaaaacgactaacgtaacgacgtaaccaatattcctaaacgaacaaaaactcgacaacaaaacgcaccccgcacctttaaacccaaaacgcgaaaatctccgctcatccaaaccgcaccccgaccctacttttttccgtccgaacctaaacgccgcgaattctactaaccccgccaaccaaaaaaaaccgtaacgaaccccgaaactcgaaaaataaaaacgacgaaaaacaaaacccaaaaaaaaccgccgaaacgacgcgacaattaccctactaaatcctcccgaaaacgacgaccaaaaaacgaacccgaaatccgaatccgaaacaaacgttacgcaaaaaaccctaaaacccgctaaatccgaaactaatacccgcccgacccaacgcgaacttccgaaaatcccgcgcgctaaaacacgccctcatcctaaaaaacgaccccgtaaccccaaacaccgcctcccgttcccgccccgcgccccgcaacgcttaaacttcgacacactaaaaaccgaatcccaatacaactccaaccgacccccgaaacgtaaacaaaaacaaacgcgcgataaaaactacgaccgaccgcgtaaccgcgctataatcccgctaaccttctcttaaaccgcgcaccctccgaacctacgtcgaaatcctcccgaaatctcccgctctctcctcccgacttacgaacatacgaccccttaaacccgacgcccctttacccgcactcttcctactaacgctaactttatccccgcacgaaacccacgaaaaaccccgaaaacgcaaaaaaacgcgcgtcacgaataaaaaacccaaaccgttacttttcctccccgcgaccgaaaccgaccgaactcccaacgactcccgaaacgcaa

SEQ ID NO: 14851 - DNA, 1042 bp, Artificial Sequence
  chemically treated genomic DNA (Homo sapiens) CpG-island No: 14851
tgaaatcggttattttttttagggaggttaggggagttgggcgcgtgttttcggtgtttagttttagatttttttcgttcgtcgtttttttacgcggaagagaacgcggtgttgcgtttaggagagtaggtcgggtttttagatttggggtaggggcggttggcgtgacggcgtggttagtgtttttgagcgagtaggggttcggtagtagagcgtatttcgtatttttgagtttaaggcgcggagattttcgtttatttaggtcgtatttcggttttgttttttttcgttcggatttaggcgtcgcgggttttattgatttcgttagttaggggaagtcgtgacggatttcgaggttcggggggtggaggcggcgggagatagagtttagggagaatcgtcggggcgacgcggtagttattttattgggttttttcggggacggcgattagagagcgagttcggggttcggattcgaggtaggcgttgcgtagggagttttgagattcgttgagttcgaggttggtgttcgttcggtttagcgcggattttcgagggtttcgcgcgttgggatacgtttttattttgggggacgatttcgtggttttaggtatcgtttttcgttttcgtttcgcgtttcgtagcgtttaggtttcggtatattgaggatcgagttttagtgtagttttagtcgattttcgggacgtagataagggtaggcgcgcggtgaagattgcggtcggtcgcgtagtcgcgttgtggtttcgttggtttttttttgggtcgcgtatttttcggatttgcgtcgggattttttcggagtttttcgtttttttttttcggtttgcgaatatgcggttttttaagttcggcgtttttttgttcgtattttttttgttggcgttggttttgttttcgtacggagtttacgggaggtttcgggggcgtaggggagcgcgcgttacggataaggagtttaagtcgttgtttttttttttcgcggtcggggtcggtcggatttttagcggttttcggagcgtag

SEQ ID NO: 14852 - DNA, 1042 bp, Artificial Sequence
  chemically treated genomic DNA (Homo sapiens) CpG-island No: 14852
ctacgctccgaaaaccgctaaaaatccgaccgaccccgaccgcgaaaaaaaaaaacaacgacttaaactccttatccgtaacgcgcgctcccctacgcccccgaaacctcccgtaaactccgtacgaaaacaaaaccaacgccaacaaaaaaaatacgaacaaaaaaacgccgaacttaaaaaaccgcatattcgcaaaccgaaaaaaaaaaacgaaaaactccgaaaaaatcccgacgcaaatccgaaaaatacgcgacccaaaaaaaaaccaacgaaaccacaacgcgactacgcgaccgaccgcaatcttcaccgcgcgcctacccttatctacgtcccgaaaatcgactaaaactacactaaaactcgatcctcaatataccgaaacctaaacgctacgaaacgcgaaacgaaaacgaaaaacgatacctaaaaccacgaaatcgtcccccaaaataaaaacgtatcccaacgcgcgaaaccctcgaaaatccgcgctaaaccgaacgaacaccaacctcgaactcaacgaatctcaaaactccctacgcaacgcctacctcgaatccgaaccccgaactcgctctctaatcgccgtccccgaaaaaacccaataaaataactaccgcgtcgccccgacgattctccctaaactctatctcccgccgcctccaccccccgaacctcgaaatccgtcacgacttcccctaactaacgaaatcaataaaacccgcgacgcctaaatccgaacgaaaaaaaacaaaaccgaaatacgacctaaataaacgaaaatctccgcgccttaaactcaaaaatacgaaatacgctctactaccgaacccctactcgctcaaaaacactaaccacgccgtcacgccaaccgcccctaccccaaatctaaaaacccgacctactctcctaaacgcaacaccgcgttctcttccgcgtaaaaaaacgacgaacgaaaaaaatctaaaactaaacaccgaaaacacgcgcccaactcccctaacctccctaaaaaaaataaccgatttca

SEQ ID NO: 14853 - DNA, 683 bp, Artificial Sequence
  chemically treated genomic DNA (Homo sapiens) CpG-island No: 14853
tgtcgtaattaagagatttcggtttggcgaaatggcggcgtttggagtttgcgagtgacgttagttggtggggttgttaaggagaatattcgttacggcgtaattaacggtattgttattaagaaatcgtcgtttttgagaaaaaaagagacgttcggtcgtcgagaaatttcgtataagtgttgtgatagaaaaatcgtcggtttcgtagcggtaaaagagttaacgggaacgtcgggtgttgcgattatgatttcggtattggaggacgtgggatggagaatgggatatacggagcgagaagggaaacgtttcgtgtagattaattagcgtcgtcgttatcggaaaattgattcgttagtgttgttaatgaagtgcgtgtgagaaatcgatgattggtgggaggagtagcgttgggcgttggattcgcgagtgtgagaatttggcggcgttaggattttttaggcgcgggtacgaggcgaaatttagcgttgttgttaaagataaatgcgcgtttttttgggcgttattagcggtgtagttagtgattatttttaggttttgagaaattagagatgttagttataaatttttcgtttagggaaagtttgcggcgtcgtgacggatcgattggtattgggtgtaatattgttttgtggtttagagattagaatataaaaata

SEQ ID NO: 14854 - DNA, 683 bp, Artificial Sequence
  chemically treated genomic DNA (Homo sapiens) CpG-island No: 14854
tatttttatattctaatctctaaaccacaaaacaatattacacccaataccaatcgatccgtcacgacgccgcaaactttccctaaacgaaaaatttataactaacatctctaatttctcaaaacctaaaaataatcactaactacaccgctaataacgcccaaaaaaacgcgcatttatctttaacaacaacgctaaatttcgcctcgtacccgcgcctaaaaaatcctaacgccgccaaattctcacactcgcgaatccaacgcccaacgctactcctcccaccaatcatcgatttctcacacgcacttcattaacaacactaacgaatcaattttccgataacgacgacgctaattaatctacacgaaacgtttcccttctcgctccgtatatcccattctccatcccacgtcctccaataccgaaatcataatcgcaacacccgacgttcccgttaactcttttaccgctacgaaaccgacgatttttctatcacaacacttatacgaaatttctcgacgaccgaacgtctctttttttctcaaaaacgacgatttcttaataacaataccgttaattacgccgtaacgaatattctccttaacaaccccaccaactaacgtcactcgcaaactccaaacgccgccatttcgccaaaccgaaatctcttaattacgaca

SEQ ID NO: 14855 - DNA, 683 bp, Artificial Sequence
  chemically treated genomic DNA (Homo sapiens) CpG-island No: 14855
tgtttttatattttagtttttaggttataagataatgttgtatttagtgttagtcgattcgttacggcgtcgtaaattttttttgaacggagggtttgtggttgatatttttagttttttagagtttgggagtgattattggttgtatcgttgatggcgtttaaaagaacgcgtatttgtttttggtaatagcgttgggtttcgtttcgtgttcgcgtttgaagggttttagcgtcgttagatttttatattcgcgggtttagcgtttagcgttgttttttttattagttatcggttttttatacgtattttattggtagtattggcgagttagtttttcggtggcggcggcgttagttggtttgtacgaaacgttttttttttcgtttcgtgtgttttattttttattttacgttttttagtgtcggggttatggtcgtagtattcggcgttttcgttggtttttttgtcgttgcggagtcggcggtttttttgttatagtatttgtacggagtttttcggcggtcgaacgttttttttttttttagagacgacggttttttggtgatagtatcgttggttgcgtcgtaacgaatgttttttttgatagttttattagttggcgttattcgtaggttttagacgtcgttatttcgttaagtcgaggttttttggttgcggta

SEQ ID NO: 14856 - DNA, 683 bp, Artificial Sequence
  chemically treated genomic DNA (Homo sapiens) CpG-island No: 14856
taccgcaaccaaaaaacctcgacttaacgaaataacgacgtctaaaacctacgaataacgccaactaataaaactatcaaaaaaaacattcgttacgacgcaaccaacgatactatcaccaaaaaaccgtcgtctctaaaaaaaaaaaaaacgttcgaccgccgaaaaactccgtacaaatactataacaaaaaaaccgccgactccgcaacgacaaaaaaaccaacgaaaacgccgaatactacgaccataaccccgacactaaaaaacgtaaaataaaaaataaaacacacgaaacgaaaaaaaaaacgtttcgtacaaaccaactaacgccgccgccaccgaaaaactaactcgccaatactaccaataaaatacgtataaaaaaccgataactaataaaaaaaacaacgctaaacgctaaacccgcgaatataaaaatctaacgacgctaaaacccttcaaacgcgaacacgaaacgaaacccaacgctattaccaaaaacaaatacgcgttcttttaaacgccatcaacgatacaaccaataatcactcccaaactctaaaaaactaaaaatatcaaccacaaaccctccgttcaaaaaaaatttacgacgccgtaacgaatcgactaacactaaatacaacattatcttataacctaaaaactaaaatataaaaaca

SEQ ID NO: 14857 - DNA, 830 bp, Artificial Sequence
  chemically treated genomic DNA (Homo sapiens) CpG-island No: 14857
gttggcgttcgtttggtgttcgcgtttgtcgggttttagagtagttagatttttatattagcgagtttagcgtttagcgttatttttttttcggattatcggttttttatattcgtagtagtattggtttgatagtttttcggttgcgatagcgttagttgagttaaataaaacgtttttttgtttgttttgggcgttttattttttattcgaggttttttagtttcggtgttattgtcgtagtatttggcgttcgttagtttttttattagcggcgcggagcgggcggttttgttgttacggtatatgtggtacggagtttttcggtggtcgaaattttttttttttttagagtttagttttttggtgatagcgttgttggttgcgttataaggaatgttgtttttgataattcgtcggtcgtagttattcgtaagttttaggtatcgatatttcgtagaattgaggtttttcggttttagtatagttcgttgttcgatgtttttattttttcggggcgatagtatttaggtcgtcgatttgagggattcggagtttttttagttggggtgagtttggcgttttcgggcggcggcggcggcgttgggttaggggagttcgtcgtttttttaagtcggtgataggggagttgttcgggcgtcgtttttttttagcgtcgtcgtagaattcgtagaatagttcgatttttagaattttgtgttgtggcggcggggttggcgtgtttgtcgtaggatttcgtagattcgtttgtcgttggtttgttggttttaataagtttcgattttagggtgtttgcgtttttttttttt

SEQ ID NO: 14858 - DNA, 830 bp, Artificial Sequence
  chemically treated genomic DNA (Homo sapiens) CpG-island No: 14858
aaaaaaaaaaaacgcaaacaccctaaaatcgaaacttattaaaaccaacaaaccaacgacaaacgaatctacgaaatcctacgacaaacacgccaaccccgccgccacaacacaaaattctaaaaatcgaactattctacgaattctacgacgacgctaaaaaaaaacgacgcccgaacaactcccctatcaccgacttaaaaaaacgacgaactcccctaacccaacgccgccgccgccgcccgaaaacgccaaactcaccccaactaaaaaaactccgaatccctcaaatcgacgacctaaatactatcgccccgaaaaaataaaaacatcgaacaacgaactatactaaaaccgaaaaacctcaattctacgaaatatcgatacctaaaacttacgaataactacgaccgacgaattatcaaaaacaacattccttataacgcaaccaacaacgctatcaccaaaaaactaaactctaaaaaaaaaaaaaatttcgaccaccgaaaaactccgtaccacatataccgtaacaacaaaaccgcccgctccgcgccgctaataaaaaaactaacgaacgccaaatactacgacaataacaccgaaactaaaaaacctcgaataaaaaataaaacgcccaaaacaaacaaaaaaacgttttatttaactcaactaacgctatcgcaaccgaaaaactatcaaaccaatactactacgaatataaaaaaccgataatccgaaaaaaaaataacgctaaacgctaaactcgctaatataaaaatctaactactctaaaacccgacaaacgcgaacaccaaacgaacgccaac

SEQ ID NO: 14859 - DNA, 830 bp, Artificial Sequence
  chemically treated genomic DNA (Homo sapiens) CpG-island No: 14859
aagaaaaagaaacgtaggtattttgaaatcgaaatttgttaggattaataagttaacgatagacgaatttgcggggttttgcgatagatacgttagtttcgtcgttatagtatagggttttggaggtcgagttgttttgcgggttttgcggcggcgttgggaagagacggcgttcgggtagtttttttgttatcggtttggaggagcggcgggtttttttagtttagcgtcgtcgtcgtcgttcgggaacgttaggtttattttagttggggaagtttcgaattttttagatcggcgatttgagtgttgtcgtttcgagaaaatggaggtatcgagtaacgagttgtgttgagatcgagagattttagttttgcgaaatgtcggtgtttggagtttgcgaatgattgcggtcggcgggttgttaaggataatattttttatggcgtaattaatagcgttgttattaagaaattggattttgagaaaaaagagggtttcggttatcgagaaatttcgtgttatatgtgtcgtgatagtaaaatcgttcgtttcgcgtcgttggtgaaagagttaacgaacgttaggtgttgcgatagtgatatcgggattagaaggtttcggatggagaatgggacgtttagagtaagtaggaaaacgttttgtttggtttaattagcgttgtcgtaatcggaaaattgttaggttagtgttgttgcggatgtgagaaatcggtgattcgaaggaggagtggcgttgggcgttggattcgttggtgtgaaaatttggttgttttaggattcggtaagcgcgggtattaggcgaacgttagt

SEQ ID NO: 14860 - DNA, 830 bp, Artificial Sequence
  chemically treated genomic DNA (Homo sapiens) CpG-island No: 14860
actaacgttcgcctaatacccgcgcttaccgaatcctaaaacaaccaaattttcacaccaacgaatccaacgcccaacgccactcctccttcgaatcaccgatttctcacatccgcaacaacactaacctaacaattttccgattacgacaacgctaattaaaccaaacaaaacgttttcctacttactctaaacgtcccattctccatccgaaaccttctaatcccgatatcactatcgcaacacctaacgttcgttaactctttcaccaacgacgcgaaacgaacgattttactatcacgacacatataacacgaaatttctcgataaccgaaaccctcttttttctcaaaatccaatttcttaataacaacgctattaattacgccataaaaaatattatccttaacaacccgccgaccgcaatcattcgcaaactccaaacaccgacatttcgcaaaactaaaatctctcgatctcaacacaactcgttactcgatacctccattttctcgaaacgacaacactcaaatcgccgatctaaaaaattcgaaacttccccaactaaaataaacctaacgttcccgaacgacgacgacgacgctaaactaaaaaaacccgccgctcctccaaaccgataacaaaaaaactacccgaacgccgtctcttcccaacgccgccgcaaaacccgcaaaacaactcgacctccaaaaccctatactataacgacgaaactaacgtatctatcgcaaaaccccgcaaattcgtctatcgttaacttattaatcctaacaaatttcgatttcaaaatacctacgtttctttttctt

SEQ ID NO: 14861 - DNA, 699 bp, Artificial Sequence
  chemically treated genomic DNA (Homo sapiens) CpG-island No: 14861
agcgtagttcgggcggtatgagaaagagaaggcgtttcggtagtttttttgttatcggttcgaggagcgttggttttttagtttagcgtcgcgtcgttcggtaattttaggcgtaattgggtcgaattggggtagttgcgatatcgaattttttatatttgtaatttgggtgttgcggttattgagaaaatggaggcgtagattacgagcggtgtcgatttcgatagatttcggttggcgaaatggtggtgtcgggagtttgcgagtgacgttagtcggcggggttgttaaggataatattcgttttgacgtagttaatggcgtcgttattaagaaattatcgattttgagaaaaaagagaggttcggttatcgagaaatttcgtacgataagtgttgtggtagaaaaatcgtttatttcgcgttataggtaaaatagttaatggaaattttaggtgttgcgatcgtgatatcggtattagagggtttcggatggagaaagcggcgtacggagattaggaaattatgtgtagtataattagtagaaaatcgtttggtcggttattcgggagaaagcgcggattagaaataagcgatttcgatgtagggaatcgcgtagttattgaagaaagtgatttacgtgtagtggtgttagcgaaatattgtagtttggacggtagttgtgggatgttatagagaa

SEQ ID NO: 14862 - DNA, 699 bp, Artificial Sequence
  chemically treated genomic DNA (Homo sapiens) CpG-island No: 14862
ttctctataacatcccacaactaccgtccaaactacaatatttcgctaacaccactacacgtaaatcactttcttcaataactacgcgattccctacatcgaaatcgcttatttctaatccgcgctttctcccgaataaccgaccaaacgattttctactaattatactacacataatttcctaatctccgtacgccgctttctccatccgaaaccctctaataccgatatcacgatcgcaacacctaaaatttccattaactattttacctataacgcgaaataaacgatttttctaccacaacacttatcgtacgaaatttctcgataaccgaacctctcttttttctcaaaatcgataatttcttaataacgacgccattaactacgtcaaaacgaatattatccttaacaaccccgccgactaacgtcactcgcaaactcccgacaccaccatttcgccaaccgaaatctatcgaaatcgacaccgctcgtaatctacgcctccattttctcaataaccgcaacacccaaattacaaatataaaaaattcgatatcgcaactaccccaattcgacccaattacgcctaaaattaccgaacgacgcgacgctaaactaaaaaaccaacgctcctcgaaccgataacaaaaaaactaccgaaacgccttctctttctcataccgcccgaactacgct

SEQ ID NO: 14863 - DNA, 699 bp, Artificial Sequence
  chemically treated genomic DNA (Homo sapiens) CpG-island No: 14863
ttttttgtggtattttatagttgtcgtttaaattgtagtgtttcgttggtattattgtacgtgggttattttttttagtggttgcgcggttttttgtatcgaagtcgtttgtttttgattcgcgttttttttcggatggtcgattagacggttttttgttagttgtgttatatatagttttttggttttcgtgcgtcgttttttttattcgagattttttagtgtcggtgttacggtcgtagtatttggggtttttattggttgttttgtttgtggcgcggagtaggcggtttttttgttatagtatttgtcgtacggagtttttcggtggtcgaatttttttttttttttagagtcgatggttttttggtgacggcgttattggttgcgttaaaacgaatgttgtttttgataatttcgtcggttggcgttattcgtaggttttcggtattattatttcgttagtcgaggtttgtcgaggtcggtatcgttcgtggtttgcgtttttatttttttagtggtcgtagtatttaggttgtagatgtgagggattcggtgtcgtagttgttttagttcggtttagttgcgtttggagttatcgggcggcgcggcgttgggttggggagttagcgtttttcgggtcggtggtaggggagttgtcggggcgtttttttttttttatgtcgttcggattgcgtt

SEQ ID NO: 14864 - DNA, 699 bp, Artificial Sequence
  chemically treated genomic DNA (Homo sapiens) CpG-island No: 14864
aacgcaatccgaacgacataaaaaaaaaaaaacgccccgacaactcccctaccaccgacccgaaaaacgctaactccccaacccaacgccgcgccgcccgataactccaaacgcaactaaaccgaactaaaacaactacgacaccgaatccctcacatctacaacctaaatactacgaccactaaaaaaataaaaacgcaaaccacgaacgataccgacctcgacaaacctcgactaacgaaataataataccgaaaacctacgaataacgccaaccgacgaaattatcaaaaacaacattcgttttaacgcaaccaataacgccgtcaccaaaaaaccatcgactctaaaaaaaaaaaaaaattcgaccaccgaaaaactccgtacgacaaatactataacaaaaaaaccgcctactccgcgccacaaacaaaacaaccaataaaaaccccaaatactacgaccgtaacaccgacactaaaaaatctcgaataaaaaaaacgacgcacgaaaaccaaaaaactatatataacacaactaacaaaaaaccgtctaatcgaccatccgaaaaaaaacgcgaatcaaaaacaaacgacttcgatacaaaaaaccgcgcaaccactaaaaaaaataacccacgtacaataataccaacgaaacactacaatttaaacgacaactataaaataccacaaaaaa

SEQ ID NO: 14865 - DNA, 1272 bp, Artificial Sequence
  chemically treated genomic DNA (Homo sapiens) CpG-island No: 14865
tagcgcgttggtcgtcgtcgttattgttgttgttgcggttgttgtatatcgagcgcgtttcgggttggttttcggcgtttcgtcgttcgcgttcgtcgttcgcgtcggttttagatttttcggggtcgtttttcgttgttgtcgttttcgggaggcgtttcggatttttttcggagtcgtcggtcgtcgttattttttggtcggcgggttgtaggggtaggggcggaggcggtagttcgttcgtttttttgtatcgcggggttattttttttagcggttcgtttggtttcgcggcgcgttcgggggtttcgggggacgcgggtagcggcggtaggtagcgcggggtcgcggggatcggggtcggttttttcggcggcggcgtcggcggcggcggcgggggaggttgcgggggaggttcggcgttttcgtttttcgtttcgcgatatcgattgtcgtcgtggtcgtttttaaagtttatggttgtgtcgtcgtcgtttttttgtcggttcggttggcgggtcgggttttggttgtagggaaagagagcgcggagggggcgggagggagaggggaaaaggagggagggggttcggacgtttggggttagggggcgggacggggaggggatgcggaaggttttgtagttgcggcggcggtaggcgcggtcgttcggtggagtcgtcggttcggttttgatggaggcggcgtcgaattcggttgcgcgtgagagtcgcgtcgcggaagggggggtcggagaagcgagggggcgggagggaggagcggcgcggcgggggtgacggggcgcgggcgcggggtgggttgggggcgcggattagtgggacggagttcggggttcggtttcgagcgggcgggttggaagtgggggattttttagtcgtttttacgggtcggtttcgcgtttacgtcggtttcggggcggatgatttttttttaaacggcgtagcgttgcggttttcgtgagttgggaagtagggggtaggggagaggtcgcgggtttagaaatcgttattggatgggtcggtgggatgtggcgcgggtcgggtggggcgcgatagtttgagtcgagattcgcgtgggtttaagggtgcgcgaggcgggtgttttgggcgcgttcgaattggttgagtagtggagcgggaaagggcgcgggattcgggattgtaatcgttatttttaggttttcgtttttcgcgtttggagtttttaagggtatttttagggattttcgagagttttaaaatagaagttttt

SEQ ID NO: 14866 - DNA, 1272 bp, Artificial Sequence
  chemically treated genomic DNA (Homo sapiens) CpG-island No: 14866
aaaaacttctattttaaaactctcgaaaatccctaaaaatacccttaaaaactccaaacgcgaaaaacgaaaacctaaaaataacgattacaatcccgaatcccgcgccctttcccgctccactactcaaccaattcgaacgcgcccaaaacacccgcctcgcgcacccttaaacccacgcgaatctcgactcaaactatcgcgccccacccgacccgcgccacatcccaccgacccatccaataacgatttctaaacccgcgacctctcccctaccccctacttcccaactcacgaaaaccgcaacgctacgccgtttaaaaaaaaatcatccgccccgaaaccgacgtaaacgcgaaaccgacccgtaaaaacgactaaaaaatcccccacttccaacccgcccgctcgaaaccgaaccccgaactccgtcccactaatccgcgcccccaacccaccccgcgcccgcgccccgtcacccccgccgcgccgctcctccctcccgccccctcgcttctccgacccccccttccgcgacgcgactctcacgcgcaaccgaattcgacgccgcctccatcaaaaccgaaccgacgactccaccgaacgaccgcgcctaccgccgccgcaactacaaaaccttccgcatcccctccccgtcccgccccctaaccccaaacgtccgaaccccctccctccttttcccctctccctcccgccccctccgcgctctctttccctacaaccaaaacccgacccgccaaccgaaccgacaaaaaaacgacgacgacacaaccataaactttaaaaacgaccacgacgacaatcgatatcgcgaaacgaaaaacgaaaacgccgaacctcccccgcaacctcccccgccgccgccgccgacgccgccgccgaaaaaaccgaccccgatccccgcgaccccgcgctacctaccgccgctacccgcgtcccccgaaacccccgaacgcgccgcgaaaccaaacgaaccgctaaaaaaaataaccccgcgatacaaaaaaacgaacgaactaccgcctccgcccctacccctacaacccgccgaccaaaaaataacgacgaccgacgactccgaaaaaaatccgaaacgcctcccgaaaacgacaacaacgaaaaacgaccccgaaaaatctaaaaccgacgcgaacgacgaacgcgaacgacgaaacgccgaaaaccaacccgaaacgcgctcgatatacaacaaccgcaacaacaacaataacgacgacgaccaacgcgcta

SEQ ID NO: 14867 - DNA, 1272 bp, Artificial Sequence
  chemically treated genomic DNA (Homo sapiens) CpG-island No: 14867
agagatttttgttttaaggttttcgaggatttttgagagtgtttttgagggttttaagcgcggggagcgagggtttggaagtggcggttatagtttcgggtttcgcgttttttttcgttttattgtttagttagttcgggcgcgtttagggtattcgtttcgcgtatttttaagtttacgcgggtttcggtttagattgtcgcgttttattcggttcgcgttatattttatcggtttatttagtaacggtttttggattcgcggttttttttttgttttttattttttagtttacgagagtcgtagcgttgcgtcgtttggagaggggttattcgtttcggaatcgacgtgagcgcggggtcggttcgtggaggcggttgagggattttttatttttagttcgttcgttcggagtcgaatttcgaatttcgttttattgattcgcgtttttagtttatttcgcgttcgcgtttcgttattttcgtcgcgtcgtttttttttttcgttttttcgttttttcggttttttttttcgcggcgcggtttttacgcgtagtcgaattcggcgtcgtttttattagagtcgagtcggcggttttatcgaacggtcgcgtttgtcgtcgtcgtagttgtagaatttttcgtatttttttttcgtttcgttttttagttttaggcgttcgggtttttttttttttttttttttttttttttcgtttttttcgcgttttttttttttgtagttagagttcggttcgttagtcgggtcggtaggagggcggcggcggtataattatgagttttgagggcggttacggcggtagtcggtgtcgcggggcggagagcggggacgtcgagtttttttcgtaatttttttcgtcgtcgtcgtcgacgtcgtcgtcgggagagtcggtttcggttttcgcggtttcgcgttatttgtcgtcgttgttcgcgtttttcgagattttcgagcgcgtcgcggggttaagcgagtcgttaggggaggtggtttcgcggtgtaggggagcggacgagttgtcgttttcgtttttgtttttgtagttcgtcggttaggaagtggcggcggtcggcgatttcggggaaggttcgaggcgtttttcggaggcggtagtagcgaaaggcggtttcggggagtttgaggtcggcgcgggcggcgagcgcgagcggcggggcgtcggagattagttcgagacgcgttcggtgtgtagtagtcgtagtagtagtagtggcggcggcgattagcgcgttg

SEQ ID NO: 14868 - DNA, 1272 bp, Artificial Sequence
  chemically treated genomic DNA (Homo sapiens) CpG-island No: 14868
caacgcgctaatcgccgccgccactactactactacgactactacacaccgaacgcgtctcgaactaatctccgacgccccgccgctcgcgctcgccgcccgcgccgacctcaaactccccgaaaccgcctttcgctactaccgcctccgaaaaacgcctcgaaccttccccgaaatcgccgaccgccgccacttcctaaccgacgaactacaaaaacaaaaacgaaaacgacaactcgtccgctcccctacaccgcgaaaccacctcccctaacgactcgcttaaccccgcgacgcgctcgaaaatctcgaaaaacgcgaacaacgacgacaaataacgcgaaaccgcgaaaaccgaaaccgactctcccgacgacgacgtcgacgacgacgacgaaaaaaattacgaaaaaaactcgacgtccccgctctccgccccgcgacaccgactaccgccgtaaccgccctcaaaactcataattataccgccgccgccctcctaccgacccgactaacgaaccgaactctaactacaaaaaaaaaaaacgcgaaaaaaacgaaaaaaaaaaaaaaaaaaaaaaaaaaaaacccgaacgcctaaaactaaaaaacgaaacgaaaaaaaaatacgaaaaattctacaactacgacgacgacaaacgcgaccgttcgataaaaccgccgactcgactctaataaaaacgacgccgaattcgactacgcgtaaaaaccgcgccgcgaaaaaaaaaaccgaaaaaacgaaaaaacgaaaaaaaaaaacgacgcgacgaaaataacgaaacgcgaacgcgaaataaactaaaaacgcgaatcaataaaacgaaattcgaaattcgactccgaacgaacgaactaaaaataaaaaatccctcaaccgcctccacgaaccgaccccgcgctcacgtcgattccgaaacgaataacccctctccaaacgacgcaacgctacgactctcgtaaactaaaaaataaaaaacaaaaaaaaaaccgcgaatccaaaaaccgttactaaataaaccgataaaatataacgcgaaccgaataaaacgcgacaatctaaaccgaaacccgcgtaaacttaaaaatacgcgaaacgaataccctaaacgcgcccgaactaactaaacaataaaacgaaaaaaaacgcgaaacccgaaactataaccgccacttccaaaccctcgctccccgcgcttaaaaccctcaaaaacactctcaaaaatcctcgaaaaccttaaaacaaaaatctct

SEQ ID NO: 14869 - DNA, 508 bp, Artificial Sequence
  chemically treated genomic DNA (Homo sapiens) CpG-island No: 14869
cgtcgtttcgtttgttacgtgtagtcggacgtcgtggcggttttcgtagcggttatggacgtcgtcggcgaattcgacgcggtagaagtagcggcggtcgttagttagggcgaggcgttcgacgcgtagcgagaggtcgttgcggcgcgggttgtttagtagtcggaagcggtcgtgtaggtttagcgtcgtttggtagagttcgttgtttcgcgtcgtagcgtagcggaatatttgcgggttcgtatagggttcgttcgcgcgttagatggtcgttagcggttcgtcgtagtggcggtgcgggtgcgtgaaggtgtagggtagtattgtcgcgtcgtttgttttcgcgtttatttcgggtggtatttgtatggattagcgttgcgttggcgagtttgagggcggggcgggttgcgttaggttcggggttttggggtcgaggcgttcgtattcggggtttggaaattttacgatttaggaaacgtttttttaatttttagtttggaaa

SEQ ID NO: 14870 - DNA, 508 bp, Artificial Sequence
  chemically treated genomic DNA (Homo sapiens) CpG-island No: 14870
tttccaaactaaaaattaaaaaaacgtttcctaaatcgtaaaatttccaaaccccgaatacgaacgcctcgaccccaaaaccccgaacctaacgcaacccgccccgccctcaaactcgccaacgcaacgctaatccatacaaataccacccgaaataaacgcgaaaacaaacgacgcgacaatactaccctacaccttcacgcacccgcaccgccactacgacgaaccgctaacgaccatctaacgcgcgaacgaaccctatacgaacccgcaaatattccgctacgctacgacgcgaaacaacgaactctaccaaacgacgctaaacctacacgaccgcttccgactactaaacaacccgcgccgcaacgacctctcgctacgcgtcgaacgcctcgccctaactaacgaccgccgctacttctaccgcgtcgaattcgccgacgacgtccataaccgctacgaaaaccgccacgacgtccgactacacgtaacaaacgaaacgacg

SEQ ID NO: 14871 - DNA, 508 bp, Artificial Sequence
  chemically treated genomic DNA (Homo sapiens) CpG-island No: 14871
tttttaggttaggggttgggggagcgttttttgggtcgtggggtttttaggtttcgggtgcgggcgtttcgattttagggtttcgagtttgacgtagttcgtttcgtttttaggttcgttagcgtagcgttggtttatgtaggtgttattcgaggtgagcgcggaggtaggcgacgcggtagtgttgttttgtatttttacgtattcgtatcgttattacgacgggtcgttgacggttatttggcgcgcgggcgagttttatgcgggttcgtaggtgtttcgttgcgttgcggcgcggggtagcgagttttgttagacggcgttgagtttgtacggtcgttttcggttgttgggtaattcgcgtcgtaacgatttttcgttgcgcgtcgagcgtttcgttttggttgacgatcgtcgttatttttgtcgcgtcgagttcgtcggcgacgtttatgatcgttacgagagtcgttacggcgttcggttgtacgtgataggcgaggcggcg

SEQ ID NO: 14872 - DNA, 508 bp, Artificial Sequence
  chemically treated genomic DNA (Homo sapiens) CpG-island No: 14872
cgccgcctcgcctatcacgtacaaccgaacgccgtaacgactctcgtaacgatcataaacgtcgccgacgaactcgacgcgacaaaaataacgacgatcgtcaaccaaaacgaaacgctcgacgcgcaacgaaaaatcgttacgacgcgaattacccaacaaccgaaaacgaccgtacaaactcaacgccgtctaacaaaactcgctaccccgcgccgcaacgcaacgaaacacctacgaacccgcataaaactcgcccgcgcgccaaataaccgtcaacgacccgtcgtaataacgatacgaatacgtaaaaatacaaaacaacactaccgcgtcgcctacctccgcgctcacctcgaataacacctacataaaccaacgctacgctaacgaacctaaaaacgaaacgaactacgtcaaactcgaaaccctaaaatcgaaacgcccgcacccgaaacctaaaaaccccacgacccaaaaaacgctcccccaacccctaacctaaaaa

SEQ ID NO: 14873 - DNA, 592 bp, Artificial Sequence
  chemically treated genomic DNA (Homo sapiens) CpG-island No: 14873
ttttttaatacgatcggaggcgtcgcggtcgttattttcggttatcgttcgaggagcgaatttcgttcgaggttttatagtcgtcgttttaagtttagttcggtttattttttttattttttgtattattttcgttagttggttttcgttttttagtagttcgttgagttgtattagcgatacgtcggcgaatcgggtcgttttcggcgttcgttatttttacgtttcggtcgtcgtcgttatcgtcgttgcggttattaggtttcgtcgatcggaagcgtcgtttttaagggcgtttttcgcgggggggatacgtgacgttagttttgggtcgtgacgttattatcgcgcgggcgggcggacgtgacgtaagtgtcgcggttcgtttggagtggaatgtgttagggatagtcgggatttttaaagggaggggaagggttttatgattgggttgtgacgcgtgagcgtattaatgacgttattgcggttcgggagagcgcgttatgaggttataagagttttttttttttaggaagagagatatcgcgatttaaggaaaataggtagtgggaaggaagttttcgtagtttgt

SEQ ID NO: 14874 - DNA, 592 bp, Artificial Sequence
  chemically treated genomic DNA (Homo sapiens) CpG-island No: 14874
acaaactacgaaaacttccttcccactacctattttccttaaatcgcgatatctctcttcctaaaaaaaaaaaactcttataacctcataacgcgctctcccgaaccgcaataacgtcattaatacgctcacgcgtcacaacccaatcataaaacccttcccctccctttaaaaatcccgactatccctaacacattccactccaaacgaaccgcgacacttacgtcacgtccgcccgcccgcgcgataataacgtcacgacccaaaactaacgtcacgtatcccccccgcgaaaaacgcccttaaaaacgacgcttccgatcgacgaaacctaataaccgcaacgacgataacgacgacgaccgaaacgtaaaaataacgaacgccgaaaacgacccgattcgccgacgtatcgctaatacaactcaacgaactactaaaaaacgaaaaccaactaacgaaaataatacaaaaaataaaaaaaataaaccgaactaaacttaaaacgacgactataaaacctcgaacgaaattcgctcctcgaacgataaccgaaaataacgaccgcgacgcctccgatcgtattaaaaaa

SEQ ID NO: 14875 - DNA, 592 bp, Artificial Sequence
  chemically treated genomic DNA (Homo sapiens) CpG-island No: 14875
ataggttgcgggaattttttttttattgtttgttttttttggatcgcggtatttttttttttggaggaaaaaggtttttatgattttatggcgcgttttttcgagtcgtagtgacgttattaatgcgtttacgcgttatagtttaattatagggttttttttttttttttagaagtttcgattgtttttgatatattttattttaagcgagtcgcgatatttacgttacgttcgttcgttcgcgcggtgatgacgttacgatttagggttggcgttacgtgtttttttcgcggggggcgtttttgagggcggcgttttcggtcggcggagtttggtggtcgtagcggcggtggcgacgacggtcgagacgtggggatggcgggcgtcgggagcgattcggttcgtcggcgtgtcgttggtgtagtttaacgagttgttggaggacgagggttagttgacggagatggtgtagaagatggaggaggtgagtcgagttgggtttaaggcggcggttgtgaggtttcgagcggggttcgtttttcgaacggtggtcggagatggcgatcgcggcgttttcggtcgtgttgagggg

SEQ ID NO: 14876 - DNA, 592 bp, Artificial Sequence
  chemically treated genomic DNA (Homo sapiens) CpG-island No: 14876
cccctcaacacgaccgaaaacgccgcgatcgccatctccgaccaccgttcgaaaaacgaaccccgctcgaaacctcacaaccgccgccttaaacccaactcgactcacctcctccatcttctacaccatctccgtcaactaaccctcgtcctccaacaactcgttaaactacaccaacgacacgccgacgaaccgaatcgctcccgacgcccgccatccccacgtctcgaccgtcgtcgccaccgccgctacgaccaccaaactccgccgaccgaaaacgccgccctcaaaaacgccccccgcgaaaaaaacacgtaacgccaaccctaaatcgtaacgtcatcaccgcgcgaacgaacgaacgtaacgtaaatatcgcgactcgcttaaaataaaatatatcaaaaacaatcgaaacttctaaaaaaaaaaaaaaaaccctataattaaactataacgcgtaaacgcattaataacgtcactacgactcgaaaaaacgcgccataaaatcataaaaacctttttcctccaaaaaaaaaaataccgcgatccaaaaaaaacaaacaataaaaaaaaaattcccgcaacctat

SEQ ID NO: 14877 - DNA, 509 bp, Artificial Sequence
  chemically treated genomic DNA (Homo sapiens) CpG-island No: 14877
ggggatatcgggttgcgttttcgtcggtcgtcgcgtagatgcgtatttggagtagattcgggtttcggggttgggggaaagagaaattcgggttttaaatttttttggaagttttttgagggcgcgagttcgtagaggtaggagttttcgcgtacgtgtacgttcgaaattgttaaagtttacgcgcgagtttgatcgtcgcgtggaggcgtcggttgcggggagagaagtcgtttcgtttcggtttttttttgcggcgtttttcggttttggttcggttttagtcgtgcgcgggcggtcgtttttttataagttggtttggttgatttagcgtcgtcgttgggtttttaaagggcggtcgttttttgtcgtttcgggacgttcgtcgagtttttttcgttacggggcgggcgttttcgtcgttattttttttgtttttagtcgggaggacgtttttttattgtatttttcggtcgagttgggtagattttcgtttttttatttggggg

SEQ ID NO: 14878 - DNA, 509 bp, Artificial Sequence
  chemically treated genomic DNA (Homo sapiens) CpG-island No: 14878
cccccaaataaaaaaacgaaaatctacccaactcgaccgaaaaatacaataaaaaaacgtcctcccgactaaaaacaaaaaaaataacgacgaaaacgcccgccccgtaacgaaaaaaactcgacgaacgtcccgaaacgacaaaaaacgaccgccctttaaaaacccaacgacgacgctaaatcaaccaaaccaacttataaaaaaacgaccgcccgcgcacgactaaaaccgaaccaaaaccgaaaaacgccgcaaaaaaaaaccgaaacgaaacgacttctctccccgcaaccgacgcctccacgcgacgatcaaactcgcgcgtaaactttaacaatttcgaacgtacacgtacgcgaaaactcctacctctacgaactcgcgccctcaaaaaacttccaaaaaaatttaaaacccgaatttctctttcccccaaccccgaaacccgaatctactccaaatacgcatctacgcgacgaccgacgaaaacgcaacccgatatcccc

SEQ ID NO: 14879 - DNA, 509 bp, Artificial Sequence
  chemically treated genomic DNA (Homo sapiens) CpG-island No: 14879
tttttaggtgggaggacgggggtttgtttagttcggtcggggagtgtagtaggggggcgttttttcgattaagggtaaaggaggtgacggcggggacgttcgtttcgtgacgaggagggttcggcgagcgtttcggggcgataggaagcggtcgttttttgaaggtttagcggcggcgttgggttagttaggttagtttgtgggggagcggtcgttcgcgtacggttggggtcgggttagggtcggagggcgtcgtaggaaggggtcggggcggggcggttttttttttcgtagtcggcgtttttacgcggcggttaagttcgcgcgtgggttttagtagtttcgggcgtgtacgtgcgcggaggtttttgtttttgcggattcgcgtttttaagagatttttaggagggtttggagttcgggttttttttttttttagtttcggaattcgagtttgttttaagtgcgtatttgcgcggcggtcgacggggacgtagttcggtgttttt

SEQ ID NO: 14880 - DNA, 509 bp, Artificial Sequence
  chemically treated genomic DNA (Homo sapiens) CpG-island No: 14880
aaaaacaccgaactacgtccccgtcgaccgccgcgcaaatacgcacttaaaacaaactcgaattccgaaactaaaaaaaaaaaaaacccgaactccaaaccctcctaaaaatctcttaaaaacgcgaatccgcaaaaacaaaaacctccgcgcacgtacacgcccgaaactactaaaacccacgcgcgaacttaaccgccgcgtaaaaacgccgactacgaaaaaaaaaaccgccccgccccgaccccttcctacgacgccctccgaccctaacccgaccccaaccgtacgcgaacgaccgctcccccacaaactaacctaactaacccaacgccgccgctaaaccttcaaaaaacgaccgcttcctatcgccccgaaacgctcgccgaaccctcctcgtcacgaaacgaacgtccccgccgtcacctcctttacccttaatcgaaaaaacgcccccctactacactccccgaccgaactaaacaaacccccgtcctcccacctaaaaa

SEQ ID NO: 14881 - DNA, 543 bp, Artificial Sequence
  chemically treated genomic DNA (Homo sapiens) CpG-island No: 14881
acgcgtacgacgattcgttagtggaagtcgcggtggcgggttttggcgcggcgggcgtttttttttaatttcgtattggtgtttcgcgttttagtgtcgttttatttttttcgtagcgggtattattttttatttagtttattatttgattcggagattatttgtttatcggttttattattagagttatgggtacggggtcggtttcgtgtagagcgtagagtttagatataaaacgaatttagtagttcgagttgtttttaggtggggttttttgttggtcgtagtttttttgggcgggcggcgcggagaaagcggtttttgtgtgtcgggtttcgcggttgtaacgttttttagttaatcgtcggtaggaacggcgatagggaggtaaacgtgtaggagtcgttgtttcgcgtcgggtttgtttagttttcgttaaggcggcggcggcggcggttgttgttgttgttgttgttgttgttgttgttgttgttttcgtgtttcgtttcggttttcgtttttagggagttttagtttatagtt

SEQ ID NO: 14882 - DNA, 543 bp, Artificial Sequence
  chemically treated genomic DNA (Homo sapiens) CpG-island No: 14882
aactataaactaaaactccctaaaaacgaaaaccgaaacgaaacacgaaaacaacaacaacaacaacaacaacaacaacaacaacaaccgccgccgccgccgccttaacgaaaactaaacaaacccgacgcgaaacaacgactcctacacgtttacctccctatcgccgttcctaccgacgattaactaaaaaacgttacaaccgcgaaacccgacacacaaaaaccgctttctccgcgccgcccgcccaaaaaaactacgaccaacaaaaaaccccacctaaaaacaactcgaactactaaattcgttttatatctaaactctacgctctacacgaaaccgaccccgtacccataactctaataataaaaccgataaacaaataatctccgaatcaaataataaactaaataaaaaataatacccgctacgaaaaaaataaaacgacactaaaacgcgaaacaccaatacgaaattaaaaaaaaacgcccgccgcgccaaaacccgccaccgcgacttccactaacgaatcgtcgtacgcgt

SEQ ID NO: 14883 - DNA, 543 bp, Artificial Sequence
  chemically treated genomic DNA (Homo sapiens) CpG-island No: 14883
agttatgaattgaagttttttagggacggagatcggagcggagtacggaggtagtagtagtagtagtagtagtagtagtagtagtagtcgtcgtcgtcgtcgttttagcggaaattgagtagattcggcgcggagtaacgatttttgtacgtttatttttttgtcgtcgtttttgtcggcggttggttaaaagacgttatagtcgcgagattcgatatataaaagtcgtttttttcgcgtcgttcgtttagggaggttgcggttagtaagggattttatttgagagtagttcgggttgttgagttcgttttgtgtttgagttttgcgttttgtacggaatcgatttcgtatttatggttttgataatggaatcggtgagtaaatggttttcgagttaagtagtggattggatgaaaggtaatgttcgttgcggggagggtgaggcggtattggggcgcggggtattagtgcgaggttaggagggggcgttcgtcgcgttagagttcgttatcgcggtttttattggcggatcgtcgtacgcgt

SEQ ID NO: 14884 - DNA, 543 bp, Artificial Sequence
  chemically treated genomic DNA (Homo sapiens) CpG-island No: 14884
acgcgtacgacgatccgccaataaaaaccgcgataacgaactctaacgcgacgaacgccccctcctaacctcgcactaataccccgcgccccaataccgcctcaccctccccgcaacgaacattacctttcatccaatccactacttaactcgaaaaccatttactcaccgattccattatcaaaaccataaatacgaaatcgattccgtacaaaacgcaaaactcaaacacaaaacgaactcaacaacccgaactactctcaaataaaatcccttactaaccgcaacctccctaaacgaacgacgcgaaaaaaacgacttttatatatcgaatctcgcgactataacgtcttttaaccaaccgccgacaaaaacgacgacaaaaaaataaacgtacaaaaatcgttactccgcgccgaatctactcaatttccgctaaaacgacgacgacgacgactactactactactactactactactactactactacctccgtactccgctccgatctccgtccctaaaaaacttcaattcataact

SEQ ID NO: 14885 - DNA, 840 bp, Artificial Sequence
  chemically treated genomic DNA (Homo sapiens) CpG-island No: 14885
gcgtcgtcgagggaagtagtttttgtcgtacgtttttagttaatttgttcgttcgttttacgcgcgggagtgaagtttcgagtacgattagttgttcggcggaaatgacgaggggttttttgttatttaaaatattttttcgtagttttcgggtgcgtggcgcgcgttacgagttttttcgttcgttcgttgtcgcgcggtttcgtttttaggtcgacggaggcgcgcgaggcgtgcgcgtgcgcgtgtcggtacgaggtcgagtttagggtttgtttggtaggtagataggtgttagtagttcgtagtttggcgttttcgttttgggggtcgttcgggaatagaggcgcgcgaagtgcgcgtgcgcggcggcggaggcggtggcggcgcgaggtagagttagagttcggggtcggttaattaggtgcgggcggttggagtatggttttgtgaggtttttgaggggattcggcggtggcggttacggcgggacgggtcgtttattagttgaatttcgatagttgaggcggttgaggaggtattcgcggttttattatcgaggggagggggatattattgagcgcggggtttatagcgagagttcgggtttttttggttttcgttttcgttttcgtttttttcgttgttgagtgggtttcggaggtgattttcgagattcgcgtacgtttgtagagacggaggtgtggattgtcgtggacgagaacggggtttcgtttgttagaagcgtagcgatgatgaggtaggagggttagtgttgtcggatttttttcgggtgatgagcgggttttgggaagttaggcgttgaggttgttatttgtt

SEQ ID NO: 14886 - DNA, 840 bp, Artificial Sequence
  chemically treated genomic DNA (Homo sapiens) CpG-island No: 14886
aacaaataacaacctcaacgcctaacttcccaaaacccgctcatcacccgaaaaaaatccgacaacactaaccctcctacctcatcatcgctacgcttctaacaaacgaaaccccgttctcgtccacgacaatccacacctccgtctctacaaacgtacgcgaatctcgaaaatcacctccgaaacccactcaacaacgaaaaaaacgaaaacgaaaacgaaaaccaaaaaaacccgaactctcgctataaaccccgcgctcaataatatccccctcccctcgataataaaaccgcgaatacctcctcaaccgcctcaactatcgaaattcaactaataaacgacccgtcccgccgtaaccgccaccgccgaatcccctcaaaaacctcacaaaaccatactccaaccgcccgcacctaattaaccgaccccgaactctaactctacctcgcgccgccaccgcctccgccgccgcgcacgcgcacttcgcgcgcctctattcccgaacgacccccaaaacgaaaacgccaaactacgaactactaacacctatctacctaccaaacaaaccctaaactcgacctcgtaccgacacgcgcacgcgcacgcctcgcgcgcctccgtcgacctaaaaacgaaaccgcgcgacaacgaacgaacgaaaaaactcgtaacgcgcgccacgcacccgaaaactacgaaaaaatattttaaataacaaaaaacccctcgtcatttccgccgaacaactaatcgtactcgaaacttcactcccgcgcgtaaaacgaacgaacaaattaactaaaaacgtacgacaaaaactacttccctcgacgacgc

SEQ ID NO: 14887 - DNA, 840 bp, Artificial Sequence
  chemically treated genomic DNA (Homo sapiens) CpG-island No: 14887
ggtaggtgatagttttaacgtttgattttttaggattcgtttattattcggggaagattcgatagtattagtttttttgttttattatcgttgcgtttttggtaggcggagtttcgttttcgtttacggtagtttatattttcgtttttgtaggcgtacgcgggtttcgggaattattttcggagtttatttagtagcggggagggcgagggcgaaagcgagagttaggaaagttcgggttttcgttgtaagtttcgcgtttagtggtgttttttttttttcggtggtggggtcgcggatatttttttagtcgttttagttgtcggagtttaattggtgggcggttcgtttcgtcgtggtcgttatcgtcgggtttttttagaggttttataaagttatgttttagtcgttcgtatttgattgatcgatttcgggttttggttttgtttcgcgtcgttatcgttttcgtcgtcgcgtacgcgtatttcgcgcgtttttgttttcggacggtttttagagcgggaacgttaggttgcgagttgttggtatttgtttgtttgttagatagattttgggttcggtttcgtgtcggtacgcgtacgcgtacgtttcgcgcgttttcgtcggtttgggggcgggatcgcgcggtagcgagcgggcgggggggttcgtggcgcgcgttacgtattcgagggttgcggagagatattttgggtggtaggaggtttttcgttattttcgtcgggtagttagtcgtgttcggggttttattttcgcgcgtgaggcgagcgggtaagttggttgagggcgtgcggtagaggttgtttttttcggcgacgt

SEQ ID NO: 14888 - DNA, 840 bp, Artificial Sequence
  chemically treated genomic DNA (Homo sapiens) CpG-island No: 14888
acgtcgccgaaaaaaacaacctctaccgcacgccctcaaccaacttacccgctcgcctcacgcgcgaaaataaaaccccgaacacgactaactacccgacgaaaataacgaaaaacctcctaccacccaaaatatctctccgcaaccctcgaatacgtaacgcgcgccacgaacccccccgcccgctcgctaccgcgcgatcccgcccccaaaccgacgaaaacgcgcgaaacgtacgcgtacgcgtaccgacacgaaaccgaacccaaaatctatctaacaaacaaacaaataccaacaactcgcaacctaacgttcccgctctaaaaaccgtccgaaaacaaaaacgcgcgaaatacgcgtacgcgacgacgaaaacgataacgacgcgaaacaaaaccaaaacccgaaatcgatcaatcaaatacgaacgactaaaacataactttataaaacctctaaaaaaacccgacgataacgaccacgacgaaacgaaccgcccaccaattaaactccgacaactaaaacgactaaaaaaatatccgcgaccccaccaccgaaaaaaaaaaaacaccactaaacgcgaaacttacaacgaaaacccgaactttcctaactctcgctttcgccctcgccctccccgctactaaataaactccgaaaataattcccgaaacccgcgtacgcctacaaaaacgaaaatataaactaccgtaaacgaaaacgaaactccgcctaccaaaaacgcaacgataataaaacaaaaaaactaatactatcgaatcttccccgaataataaacgaatcctaaaaaatcaaacgttaaaactatcacctacc

SEQ ID NO: 14889 - DNA, 875 bp, Artificial Sequence
  chemically treated genomic DNA (Homo sapiens) CpG-island No: 14889
gttaagtcgtgggttcgaggggacggcgggggagcgggggggtggggcggcgttgggttttcggtgcgtatattttttgcggatatttagtttagatacgtcggtaggtatcgattacgtacgcggagatacgcgatgcgtttatcgacgtttatagttaagcgtaggttcgtaaacgtggatacgggcgtaaagtagtcgcgtaaagttacggatatataaaggtatcgatagcggcgcgttttcgatcgtaaatttataaagatttataaacgtgagatgtacgtgttcgtataaagatttatacggtttttgggcgtagtttttgtttttcgtaagattttttttttgggtcggcgttttttattttcgtttagttttaggcgttcgacgaaagttgaggggtttcggcgggatttagtttcgtttttgcgttcggcgtttttagttcgtttttcgaaggggtcgcgaggttaggatcggggatttgggatttttaatcgtagcgcggattttcgtttcgttcggggaattgtatttatttggaagtttgcgttatagtcgtttcggtacgtttatttcggcggttcggtcgcgggtttttcggttagcgttttttttcgcgcggcgcggttcgtttttcggttttcgttcgtagttaggtttttttttgtcgggcgtcgggtggcggttcgggtcggtcgcggggcggtttagggagtgtcgttaaagtgttagtttttttcggcgcgcgtttcgttcgcggagtttgagtcgagttcgggttttattttagggagcgttttaaaagtgcgttgttttcgttttttttagttggtttcgtttatagttttttgtatttcggatttttgttt

SEQ ID NO: 14890 - DNA, 875 bp, Artificial Sequence
  chemically treated genomic DNA (Homo sapiens) CpG-island No: 14890
aaacaaaaatccgaaatacaaaaaactataaacgaaaccaactaaaaaaaacgaaaacaacgcacttttaaaacgctccctaaaataaaacccgaactcgactcaaactccgcgaacgaaacgcgcgccgaaaaaaactaacactttaacgacactccctaaaccgccccgcgaccgacccgaaccgccacccgacgcccgacaaaaaaaaacctaactacgaacgaaaaccgaaaaacgaaccgcgccgcgcgaaaaaaaacgctaaccgaaaaacccgcgaccgaaccgccgaaataaacgtaccgaaacgactataacgcaaacttccaaataaatacaattccccgaacgaaacgaaaatccgcgctacgattaaaaatcccaaatccccgatcctaacctcgcgaccccttcgaaaaacgaactaaaaacgccgaacgcaaaaacgaaactaaatcccgccgaaacccctcaactttcgtcgaacgcctaaaactaaacgaaaataaaaaacgccgacccaaaaaaaaaatcttacgaaaaacaaaaactacgcccaaaaaccgtataaatctttatacgaacacgtacatctcacgtttataaatctttataaatttacgatcgaaaacgcgccgctatcgatacctttatatatccgtaactttacgcgactactttacgcccgtatccacgtttacgaacctacgcttaactataaacgtcgataaacgcatcgcgtatctccgcgtacgtaatcgatacctaccgacgtatctaaactaaatatccgcaaaaaatatacgcaccgaaaacccaacgccgccccacccccccgctcccccgccgtcccctcgaacccacgacttaac

SEQ ID NO: 14891 - DNA, 875 bp, Artificial Sequence
  chemically treated genomic DNA (Homo sapiens) CpG-island No: 14891
gggtagggattcgggatgtaggaagttgtgagcgaggttaattagagggggcgggagtagcgtatttttgagacgttttttagagtggaattcgggttcggtttaggtttcgcgggcggggcgcgcgtcgagagaggttggtattttggcgatattttttgagtcgtttcgcggtcggttcgagtcgttattcggcgttcggtaggggggagtttggttgcgggcggggatcggggggcgggtcgcgtcgcgcggagaaaagcgttggtcggagggttcgcggtcgggtcgtcggggtgagcgtgtcgaggcggttgtggcgtaggtttttaggtgagtgtagtttttcgggcggggcgagagttcgcgttgcggttgaagattttaagttttcgattttagtttcgcggttttttcggagggcgggttggggacgtcgggcgtaggggcggggttgggtttcgtcgaggttttttaattttcgtcggacgtttagggttgggcgggagtggggaacgtcgatttaggggagaggttttgcgggagataaaggttacgtttaggggtcgtgtgggtttttgtgcggatacgtgtattttacgtttgtgggtttttgtggatttgcggtcggggacgcgtcgttgtcggtgtttttgtgtgttcgtggttttgcgcggttgttttgcgttcgtgtttacgtttgcgggtttgcgtttggttgtgggcgtcggtgggcgtatcgcgtgttttcgcgtacgtggtcggtgtttgtcgacgtgtttgggttgggtgttcgtagagggtgtgcgtatcgagagtttaacgtcgttttattttttcgttttttcgtcgttttttcgggtttacgatttggt

SEQ ID NO: 14892 - DNA, 875 bp, Artificial Sequence
  chemically treated genomic DNA (Homo sapiens) CpG-island No: 14892
accaaatcgtaaacccgaaaaaacgacgaaaaaacgaaaaaataaaacgacgttaaactctcgatacgcacaccctctacgaacacccaacccaaacacgtcgacaaacaccgaccacgtacgcgaaaacacgcgatacgcccaccgacgcccacaaccaaacgcaaacccgcaaacgtaaacacgaacgcaaaacaaccgcgcaaaaccacgaacacacaaaaacaccgacaacgacgcgtccccgaccgcaaatccacaaaaacccacaaacgtaaaatacacgtatccgcacaaaaacccacacgacccctaaacgtaacctttatctcccgcaaaacctctcccctaaatcgacgttccccactcccgcccaaccctaaacgtccgacgaaaattaaaaaacctcgacgaaacccaaccccgcccctacgcccgacgtccccaacccgccctccgaaaaaaccgcgaaactaaaatcgaaaacttaaaatcttcaaccgcaacgcgaactctcgccccgcccgaaaaactacactcacctaaaaacctacgccacaaccgcctcgacacgctcaccccgacgacccgaccgcgaaccctccgaccaacgcttttctccgcgcgacgcgacccgccccccgatccccgcccgcaaccaaactcccccctaccgaacgccgaataacgactcgaaccgaccgcgaaacgactcaaaaaatatcgccaaaataccaacctctctcgacgcgcgccccgcccgcgaaacctaaaccgaacccgaattccactctaaaaaacgtctcaaaaatacgctactcccgccccctctaattaacctcgctcacaacttcctacatcccgaatccctaccc

SEQ ID NO: 14893 - DNA, 725 bp, Artificial Sequence
  chemically treated genomic DNA (Homo sapiens) CpG-island No: 14893
agggagcggcgggcgagcgaggttcgagcggagatagcggcgtacgttgggtttcgagtttcggtttcgaagtttttttttcggtagtaggtgtgcgcggttgaggtgtttattcgtttttcggttgggttcgtgcggggcgggggaggttagggcgggtttgcgagtttttttttcgtaagtcgggttcgatttatttgttgcggcggcggtagcgtttagttgcgcggggcgcggggagttttgttttcggagtacggggcggcggttcggggcgtcggggcggcggttgtcggggtagcgcgtattatttcgggttgttcgcgcgttttttcggggttgcgacgggttgggcggggcgcggcgaggcgaggcgagggatgcggatcgggtggggttacggaggacggaggcggagggtttagcgttttcgtcggcgcgattttttttttcgttgcggttttttttttttttcggtttcggttttatagtcgtcgtcgtcggttattatcggttggattcgttttagggtcgggcgttgaggatcggtcgttaggtgtagcgtttcgttttttgcggcggcggcggatgcgtcgattgttcgttttcggtttttagttcgtttcggcggttcggagggatatttgaatttagtcgggttcggggagtacgttgaggaggcgaaagtattgggcgaggttttatttttatcgtattttttattt

SEQ ID NO: 14894 - DNA, 725 bp, Artificial Sequence
  chemically treated genomic DNA (Homo sapiens) CpG-island No: 14894
aaataaaaaatacgataaaaataaaacctcgcccaatactttcgcctcctcaacgtactccccgaacccgactaaattcaaatatccctccgaaccgccgaaacgaactaaaaaccgaaaacgaacaatcgacgcatccgccgccgccgcaaaaaacgaaacgctacacctaacgaccgatcctcaacgcccgaccctaaaacgaatccaaccgataataaccgacgacgacgactataaaaccgaaaccgaaaaaaaaaaaaaaccgcaacgaaaaaaaaaatcgcgccgacgaaaacgctaaaccctccgcctccgtcctccgtaaccccacccgatccgcatccctcgcctcgcctcgccgcgccccgcccaacccgtcgcaaccccgaaaaaacgcgcgaacaacccgaaataatacgcgctaccccgacaaccgccgccccgacgccccgaaccgccgccccgtactccgaaaacaaaactccccgcgccccgcgcaactaaacgctaccgccgccgcaacaaataaatcgaacccgacttacgaaaaaaaaactcgcaaacccgccctaacctcccccgccccgcacgaacccaaccgaaaaacgaataaacacctcaaccgcgcacacctactaccgaaaaaaaaacttcgaaaccgaaactcgaaacccaacgtacgccgctatctccgctcgaacctcgctcgcccgccgctccct

SEQ ID NO: 14895 - DNA, 725 bp, Artificial Sequence
  chemically treated genomic DNA (Homo sapiens) CpG-island No: 14895
gggtggagggtgcggtagggatggagtttcgtttagtgttttcgtttttttagcgtgtttttcgggttcggttgggtttaggtgttttttcgggtcgtcggggcgggttggaggtcgggagcgggtagtcgacgtattcgtcgtcgtcgtaggaggcggagcgttgtatttggcggtcggtttttagcgttcggttttgaaacgggtttagtcggtagtgatcggcggcggcgattgtgaggtcggggtcggggaggaggaggagtcgtagcgggagagaaggtcgcgtcggcgggagcgttgggtttttcgttttcgtttttcgtggttttattcggttcgtatttttcgtttcgtttcgtcgcgtttcgtttagttcgtcgtagtttcggaggagcgcgcgagtagttcgggatggtgcgcgttgtttcgatagtcgtcgtttcggcgtttcgagtcgtcgtttcgtgtttcggggatagggtttttcgcgtttcgcgtagttgagcgttgtcgtcgtcgtagtaggtgagtcgggttcggtttgcggagaaggggttcgtagattcgttttggtttttttcgtttcgtacgggtttagtcggagggcgggtaggtattttagtcgcgtatatttgttgtcgggaaaggggtttcggggtcggggttcggagtttagcgtgcgtcgttgttttcgttcgggtttcgttcgttcgtcgtttttt

SEQ ID NO: 14896 - DNA, 725 bp, Artificial Sequence
  chemically treated genomic DNA (Homo sapiens) CpG-island No: 14896
aaaaaacgacgaacgaacgaaacccgaacgaaaacaacgacgcacgctaaactccgaaccccgaccccgaaacccctttcccgacaacaaatatacgcgactaaaatacctacccgccctccgactaaacccgtacgaaacgaaaaaaaccaaaacgaatctacgaaccccttctccgcaaaccgaacccgactcacctactacgacgacgacaacgctcaactacgcgaaacgcgaaaaaccctatccccgaaacacgaaacgacgactcgaaacgccgaaacgacgactatcgaaacaacgcgcaccatcccgaactactcgcgcgctcctccgaaactacgacgaactaaacgaaacgcgacgaaacgaaacgaaaaatacgaaccgaataaaaccacgaaaaacgaaaacgaaaaacccaacgctcccgccgacgcgaccttctctcccgctacgactcctcctcctccccgaccccgacctcacaatcgccgccgccgatcactaccgactaaacccgtttcaaaaccgaacgctaaaaaccgaccgccaaatacaacgctccgcctcctacgacgacgacgaatacgtcgactacccgctcccgacctccaacccgccccgacgacccgaaaaaacacctaaacccaaccgaacccgaaaaacacgctaaaaaaacgaaaacactaaacgaaactccatccctaccgcaccctccaccc

SEQ ID NO: 14897 - DNA, 767 bp, Artificial Sequence
  chemically treated genomic DNA (Homo sapiens) CpG-island No: 14897
tatcgcgttttatttgtgacgtcgcggacgttcggttcgggtaggcgtggggggttcgcgcgtttcgggagtttcgaggcggtagcgcgcgtttttacgtcgcggtttcgcgggaaagtcgggggcggcggtttggttgaggttaagttcggattcggtgtcgagttaagcggggtcgtgcgtcgtcggggtttcgttttcgttcgcgtgattttcgtcgttttttttaattttcgttttttggtcgcgtttgcggtcgtacgtttagcgtttttcgtttaatttcgcgttcgggtcgcgtttttttttttttttgtttttcgtcgttttcgtttttcgagggaaaggttgttgttttttgttttgtttttattttcggtttaggtaatacgtttttttttttacgatatttattatagggttttcgcgtcgttgttttttttttttggatttggggttcgggttggtgagcggcgcgcgtcgtcgttttttcgcgggtaggtgagtcgatggcgtcgggagggtttttcgtttttgcgcgtcggtttgcgaggtttttgtttcggtagcgaggtcgttttcggtcgggttcggttaggtatgttcggtatcgtcgttgtagttagcgcggaggggagttcgtgagtttcgcggcgtttttggttttgttcgagcggttcgatggggttggggggcgggaagaaagggtggtaaataacgattttaaaaatttagttattagtatttgtaggacgaagaagttgatt

SEQ ID NO: 14898 - DNA, 767 bp, Artificial Sequence
  chemically treated genomic DNA (Homo sapiens) CpG-island No: 14898
aatcaacttcttcgtcctacaaatactaataactaaatttttaaaatcgttatttaccaccctttcttcccgccccccaaccccatcgaaccgctcgaacaaaaccaaaaacgccgcgaaactcacgaactcccctccgcgctaactacaacgacgataccgaacatacctaaccgaacccgaccgaaaacgacctcgctaccgaaacaaaaacctcgcaaaccgacgcgcaaaaacgaaaaaccctcccgacgccatcgactcacctacccgcgaaaaaacgacgacgcgcgccgctcaccaacccgaaccccaaatccaaaaaaaaaaaacaacgacgcgaaaaccctataataaatatcgtaaaaaaaaaaacgtattacctaaaccgaaaataaaaacaaaacaaaaaacaacaacctttccctcgaaaaacgaaaacgacgaaaaacaaaaaaaaaaaaaaacgcgacccgaacgcgaaattaaacgaaaaacgctaaacgtacgaccgcaaacgcgaccaaaaaacgaaaattaaaaaaaacgacgaaaatcacgcgaacgaaaacgaaaccccgacgacgcacgaccccgcttaactcgacaccgaatccgaacttaacctcaaccaaaccgccgcccccgactttcccgcgaaaccgcgacgtaaaaacgcgcgctaccgcctcgaaactcccgaaacgcgcgaaccccccacgcctacccgaaccgaacgtccgcgacgtcacaaataaaacgcgata

SEQ ID NO: 14899 - DNA, 767 bp, Artificial Sequence
  chemically treated genomic DNA (Homo sapiens) CpG-island No: 14899
gattagttttttcgttttataaatattaatgattggatttttaaaatcgttgtttgttatttttttttttcgttttttaattttatcgggtcgttcgggtagggttaagggcgtcgcgggatttacgagttttttttcgcgttggttgtagcggcgatgtcgggtatgtttggtcgggttcggtcgggggcggtttcgttgtcggggtagggatttcgtaggtcggcgcgtagaggcgaggaattttttcggcgttatcgatttatttattcgcggagaggcgacggcgcgcgtcgtttattagttcgggttttagatttaaggaggaggggtagcggcgcggggattttgtggtgggtgtcgtaaggaggaaaacgtgttatttaagtcggggatgaggatagagtaggaggtagtagtttttttttcgagaaacggaagcggcggggagtaggaggaggaggaggcgcggttcgggcgcgaggttaggcgaggggcgttgggcgtgcggtcgtaggcgcggttagaggacgagggttggggaggacggcggaggttacgcgagcgaaggcgaagtttcggcgacgtacggtttcgtttggttcggtatcggattcgagtttggttttagttaggtcgtcgttttcggttttttcgcgggatcgcggcgtggaaacgcgcgttgtcgtttcggggttttcgggacgcgcgggttttttacgtttgttcgagtcgggcgttcgcgacgttataagtggagcgcgatg

SEQ ID NO: 14900 - DNA, 767 bp, Artificial Sequence
  chemically treated genomic DNA (Homo sapiens) CpG-island No: 14900
catcgcgctccacttataacgtcgcgaacgcccgactcgaacaaacgtaaaaaacccgcgcgtcccgaaaaccccgaaacgacaacgcgcgtttccacgccgcgatcccgcgaaaaaaccgaaaacgacgacctaactaaaaccaaactcgaatccgataccgaaccaaacgaaaccgtacgtcgccgaaacttcgccttcgctcgcgtaacctccgccgtcctccccaaccctcgtcctctaaccgcgcctacgaccgcacgcccaacgcccctcgcctaacctcgcgcccgaaccgcgcctcctcctcctcctactccccgccgcttccgtttctcgaaaaaaaaactactacctcctactctatcctcatccccgacttaaataacacgttttcctccttacgacacccaccacaaaatccccgcgccgctacccctcctccttaaatctaaaacccgaactaataaacgacgcgcgccgtcgcctctccgcgaataaataaatcgataacgccgaaaaaattcctcgcctctacgcgccgacctacgaaatccctaccccgacaacgaaaccgcccccgaccgaacccgaccaaacatacccgacatcgccgctacaaccaacgcgaaaaaaaactcgtaaatcccgcgacgcccttaaccctacccgaacgacccgataaaattaaaaaacgaaaaaaaaaaataacaaacaacgattttaaaaatccaatcattaatatttataaaacgaaaaaactaatc

SEQ ID NO: 14901 - DNA, 606 bp, Artificial Sequence
  chemically treated genomic DNA (Homo sapiens) CpG-island No: 14901
ttttcgtacgtttttttcggtttcgttttttttagagcgtgggtttcgcgcgtcgttatcgttcggtcgggaggcgcggggttttttagaaggttcgggtatgtcggagggagtcgcggtgtagagatttgttacgcggttgttcgggcggcgcgcgttggagtagttttgttttttttgttttcgacgggtattttgttttgcggaatatttattcgagttttgcgcgggaggggcggtcgggaggcgcgcgggtatgcggaggggaaatagggttgtagttttaagtttaggtaggacgtttttagttattttatcggaaagtgggtagcgtcgcgttttcggttagttagagttttaggtaaataaagagttcggtgtttgcggggttttggttttagtggttcgttttgttatttcgttttttaatatacgtattcgtaggattttttttgagggtttttttttttggagtgagtattgaacgtagagcgtttggacggtggcgcggcgtttacgattcggtttcgcgtagattttagagatttttgtaggatagggagtagtttttaaaggtttttttttttttttttttatttgttttat

SEQ ID NO: 14902 - DNA, 606 bp, Artificial Sequence
  chemically treated genomic DNA (Homo sapiens) CpG-island No: 14902
ataaaacaaataaaaaaaaaaaaaaaaaaacctttaaaaactactccctatcctacaaaaatctctaaaatctacgcgaaaccgaatcgtaaacgccgcgccaccgtccaaacgctctacgttcaatactcactccaaaaaaaaaaaccctcaaaaaaaatcctacgaatacgtatattaaaaaacgaaataacaaaacgaaccactaaaaccaaaaccccgcaaacaccgaactctttatttacctaaaactctaactaaccgaaaacgcgacgctacccactttccgataaaataactaaaaacgtcctacctaaacttaaaactacaaccctatttcccctccgcatacccgcgcgcctcccgaccgcccctcccgcgcaaaactcgaataaatattccgcaaaacaaaatacccgtcgaaaacaaaaaaaacaaaactactccaacgcgcgccgcccgaacaaccgcgtaacaaatctctacaccgcgactccctccgacatacccgaaccttctaaaaaaccccgcgcctcccgaccgaacgataacgacgcgcgaaacccacgctctaaaaaaaacgaaaccgaaaaaaacgtacgaaaa

SEQ ID NO: 14903 - DNA, 606 bp, Artificial Sequence
  chemically treated genomic DNA (Homo sapiens) CpG-island No: 14903
gtgaggtaaataggaggaaggaggaaagggtttttaggagttgttttttattttgtaggagtttttggagtttgcgcggggtcgggtcgtgaacgtcgcgttatcgtttaagcgttttgcgtttagtgtttattttaaaaaaggaaatttttaaagaaagttttgcgggtgcgtgtattggaaagcggagtgatagagcgagttattgaggttagagtttcgtagatatcgagttttttatttatttggggttttgattaatcggagacgcggcgttgtttatttttcgataaggtgattaagggcgttttgtttgggtttgaagttgtagttttgtttttttttcgtatgttcgcgcgtttttcggtcgtttttttcgcgtagggttcgggtgggtgtttcgtagggtaggatgttcgtcgggagtagaggaaataaagttgttttagcgcgcgtcgttcgggtagtcgcgtggtaagtttttgtatcgcggtttttttcgatatgttcgagttttttagggagtttcgcgtttttcggtcgggcggtggcggcgcgcggggtttacgttttgaggagggcggggtcggggagggcgtgcgggga

SEQ ID NO: 14904 - DNA, 606 bp, Artificial Sequence
  chemically treated genomic DNA (Homo sapiens) CpG-island No: 14904
tccccgcacgccctccccgaccccgccctcctcaaaacgtaaaccccgcgcgccgccaccgcccgaccgaaaaacgcgaaactccctaaaaaactcgaacatatcgaaaaaaaccgcgatacaaaaacttaccacgcgactacccgaacgacgcgcgctaaaacaactttatttcctctactcccgacgaacatcctaccctacgaaacacccacccgaaccctacgcgaaaaaaacgaccgaaaaacgcgcgaacatacgaaaaaaaaacaaaactacaacttcaaacccaaacaaaacgcccttaatcaccttatcgaaaaataaacaacgccgcgtctccgattaatcaaaaccccaaataaataaaaaactcgatatctacgaaactctaacctcaataactcgctctatcactccgctttccaatacacgcacccgcaaaactttctttaaaaatttccttttttaaaataaacactaaacgcaaaacgcttaaacgataacgcgacgttcacgacccgaccccgcgcaaactccaaaaactcctacaaaataaaaaacaactcctaaaaaccctttcctccttcctcctatttacctcac

SEQ ID NO: 14905 - DNA, 734 bp, Artificial Sequence
  chemically treated genomic DNA (Homo sapiens) CpG-island No: 14905
gcgcgtcgttttcgtcgttgtcggggtcgtcggttcggggagtcgttcgtcgtttatcggtgaacgggagcgcgttttttttttcgagggattaagcgttcgcgtacgtatttcgtcgcgtcggaagcggggattattggcggtttagttgggagtgatcgcggtcgaatgattcggggcgatttcgtagtaagggcgttttcggaggcggtaaagttttttgagaatcggcgcgtttttcgtcgcgacggattttattcggtcgggcgtttagttttttcgtcgttttttttagttcggtcgttttttttaacggtcgtcgtagtttttttatggatcgagagcgcgggtttgtagtcggtagtttcgttcggcgcgcggtttcgggtaggtcgttttttttcgtttttttgcgtcgcgaggttttttttcgtttcgtttttcgggtttcggcgtaaattagagtgtcgcgtagttgacgagcgatgtttgcgatgattttatttttggtgtgggatgacgttaaatttaagatggatggaattatagcgcgatgcggcggttgggcgcgcgcgagtcgaagtgtgagcggaaaggggttcggcgtttgtttcgagattgaagatcggtgagtaattgttacgtttttagttttaggagaattgcggggttttttgggaggttatagttttttcgtaaaaaacggttttttttgacgtaattttgaggtgatt

SEQ ID NO: 14906 - DNA, 734 bp, Artificial Sequence
  chemically treated genomic DNA (Homo sapiens) CpG-island No: 14906
aatcacctcaaaattacgtcaaaaaaaaccgttttttacgaaaaaactataacctcccaaaaaaccccgcaattctcctaaaactaaaaacgtaacaattactcaccgatcttcaatctcgaaacaaacgccgaacccctttccgctcacacttcgactcgcgcgcgcccaaccgccgcatcgcgctataattccatccatcttaaatttaacgtcatcccacaccaaaaataaaatcatcgcaaacatcgctcgtcaactacgcgacactctaatttacgccgaaacccgaaaaacgaaacgaaaaaaaacctcgcgacgcaaaaaaacgaaaaaaaacgacctacccgaaaccgcgcgccgaacgaaactaccgactacaaacccgcgctctcgatccataaaaaaactacgacgaccgttaaaaaaaacgaccgaactaaaaaaaacgacgaaaaaactaaacgcccgaccgaataaaatccgtcgcgacgaaaaacgcgccgattctcaaaaaactttaccgcctccgaaaacgcccttactacgaaatcgccccgaatcattcgaccgcgatcactcccaactaaaccgccaataatccccgcttccgacgcgacgaaatacgtacgcgaacgcttaatccctcgaaaaaaaaaacgcgctcccgttcaccgataaacgacgaacgactccccgaaccgacgaccccgacaacgacgaaaacgacgcgc

SEQ ID NO: 14907 - DNA, 734 bp, Artificial Sequence
  chemically treated genomic DNA (Homo sapiens) CpG-island No: 14907
aattattttagagttacgttaggaaaggtcgttttttgcggggaggttgtagttttttaaggagtttcgtagtttttttagagttaggggcgtgatagttatttatcggtttttagtttcgaggtagacgtcgggttttttttcgtttatatttcggttcgcgcgcgtttagtcgtcgtatcgcgttgtgattttatttattttgaatttgacgttattttatattagggatgaggttatcgtaggtatcgttcgttaattgcgcggtattttgatttgcgtcgggattcggagggcggagcgggggggggtttcgcggcgtagggggacgggggagggcggtttgttcggagtcgcgcgtcgaacggagttgtcggttgtaagttcgcgttttcggtttatgaggggattgcggcggtcgttaggggaggcggtcgggttgggggaaacggcgaggaggttgagcgttcggtcgggtggagttcgtcgcggcgaggagcgcgtcgatttttaggggattttgtcgttttcggaggcgtttttgttgcggggtcgtttcgggttattcggtcgcggttatttttagttgggtcgttagtagttttcgttttcggcgcggcgggatgcgtgcgcgagcgtttagtttttcggaggggaggacgcgttttcgtttatcggtggacggcgggcgatttttcgagtcgacgatttcgatagcgacgggagcgacgcgt

SEQ ID NO: 14908 - DNA, 734 bp, Artificial Sequence
  chemically treated genomic DNA (Homo sapiens) CpG-island No: 14908
acgcgtcgctcccgtcgctatcgaaatcgtcgactcgaaaaatcgcccgccgtccaccgataaacgaaaacgcgtcctcccctccgaaaaactaaacgctcgcgcacgcatcccgccgcgccgaaaacgaaaactactaacgacccaactaaaaataaccgcgaccgaataacccgaaacgaccccgcaacaaaaacgcctccgaaaacgacaaaatcccctaaaaatcgacgcgctcctcgccgcgacgaactccacccgaccgaacgctcaacctcctcgccgtttcccccaacccgaccgcctcccctaacgaccgccgcaatcccctcataaaccgaaaacgcgaacttacaaccgacaactccgttcgacgcgcgactccgaacaaaccgccctcccccgtccccctacgccgcgaaacccccccccgctccgccctccgaatcccgacgcaaatcaaaataccgcgcaattaacgaacgatacctacgataacctcatccctaatataaaataacgtcaaattcaaaataaataaaatcacaacgcgatacgacgactaaacgcgcgcgaaccgaaatataaacgaaaaaaaacccgacgtctacctcgaaactaaaaaccgataaataactatcacgcccctaactctaaaaaaactacgaaactccttaaaaaactacaacctccccgcaaaaaacgacctttcctaacgtaactctaaaataatt

SEQ ID NO: 14909 - DNA, 624 bp, Artificial Sequence
  chemically treated genomic DNA (Homo sapiens) CpG-island No: 14909
agggtgatcgcgatttttatcgcgaggtggattagcgcgagatcgagtagttggtgggcgacgatttttagcgttgcgtttatttcgagatttcggttaagaagaatagtagtttggattagatgtttcgcgcgtttttcgttatggttaagttgtttagcgagatgagtttagatttgtatcgtaaggtttcggtgtagtattgcgacgtgttgtataagaaggcgttgcggaataagaagttgttgcgggtcggtagcggcggcggcggcggcgattcgggcgattttttggtatcgtggtatttttcgcgcgtcggtttagcgtatatagcgattttatgtatattcgcgagaaggttagcgtcggtagttaggttaaggataaggagcgttgcgttattagttaggagtttcgtcgcgttggcgatataatttaaggaggatttttttgttaagttaaatttaacggttcggtgcgttttaggtcgggagcgcgcgcggattggcgttttttttttcggcgattcgtttttagtattggggaggcgttattgaatcgagaagggacggttatttgtttcggaaggaaagagaacgggttaagattgggattattttttat

SEQ ID NO: 14910 - DNA, 624 bp, Artificial Sequence
  chemically treated genomic DNA (Homo sapiens) CpG-island No: 14910
ataaaaaataatcccaatcttaacccgttctctttccttccgaaacaaataaccgtcccttctcgattcaataacgcctccccaatactaaaaacgaatcgccgaaaaaaaaaacgccaatccgcgcgcgctcccgacctaaaacgcaccgaaccgttaaatttaacttaacaaaaaaatcctccttaaattatatcgccaacgcgacgaaactcctaactaataacgcaacgctccttatccttaacctaactaccgacgctaaccttctcgcgaatatacataaaatcgctatatacgctaaaccgacgcgcgaaaaataccacgataccaaaaaatcgcccgaatcgccgccgccgccgccgctaccgacccgcaacaacttcttattccgcaacgccttcttatacaacacgtcgcaatactacaccgaaaccttacgatacaaatctaaactcatctcgctaaacaacttaaccataacgaaaaacgcgcgaaacatctaatccaaactactattcttcttaaccgaaatctcgaaataaacgcaacgctaaaaatcgtcgcccaccaactactcgatctcgcgctaatccacctcgcgataaaaatcgcgatcaccct

SEQ ID NO: 14911 - DNA, 624 bp, Artificial Sequence
  chemically treated genomic DNA (Homo sapiens) CpG-island No: 14911
gtggggaatagttttagttttggttcgtttttttttttttcggagtagatgatcgttttttttcggtttagtggcgtttttttagtgttgggggcggatcgtcgggaggggagacgttagttcgcgcgcgttttcggtttggggcgtatcgggtcgttggatttgatttaataaaaaggttttttttaggttgtgtcgttagcgcggcgaggtttttagttgatgacgtagcgttttttgtttttggtttggttgtcggcgttggttttttcgcggatgtatatgaggtcgttgtgtacgttgggtcggcgcgcgaagggtgttacgatgttaaagggtcgttcgggtcgtcgtcgtcgtcgtcgttgtcggttcgtagtagttttttgtttcgtagcgtttttttgtgtagtacgtcgtagtattgtatcgagattttgcggtgtaggtttgggtttatttcgttgggtagtttggttatggcgaagagcgcgcggaatatttggtttaggttgttgttttttttggtcgagatttcgaagtaggcgtagcgttgggggtcgtcgtttattagttgttcgatttcgcgttggtttatttcgcggtagaagtcgcggttatttt

SEQ ID NO: 14912 - DNA, 624 bp, Artificial Sequence
  chemically treated genomic DNA (Homo sapiens) CpG-island No: 14912
aaaataaccgcgacttctaccgcgaaataaaccaacgcgaaatcgaacaactaataaacgacgacccccaacgctacgcctacttcgaaatctcgaccaaaaaaaacaacaacctaaaccaaatattccgcgcgctcttcgccataaccaaactacccaacgaaataaacccaaacctacaccgcaaaatctcgatacaatactacgacgtactacacaaaaaaacgctacgaaacaaaaaactactacgaaccgacaacgacgacgacgacgacgacccgaacgaccctttaacatcgtaacacccttcgcgcgccgacccaacgtacacaacgacctcatatacatccgcgaaaaaaccaacgccgacaaccaaaccaaaaacaaaaaacgctacgtcatcaactaaaaacctcgccgcgctaacgacacaacctaaaaaaaacctttttattaaatcaaatccaacgacccgatacgccccaaaccgaaaacgcgcgcgaactaacgtctcccctcccgacgatccgcccccaacactaaaaaaacgccactaaaccgaaaaaaaacgatcatctactccgaaaaaaaaaaaaacgaaccaaaactaaaactattccccac

SEQ ID NO: 14913 - DNA, 948 bp, Artificial Sequence
  chemically treated genomic DNA (Homo sapiens) CpG-island No: 14913
agtgttcgtcgcgtatcgtttttagagtaaagcgaattttagaagagggcgtggggttttgggcgtgtggggtttgggcgtgtgtgattcgggttaagtttaagttcgtaggaggttgcgcgggaagttgtttatagttacgattcgcggttttcggtttttagttttatcgtcgttaggtaagggtagggacgttaggttagttataggttcgggtgcggtagtcggcgattaaaggtattgggcgggaggtcggatttaaggggatattgttacgtagttgtagcggaatcggtaggttttgcggcgaaatatattgggatttgtagttttcggtttttttagagttgtcgcgagtttttagataaagaggtatttcgcggtgacggggaattatattttttagaaggtcggaatatgttgggggttatcgggaaagcgtttcgattggcggtatttattcggttttataggttcggtttcgggggcgcgtggttgtagcggggttcgcgtggtgtttttgaggcggttttcggatgaagagatttgggaattcgggagtcgaggtaacgaatagttcggtggtagggtttgattgttgcggaggtttcggtaatattgattttagataggtattgatcgtatcggatcgtcgcggaaattgggagagggatttgtaaggtcgaggggcgtgaaggtttgcggcgttttaaacgttgcgggcggggtcgttagtttttaggtaatgggggcgtggcgtggcgggggtgggggagtcgcgtgcgggagcgtcggttggtgtttgtgtgtgtgcgtgtgcgcgcgcgtgtaaattttagattgcgtgtgttagagacgggggcgtttttgagttcgtttgattgtgtgtttgtgtgtggttttgagattgtgtgagatttagaggttgttcgtgttagtttttgggat

SEQ ID NO: 14914 - DNA, 948 bp, Artificial Sequence
  chemically treated genomic DNA (Homo sapiens) CpG-island No: 14914
atcccaaaaactaacacgaacaacctctaaatctcacacaatctcaaaaccacacacaaacacacaatcaaacgaactcaaaaacgcccccgtctctaacacacgcaatctaaaatttacacgcgcgcgcacacgcacacacacaaacaccaaccgacgctcccgcacgcgactcccccacccccgccacgccacgcccccattacctaaaaactaacgaccccgcccgcaacgtttaaaacgccgcaaaccttcacgcccctcgaccttacaaatccctctcccaatttccgcgacgatccgatacgatcaatacctatctaaaatcaatattaccgaaacctccgcaacaatcaaaccctaccaccgaactattcgttacctcgactcccgaattcccaaatctcttcatccgaaaaccgcctcaaaaacaccacgcgaaccccgctacaaccacgcgcccccgaaaccgaacctataaaaccgaataaataccgccaatcgaaacgctttcccgataacccccaacatattccgaccttctaaaaaatataattccccgtcaccgcgaaatacctctttatctaaaaactcgcgacaactctaaaaaaaccgaaaactacaaatcccaatatatttcgccgcaaaacctaccgattccgctacaactacgtaacaatatccccttaaatccgacctcccgcccaatacctttaatcgccgactaccgcacccgaacctataactaacctaacgtccctacccttacctaacgacgataaaactaaaaaccgaaaaccgcgaatcgtaactataaacaacttcccgcgcaacctcctacgaacttaaacttaacccgaatcacacacgcccaaaccccacacgcccaaaaccccacgccctcttctaaaattcgctttactctaaaaacgatacgcgacgaacact

SEQ ID NO: 14915 - DNA, 948 bp, Artificial Sequence
  chemically treated genomic DNA (Homo sapiens) CpG-island No: 14915
attttaaagattaatacggataatttttgagttttatataattttagggttatatataggtatataattagacgagtttaggaacgttttcgtttttgatatacgtaatttgaggtttatacgcgcgcgtatacgtatatatatagatattagtcggcgttttcgtacgcggtttttttattttcgttacgttacgtttttattgtttgggaattggcggtttcgttcgtagcgtttgaggcgtcgtaagtttttacgtttttcggttttgtagattttttttttagttttcgcggcggttcggtgcggttagtatttgtttaaaattaatattgtcgaggttttcgtagtagttaggttttgttatcgagttgttcgttatttcggttttcgggtttttagatttttttattcgggggtcgttttaggagtattacgcgggtttcgttgtagttacgcgttttcggaatcggatttatagagtcgggtaagtgtcgttagtcggggcgttttttcggtgatttttaatatatttcggttttttgggaaatgtagtttttcgttatcgcgaagtgtttttttatttgggggttcgcgatagttttagaggagtcgagaattataagttttagtgtgtttcgtcgtagagtttgtcggtttcgttgtagttacgtagtagtatttttttggattcggtttttcgtttagtgtttttggtcgtcggttgtcgtattcgagtttgtaattgatttggcgtttttgtttttgtttggcggcggtggggttagaggtcgggggtcgcgggtcgtagttataagtagtttttcgcgtagttttttgcggatttggatttggttcgggttatatacgtttaggttttatacgtttagggttttacgtttttttttgaaattcgttttattttgggggcggtgcgcgacgagtatt

SEQ ID NO: 14916 - DNA, 948 bp, Artificial Sequence
  chemically treated genomic DNA (Homo sapiens) CpG-island No: 14916
aatactcgtcgcgcaccgcccccaaaataaaacgaatttcaaaaaaaaacgtaaaaccctaaacgtataaaacctaaacgtatataacccgaaccaaatccaaatccgcaaaaaactacgcgaaaaactacttataactacgacccgcgacccccgacctctaaccccaccgccgccaaacaaaaacaaaaacgccaaatcaattacaaactcgaatacgacaaccgacgaccaaaaacactaaacgaaaaaccgaatccaaaaaaatactactacgtaactacaacgaaaccgacaaactctacgacgaaacacactaaaacttataattctcgactcctctaaaactatcgcgaacccccaaataaaaaaacacttcgcgataacgaaaaactacatttcccaaaaaaccgaaatatattaaaaatcaccgaaaaaacgccccgactaacgacacttacccgactctataaatccgattccgaaaacgcgtaactacaacgaaacccgcgtaatactcctaaaacgacccccgaataaaaaaatctaaaaacccgaaaaccgaaataacgaacaactcgataacaaaacctaactactacgaaaacctcgacaatattaattttaaacaaatactaaccgcaccgaaccgccgcgaaaactaaaaaaaaaatctacaaaaccgaaaaacgtaaaaacttacgacgcctcaaacgctacgaacgaaaccgccaattcccaaacaataaaaacgtaacgtaacgaaaataaaaaaaccgcgtacgaaaacgccgactaatatctatatatatacgtatacgcgcgcgtataaacctcaaattacgtatatcaaaaacgaaaacgttcctaaactcgtctaattatatacctatatataaccctaaaattatataaaactcaaaaattatccgtattaatctttaaaat

SEQ ID NO: 14917 - DNA, 531 bp, Artificial Sequence
  chemically treated genomic DNA (Homo sapiens) CpG-island No: 14917
ttcgttcgggttatcgtcgcgggggtttattggtagcggtttttgcgtatgttcggaagagcgggtagggtttttatttcgggagcggagacggagaataggttatgtgggagtcggcgggggtatttgtcggcgatattcgagcgggggtcggaagtggggttatagttcgtagtaggagtttcgggttagatcgtggcgtcggtagcggtttttgggttggaggaggatgatgaggagcgacggaagcgacgcgggggtacgttgttgcgcggcgttcggtttcgtgttcgcggtcgattgcgtagtttgttcgcgagtttgagtaagtgcggttcggggatttcgagttcgcggggttcgagcgtcggttcgttttttttaggagggtcgcggggagtcgtcggtttttttaggcgggcgcgaaattttttcgggaggttgtggggggagtttcggggttagtgcggttttttttgggggtcgtgcgggggtcgagcgtcgggggttgtggaggattagttcggggtg

SEQ ID NO: 14918 - DNA, 531 bp, Artificial Sequence
  chemically treated genomic DNA (Homo sapiens) CpG-island No: 14918
caccccgaactaatcctccacaacccccgacgctcgacccccgcacgacccccaaaaaaaaccgcactaaccccgaaactccccccacaacctcccgaaaaaatttcgcgcccgcctaaaaaaaccgacgactccccgcgaccctcctaaaaaaaacgaaccgacgctcgaaccccgcgaactcgaaatccccgaaccgcacttactcaaactcgcgaacaaactacgcaatcgaccgcgaacacgaaaccgaacgccgcgcaacaacgtacccccgcgtcgcttccgtcgctcctcatcatcctcctccaacccaaaaaccgctaccgacgccacgatctaacccgaaactcctactacgaactataaccccacttccgacccccgctcgaatatcgccgacaaatacccccgccgactcccacataacctattctccgtctccgctcccgaaataaaaaccctacccgctcttccgaacatacgcaaaaaccgctaccaataaacccccgcgacgataacccgaacgaa

SEQ ID NO: 14919 - DNA, 531 bp, Artificial Sequence
  chemically treated genomic DNA (Homo sapiens) CpG-island No: 14919
tatttcgggttggttttttataattttcggcgttcggttttcgtacgatttttaggggaagtcgtattagtttcggggttttttttatagtttttcgggagggtttcgcgttcgtttggaggagtcggcggtttttcgcgatttttttagaaggagcggatcggcgttcgggtttcgcgggttcggggttttcgagtcgtatttatttagattcgcggataggttgcgtagtcggtcgcgggtacgaaatcgggcgtcgcgtagtagcgtattttcgcgtcgttttcgtcgttttttattatttttttttagtttaggggtcgttgtcggcgttacggtttagttcggagtttttgttgcgagttgtggttttattttcggttttcgttcgggtgtcgtcggtaaatgttttcgtcggtttttatataatttgtttttcgttttcgttttcggagtgggaattttgttcgttttttcgagtatgcgtagaagtcgttgttagtgagttttcgcgacggtggttcggacgga

SEQ ID NO: 14920 - DNA, 531 bp, Artificial Sequence
  chemically treated genomic DNA (Homo sapiens) CpG-island No: 14920
tccgtccgaaccaccgtcgcgaaaactcactaacaacgacttctacgcatactcgaaaaaacgaacaaaattcccactccgaaaacgaaaacgaaaaacaaattatataaaaaccgacgaaaacatttaccgacgacacccgaacgaaaaccgaaaataaaaccacaactcgcaacaaaaactccgaactaaaccgtaacgccgacaacgacccctaaactaaaaaaaaataataaaaaacgacgaaaacgacgcgaaaatacgctactacgcgacgcccgatttcgtacccgcgaccgactacgcaacctatccgcgaatctaaataaatacgactcgaaaaccccgaacccgcgaaacccgaacgccgatccgctccttctaaaaaaatcgcgaaaaaccgccgactcctccaaacgaacgcgaaaccctcccgaaaaactataaaaaaaaccccgaaactaatacgacttcccctaaaaatcgtacgaaaaccgaacgccgaaaattataaaaaaccaacccgaaata

SEQ ID NO: 14921 - DNA, 565 bp, Artificial Sequence
  chemically treated genomic DNA (Homo sapiens) CpG-island No: 14921
tgtgtgtggcgggtggcgtgtgtcgcgggtatgtgtgtggtgcgtgtgtgcgttatgtacggtatgattagggatatcgttcgtagttggcgggcgtacgtacgtttttgatgtcggttatttagatacgttagtttgttttttacgtcgtatacgagttcgttcgcgttacgtttgagtttagttaatagcggttttggattattatcgttcgaatttcgcgcgattttcgggacggcgtaggcgtcgcgttcggtatttataacgcgtaggtcgttagtaatatttagtaacgaatagttttcgttacgtcgagtcgttacgcgcgattttttagttatatacgttattttcgacgtttcgttcgatcgagtcgtcgattttagtaagtttatagaagaagttagttcgttagatcgataaaatcgtatagttacgagtagtatacgaacgtcgtattaacgtagtttattttaagcgtattatattagatttttcgtagtagtaatttacgcgtattattagttagttatcgtttttttcgtttcgagttttaggttataga

SEQ ID NO: 14922 - DNA, 565 bp, Artificial Sequence
  chemically treated genomic DNA (Homo sapiens) CpG-island No: 14922
tctataacctaaaactcgaaacgaaaaaaacgataactaactaataatacgcgtaaattactactacgaaaaatctaatataatacgcttaaaataaactacgttaatacgacgttcgtatactactcgtaactatacgattttatcgatctaacgaactaacttcttctataaacttactaaaatcgacgactcgatcgaacgaaacgtcgaaaataacgtatataactaaaaaatcgcgcgtaacgactcgacgtaacgaaaactattcgttactaaatattactaacgacctacgcgttataaataccgaacgcgacgcctacgccgtcccgaaaatcgcgcgaaattcgaacgataataatccaaaaccgctattaactaaactcaaacgtaacgcgaacgaactcgtatacgacgtaaaaaacaaactaacgtatctaaataaccgacatcaaaaacgtacgtacgcccgccaactacgaacgatatccctaatcataccgtacataacgcacacacgcaccacacacatacccgcgacacacgccacccgccacacaca

SEQ ID NO: 14923 - DNA, 565 bp, Artificial Sequence
  chemically treated genomic DNA (Homo sapiens) CpG-island No: 14923
tttgtggtttggggttcgaggcggggagggcggtggttggttggtggtgcgcgtgggttgttgttgcggggggtttggtgtggtgcgtttggggtgggttgcgttggtgcggcgttcgtgtgttgttcgtggttgtgcggttttgtcggtttggcgggttggttttttttgtgggtttgttggggtcggcggttcggtcgggcggggcgtcgggagtggcgtgtgtggttggggggtcgcgcgtggcggttcgacgtggcgagggttattcgttgttgggtgttgttggcggtttgcgcgttgtgggtgtcgagcgcggcgtttacgtcgtttcggggatcgcgcggggttcgggcgatggtagtttagggtcgttgttgattgggtttaggcgtggcgcggacgaattcgtgtgcggcgtgggggataggttgacgtgtttgagtgatcgatattagaggcgtgcgtgcgttcgttagttacgggcgatatttttggttatgtcgtatatgacgtatatacgtattatatatatattcgcgatatacgttattcgttatatata

SEQ ID NO: 14924 - DNA, 565 bp, Artificial Sequence
  chemically treated genomic DNA (Homo sapiens) CpG-island No: 14924
tatatataacgaataacgtatatcgcgaatatatatataatacgtatatacgtcatatacgacataaccaaaaatatcgcccgtaactaacgaacgcacgcacgcctctaatatcgatcactcaaacacgtcaacctatcccccacgccgcacacgaattcgtccgcgccacgcctaaacccaatcaacaacgaccctaaactaccatcgcccgaaccccgcgcgatccccgaaacgacgtaaacgccgcgctcgacacccacaacgcgcaaaccgccaacaacacccaacaacgaataaccctcgccacgtcgaaccgccacgcgcgaccccccaaccacacacgccactcccgacgccccgcccgaccgaaccgccgaccccaacaaacccacaaaaaaaaccaacccgccaaaccgacaaaaccgcacaaccacgaacaacacacgaacgccgcaccaacgcaacccaccccaaacgcaccacaccaaaccccccgcaacaacaacccacgcgcaccaccaaccaaccaccgccctccccgcctcgaaccccaaaccacaaa

SEQ ID NO: 14925 - DNA, 715 bp, Artificial Sequence
  chemically treated genomic DNA (Homo sapiens) CpG-island No: 14925
cgcgtttatttttatttgtcgcgtcgtcgggagtcgcgaggaggcgtacgtcggtcgtcgtagttaatgagcgacgtcggcgtggtagttgttgttataaagggttgggggcggcggcggcgcggtttagagcgcggtcgtcgcggttcggtacggaggtagggagggtgggcgaggggagaggatttgaatatacgggatcggataggatcgatcgaggggcggcggcgaaaggtagagcgtcgcgatttttgtcgggaagcgtaattttttcggtcgcggggtcgcgtagggggcgtttttaattcgcgttcgttttttttttttattttttgtcgtcgtagttatttcggggttcggttatcgcgcgcgtattttcgggattgttcgtttttggttttcgagggagtcgtcgtttttatcgttatatttgtacggtcgtattagaggtcgttcgggcgggattttagcgtgagtatcgggcgtttttttaggagtgtattattttcggagttttttttaatacggatcgtcgcgtcgggtatataagaatggttattgtaggtatttttttgtcgtcgaaagggaatcgggacggggaggagttgggtttagcgttcgcggagattgggcgggtgcggcggggggggtaggattaggtttagttaggttcgggttgggggggtaggattaagtttcggggtttgagagtggg

SEQ ID NO: 14926 - DNA, 715 bp, Artificial Sequence
  chemically treated genomic DNA (Homo sapiens) CpG-island No: 14926
cccactctcaaaccccgaaacttaatcctacccccccaacccgaacctaactaaacctaatcctaccccccccgccgcacccgcccaatctccgcgaacgctaaacccaactcctccccgtcccgattccctttcgacgacaaaaaaatacctacaataaccattcttatatacccgacgcgacgatccgtattaaaaaaaactccgaaaataatacactcctaaaaaaacgcccgatactcacgctaaaatcccgcccgaacgacctctaatacgaccgtacaaatataacgataaaaacgacgactccctcgaaaaccaaaaacgaacaatcccgaaaatacgcgcgcgataaccgaaccccgaaataactacgacgacaaaaaataaaaaaaaaaaacgaacgcgaattaaaaacgccccctacgcgaccccgcgaccgaaaaaattacgcttcccgacaaaaatcgcgacgctctacctttcgccgccgcccctcgatcgatcctatccgatcccgtatattcaaatcctctcccctcgcccaccctccctacctccgtaccgaaccgcgacgaccgcgctctaaaccgcgccgccgccgcccccaaccctttataacaacaactaccacgccgacgtcgctcattaactacgacgaccgacgtacgcctcctcgcgactcccgacgacgcgacaaataaaaataaacgcg

SEQ ID NO: 14927 - DNA, 715 bp, Artificial Sequence
  chemically treated genomic DNA (Homo sapiens) CpG-island No: 14927
tttatttttaggtttcgaggtttggttttatttttttaattcgggtttagttaggtttggttttatttttttcgtcgtattcgtttaattttcgcggacgttgggtttaattttttttcgtttcgattttttttcggcgataggggaatatttatagtgattatttttgtgtgttcggcgcggcggttcgtgttgaggggggtttcgggggtggtgtatttttaggggggcgttcgatgtttacgttggggtttcgttcgggcgatttttggtgcggtcgtgtagatgtggcgatgaaggcggcggttttttcgagggttagggacgggtaatttcggggatgcgcgcgcgatggtcgggtttcggggtggttgcggcggtaggggatggaaagagggagcgggcgcgggttgaggacgttttttgcgcggtttcgcggtcggggaggttgcgtttttcgatagagatcgcggcgttttgtttttcgtcgtcgtttttcggtcggttttgttcggtttcgtgtgtttaagtttttttttttcgtttattttttttgttttcgtgtcgggtcgcggcggtcgcgttttggatcgcgtcgtcgtcgtttttagttttttatagtagtagttgttacgtcggcgtcgtttattggttgcggcgatcgacgtacgttttttcgcggttttcgacggcgcggtaggtggaagtgagcgcg

SEQ ID NO: 14928 - DNA, 715 bp, Artificial Sequence
  chemically treated genomic DNA (Homo sapiens) CpG-island No: 14928
cgcgctcacttccacctaccgcgccgtcgaaaaccgcgaaaaaacgtacgtcgatcgccgcaaccaataaacgacgccgacgtaacaactactactataaaaaactaaaaacgacgacgacgcgatccaaaacgcgaccgccgcgacccgacacgaaaacaaaaaaaataaacgaaaaaaaaaaacttaaacacacgaaaccgaacaaaaccgaccgaaaaacgacgacgaaaaacaaaacgccgcgatctctatcgaaaaacgcaacctccccgaccgcgaaaccgcgcaaaaaacgtcctcaacccgcgcccgctccctctttccatcccctaccgccgcaaccaccccgaaacccgaccatcgcgcgcgcatccccgaaattacccgtccctaaccctcgaaaaaaccgccgccttcatcgccacatctacacgaccgcaccaaaaatcgcccgaacgaaaccccaacgtaaacatcgaacgcccccctaaaaatacaccacccccgaaacccccctcaacacgaaccgccgcgccgaacacacaaaaataatcactataaatattcccctatcgccgaaaaaaaatcgaaacgaaaaaaaattaaacccaacgtccgcgaaaattaaacgaatacgacgaaaaaaataaaaccaaacctaactaaacccgaattaaaaaaataaaaccaaacctcgaaacctaaaaataaa

SEQ ID NO: 14929 - DNA, 544 bp, Artificial Sequence
  chemically treated genomic DNA (Homo sapiens) CpG-island No: 14929
cgttaaattttatttcgaggatatcgattttatcgttaggaatcgggattttaattcgtagtattcggatttcgagaatagaggcgtcggggttaaatgggttgaatttggtattttatttttacgttttcgggtggatagcgatttttttcggtcgcgttttttcgtgggtttttttaattaataattcgtttcgttttttagttgagttcgaagttaatcgggtcgtagatttgtatttttttatttcgtttttttgggtattgattaatcgtagaaatttttttgggatttcgttttttttacgggtttttatttaattacgtcgcggttattaagcgtagttgaagcgtgaaggcgttaatgaggtttcggttatttcggtaggggcggaattaaaatgtcggttatatttttttttgtgatttagtttttgagcgttttaatacgatggtgttttcgcgggattaaattttagcgttatagttgaggattggtttcgtggtttttgatgggagagtatgaataggtggtatgtggtagg

SEQ ID NO: 14930 - DNA, 544 bp, Artificial Sequence
  chemically treated genomic DNA (Homo sapiens) CpG-island No: 14930
cctaccacataccacctattcatactctcccatcaaaaaccacgaaaccaatcctcaactataacgctaaaatttaatcccgcgaaaacaccatcgtattaaaacgctcaaaaactaaatcacaaaaaaaaatataaccgacattttaattccgcccctaccgaaataaccgaaacctcattaacgccttcacgcttcaactacgcttaataaccgcgacgtaattaaataaaaacccgtaaaaaaaacgaaatcccaaaaaaatttctacgattaatcaatacccaaaaaaacgaaataaaaaaatacaaatctacgacccgattaacttcgaactcaactaaaaaacgaaacgaattattaattaaaaaaacccacgaaaaaacgcgaccgaaaaaaatcgctatccacccgaaaacgtaaaaataaaataccaaattcaacccatttaaccccgacgcctctattctcgaaatccgaatactacgaattaaaatcccgattcctaacgataaaatcgatatcctcgaaataaaatttaacg

SEQ ID NO: 14931 - DNA, 544 bp, Artificial Sequence
  chemically treated genomic DNA (Homo sapiens) CpG-island No: 14931
tttattatatattatttgtttatgtttttttattagggattacgaagttagtttttagttgtgacgttgaagtttgatttcgcggggatattatcgtattaaaacgtttagagattgagttatagagaggggtgtggtcggtattttagtttcgtttttgtcggagtagtcgaagttttattggcgtttttacgttttagttgcgtttagtagtcgcggcgtaattggataaaagttcgtggagggggcgggattttaggggggtttttacgattagttaatatttaggagggcgggatagaaaggtgtagatttacgattcgattggtttcgggtttagttgggaggcgggacgaattattggttggggaaatttacgaggggacgcggtcgaggagggtcgttgtttattcgggggcgtgggagtgaggtattagatttagtttatttggtttcgacgtttttgttttcggaattcgggtgttgcggattgaggtttcggtttttaacggtgggatcggtgttttcgggatgagatttggcg

SEQ ID NO: 14932 - DNA, 544 bp, Artificial Sequence
  chemically treated genomic DNA (Homo sapiens) CpG-island No: 14932
cgccaaatctcatcccgaaaacaccgatcccaccgttaaaaaccgaaacctcaatccgcaacacccgaattccgaaaacaaaaacgtcgaaaccaaataaactaaatctaatacctcactcccacgcccccgaataaacaacgaccctcctcgaccgcgtcccctcgtaaatttccccaaccaataattcgtcccgcctcccaactaaacccgaaaccaatcgaatcgtaaatctacacctttctatcccgccctcctaaatattaactaatcgtaaaaacccccctaaaatcccgccccctccacgaacttttatccaattacgccgcgactactaaacgcaactaaaacgtaaaaacgccaataaaacttcgactactccgacaaaaacgaaactaaaataccgaccacacccctctctataactcaatctctaaacgttttaatacgataatatccccgcgaaatcaaacttcaacgtcacaactaaaaactaacttcgtaatccctaataaaaaaacataaacaaataatatataataaa

SEQ ID NO: 14933 - DNA, 587 bp, Artificial Sequence
  chemically treated genomic DNA (Homo sapiens) CpG-island No: 14933
tgaaatcgaattttttattttgggtatcgcggtttttttttatttttggttttcgcggtcggagcgtatttattgttagtcgttatggtcggacgagggggttgttcgacggtcgtttaggttcggggaatcggcgtcgagttcggtcgggcgcgcgtttttcggtaggttcggtgcgttcgggggtcgcgtcgcgtatagttttttttgtcgcgcgttttcgtcgcgtcgcgtcgtttcgcgtcgtttcgcgtttagtagtcgttagttttgcggtcgtcgtcggcgttttgagagtttagtttttcgggtagaacggtcgagttgcggcgtttagaggttggattttttttttttcgtttcgtcgcgttcgttttttttttttttttttttttttcgttttttttttaaagaggatgttcgtcgtaatttggaaatacgttttcggttacgttagggtcgtttttttacgttattttttttataacgttttcgttatatttttgttttttagttattttttttatttttcgttttatttttatttcgagttttttattagcggggttgggattttatgtttagtt

SEQ ID NO: 14934 - DNA, 587 bp, Artificial Sequence
  chemically treated genomic DNA (Homo sapiens) CpG-island No: 14934
aactaaacataaaatcccaaccccgctaataaaaaactcgaaataaaaataaaacgaaaaataaaaaaaataactaaaaaacaaaaatataacgaaaacgttataaaaaaaataacgtaaaaaaacgaccctaacgtaaccgaaaacgtatttccaaattacgacgaacatcctctttaaaaaaaaaacgaaaaaaaaaaaaaaaaaaaaaaaacgaacgcgacgaaacgaaaaaaaaaaaatccaacctctaaacgccgcaactcgaccgttctacccgaaaaactaaactctcaaaacgccgacgacgaccgcaaaactaacgactactaaacgcgaaacgacgcgaaacgacgcgacgcgacgaaaacgcgcgacaaaaaaaactatacgcgacgcgacccccgaacgcaccgaacctaccgaaaaacgcgcgcccgaccgaactcgacgccgattccccgaacctaaacgaccgtcgaacaaccccctcgtccgaccataacgactaacaataaatacgctccgaccgcgaaaaccaaaaataaaaaaaaaccgcgatacccaaaataaaaaattcgatttca

SEQ ID NO: 14935 - DNA, 587 bp, Artificial Sequence
  chemically treated genomic DNA (Homo sapiens) CpG-island No: 14935
ggttgagtatggggttttaatttcgttggtgagaagttcgaggtagggatgaagcggagaatggaaaaggtgattggaaaataaggatatagcgggaacgttgtaggaaaggtggcgtggagaggcgattttagcgtggtcgggagcgtgtttttaagttgcggcgagtattttttttgggggaggggcgggaaaggaaaggaggggagggggacggacgcggcgaggcgaggagggggagatttagtttttaggcgtcgtagttcggtcgttttgttcgggaggttgggtttttaggacgtcggcggcggtcgtagggttggcggttgttgggcgcggggcggcgcggggcggcgcggcgcggcgggggcgcgcggtaggaggggttgtgcgcggcgcggttttcgagcgtatcgggtttgtcgaggagcgcgcgttcggtcgggttcggcgtcggtttttcgaatttgggcggtcgtcgggtagttttttcgttcgattatggcgattgatagtgagtgcgtttcggtcgcggaggttaggggtggggggaggtcgcggtgtttagggtgggaagttcgatttta

SEQ ID NO: 14936 - DNA, 587 bp, Artificial Sequence
  chemically treated genomic DNA (Homo sapiens) CpG-island No: 14936
taaaatcgaacttcccaccctaaacaccgcgacctccccccacccctaacctccgcgaccgaaacgcactcactatcaatcgccataatcgaacgaaaaaactacccgacgaccgcccaaattcgaaaaaccgacgccgaacccgaccgaacgcgcgctcctcgacaaacccgatacgctcgaaaaccgcgccgcgcacaacccctcctaccgcgcgcccccgccgcgccgcgccgccccgcgccgccccgcgcccaacaaccgccaaccctacgaccgccgccgacgtcctaaaaacccaacctcccgaacaaaacgaccgaactacgacgcctaaaaactaaatctccccctcctcgcctcgccgcgtccgtccccctcccctcctttcctttcccgcccctcccccaaaaaaaatactcgccgcaacttaaaaacacgctcccgaccacgctaaaatcgcctctccacgccacctttcctacaacgttcccgctatatccttattttccaatcaccttttccattctccgcttcatccctacctcgaacttctcaccaacgaaattaaaaccccatactcaacc

SEQ ID NO: 14937 - DNA, 803 bp, Artificial Sequence
  chemically treated genomic DNA (Homo sapiens) CpG-island No: 14937
cgcggttcgatgattcggtttcggtgatagtagtcgcgacggcggtaatttcgatagggagttaggcggtttatggtgggttagggggcgatcgaggagggattacgcggtttgtagggggtagcgtcgagttcgggaggagatagtagtcggcgggtggggtgggtttgggttgtttttttcgggagttgtttcggggtcgtacggcgattgttatattcggtcgtttttgttcgtcgtgggttttttttcggcgtcgcgggttttaacggggttttgaggggacgtgatagagttcggtacgcggtagtttttggggagttagggttcggagagatttacgcgtcgtttttcgttcgttcggggtcgggagattttcgggagtcgttttcgcgtgtttagagagtgtcggggcggtcgttattttttttcgtttttcgtcggaggtgggcgtttttttttgcgtggcgggtgtttcgattttagttgttttgagtttcggggaagcgcgtttcgagtttttgacgtgggcgtttcgttatttcggggtgggtgtttggggtttttgaggtgggcgcgggttgtttcggggtgggcgttcggttcgcgcgggttatttttggcgttcgtagaggcgcgtgtgttggggcgtgttttttttttttaggtgtcgagagtcggggtttcgtcggcgtcggagttgattcgtttttttttttttttttttgtaggaatttttcgataattttgtcgtcgcgattttaatcgtgcgtaaggcgagagttcgaaataaatattatatt

SEQ ID NO: 14938 - DNA, 803 bp, Artificial Sequence
  chemically treated genomic DNA (Homo sapiens) CpG-island No: 14938
aatataatatttatttcgaactctcgccttacgcacgattaaaatcgcgacgacaaaattatcgaaaaattcctacaaaaaaaaaaaaaaaaaaacgaatcaactccgacgccgacgaaaccccgactctcgacacctaaaaaaaaaaaacacgccccaacacacgcgcctctacgaacgccaaaaataacccgcgcgaaccgaacgcccaccccgaaacaacccgcgcccacctcaaaaaccccaaacacccaccccgaaataacgaaacgcccacgtcaaaaactcgaaacgcgcttccccgaaactcaaaacaactaaaatcgaaacacccgccacgcaaaaaaaaacgcccacctccgacgaaaaacgaaaaaaaataacgaccgccccgacactctctaaacacgcgaaaacgactcccgaaaatctcccgaccccgaacgaacgaaaaacgacgcgtaaatctctccgaaccctaactccccaaaaactaccgcgtaccgaactctatcacgtcccctcaaaaccccgttaaaacccgcgacgccgaaaaaaaacccacgacgaacaaaaacgaccgaatataacaatcgccgtacgaccccgaaacaactcccgaaaaaaacaacccaaacccaccccacccgccgactactatctcctcccgaactcgacgctaccccctacaaaccgcgtaatccctcctcgatcgccccctaacccaccataaaccgcctaactccctatcgaaattaccgccgtcgcgactactatcaccgaaaccgaatcatcgaaccgcg

SEQ ID NO: 14939 - DNA, 803 bp, Artificial Sequence
  chemically treated genomic DNA (Homo sapiens) CpG-island No: 14939
gatgtgatgtttgtttcgagttttcgttttgcgtacggttaaagtcgcggcggtagaattatcggaagatttttgtaggggaaagaagagagagacgagttagtttcggcgtcggcggagtttcggttttcggtatttggggaaggaaaatacgttttaatatacgcgtttttgcgggcgttaaaaataattcgcgcgggtcgggcgtttatttcggggtaattcgcgtttattttaggggttttaggtatttatttcgaggtaacggggcgtttacgttaggggttcggggcgcgttttttcggggtttagagtaattggggtcggagtattcgttacgtaggaaaaggcgtttattttcggcgaagggcgaggggaagtggcggtcgtttcgatattttttggatacgcggaggcggttttcgaggatttttcggtttcgggcgggcggggggcgacgcgtgggttttttcggattttaattttttagaggttgtcgcgtgtcgagttttgttacgtttttttagagtttcgttaaggttcgcggcgtcgagaggaagtttacggcgggtaggggcggtcgggtatgataatcgtcgtgcggtttcggggtagttttcggagggggtagtttagatttattttattcgtcggttgttgttttttttcgagttcggcgttgttttttataggtcgcgtggttttttttcggtcgttttttgatttattatgagtcgtttagttttttgtcgagattgtcgtcgtcgcggttgttgttatcgaggtcgggttatcgggtcgcg

SEQ ID NO: 14940 - DNA, 803 bp, Artificial Sequence
  chemically treated genomic DNA (Homo sapiens) CpG-island No: 14940
cgcgacccgataacccgacctcgataacaacaaccgcgacgacgacaatctcgacaaaaaactaaacgactcataataaatcaaaaaacgaccgaaaaaaaaccacgcgacctataaaaaacaacgccgaactcgaaaaaaaacaacaaccgacgaataaaataaatctaaactaccccctccgaaaactaccccgaaaccgcacgacgattatcatacccgaccgcccctacccgccgtaaacttcctctcgacgccgcgaaccttaacgaaactctaaaaaaacgtaacaaaactcgacacgcgacaacctctaaaaaattaaaatccgaaaaaacccacgcgtcgccccccgcccgcccgaaaccgaaaaatcctcgaaaaccgcctccgcgtatccaaaaaatatcgaaacgaccgccacttcccctcgcccttcgccgaaaataaacgccttttcctacgtaacgaatactccgaccccaattactctaaaccccgaaaaaacgcgccccgaacccctaacgtaaacgccccgttacctcgaaataaatacctaaaacccctaaaataaacgcgaattaccccgaaataaacgcccgacccgcgcgaattatttttaacgcccgcaaaaacgcgtatattaaaacgtattttccttccccaaataccgaaaaccgaaactccgccgacgccgaaactaactcgtctctctcttctttcccctacaaaaatcttccgataattctaccgccgcgactttaaccgtacgcaaaacgaaaactcgaaacaaacatcacatc

SEQ ID NO: 14941 - DNA, 501 bp, Artificial Sequence
  chemically treated genomic DNA (Homo sapiens) CpG-island No: 14941
aatttttcgtagtcggagaggggtcgtcgtttcggatttcggaggatagagggcggaagacgagtcggagatcgaggcggatagcgtttagagaatcgatttaagaacgatatcgatttcgatagggagagggcggttacgttaattgtcgtaggttattaatttattttttttttagcgtggggtatttttatttagtttcgggagttcggcgagtagtagcggttgcggtttgggtttaaacgttatagtcgttggcggttgttttattagttaatcgggttttgcgaagatggagtaagggagggcggttattaggaagtgaaaggcggaaagggcgggacgtcgttgttagggtaggaaggggcgtgtttaggcgagtcgggggcggtatagtttgcgtgataggggtgttttttcgttttgtgttggtggcggttcgttgttttttgaagcgttgatggaaaaggaaatttttttttgatatttattattaattat

SEQ ID NO: 14942 - DNA, 501 bp, Artificial Sequence
  chemically treated genomic DNA (Homo sapiens) CpG-island No: 14942
ataattaataataaatatcaaaaaaaaatttccttttccatcaacgcttcaaaaaacaacgaaccgccaccaacacaaaacgaaaaaacacccctatcacgcaaactataccgcccccgactcgcctaaacacgccccttcctaccctaacaacgacgtcccgccctttccgcctttcacttcctaataaccgccctcccttactccatcttcgcaaaacccgattaactaataaaacaaccgccaacgactataacgtttaaacccaaaccgcaaccgctactactcgccgaactcccgaaactaaataaaaataccccacgctaaaaaaaaaataaattaataacctacgacaattaacgtaaccgccctctccctatcgaaatcgatatcgttcttaaatcgattctctaaacgctatccgcctcgatctccgactcgtcttccgccctctatcctccgaaatccgaaacgacgacccctctccgactacgaaaaatt

SEQ ID NO: 14943 - DNA, 501 bp, Artificial Sequence
  chemically treated genomic DNA (Homo sapiens) CpG-island No: 14943
gtgattgataatgaatgttagaggagagtttttttttttattaacgttttaggagatagcggatcgttattaatatagggcggaagagtatttttgttacgtagattgtgtcgttttcggttcgtttgggtacgtttttttttgttttagtagcggcgtttcgtttttttcgttttttattttttagtaatcgtttttttttgttttattttcgtaggattcgattggttgatggggtaatcgttaacggttgtggcgtttaaatttaagtcgtagtcgttgttgttcgtcgagttttcggagttgggtgggggtgttttacgttgaaagagaggtaagttagtggtttgcggtagttgacgtgatcgttttttttttgtcgggatcggtgtcgtttttgagtcggttttttaggcgttgttcgtttcggttttcggttcgtttttcgttttttgtttttcgggattcgggacggcggttttttttcggttacgaggggtt

SEQ ID NO: 14944 - DNA, 501 bp, Artificial Sequence
  chemically treated genomic DNA (Homo sapiens) CpG-island No: 14944
aacccctcgtaaccgaaaaaaaaccgccgtcccgaatcccgaaaaacaaaaaacgaaaaacgaaccgaaaaccgaaacgaacaacgcctaaaaaaccgactcaaaaacgacaccgatcccgacaaaaaaaaaacgatcacgtcaactaccgcaaaccactaacttacctctctttcaacgtaaaacacccccacccaactccgaaaactcgacgaacaacaacgactacgacttaaatttaaacgccacaaccgttaacgattaccccatcaaccaatcgaatcctacgaaaataaaacaaaaaaaaacgattactaaaaaataaaaaacgaaaaaaacgaaacgccgctactaaaacaaaaaaaaacgtacccaaacgaaccgaaaacgacacaatctacgtaacaaaaatactcttccgccctatattaataacgatccgctatctcctaaaacgttaataaaaaaaaaaactctcctctaacattcattatcaatcac

SEQ ID NO: 14945 - DNA, 527 bp, Artificial Sequence
  chemically treated genomic DNA (Homo sapiens) CpG-island No: 14945
cgaggcggtttattggggcgagacgaatttgggggcggggcgtggcgtggcgtggcgtgtacgggacgtggtttttttttttttttgagtcgttgttttagagtcgggtcgtacgggggcgtcgttggggtcgttttgttttcgagttgtcgagtagttgagaaggcgtttattttcgcgttcgtttcgcgcgttcggcggtcggcgagggtttggcgggtcgtaggttagtttgggaagttgtcgattcgttttattttttcggtgcggaagagtcgggcgcgggatgggtcggggcggataggcggcggggcgttttgaggaagggtacgggtcgcgttggtaacgcgtcgtttcgggttgtaggttcgggtttcgggtcgatttggggtttttaggtcgcggaagatcgtggcggggttttttggttttttagtttttttcggtttttttcgtttcggaagaggagtgtgagttttttgagcgatgttttttaaagtggggttcgcgggtagatttcgattttt

SEQ ID NO: 14946 - DNA, 527 bp, Artificial Sequence
  chemically treated genomic DNA (Homo sapiens) CpG-island No: 14946
aaaaatcgaaatctacccgcgaaccccactttaaaaaacatcgctcaaaaaactcacactcctcttccgaaacgaaaaaaaccgaaaaaaactaaaaaaccaaaaaaccccgccacgatcttccgcgacctaaaaaccccaaatcgacccgaaacccgaacctacaacccgaaacgacgcgttaccaacgcgacccgtacccttcctcaaaacgccccgccgcctatccgccccgacccatcccgcgcccgactcttccgcaccgaaaaaataaaacgaatcgacaacttcccaaactaacctacgacccgccaaaccctcgccgaccgccgaacgcgcgaaacgaacgcgaaaataaacgccttctcaactactcgacaactcgaaaacaaaacgaccccaacgacgcccccgtacgacccgactctaaaacaacgactcaaaaaaaaaaaaaaaccacgtcccgtacacgccacgccacgccacgccccgcccccaaattcgtctcgccccaataaaccgcctcg

SEQ ID NO: 14947 - DNA, 527 bp, Artificial Sequence
  chemically treated genomic DNA (Homo sapiens) CpG-island No: 14947
aggggtcgggatttgttcgcgaattttattttgaaaaatatcgtttaaggggtttatatttttttttcgaagcgggaagagtcgggaggagttggggagttagaaagtttcgttacggtttttcgcggtttggagattttaaatcggttcgaagttcgagtttgtagttcgggacggcgcgttattagcgcggttcgtgtttttttttagggcgtttcgtcgtttattcgtttcggtttatttcgcgttcggttttttcgtatcgggggggtggggcgggtcggtagttttttagattgatttgcggttcgttagattttcgtcggtcgtcggacgcgcggggcggacgcggaagtgaacgtttttttagttgttcggtaattcgggagtagagcggttttagcggcgttttcgtgcggttcggttttgaggtagcggtttagggagggagggaggttacgtttcgtgtacgttacgttacgttacgtttcgtttttagattcgtttcgttttagtgggtcgtttcg

SEQ ID NO: 14948 - DNA, 527 bp, Artificial Sequence
  chemically treated genomic DNA (Homo sapiens) CpG-island No: 14948
cgaaacgacccactaaaacgaaacgaatctaaaaacgaaacgtaacgtaacgtaacgtacacgaaacgtaacctccctccctccctaaaccgctacctcaaaaccgaaccgcacgaaaacgccgctaaaaccgctctactcccgaattaccgaacaactaaaaaaacgttcacttccgcgtccgccccgcgcgtccgacgaccgacgaaaatctaacgaaccgcaaatcaatctaaaaaactaccgacccgccccacccccccgatacgaaaaaaccgaacgcgaaataaaccgaaacgaataaacgacgaaacgccctaaaaaaaaacacgaaccgcgctaataacgcgccgtcccgaactacaaactcgaacttcgaaccgatttaaaatctccaaaccgcgaaaaaccgtaacgaaactttctaactccccaactcctcccgactcttcccgcttcgaaaaaaaaatataaaccccttaaacgatatttttcaaaataaaattcgcgaacaaatcccgacccct

SEQ ID NO: 14949 - DNA, 787 bp, Artificial Sequence
  chemically treated genomic DNA (Homo sapiens) CpG-island No: 14949
tgcgttttttaggtcgcgtagacggcgtaaagggggaaattttatttcgttcggtttcgcgttttttaaatgtacgtaaagggttgtcgttttttttttttttatttcgttcgggttttttaaggttcggcgcgaggagttcgcgaggcgcggtgcgcgggttttatttgtatacgtcgcgaatgtaggttttagttagatgcggtaagcggtttcgatgtgtttttgcgatattttttcgggtcgtatcgttttcgtttagcgttaggtcgttttttttagttgtagtcgcggggttatggttttggttttaggaacgtttttcgagttagatcgtcgtagtcgtcgtcgcggtttgtatcgtcgttttaatgggtttcgtattttgttagtaaggaggatttggcgtttttttaggtagttggttagttaattatttgtgcgcgttattgtcgtcgcgttcgttcgcgttcgatacgtacgatcggtcgtaaaggtcggtcgtcgatattcgatatatttcgcgtcgcggagcggttaaaggtggattttcgtcgcgttgagtatgcgcgtttttagtagttttttgtttttcgcgtttttaaatcgacgggttgaggtagaggaagcgtacgttcgaggcggttttgttacgtttttattggtatttttggaaaagtagcgttttagttttcgtttagggcggcgtattacgtattattattttaataaattagtgtttcgaaagttattttttgtttcggtattttttttttaattatgaagt

SEQ ID NO: 14950 - DNA, 787 bp, Artificial Sequence
  chemically treated genomic DNA (Homo sapiens) CpG-island No: 14950
acttcataattaaaaaaaaaataccgaaacaaaaaataactttcgaaacactaatttattaaaataataatacgtaatacgccgccctaaacgaaaactaaaacgctacttttccaaaaataccaataaaaacgtaacaaaaccgcctcgaacgtacgcttcctctacctcaacccgtcgatttaaaaacgcgaaaaacaaaaaactactaaaaacgcgcatactcaacgcgacgaaaatccacctttaaccgctccgcgacgcgaaatatatcgaatatcgacgaccgacctttacgaccgatcgtacgtatcgaacgcgaacgaacgcgacgacaataacgcgcacaaataattaactaaccaactacctaaaaaaacgccaaatcctccttactaacaaaatacgaaacccattaaaacgacgatacaaaccgcgacgacgactacgacgatctaactcgaaaaacgttcctaaaaccaaaaccataaccccgcgactacaactaaaaaaaacgacctaacgctaaacgaaaacgatacgacccgaaaaaatatcgcaaaaacacatcgaaaccgcttaccgcatctaactaaaacctacattcgcgacgtatacaaataaaacccgcgcaccgcgcctcgcgaactcctcgcgccgaaccttaaaaaacccgaacgaaataaaaaaaaaaaaaacgacaaccctttacgtacatttaaaaaacgcgaaaccgaacgaaataaaatttccccctttacgccgtctacgcgacctaaaaaacgca

SEQ ID NO: 14951 - DNA, 787 bp, Artificial Sequence
  chemically treated genomic DNA (Homo sapiens) CpG-island No: 14951
attttatggttaaaagggaagtatcggagtaagaaatagttttcgaggtattggtttgttagagtagtggtacgtagtgcgtcgttttgaacgggggttgagacgttgtttttttagaagtgttagtgaagacgtggtaagatcgtttcggacgtacgttttttttattttagttcgtcggtttaggggcgcgggaagtaggaggttgttgggaacgcgtatgtttagcgcggcgggagtttatttttaatcgtttcgcggcgcggggtgtgtcgggtgtcgacggtcggtttttgcggtcggtcgtgcgtgtcgggcgcgggcgggcgcggcggtagtggcgcgtataggtgattgattggttagttgtttgaaggagcgttaggttttttttgttggtaggatgcgaagtttattggggcggcggtgtagatcgcggcggcggttgcggcggtttggttcgggaggcgtttttggggttaaggttatggtttcgcggttgtagttggagaaggcggtttggcgttgggcggagacggtgcggttcgaggaggtgtcgtaggagtatatcgagatcgtttatcgtatttggttggagtttgtattcgcggcgtgtgtaggtgaggttcgcgtatcgcgtttcgcgggtttttcgcgtcggattttggaaagttcgggcggggtaggggaaaggaagacggtagttttttgcgtgtatttgggaggcgcggagtcgagcgaggtggagtttttttttttgcgtcgtttgcgcgatttgggaaacgta

SEQ ID NO: 14952 - DNA, 787 bp, Artificial Sequence
  chemically treated genomic DNA (Homo sapiens) CpG-island No: 14952
tacgtttcccaaatcgcgcaaacgacgcaaaaaaaaaaactccacctcgctcgactccgcgcctcccaaatacacgcaaaaaactaccgtcttcctttcccctaccccgcccgaactttccaaaatccgacgcgaaaaacccgcgaaacgcgatacgcgaacctcacctacacacgccgcgaatacaaactccaaccaaatacgataaacgatctcgatatactcctacgacacctcctcgaaccgcaccgtctccgcccaacgccaaaccgccttctccaactacaaccgcgaaaccataaccttaaccccaaaaacgcctcccgaaccaaaccgccgcaaccgccgccgcgatctacaccgccgccccaataaacttcgcatcctaccaacaaaaaaaacctaacgctccttcaaacaactaaccaatcaatcacctatacgcgccactaccgccgcgcccgcccgcgcccgacacgcacgaccgaccgcaaaaaccgaccgtcgacacccgacacaccccgcgccgcgaaacgattaaaaataaactcccgccgcgctaaacatacgcgttcccaacaacctcctacttcccgcgcccctaaaccgacgaactaaaataaaaaaaacgtacgtccgaaacgatcttaccacgtcttcactaacacttctaaaaaaacaacgtctcaacccccgttcaaaacgacgcactacgtaccactactctaacaaaccaatacctcgaaaactatttcttactccgatacttcccttttaaccataaaat

SEQ ID NO: 14953 - DNA, 689 bp, Artificial Sequence
  chemically treated genomic DNA (Homo sapiens) CpG-island No: 14953
gagaggcgttgttggtcggttgtttggtgtcgatttagtcgtcgtcgtagtcgtttgtcgcggttcggtagtagtagtagtagtagtggcgcggcgttcgagttcgtttagtttagttttatttggcggggcgtattattggtcgtgtcgcgtttcggttgtttttcggtcgttatcgtcgtcgttgcgtttattggtttcgtcgcgtcgtgtttgttcgttcggtttcgtagtttttcggcgcgttttcggttttttttttttttgtcgggggtcgtcggttttttgtttcgcgtcgtcgttcggtttcgtatataaggcgtttggtgtgggttttcgcgtcgtttgtttcgttacgtttcgttttttcgtcgttggatcggttcgttttcgtcgttttcgagttcggttgcgtttttttagtgtcgtcgcggcgtcggtttttttcgtttagtcgttttttttcgtttgatagggcgtttcggtatacggtattaacgttcgttcggagtagtacggtagcgcggttatagcgcggtcgcggcggtggcggtagtagggtttttttagggcgtacggttatttatgcgcgtcgtagttcgtttttttattttggtttagtagtttttagttttttagttcgagcgaagttggggtttaaattattttttgcgaaaattttagacgtt

SEQ ID NO: 14954 - DNA, 689 bp, Artificial Sequence
  chemically treated genomic DNA (Homo sapiens) CpG-island No: 14954
aacgtctaaaattttcgcaaaaaataatttaaaccccaacttcgctcgaactaaaaaactaaaaactactaaaccaaaataaaaaaacgaactacgacgcgcataaataaccgtacgccctaaaaaaaccctactaccgccaccgccgcgaccgcgctataaccgcgctaccgtactactccgaacgaacgttaataccgtataccgaaacgccctatcaaacgaaaaaaaacgactaaacgaaaaaaaccgacgccgcgacgacactaaaaaaacgcaaccgaactcgaaaacgacgaaaacgaaccgatccaacgacgaaaaaacgaaacgtaacgaaacaaacgacgcgaaaacccacaccaaacgccttatatacgaaaccgaacgacgacgcgaaacaaaaaaccgacgacccccgacaaaaaaaaaaaaaaccgaaaacgcgccgaaaaactacgaaaccgaacgaacaaacacgacgcgacgaaaccaataaacgcaacgacgacgataacgaccgaaaaacaaccgaaacgcgacacgaccaataatacgccccgccaaataaaactaaactaaacgaactcgaacgccgcgccactactactactactactaccgaaccgcgacaaacgactacgacgacgactaaatcgacaccaaacaaccgaccaacaacgcctctc

SEQ ID NO: 14955 - DNA, 689 bp, Artificial Sequence
  chemically treated genomic DNA (Homo sapiens) CpG-island No: 14955
agcgtttgggattttcgtagaagataatttaagttttagtttcgttcgggttggggggttgggggttgttgggttagggtgggggaacgggttgcggcgcgtataggtagtcgtacgttttgaggaggttttgttgtcgttatcgtcgcggtcgcgttgtaatcgcgttgtcgtgttgtttcgggcgggcgttggtgtcgtgtgtcgaggcgttttgttaggcgagggggagcggttgggcggggagagtcgacgtcgcggcggtattagaggaacgtagtcgggttcgggagcggcgagggcgggtcggtttagcggcggaggagcgaggcgtggcgaggtaggcggcgcggggatttatattaggcgttttgtgtgcgaggtcgagcggcggcgcggaatagagagtcggcgattttcggtaggaggagaaggagtcggagacgcgtcgagggattgcggggtcgggcgggtaaatacggcgcgacgagattaatggacgtagcggcgacggtggcggtcgagaggtagtcggggcgcgatacggttaatagtacgtttcgttaggtgaggttgggttgagcgggttcgagcgtcgcgttattgttgttgttgttgttgtcgggtcgcggtagacggttgcggcggcggttaaatcggtattaagtagtcgattaatagcgtttttt

SEQ ID NO: 14956 - DNA, 689 bp, Artificial Sequence
  chemically treated genomic DNA (Homo sapiens) CpG-island No: 14956
aaaaaacgctattaatcgactacttaataccgatttaaccgccgccgcaaccgtctaccgcgacccgacaacaacaacaacaacaataacgcgacgctcgaacccgctcaacccaacctcacctaacgaaacgtactattaaccgtatcgcgccccgactacctctcgaccgccaccgtcgccgctacgtccattaatctcgtcgcgccgtatttacccgcccgaccccgcaatccctcgacgcgtctccgactccttctcctcctaccgaaaatcgccgactctctattccgcgccgccgctcgacctcgcacacaaaacgcctaatataaatccccgcgccgcctacctcgccacgcctcgctcctccgccgctaaaccgacccgccctcgccgctcccgaacccgactacgttcctctaataccgccgcgacgtcgactctccccgcccaaccgctccccctcgcctaacaaaacgcctcgacacacgacaccaacgcccgcccgaaacaacacgacaacgcgattacaacgcgaccgcgacgataacgacaacaaaacctcctcaaaacgtacgactacctatacgcgccgcaacccgttcccccaccctaacccaacaacccccaaccccccaacccgaacgaaactaaaacttaaattatcttctacgaaaatcccaaacgct

SEQ ID NO: 14957 - DNA, 690 bp, Artificial Sequence
  chemically treated genomic DNA (Homo sapiens) CpG-island No: 14957
ggaggttttgttgttttttttcgtggttggttgtgttcgtcgtagtttgaaaggttagcggtatttagcgttgtgatagggttataggcgcgcgatgttttatagttcggagtagtatttatttggtattaggtcgcgtgtcgtaggttagtttttatcgttgggtttttgaagtaggaggcgcgagtcgcgttaaagtttgtaacggttttaagtttcgacgttagtttaggtaaaaggtaatgtatttaaacgaaaagaaaataggtttttttcgttttatcgtttcgggtagttatatttttatattttcggcggtgtatcggtttaaatgtcgtttgttagtaattttcgtttttttagttaaaagcgaaaaatagaggttcggaatcgttgcgtggtttttgttttttattcggtcgttttaaagggtgattttttttttgtttcggtttgcgtggtgtgggtttgtgggtttttgagattcgaaaattgagagcgttttcgtattttagcggttgtttttggcggttttgcggtcgttattatggtaaggaggatgtttcggacgttcgcgatatatagcgtttgagttagtgggatttgaggattttggggcgttggggtagggggtgagcggtggtaggcggaaatgagaattgttaagagaaaaggatggtagattcgtgg

SEQ ID NO: 14958 - DNA, 690 bp, Artificial Sequence
  chemically treated genomic DNA (Homo sapiens) CpG-island No: 14958
ccacgaatctaccatccttttctcttaacaattctcatttccgcctaccaccgctcaccccctaccccaacgccccaaaatcctcaaatcccactaactcaaacgctatatatcgcgaacgtccgaaacatcctccttaccataataacgaccgcaaaaccgccaaaaacaaccgctaaaatacgaaaacgctctcaattttcgaatctcaaaaacccacaaacccacaccacgcaaaccgaaacaaaaaaaaaatcaccctttaaaacgaccgaataaaaaacaaaaaccacgcaacgattccgaacctctatttttcgcttttaactaaaaaaacgaaaattactaacaaacgacatttaaaccgatacaccgccgaaaatataaaaatataactacccgaaacgataaaacgaaaaaaacctattttcttttcgtttaaatacattaccttttacctaaactaacgtcgaaacttaaaaccgttacaaactttaacgcgactcgcgcctcctacttcaaaaacccaacgataaaaactaacctacgacacgcgacctaataccaaataaatactactccgaactataaaacatcgcgcgcctataaccctatcacaacgctaaataccgctaacctttcaaactacgacgaacacaaccaaccacgaaaaaaaacaacaaaacctcc

SEQ ID NO: 14959 - DNA, 690 bp, Artificial Sequence
  chemically treated genomic DNA (Homo sapiens) CpG-island No: 14959
ttacgggtttattattttttttttttggtagtttttattttcgtttattatcgtttattttttattttagcgttttagagtttttaggttttattaatttagacgttgtgtgtcgcgagcgttcgaggtattttttttattatggtgacggtcgtagagtcgttaggagtagtcgttggagtgcgaaaacgtttttaattttcgggttttaaagatttataagtttatattacgtaggtcgggatagggaaagagttattttttaaaacggtcgagtgaagagtaagaattacgtagcggtttcgagtttttgtttttcgtttttagttaggaggacggaagttgttggtaggcggtatttgggtcgatatatcgtcggaagtgtggaggtgtggttgttcgaggcggtagagcggagaaagtttatttttttttcgtttagatatattgttttttgtttaggttggcgtcgagatttgaggtcgttgtagattttggcgcggttcgcgttttttgttttaagagtttagcggtgagagttggtttgcggtacgcggtttaatgttaggtgagtattgtttcgagttgtgagatatcgcgcgtttgtgattttgttatagcgttgggtatcgttgattttttaggttgcgacggatatagttagttacggaagaggataatagggttttt

SEQ ID NO: 14960 - DNA, 690 bp, Artificial Sequence
  chemically treated genomic DNA (Homo sapiens) CpG-island No: 14960
aaaaaccctattatcctcttccgtaactaactatatccgtcgcaacctaaaaaatcaacgatacccaacgctataacaaaatcacaaacgcgcgatatctcacaactcgaaacaatactcacctaacattaaaccgcgtaccgcaaaccaactctcaccgctaaactcttaaaacaaaaaacgcgaaccgcgccaaaatctacaacgacctcaaatctcgacgccaacctaaacaaaaaacaatatatctaaacgaaaaaaaaataaactttctccgctctaccgcctcgaacaaccacacctccacacttccgacgatatatcgacccaaataccgcctaccaacaacttccgtcctcctaactaaaaacgaaaaacaaaaactcgaaaccgctacgtaattcttactcttcactcgaccgttttaaaaaataactctttccctatcccgacctacgtaatataaacttataaatctttaaaacccgaaaattaaaaacgttttcgcactccaacgactactcctaacgactctacgaccgtcaccataataaaaaaaatacctcgaacgctcgcgacacacaacgtctaaattaataaaacctaaaaactctaaaacgctaaaataaaaaataaacgataataaacgaaaataaaaactaccaaaaaaaaaaaataataaacccgtaa

SEQ ID NO: 14961 - DNA, 705 bp, Artificial Sequence
  chemically treated genomic DNA (Homo sapiens) CpG-island No: 14961
cgagttagagcgggttcgtcgaggggtgcgcggttcggttcggtttcgtttcgcgtcgcgttgtatgttagttttcgttttcgggttcgacgtggtttcgatttcgggtttttagtttaggttttcgtttcgttttttttcgttcgagttcgggttcgggtcgtcgtcgtattttgttgaaggcgaaaagtttttgtttgagtttttcgcgttgcgggtcggcgttttgtcgtcggaatcgaaattttattattttgcgttcggttgtaggcgtttcgttcgtcgtcgtcgttcgtaggatggtcgcgcgtttcgcgggttttaaggcgcggcggggcgtaggcgtcgggcgggcgtcggggtcgtgtatgtacgcgggtgggcgcgggcgacgacgcgtcgttcgattagtgaacgagttcgtcgtgtcgttcgtttcgtttttgttggttagataatggtgaatttgggtttcggggttcggtcgggttcgcgaagagacgttcgtttatgtatcggtcggcgcggggttgtcgggatttgtagtttatgagtcggggttttagcgcgggcggttggggaagcgttttggagggggattggcgtacgttttcgggtttggaggagatttttttttttttttagagagcgagcgacgtgtttatttatgtaatggggtagttttgtttcgaaagttaagatagt

SEQ ID NO: 14962 - DNA, 705 bp, Artificial Sequence
  chemically treated genomic DNA (Homo sapiens) CpG-island No: 14962
actatcttaactttcgaaacaaaactaccccattacataaataaacacgtcgctcgctctctaaaaaaaaaaaaaaatctcctccaaacccgaaaacgtacgccaatccccctccaaaacgcttccccaaccgcccgcgctaaaaccccgactcataaactacaaatcccgacaaccccgcgccgaccgatacataaacgaacgtctcttcgcgaacccgaccgaaccccgaaacccaaattcaccattatctaaccaacaaaaacgaaacgaacgacacgacgaactcgttcactaatcgaacgacgcgtcgtcgcccgcgcccacccgcgtacatacacgaccccgacgcccgcccgacgcctacgccccgccgcgccttaaaacccgcgaaacgcgcgaccatcctacgaacgacgacgacgaacgaaacgcctacaaccgaacgcaaaataataaaatttcgattccgacgacaaaacgccgacccgcaacgcgaaaaactcaaacaaaaacttttcgccttcaacaaaatacgacgacgacccgaacccgaactcgaacgaaaaaaaacgaaacgaaaacctaaactaaaaacccgaaatcgaaaccacgtcgaacccgaaaacgaaaactaacatacaacgcgacgcgaaacgaaaccgaaccgaaccgcgcacccctcgacgaacccgctctaactcg

SEQ ID NO: 14963 - DNA, 705 bp, Artificial Sequence
  chemically treated genomic DNA (Homo sapiens) CpG-island No: 14963
gttgttttggttttcggaatagggttgttttattatatgagtgggtacgtcgttcgttttttgggaggaggaaaaagttttttttaagttcgggaacgtgcgttaatttttttttaaagcgtttttttagtcgttcgcgttggagtttcggtttatggattataagtttcggtagtttcgcgtcggtcgatgtataggcgggcgttttttcgcgagttcggtcgagtttcggggtttaagtttattattgtttggttaataggggcggggcgggcggtacggcgggttcgtttattggtcgggcggcgcgtcgtcgttcgcgtttattcgcgtgtatgtacggtttcggcgttcgttcggcgtttgcgtttcgtcgcgttttaggattcgcggggcgcgcggttattttgcgggcggcggcggcgggcgaggcgtttgtagtcgggcgtaagatgatgaagtttcggtttcggcggtagggcgtcgattcgtagcgcgagaagtttaagtaggagtttttcgtttttaataaggtgcggcggcggttcgggttcgggttcgggcgggagggggcgggacgggggtttgggttgggggttcggggtcggagttacgtcgggttcgggggcgggggttggtatgtagcgcggcgcggggcggggtcgggtcgggtcgcgtatttttcggcgggttcgttttggttcg

SEQ ID NO: 14964 - DNA, 705 bp, Artificial Sequence
  chemically treated genomic DNA (Homo sapiens) CpG-island No: 14964
cgaaccaaaacgaacccgccgaaaaatacgcgacccgacccgaccccgccccgcgccgcgctacataccaacccccgcccccgaacccgacgtaactccgaccccgaacccccaacccaaacccccgtcccgccccctcccgcccgaacccgaacccgaaccgccgccgcaccttattaaaaacgaaaaactcctacttaaacttctcgcgctacgaatcgacgccctaccgccgaaaccgaaacttcatcatcttacgcccgactacaaacgcctcgcccgccgccgccgcccgcaaaataaccgcgcgccccgcgaatcctaaaacgcgacgaaacgcaaacgccgaacgaacgccgaaaccgtacatacacgcgaataaacgcgaacgacgacgcgccgcccgaccaataaacgaacccgccgtaccgcccgccccgcccctattaaccaaacaataataaacttaaaccccgaaactcgaccgaactcgcgaaaaaacgcccgcctatacatcgaccgacgcgaaactaccgaaacttataatccataaaccgaaactccaacgcgaacgactaaaaaaacgctttaaaaaaaaattaacgcacgttcccgaacttaaaaaaaactttttcctcctcccaaaaaacgaacgacgtacccactcatataataaaacaaccctattccgaaaaccaaaacaac

SEQ ID NO: 14965 - DNA, 918 bp, Artificial Sequence
  chemically treated genomic DNA (Homo sapiens) CpG-island No: 14965
cgcggtttttatacgtatgggttcgcgttaagatttttttttcggggttcggggcgttttttagagtatgttcgtttttcgtcgttcgaggatttagagtagcgtcgtggggttatggcgcgtagcggttatacggatttgcgtgagaagtttaagtttatgacgtttcgggataattataaggcgggtagtcgggaggtcgtcgtttgtcgtagtcgtcgtagtcgtcgtagtcgtagtcgtcgtttcgtcgaattttattttgtgttcggggttaagcgtaagtattaggaggattcggatttcgagcgtagcgattatgaggagtagtagttgtagaaggaggaggaggcgcgtaaggtgaagagcggtattcgttagatgcgtttttttagttaggacgagtgcgttaagatcgaggttcgtattgacgaggtggtgtttcgcgttgagaagggtttgtataacgagtatacggtggatcgggttttattgcgtaataagtattttttcggcgaaggttatatttacggcgtttagttgtagaagcgcgggttcggttaggagcgtttttattcgtcgggcgacgtggacgagattttcgagtgggtgtattagttggtgatttaaaagttggtggagtatcgcgttattttcgagggtttcgttaatagcgtcgttattaacgattattagttcggcggttgtatcgtgttttacgtggattttatttatattttcgagcgttttatcgtgttcgtgtttttttttagcgattttgcgttgtgtttcggttgtaagttttagtttaagtttattcgggtgtcggaattagtgttttttttgtcggtgcgtaggggaagcgtgattgtgtttaggtaatttattcgggtggagggggcggttttgcgtttgttg

SEQ ID NO: 14966 - DNA, 918 bp, Artificial Sequence
  chemically treated genomic DNA (Homo sapiens) CpG-island No: 14966
caacaaacgcaaaaccgccccctccacccgaataaattacctaaacacaatcacgcttcccctacgcaccgacaaaaaaaacactaattccgacacccgaataaacttaaactaaaacttacaaccgaaacacaacgcaaaatcgctaaaaaaaaacacgaacacgataaaacgctcgaaaatataaataaaatccacgtaaaacacgatacaaccgccgaactaataatcgttaataacgacgctattaacgaaaccctcgaaaataacgcgatactccaccaacttttaaatcaccaactaatacacccactcgaaaatctcgtccacgtcgcccgacgaataaaaacgctcctaaccgaacccgcgcttctacaactaaacgccgtaaatataaccttcgccgaaaaaatacttattacgcaataaaacccgatccaccgtatactcgttatacaaacccttctcaacgcgaaacaccacctcgtcaatacgaacctcgatcttaacgcactcgtcctaactaaaaaaacgcatctaacgaataccgctcttcaccttacgcgcctcctcctccttctacaactactactcctcataatcgctacgctcgaaatccgaatcctcctaatacttacgcttaaccccgaacacaaaataaaattcgacgaaacgacgactacgactacgacgactacgacgactacgacaaacgacgacctcccgactacccgccttataattatcccgaaacgtcataaacttaaacttctcacgcaaatccgtataaccgctacgcgccataaccccacgacgctactctaaatcctcgaacgacgaaaaacgaacatactctaaaaaacgccccgaaccccgaaaaaaaaatcttaacgcgaacccatacgtataaaaaccgcg

SEQ ID NO: 14967 - DNA, 918 bp, Artificial Sequence
  chemically treated genomic DNA (Homo sapiens) CpG-island No: 14967
tagtaggcgtagggtcgttttttttattcgggtgggttatttgagtatagttacgttttttttgcgtatcggtagggaaagtattggtttcgatattcgaataggtttgaattggaatttgtagtcgaagtatagcgtagagtcgttaaagaaggatacggatacgatggggcgttcgaagatgtggatggggtttacgtgagatacgatgtagtcgtcgggttggtagtcgttgatgacggcgttgttgacgaagttttcggggatgacgcggtgttttattagtttttggattattagttggtgtatttattcggggatttcgtttacgtcgttcggcgggtagaggcgtttttggtcgggttcgcgtttttgtagttgggcgtcgtaagtgtagttttcgtcgaagaagtatttgttgcgtagtggggttcggtttatcgtgtgttcgttgtataggttttttttagcgcgggatattatttcgttaatgcgggtttcgattttggcgtattcgttttggttgaagaggcgtatttggcggatgtcgttttttattttgcgcgtttttttttttttttgtagttgttgttttttatagtcgttgcgttcggggttcgagtttttttgatatttgcgtttggtttcggatatagggtaaggttcggcggagcggcggttgcggttgcggcggttacggcggttgcggtaggcggcggtttttcggttgttcgttttatagttgtttcgggacgttatggatttgagttttttacgtaggttcgtgtagtcgttgcgcgttatggttttacgacgttgttttaggttttcgggcggcggggagcgggtatgttttaggggacgtttcgggtttcgagaggggggttttagcgcgaatttatgcgtatggggatcgcg

SEQ ID NO: 14968 - DNA, 918 bp, Artificial Sequence
  chemically treated genomic DNA (Homo sapiens) CpG-island No: 14968
cgcgatccccatacgcataaattcgcgctaaaacccccctctcgaaacccgaaacgtcccctaaaacatacccgctccccgccgcccgaaaacctaaaacaacgtcgtaaaaccataacgcgcaacgactacacgaacctacgtaaaaaactcaaatccataacgtcccgaaacaactataaaacgaacaaccgaaaaaccgccgcctaccgcaaccgccgtaaccgccgcaaccgcaaccgccgctccgccgaaccttaccctatatccgaaaccaaacgcaaatatcaaaaaaactcgaaccccgaacgcaacgactataaaaaacaacaactacaaaaaaaaaaaaaaacgcgcaaaataaaaaacgacatccgccaaatacgcctcttcaaccaaaacgaatacgccaaaatcgaaacccgcattaacgaaataatatcccgcgctaaaaaaaacctatacaacgaacacacgataaaccgaaccccactacgcaacaaatacttcttcgacgaaaactacacttacgacgcccaactacaaaaacgcgaacccgaccaaaaacgcctctacccgccgaacgacgtaaacgaaatccccgaataaatacaccaactaataatccaaaaactaataaaacaccgcgtcatccccgaaaacttcgtcaacaacgccgtcatcaacgactaccaacccgacgactacatcgtatctcacgtaaaccccatccacatcttcgaacgccccatcgtatccgtatccttctttaacgactctacgctatacttcgactacaaattccaattcaaacctattcgaatatcgaaaccaatactttccctaccgatacgcaaaaaaaacgtaactatactcaaataacccacccgaataaaaaaaacgaccctacgcctacta

SEQ ID NO: 14969 - DNA, 535 bp, Artificial Sequence
  chemically treated genomic DNA (Homo sapiens) CpG-island No: 14969
tattatttcgcgggttcggttggagaagtcgtttttgcgacgggggtttcggcggaatagttcgtttcggttgttatcgatttcgtcgtttatcgttatttttagcgttttgtttcgcgtttttacggttttgacgttggttcggaatagtagcgtgatgtttatcgttatagcgattcgtatttttagttttatattaggttcgtttacgtaagtagtcggcgagtcggcgcgaattcggtcgttgaaggattggttttgttttatacgttttttttcggtaacggcgacgcgagaagaaaggtttttgtttgcgttttgtatcgcggcgggaggaaaaaggtttcgttttagtcggcgtattggcggaggaggaattttcgacgcgttttcgggtatcggttttttttagtaaagtttggagggtttagttgcgcggagagtttagcgagtttttttgtgtttgtttggggcgtgtgggtttcgggagcgtgaggatcgggaagttaggaggtttttttttttttggcggttt

SEQ ID NO: 14970 - DNA, 535 bp, Artificial Sequence
  chemically treated genomic DNA (Homo sapiens) CpG-island No: 14970
aaaccgccaaaaaaaaaaaaacctcctaacttcccgatcctcacgctcccgaaacccacacgccccaaacaaacacaaaaaaactcgctaaactctccgcgcaactaaaccctccaaactttactaaaaaaaaccgatacccgaaaacgcgtcgaaaattcctcctccgccaatacgccgactaaaacgaaacctttttcctcccgccgcgatacaaaacgcaaacaaaaacctttcttctcgcgtcgccgttaccgaaaaaaaacgtataaaacaaaaccaatccttcaacgaccgaattcgcgccgactcgccgactacttacgtaaacgaacctaatataaaactaaaaatacgaatcgctataacgataaacatcacgctactattccgaaccaacgtcaaaaccgtaaaaacgcgaaacaaaacgctaaaaataacgataaacgacgaaatcgataacaaccgaaacgaactattccgccgaaacccccgtcgcaaaaacgacttctccaaccgaacccgcgaaataata

SEQ ID NO: 14971 - DNA, 535 bp, Artificial Sequence
  chemically treated genomic DNA (Homo sapiens) CpG-island No: 14971
gagtcgttagaagggaaggagttttttagtttttcggtttttacgttttcggagtttatacgttttaaatagatatagaagagttcgttgagtttttcgcgtagttaaattttttaagttttgttgggagaaatcgatgttcgagagcgcgtcgaaggtttttttttcgttagtgcgtcggttgaggcgaagttttttttttttcgtcgcggtatagggcgtaggtaggaattttttttttcgcgtcgtcgttgtcggggggaggcgtgtggggtaggattagttttttagcggtcgggttcgcgtcggttcgtcggttgtttacgtgggcgggtttagtgtggggttgagggtgcgggtcgttatggcggtggatattacgttgttatttcgggttagcgttaagatcgtgaagacgcggaataaggcgttgggagtggcggtgggcggcggggtcgatggtagtcgggacgagttgtttcgtcggagttttcgtcgtaagggcgatttttttagtcgggttcgcgaagtggtg

SEQ ID NO: 14972 - DNA, 535 bp, Artificial Sequence
  chemically treated genomic DNA (Homo sapiens) CpG-island No: 14972
caccacttcgcgaacccgactaaaaaaatcgcccttacgacgaaaactccgacgaaacaactcgtcccgactaccatcgaccccgccgcccaccgccactcccaacgccttattccgcgtcttcacgatcttaacgctaacccgaaataacaacgtaatatccaccgccataacgacccgcaccctcaaccccacactaaacccgcccacgtaaacaaccgacgaaccgacgcgaacccgaccgctaaaaaactaatcctaccccacacgcctccccccgacaacgacgacgcgaaaaaaaaaattcctacctacgccctataccgcgacgaaaaaaaaaaaacttcgcctcaaccgacgcactaacgaaaaaaaaaccttcgacgcgctctcgaacatcgatttctcccaacaaaacttaaaaaatttaactacgcgaaaaactcaacgaactcttctatatctatttaaaacgtataaactccgaaaacgtaaaaaccgaaaaactaaaaaactccttcccttctaacgactc

SEQ ID NO: 14973 - DNA, 661 bp, Artificial Sequence
  chemically treated genomic DNA (Homo sapiens) CpG-island No: 14973
cgtatgcgtgcgggcggcgtagggattcggttttaggttttcgttgacgtttcgtatgttttcgcggggttcgttcgttttatttttagttcgtatcggcgtcgtttatattgtaggatgattttttcgaacgtttgtttttgtagtcggtttcggcgttttagttgtttcgagatgtggcgtttttagcgggggaagttagcggcgcggaggttcgacgatatgttatttgttgtttcggtattttagcgttattaatgcgagcgagggttgacggtcgtagtttgtagtatgaagtaattagtagaagcgggaatgtcggtaatttcggagtttatttttatatattggtagttttcgaggttattcgggacggtttttcggtttatgtcggaaatgattttcgagagggtcggaagattcgtttttttattcgaagtacgggtttaggagtcggtgtttacgtagggcgttcgttagtgacgttagtttgtagtcggaagcgttagttgtagagaggtggtcgtttgggggcgttcgggttttgcgtaaggtttagcgtcgggcgggaaggaggtaggaaaggggtcgttttcgtttgattgtttattttttttttgttgttttttaatttttttcgtgtttttttttttggtttgtt

SEQ ID NO: 14974 - DNA, 661 bp, Artificial Sequence
  chemically treated genomic DNA (Homo sapiens) CpG-island No: 14974
aacaaaccaaaaaaaaaaacacgaaaaaaattaaaaaacaacaaaaaaaaaataaacaatcaaacgaaaacgacccctttcctacctccttcccgcccgacgctaaaccttacgcaaaacccgaacgcccccaaacgaccacctctctacaactaacgcttccgactacaaactaacgtcactaacgaacgccctacgtaaacaccgactcctaaacccgtacttcgaataaaaaaacgaatcttccgaccctctcgaaaatcatttccgacataaaccgaaaaaccgtcccgaataacctcgaaaactaccaatatataaaaataaactccgaaattaccgacattcccgcttctactaattacttcatactacaaactacgaccgtcaaccctcgctcgcattaataacgctaaaataccgaaacaacaaataacatatcgtcgaacctccgcgccgctaacttcccccgctaaaaacgccacatctcgaaacaactaaaacgccgaaaccgactacaaaaacaaacgttcgaaaaaatcatcctacaatataaacgacgccgatacgaactaaaaataaaacgaacgaaccccgcgaaaacatacgaaacgtcaacgaaaacctaaaaccgaatccctacgccgcccgcacgcatacg

SEQ ID NO: 14975 - DNA, 661 bp, Artificial Sequence
  chemically treated genomic DNA (Homo sapiens) CpG-island No: 14975
gataggttaagaaaaaaaatacgaaaagggttgaaaagtagtaaaagaaaagtaagtagttaggcggaaacggttttttttttgtttttttttcgttcggcgttgggttttgcgtagggttcggacgtttttaagcggttatttttttgtagttgacgttttcggttataggttggcgttattagcgagcgttttgcgtaggtatcggtttttgagttcgtgtttcgggtgagggggcgggtttttcggttttttcgaaaattattttcggtatgagtcggaagatcgtttcggatggtttcggggattgttagtgtgtggaggtgagtttcgggattgtcggtattttcgtttttgttggttgttttatgttgtaggttgcggtcgttagttttcgttcgtattggtggcgttgaggtgtcggggtagtaagtgatatgtcgtcgggttttcgcgtcgttgatttttttcgttggaagcgttatatttcggagtaattgaggcgtcgggatcggttgtagagataggcgttcgaggagattattttgtagtgtgagcggcgtcggtgcgggttgggagtggggcgggcgggtttcgcggaggtatgcggggcgttagcgggaatttgaggtcgagtttttgcgtcgttcgtacgtatgcg

SEQ ID NO: 14976 - DNA, 661 bp, Artificial Sequence
  chemically treated genomic DNA (Homo sapiens) CpG-island No: 14976
cgcatacgtacgaacgacgcaaaaactcgacctcaaattcccgctaacgccccgcatacctccgcgaaacccgcccgccccactcccaacccgcaccgacgccgctcacactacaaaataatctcctcgaacgcctatctctacaaccgatcccgacgcctcaattactccgaaatataacgcttccaacgaaaaaaatcaacgacgcgaaaacccgacgacatatcacttactaccccgacacctcaacgccaccaatacgaacgaaaactaacgaccgcaacctacaacataaaacaaccaacaaaaacgaaaataccgacaatcccgaaactcacctccacacactaacaatccccgaaaccatccgaaacgatcttccgactcataccgaaaataattttcgaaaaaaccgaaaaacccgccccctcacccgaaacacgaactcaaaaaccgatacctacgcaaaacgctcgctaataacgccaacctataaccgaaaacgtcaactacaaaaaaataaccgcttaaaaacgtccgaaccctacgcaaaacccaacgccgaacgaaaaaaaaacaaaaaaaaaaccgtttccgcctaactacttacttttcttttactacttttcaacccttttcgtattttttttcttaacctatc

SEQ ID NO: 14977 - DNA, 593 bp, Artificial Sequence
  chemically treated genomic DNA (Homo sapiens) CpG-island No: 14977
  unsure (545)
tggtttcgcggtttcgtttgtatttttcggtttttcgttttttttttttgttttttttcgttttcgttttgttttttttcggcgttttttttttttgtcgtgtcgtttttttttgtcgtcgcgttttcgttttttttttgtgttttttcgttcgttttttttttttttattcgttttcgtttgtgttgtttcgcgatttcgttcgtttttttggtcgtcgttcgcgtacgtgtcggcgtaattttacgtgttttgttcgttatttcgcgcgtttggatagttgttatttcgttcgtgtcgttttttgttttgtttcgcgttttgttgttttcgtttcggtcgcgtattttgagtttcgtttcgttcggcgggtttgagagcggcgatttttagttcgtttttatttaattgattggttttttcgtgtattggttgtcgttttgcgtatttgtatagttattcgatgacgggcgagtcgtttatttttttcgtgcgttcgttaatatttttgtttcgttgtgtgtttttgtagtggcggtacgcgncgtgttgtgtcgttcgtttttcgtgttttttgtgttgtgttgttgttg

SEQ ID NO: 14978 - DNA, 593 bp, Artificial Sequence
  chemically treated genomic DNA (Homo sapiens) CpG-island No: 14978
  unsure (49)
caacaacaacacaacacaaaaaacacgaaaaacgaacgacacaacacgncgcgtaccgccactacaaaaacacacaacgaaacaaaaatattaacgaacgcacgaaaaaaataaacgactcgcccgtcatcgaataactatacaaatacgcaaaacgacaaccaatacacgaaaaaaccaatcaattaaataaaaacgaactaaaaatcgccgctctcaaacccgccgaacgaaacgaaactcaaaatacgcgaccgaaacgaaaacaacaaaacgcgaaacaaaacaaaaaacgacacgaacgaaataacaactatccaaacgcgcgaaataacgaacaaaacacgtaaaattacgccgacacgtacgcgaacgacgaccaaaaaaacgaacgaaatcgcgaaacaacacaaacgaaaacgaataaaaaaaaaaaaaacgaacgaaaaaacacaaaaaaaaaacgaaaacgcgacgacaaaaaaaaacgacacgacaaaaaaaaaaaacgccgaaaaaaaacaaaacgaaaacgaaaaaaaacaaaaaaaaaaaacgaaaaaccgaaaaatacaaacgaaaccgcgaaacca

SEQ ID NO: 14979 - DNA, 593 bp, Artificial Sequence
  chemically treated genomic DNA (Homo sapiens) CpG-island No: 14979
  unsure (49)
taataataatataatatagaaagtacgaggagcgagcgatataatacgncgcgtgtcgttattgtaaggatatataacgaagtagaggtattgacgagcgtacggagagaatgagcggttcgttcgttatcgagtgattatataaatacgtagggcgatagttaatatacgaaaagattaattaattaggtgaggacgggttagagatcgtcgtttttagattcgtcgagcgaggcgagatttagagtgcgcgatcgaggcggaggtaatagaacgcggagtaaggtaggaagcgatacgggcgagatgataattgtttaggcgcgcgggatagcgaatagaatacgtgaagttacgtcgatacgtgcgcggacgacgattaaagaaacgagcggggtcgcgaggtaatataagcgggaacgaataaaggagggagagacgaacggaagagtatagagggagggcgaaggcgcggcgataagaaggagcgatacggtaggggggagaaacgtcgggaagaagtaagacgggaacgggggaagataagaggagagggcggagaatcggaagatataaacgggatcgcgaggtta

SEQ ID NO: 14980 - DNA, 593 bp, Artificial Sequence
  chemically treated genomic DNA (Homo sapiens) CpG-island No: 14980
  unsure (545)
taacctcgcgatcccgtttatatcttccgattctccgccctctcctcttatcttcccccgttcccgtcttacttcttcccgacgtttctcccccctaccgtatcgctccttcttatcgccgcgccttcgccctccctctatactcttccgttcgtctctccctcctttattcgttcccgcttatattacctcgcgaccccgctcgtttctttaatcgtcgtccgcgcacgtatcgacgtaacttcacgtattctattcgctatcccgcgcgcctaaacaattatcatctcgcccgtatcgcttcctaccttactccgcgttctattacctccgcctcgatcgcgcactctaaatctcgcctcgctcgacgaatctaaaaacgacgatctctaacccgtcctcacctaattaattaatcttttcgtatattaactatcgccctacgtatttatataatcactcgataacgaacgaaccgctcattctctccgtacgctcgtcaatacctctacttcgttatatatccttacaataacgacacgcgncgtattatatcgctcgctcctcgtactttctatattatattattatta

SEQ ID NO: 14981 - DNA, 663 bp, Artificial Sequence
  chemically treated genomic DNA (Homo sapiens) CpG-island No: 14981
gtttattcggtagttggtgttttcggaatcgagatgtttttaaaatgtcgttagtgagtaggatcgggtgtttaaggttatttttcgtttttttcggttcgcgttttggttttcggtcgtcgttttatttggttcggcgagtcgggggcgggttcgagtttttcgggagcgttaggttcgcgtatatttggatcggtcgcgggaattcgagcgggtcgcgtttagtttcgtcggaggtttaggagtcgtcgtcgcgtagtgtgtagggggtggggaaggattcggtttcgttcgcgcgagttggttcggcgagggtgggggaggggttttttcgtcgtcgaaaggacgcgtgcgtttaggattcgcgggttattcgatttggatttttattttcgtttacgtcgcggattttagtttttcgtttcgatttcgttttcgttcgcggttgggttcgggcgtgcgcgtggggtttgttgtggtaatttcgggagatcgcgggcgttttggtcgtttttgtttcgtttcgggttgcgtggtttacggatttttttttttttggttaaagtcggcggacgagaaagtttttgatttttgtaaagttcggttcggtttgtacggttatttcgaacgtagttggttttcgttatagagtatttataataa

SEQ ID NO: 14982 - DNA, 663 bp, Artificial Sequence
  chemically treated genomic DNA (Homo sapiens) CpG-island No: 14982
ttattataaatactctataacgaaaaccaactacgttcgaaataaccgtacaaaccgaaccgaactttacaaaaatcaaaaactttctcgtccgccgactttaaccaaaaaaaaaaaaatccgtaaaccacgcaacccgaaacgaaacaaaaacgaccaaaacgcccgcgatctcccgaaattaccacaacaaaccccacgcgcacgcccgaacccaaccgcgaacgaaaacgaaatcgaaacgaaaaactaaaatccgcgacgtaaacgaaaataaaaatccaaatcgaataacccgcgaatcctaaacgcacgcgtcctttcgacgacgaaaaaacccctcccccaccctcgccgaaccaactcgcgcgaacgaaaccgaatccttccccaccccctacacactacgcgacgacgactcctaaacctccgacgaaactaaacgcgacccgctcgaattcccgcgaccgatccaaatatacgcgaacctaacgctcccgaaaaactcgaacccgcccccgactcgccgaaccaaataaaacgacgaccgaaaaccaaaacgcgaaccgaaaaaaacgaaaaataaccttaaacacccgatcctactcactaacgacattttaaaaacatctcgattccgaaaacaccaactaccgaataaac

SEQ ID NO: 14983 - DNA, 663 bp, Artificial Sequence
  chemically treated genomic DNA (Homo sapiens) CpG-island No: 14983
ttattataaatattttgtggcgggagttagttgcgttcgggataatcgtgtagatcgaatcggattttataaaaattagggattttttcgttcgtcggttttggttagggagggggaggttcgtgagttacgtagttcggggcggggtagaggcggttagggcgttcgcggtttttcggggttgttataatagattttacgcgtacgttcgagtttagtcgcgggcgggagcggggtcggggcgggggattgaggttcgcggcgtgggcgggggtgggggtttaggtcgggtagttcgcgggttttgagcgtacgcgttttttcggcggcgagagggttttttttttattttcgtcgagttagttcgcgcgggcggggtcgggtttttttttattttttgtatattacgcggcggcggtttttgagttttcggcggggttgggcgcggttcgttcgggttttcgcggtcgatttaggtgtgcgcggatttggcgttttcggggggttcggattcgttttcgattcgtcgagttaggtgaggcggcggtcggggattagggcgcgggtcggggaggacgggaggtggttttgggtattcgattttgtttattgacggtattttgggggtatttcgatttcgggagtattaattatcgggtaagt

SEQ ID NO: 14984 - DNA, 663 bp, Artificial Sequence
  chemically treated genomic DNA (Homo sapiens) CpG-island No: 14984
acttacccgataattaatactcccgaaatcgaaatacccccaaaataccgtcaataaacaaaatcgaatacccaaaaccacctcccgtcctccccgacccgcgccctaatccccgaccgccgcctcacctaactcgacgaatcgaaaacgaatccgaaccccccgaaaacgccaaatccgcgcacacctaaatcgaccgcgaaaacccgaacgaaccgcgcccaaccccgccgaaaactcaaaaaccgccgccgcgtaatatacaaaaaataaaaaaaaacccgaccccgcccgcgcgaactaactcgacgaaaataaaaaaaaaaccctctcgccgccgaaaaaacgcgtacgctcaaaacccgcgaactacccgacctaaacccccacccccgcccacgccgcgaacctcaatcccccgccccgaccccgctcccgcccgcgactaaactcgaacgtacgcgtaaaatctattataacaaccccgaaaaaccgcgaacgccctaaccgcctctaccccgccccgaactacgtaactcacgaacctccccctccctaaccaaaaccgacgaacgaaaaaatccctaatttttataaaatccgattcgatctacacgattatcccgaacgcaactaactcccgccacaaaatatttataataa

SEQ ID NO: 14985 - DNA, 557 bp, Artificial Sequence
  chemically treated genomic DNA (Homo sapiens) CpG-island No: 14985
aggcgtttcgagtttttttaaaagatcggttgcgaaaatttacggttatttgtattattttttttttttttgggtgttttagttttacggaaaggtaagtttcgtttacgcgtttatttatttcgagtagggtgttcgtacgtagattcgtttggagggttcgcgttgtatttttacgttaagttttagaattttggcggcgaggtttattttagttttcgtattttttcgaattcgggcggcgaggtcgttgcggtggtcgtatttgttggtttagttcggcggttttagtttaagtgacgagtgcgttgtcggcgtttttgggagcggttttcggttttggcgtcggggtcggggtattcgttggaggcgtttgggcgcgggttgggcgagcggattgtttggcgttcggggaggagggatgttcggcgaaagttgttagggaatttgattaattcgagcgcgtaggtgttagttttttgtataatttacggacggtggttggcgggttgcgtacggacgtttttattatattagttagatgagtattgcgtgtt

SEQ ID NO: 14986 - DNA, 557 bp, Artificial Sequence
  chemically treated genomic DNA (Homo sapiens) CpG-island No: 14986
aacacgcaatactcatctaactaatataataaaaacgtccgtacgcaacccgccaaccaccgtccgtaaattatacaaaaaactaacacctacgcgctcgaattaatcaaattccctaacaactttcgccgaacatccctcctccccgaacgccaaacaatccgctcgcccaacccgcgcccaaacgcctccaacgaataccccgaccccgacgccaaaaccgaaaaccgctcccaaaaacgccgacaacgcactcgtcacttaaactaaaaccgccgaactaaaccaacaaatacgaccaccgcaacgacctcgccgcccgaattcgaaaaaatacgaaaactaaaataaacctcgccgccaaaattctaaaacttaacgtaaaaatacaacgcgaaccctccaaacgaatctacgtacgaacaccctactcgaaataaataaacgcgtaaacgaaacttacctttccgtaaaactaaaacacccaaaaaaaaaaaaaataatacaaataaccgtaaattttcgcaaccgatcttttaaaaaaactcgaaacgcct

SEQ ID NO: 14987 - DNA, 557 bp, Artificial Sequence
  chemically treated genomic DNA (Homo sapiens) CpG-island No: 14987
ggtacgtagtgtttatttagttggtatagtgagaacgttcgtgcgtagttcgttagttatcgttcgtgaattatgtaggaagttggtatttgcgcgttcgagttgattaagttttttagtaattttcgtcgagtatttttttttttcggacgttaggtagttcgttcgtttagttcgcgtttaggcgtttttaacgggtgtttcggtttcggcgttaggatcggggatcgtttttagagacgtcgatagcgtattcgttatttgggttggagtcgtcggattgagttagtaggtgcgattatcgtagcggtttcgtcgttcgggttcggggggatgcgggggttggggtggatttcgtcgttagggttttggggtttggcgtgggggtgtagcgcgggttttttaggcgggtttgcgtgcggatattttgttcgaggtgggtgggcgcgtgggcgaggtttgttttttcgtggggttggagtatttagagggagaaagggtggtgtaggtgatcgtgggttttcgtagtcgattttttaaaggggttcggggcgttt

SEQ ID NO: 14988 - DNA, 557 bp, Artificial Sequence
  chemically treated genomic DNA (Homo sapiens) CpG-island No: 14988
aaacgccccgaacccctttaaaaaatcgactacgaaaacccacgatcacctacaccaccctttctccctctaaatactccaaccccacgaaaaaacaaacctcgcccacgcgcccacccacctcgaacaaaatatccgcacgcaaacccgcctaaaaaacccgcgctacacccccacgccaaaccccaaaaccctaacgacgaaatccaccccaacccccgcatccccccgaacccgaacgacgaaaccgctacgataatcgcacctactaactcaatccgacgactccaacccaaataacgaatacgctatcgacgtctctaaaaacgatccccgatcctaacgccgaaaccgaaacacccgttaaaaacgcctaaacgcgaactaaacgaacgaactacctaacgtccgaaaaaaaaaaatactcgacgaaaattactaaaaaacttaatcaactcgaacgcgcaaataccaacttcctacataattcacgaacgataactaacgaactacgcacgaacgttctcactataccaactaaataaacactacgtacc

SEQ ID NO: 14989 - DNA, 502 bp, Artificial Sequence
  chemically treated genomic DNA (Homo sapiens) CpG-island No: 14989
gtagcgaaagaatttttgggggttttgggatggggcgagaggcgtgagtttttagttgggaaggaggaggcggcgatttggggattcggtaatttgttcgggtagtgaggcgagtacggggaggggaggcgagaaaaggggagggtggagtaaaagttcgtgggtgtaggttttgggtcggggagagggaggaagcgcggagggaggcgaagacgtttggggtcgggtatttattcgtcgggcgttcgggttgaatgggtcgttatcgtagtgttcgttcgtttagtattacgttataattgtttttttcgatttcgaagatgtttcggagtagaattcgttcggtcgtcgttttcgtttgttgcggggacgttaatagcgtcggaggtatagcggtagttttcgggggcgttttttttttcggtcgttttttagggtatttattcggtttttgcgttttttttagggtatggcggagtcgtaggttgggttcgagttaggg

SEQ ID NO: 14990 - DNA, 502 bp, Artificial Sequence
  chemically treated genomic DNA (Homo sapiens) CpG-island No: 14990
ccctaactcgaacccaacctacgactccgccataccctaaaaaaaacgcaaaaaccgaataaataccctaaaaaacgaccgaaaaaaaaaacgcccccgaaaactaccgctatacctccgacgctattaacgtccccgcaacaaacgaaaacgacgaccgaacgaattctactccgaaacatcttcgaaatcgaaaaaaacaattataacgtaatactaaacgaacgaacactacgataacgacccattcaacccgaacgcccgacgaataaatacccgaccccaaacgtcttcgcctccctccgcgcttcctccctctccccgacccaaaacctacacccacgaacttttactccaccctccccttttctcgcctcccctccccgtactcgcctcactacccgaacaaattaccgaatccccaaatcgccgcctcctccttcccaactaaaaactcacgcctctcgccccatcccaaaacccccaaaaattctttcgctac

SEQ ID NO: 14991 - DNA, 502 bp, Artificial Sequence
  chemically treated genomic DNA (Homo sapiens) CpG-island No: 14991
ttttggttcgggtttagtttgcgatttcgttatgttttggaggaggcgtaggaatcgggtgagtgttttggagggcggtcgggagaagaggcgttttcggaggttgtcgttgtgttttcggcgttgttaacgttttcgtagtagacggaggcggcggtcgagcggattttgtttcggggtattttcgagatcgggagggatagttgtgacgtggtgttgagcgagcgagtattgcggtggcggtttatttagttcgagcgttcggcgggtgagtgttcggttttaagcgttttcgttttttttcgcgtttttttttttttttcggtttaaggtttatatttacgagtttttgttttattttttttttttttcgtttttttttttcgtgttcgttttattgttcggataggttatcgagtttttaagtcgtcgtttttttttttttaattgggaatttacgtttttcgttttattttagaatttttagggattttttcgttat

SEQ ID NO: 14992 - DNA, 502 bp, Artificial Sequence
  chemically treated genomic DNA (Homo sapiens) CpG-island No: 14992
ataacgaaaaaatccctaaaaattctaaaataaaacgaaaaacgtaaattcccaattaaaaaaaaaaaaacgacgacttaaaaactcgataacctatccgaacaataaaacgaacacgaaaaaaaaaaacgaaaaaaaaaaaaaataaaacaaaaactcgtaaatataaaccttaaaccgaaaaaaaaaaaaaaacgcgaaaaaaaacgaaaacgcttaaaaccgaacactcacccgccgaacgctcgaactaaataaaccgccaccgcaatactcgctcgctcaacaccacgtcacaactatccctcccgatctcgaaaataccccgaaacaaaatccgctcgaccgccgcctccgtctactacgaaaacgttaacaacgccgaaaacacaacgacaacctccgaaaacgcctcttctcccgaccgccctccaaaacactcacccgattcctacgcctcctccaaaacataacgaaatcgcaaactaaacccgaaccaaaa

SEQ ID NO: 14993 - DNA, 796 bp, Artificial Sequence
  chemically treated genomic DNA (Homo sapiens) CpG-island No: 14993
  unsure (641)
gtttttcgaaatggggtcgtagagttgtcggcggagattagtaggtgggaggttttacgtatatttttcgattcggtcgggacgcggttttcggatttcgcgtagggtttaagatcgtcgtttcgtttttttttttcggtttttttattaattttagtttgaaagaaaattttacgcggtcgaaatgaacgttattttatcgttttaagtttttagtcggtagaaaacgtgagatttattatgatacggggaggggagatgggggtcgtcgtggtatattcggaagcgggttatttggttttcgtcgcgagggtatcgtagttcggggattaacgggttgggggcgacgcggtcgggcgcgcgggtggcgcgagggagtgcgtcgtcgcggagttttcggggtagtatttgttttgtaatcgattgtcgagcgcgtcgagcggtttagcgcgtagatacgtcgatacggttcgttagttcgcgcgcgcgtatacgcgtttttatatatatacgtataggcgttcgggtttcgtatatacgtacgcgcgcgtacgtacgttcgttcgttcgcgttcggggttcgttgttcgtcgttagtcgttcgtcgtcgtcgtcgtcgtagtcgtcgtttagttcgtttnattttcgcgggcgtttgcgcgagttcggtcggcgggggagatgtgttcgggttttatcggatcggtttttcggggtttgattagttgtttcgggttaattttgtttttcgttgaagatggaggaagtaaaaataggattatttttagttatagat

SEQ ID NO: 14994 - DNA, 796 bp, Artificial Sequence
  chemically treated genomic DNA (Homo sapiens) CpG-island No: 14994
  unsure (156)
atctataactaaaaataatcctatttttacttcctccatcttcaacgaaaaacaaaattaacccgaaacaactaatcaaaccccgaaaaaccgatccgataaaacccgaacacatctcccccgccgaccgaactcgcgcaaacgcccgcgaaaatnaaacgaactaaacgacgactacgacgacgacgacgacgaacgactaacgacgaacaacgaaccccgaacgcgaacgaacgaacgtacgtacgcgcgcgtacgtatatacgaaacccgaacgcctatacgtatatatataaaaacgcgtatacgcgcgcgcgaactaacgaaccgtatcgacgtatctacgcgctaaaccgctcgacgcgctcgacaatcgattacaaaacaaatactaccccgaaaactccgcgacgacgcactccctcgcgccacccgcgcgcccgaccgcgtcgcccccaacccgttaatccccgaactacgataccctcgcgacgaaaaccaaataacccgcttccgaatataccacgacgacccccatctcccctccccgtatcataataaatctcacgttttctaccgactaaaaacttaaaacgataaaataacgttcatttcgaccgcgtaaaattttctttcaaactaaaattaataaaaaaaccgaaaaaaaaaaacgaaacgacgatcttaaaccctacgcgaaatccgaaaaccgcgtcccgaccgaatcgaaaaatatacgtaaaacctcccacctactaatctccgccgacaactctacgaccccatttcgaaaaac

SEQ ID NO: 14995 - DNA, 796 bp, Artificial Sequence
  chemically treated genomic DNA (Homo sapiens) CpG-island No: 14995
  unsure (156)
atttgtagttaagggtaattttgtttttattttttttatttttagcgaggagtagggttagttcgggatagttggttaaatttcgagaaatcgattcggtggagttcgagtatatttttttcgtcggtcgggttcgcgtagacgttcgcggggatngggcgggttaggcggcggttgcggcggcggcggcggcgggcggttggcggcgggtagcggatttcgggcgcgggcgagcggacgtgcgtgcgcgcgcgtgcgtgtgtgcggggttcgagcgtttgtgcgtgtgtgtatgagagcgcgtgtgcgcgcgcgcgggttggcgggtcgtgtcgacgtgtttgcgcgttaagtcgttcggcgcgttcggtaatcgattataggataagtgttgtttcggaggtttcgcgacggcgtattttttcgcgttattcgcgcgttcggtcgcgtcgtttttagttcgttggttttcggattgcggtattttcgcgacgggggttaggtaattcgttttcgagtgtgttacggcgatttttatttttttttttcgtgttataataaattttacgttttttgtcggttggaggtttggagcggtgaggtgacgtttatttcggtcgcgtgaagtttttttttaaattgggattggtggggaggtcgggggaagggagcggggcggcgattttaggttttgcgcggagttcgggagtcgcgtttcggtcgagtcggggagtgtgcgtggagttttttatttattggttttcgtcggtaattttgcggttttatttcggaaagt

SEQ ID NO: 14996 - DNA, 796 bp, Artificial Sequence
  chemically treated genomic DNA (Homo sapiens) CpG-island No: 14996
  unsure (641)
actttccgaaataaaaccgcaaaattaccgacgaaaaccaataaataaaaaactccacgcacactccccgactcgaccgaaacgcgactcccgaactccgcgcaaaacctaaaatcgccgccccgctcccttcccccgacctccccaccaatcccaatttaaaaaaaaacttcacgcgaccgaaataaacgtcacctcaccgctccaaacctccaaccgacaaaaaacgtaaaatttattataacacgaaaaaaaaaaataaaaatcgccgtaacacactcgaaaacgaattacctaacccccgtcgcgaaaataccgcaatccgaaaaccaacgaactaaaaacgacgcgaccgaacgcgcgaataacgcgaaaaaatacgccgtcgcgaaacctccgaaacaacacttatcctataatcgattaccgaacgcgccgaacgacttaacgcgcaaacacgtcgacacgacccgccaacccgcgcgcgcgcacacgcgctctcatacacacacgcacaaacgctcgaaccccgcacacacgcacgcgcgcgcacgcacgtccgctcgcccgcgcccgaaatccgctacccgccgccaaccgcccgccgccgccgccgccgcaaccgccgcctaacccgcccnatccccgcgaacgtctacgcgaacccgaccgacgaaaaaaatatactcgaactccaccgaatcgatttctcgaaatttaaccaactatcccgaactaaccctactcctcgctaaaaataaaaaaaataaaaacaaaattacccttaactacaaat

SEQ ID NO: 14997 - DNA, 663 bp, Artificial Sequence
  chemically treated genomic DNA (Homo sapiens) CpG-island No: 14997
agagggtatttgtttagttagggtttgtagtttttcgtttgtcgttagagtagttttcggttttttcggatttatttgttgaggcgttggcgtcgtttttacgtcggtttcggtggtcgcgttcgtttttgttatagtttcggttatcgcggtggtcgtagtcgttattataatcgtcgttagtgcggttatgtttattcgtcgagttattcgggtcgcggcggttatcggtgtttggggattcgtggtaggcgtattttggtttttgtagatagttttttgcgttgcgggtttggtcgggatgtagggcggggtcgagatgtagggcggggtcgggatgtagggcggggttgagatgcgggggtgtaggggtgtgggggtgcgggaggggcgggattggggtgtagggcggggtcgaaatgcgaggcgggggtcgggatttaggcggggaggggcggggcgagggaggggtaaggtgtcgggcggagtcgggatgtaggggaggggcgggtttggggttttggggcgggcgggtgtgggggcggggcggggcggggcgggggttgcgttttgttttgtcgcgggtttatatattttttgggtatttaatcgattgtgttagtttagttttatatttgttaagaaaatttattgttttatatt

SEQ ID NO: 14998 - DNA, 663 bp, Artificial Sequence
  chemically treated genomic DNA (Homo sapiens) CpG-island No: 14998
aatataaaacaataaattttcttaacaaatataaaactaaactaacacaatcgattaaatacccaaaaaatatataaacccgcgacaaaacaaaacgcaacccccgccccgccccgccccgcccccacacccgcccgccccaaaaccccaaacccgcccctcccctacatcccgactccgcccgacaccttacccctccctcgccccgcccctccccgcctaaatcccgacccccgcctcgcatttcgaccccgccctacaccccaatcccgcccctcccgcacccccacacccctacacccccgcatctcaaccccgccctacatcccgaccccgccctacatctcgaccccgccctacatcccgaccaaacccgcaacgcaaaaaactatctacaaaaaccaaaatacgcctaccacgaatccccaaacaccgataaccgccgcgacccgaataactcgacgaataaacataaccgcactaacgacgattataataacgactacgaccaccgcgataaccgaaactataacaaaaacgaacgcgaccaccgaaaccgacgtaaaaacgacgccaacgcctcaacaaataaatccgaaaaaaccgaaaactactctaacgacaaacgaaaaactacaaaccctaactaaacaaataccctct

SEQ ID NO: 14999 - DNA, 663 bp, Artificial Sequence
  chemically treated genomic DNA (Homo sapiens) CpG-island No: 14999
gatgtaagataatgaatttttttgataggtatgggattgggttggtatagtcggttaagtgtttaaagggtatataaattcgcgatagggtagagcgtagttttcgtttcgtttcgtttcgtttttatattcgttcgttttagaattttagattcgttttttttttgtatttcggtttcgttcggtattttgtttttttttcgtttcgttttttttcgtttgaatttcggttttcgtttcgtatttcggtttcgttttgtattttagtttcgtttttttcgtatttttatatttttgtattttcgtattttagtttcgttttgtatttcgatttcgttttatatttcggtttcgttttgtatttcggttaagttcgtagcgtagggagttgtttgtagaggttagggtgcgtttgttacgaatttttaggtatcggtggtcgtcgcggttcgagtagttcggcgggtaaatatggtcgtattgacgacggttgtggtagcggttgcggttatcgcggtagtcggggttgtggtaggggcgggcgcggttatcgggatcggcgtgggagcgacgttagcgttttaataggtaaattcgggagaatcgagagttgttttggcggtaggcgaggggttgtaggttttggttgaataggtgtttttt

SEQ ID NO: 15000 - DNA, 663 bp, Artificial Sequence
  chemically treated genomic DNA (Homo sapiens) CpG-island No: 15000
aaaaaacacctattcaaccaaaacctacaacccctcgcctaccgccaaaacaactctcgattctcccgaatttacctattaaaacgctaacgtcgctcccacgccgatcccgataaccgcgcccgcccctaccacaaccccgactaccgcgataaccgcaaccgctaccacaaccgtcgtcaatacgaccatatttacccgccgaactactcgaaccgcgacgaccaccgatacctaaaaattcgtaacaaacgcaccctaacctctacaaacaactccctacgctacgaacttaaccgaaatacaaaacgaaaccgaaatataaaacgaaatcgaaatacaaaacgaaactaaaatacgaaaatacaaaaatataaaaatacgaaaaaaacgaaactaaaatacaaaacgaaaccgaaatacgaaacgaaaaccgaaattcaaacgaaaaaaaacgaaacgaaaaaaaaacaaaataccgaacgaaaccgaaatacaaaaaaaaaacgaatctaaaattctaaaacgaacgaatataaaaacgaaacgaaacgaaacgaaaactacgctctaccctatcgcgaatttatataccctttaaacacttaaccgactataccaacccaatcccatacctatcaaaaaaattcattatcttacatc

SEQ ID NO: 15001 - DNA, 898 bp, Artificial Sequence
  chemically treated genomic DNA (Homo sapiens) CpG-island No: 15001
  unsure (530, 537, 586, 660)
tcgtggtcgtttcgtgagtgatcgtcgtttttgttgaacggttcgggcgttgggtcgcggtttttcgtaaggttggttttttttttcgagtggtagtaggtgttcggatgatcgggagtagtttacgttttggtgaagtagcgcgattcgaggttcggtgtcgttttttatcgttacgtagcgcgttcgtgttagggtaggtttggagtgagggcggttgatttaaattttacgtttttcgtggggttttttgggtagggcgggaaagcgtttggatgtttatattttcgggaggtggtttgtttttttttcgtgggtatcgtagcgggatagcgtggttgagattcgcggttttttcgttaaagtttttgcgttttcgttgttgtcggcgaggtcggttcggtcgttttttcgcgggtcgttgttttcggtgttttggaagggttttaggtggcggtttcgttgtagaatttttcgagttgcgttcgtcgttcggtgttttcgtagcgtttcggttgggttgcgggttncgggcgngcgagcgtaggaagcgtcgcggggttatttttttttttttttgaagttntcgcgatcgtgtaacgggtcgcgtcgttttttgttgtgttttacggtgatttttaagagtacgcgggtagtggncggtgacgtcgtgtgtgtgtgttttttttcgcgtaggtgtcggggatacgggcggtaagtcgtttacgcggggcggtgattttgtagcgcggtttcgtaggacggaaggtattcgcgtcgcgtataggcggggagatcgcggcggcgttcgggatttgttggaggaggtttgcgattagtgcgcgttttagttggaaaaggtaggggagcgtttgtttttgcggttatttatgtagtt

SEQ ID NO: 15002 - DNA, 898 bp, Artificial Sequence
  chemically treated genomic DNA (Homo sapiens) CpG-island No: 15002
  unsure (239, 313, 362, 369)
aactacataaataaccgcaaaaacaaacgctcccctaccttttccaactaaaacgcgcactaatcgcaaacctcctccaacaaatcccgaacgccgccgcgatctccccgcctatacgcgacgcgaataccttccgtcctacgaaaccgcgctacaaaatcaccgccccgcgtaaacgacttaccgcccgtatccccgacacctacgcgaaaaaaaacacacacacacgacgtcaccgnccactacccgcgtactcttaaaaatcaccgtaaaacacaacaaaaaacgacgcgacccgttacacgatcgcganaacttcaaaaaaaaaaaaaaataaccccgcgacgcttcctacgctcgcncgcccgnaacccgcaacccaaccgaaacgctacgaaaacaccgaacgacgaacgcaactcgaaaaattctacaacgaaaccgccacctaaaacccttccaaaacaccgaaaacaacgacccgcgaaaaaacgaccgaaccgacctcgccgacaacaacgaaaacgcaaaaactttaacgaaaaaaccgcgaatctcaaccacgctatcccgctacgatacccacgaaaaaaaaacaaaccacctcccgaaaatataaacatccaaacgctttcccgccctacccaaaaaaccccacgaaaaacgtaaaatttaaatcaaccgccctcactccaaacctaccctaacacgaacgcgctacgtaacgataaaaaacgacaccgaacctcgaatcgcgctacttcaccaaaacgtaaactactcccgatcatccgaacacctactaccactcgaaaaaaaaaaccaaccttacgaaaaaccgcgacccaacgcccgaaccgttcaacaaaaacgacgatcactcacgaaacgaccacga

SEQ ID NO: 15003 - DNA, 898 bp, Artificial Sequence
  chemically treated genomic DNA (Homo sapiens) CpG-island No: 15003
  unsure (239, 313, 362, 369)
ggttgtatgggtggtcgtaggggtaggcgtttttttattttttttagttgggacgcgtattggtcgtaggttttttttagtaggtttcgggcgtcgtcgcggttttttcgtttgtacgcggcgcggatgtttttcgttttgcgggatcgcgttgtagggttatcgtttcgcgtggacggtttgtcgttcgtgttttcggtatttgcgcgggaggaagtatatatatacggcgttatcgnttattgttcgcgtgtttttgagaattatcgtggaatatagtaggaggcggcgcggttcgttgtacgatcgcggnggttttaggaagagagaggggtggtttcgcgacgttttttgcgttcgtncgttcgngattcgtaatttaatcggggcgttgcgaaggtatcgggcggcgagcgtagttcggaggattttgtagcgagatcgttatttggagtttttttagggtatcggggatagcggttcgcgggggagcggtcgggtcgatttcgtcgatagtagcggaggcgtaggggttttggcgagagagtcgcgggttttagttacgttgtttcgttgcggtgtttacgggggaaagataggttatttttcgggggtgtggatatttagacgttttttcgttttgtttagaaaattttacgaagggcgtgggatttaaattagtcgtttttattttagatttgttttggtacgaacgcgttgcgtaacgatgggggacgatatcgggtttcgggtcgcgttgttttattagagcgtgggttgttttcggttattcgagtatttgttgttattcgggaggagaggttagttttgcgggaggtcgcgatttagcgttcgggtcgtttagtaaaagcggcggttatttacggggcggttacgg

SEQ ID NO: 15004 - DNA, 898 bp, Artificial Sequence
  chemically treated genomic DNA (Homo sapiens) CpG-island No: 15004
  unsure (530, 537, 586, 660)
ccgtaaccgccccgtaaataaccgccgcttttactaaacgacccgaacgctaaatcgcgacctcccgcaaaactaacctctcctcccgaataacaacaaatactcgaataaccgaaaacaacccacgctctaataaaacaacgcgacccgaaacccgatatcgtcccccatcgttacgcaacgcgttcgtaccaaaacaaatctaaaataaaaacgactaatttaaatcccacgcccttcgtaaaattttctaaacaaaacgaaaaaacgtctaaatatccacacccccgaaaaataacctatctttcccccgtaaacaccgcaacgaaacaacgtaactaaaacccgcgactctctcgccaaaacccctacgcctccgctactatcgacgaaatcgacccgaccgctcccccgcgaaccgctatccccgataccctaaaaaaactccaaataacgatctcgctacaaaatcctccgaactacgctcgccgcccgataccttcgcaacgccccgattaaattacgaatcncgaacgnacgaacgcaaaaaacgtcgcgaaaccacccctctctcttcctaaaaccnccgcgatcgtacaacgaaccgcgccgcctcctactatattccacgataattctcaaaaacacgcgaacaataancgataacgccgtatatatatacttcctcccgcgcaaataccgaaaacacgaacgacaaaccgtccacgcgaaacgataaccctacaacgcgatcccgcaaaacgaaaaacatccgcgccgcgtacaaacgaaaaaaccgcgacgacgcccgaaacctactaaaaaaaacctacgaccaatacgcgtcccaactaaaaaaaataaaaaaacgcctacccctacgaccacccatacaacc

SEQ ID NO: 15005 - DNA, 594 bp, Artificial Sequence
  chemically treated genomic DNA (Homo sapiens) CpG-island No: 15005
cggcgtttgcgcggtttttttttagttttttttgtagttacgttattttttacggtttttttcggcgtttgcgcggtttttttttagttttttttgtagttacgttattttttacggtttttttcggcgtttgcgcggtttttttttagttttttttgtagttacgttattttttacggtttttttcggcgtttgcgcggtttttttttagttttttttgtagttacgttattttttacggtttttttcggcgtttgcgcggtttttttttagttttttttgtagttacgttatttatttcggtttttttcggcgtttgcgcggtttttttttagttttttttgtagttatgttattttttacggttttcggcgtttgcgcggtcgcggtttcgtcgtttaatcgtatgcgcgatagcgttgaggttcggggagcgaggatttgtcgtcgtttagttcggagttcgtttagaaatttcgttttgtcgattcggacggtagtcgtcgttttggattttgtatttatttttttttaggttttggtttgtttcgtcgttggtgttatttaggagttgtttagtttcggttttattta

SEQ ID NO: 15006 - DNA, 594 bp, Artificial Sequence
  chemically treated genomic DNA (Homo sapiens) CpG-island No: 15006
taaataaaaccgaaactaaacaactcctaaataacaccaacgacgaaacaaaccaaaacctaaaaaaaaataaatacaaaatccaaaacgacgactaccgtccgaatcgacaaaacgaaatttctaaacgaactccgaactaaacgacgacaaatcctcgctccccgaacctcaacgctatcgcgcatacgattaaacgacgaaaccgcgaccgcgcaaacgccgaaaaccgtaaaaaataacataactacaaaaaaaactaaaaaaaaaccgcgcaaacgccgaaaaaaaccgaaataaataacgtaactacaaaaaaaactaaaaaaaaaccgcgcaaacgccgaaaaaaaccgtaaaaaataacgtaactacaaaaaaaactaaaaaaaaaccgcgcaaacgccgaaaaaaaccgtaaaaaataacgtaactacaaaaaaaactaaaaaaaaaccgcgcaaacgccgaaaaaaaccgtaaaaaataacgtaactacaaaaaaaactaaaaaaaaaccgcgcaaacgccgaaaaaaaccgtaaaaaataacgtaactacaaaaaaaactaaaaaaaaaccgcgcaaacgccg

SEQ ID NO: 15007 - DNA, 594 bp, Artificial Sequence
  chemically treated genomic DNA (Homo sapiens) CpG-island No: 15007
tgagtgagatcgggattgggtagtttttagatgatattaacgacgggataagttagagtttgggaggaaatgaatgtaggatttaaaacggcggttgtcgttcgagtcggtagaacgaggtttttgagcgggtttcgggttgagcggcggtagattttcgtttttcgggttttagcgttgtcgcgtatgcggttgaacggcggagtcgcggtcgcgtaggcgtcggaggtcgtgggaggtgatatagttgtagggggagttggggaagagtcgcgtaggcgtcggaggaggtcggggtaggtgacgtagttgtagggggagttggggaagagtcgcgtaggcgtcggaggaggtcgtgggaggtgacgtagttgtagggggagttggggaagagtcgcgtaggcgtcggaggaggtcgtgggaggtgacgtagttgtagggggagttggggaagagtcgcgtaggcgtcggaggaggtcgtgggaggtgacgtagttgtagggggagttggggaagagtcgcgtaggcgtcggaggaggtcgtgggaggtgacgtagttgtagggggagttggggaagagtcgcgtaggcgtcg

SEQ ID NO: 15008 - DNA, 594 bp, Artificial Sequence
  chemically treated genomic DNA (Homo sapiens) CpG-island No: 15008
cgacgcctacgcgactcttccccaactccccctacaactacgtcacctcccacgacctcctccgacgcctacgcgactcttccccaactccccctacaactacgtcacctcccacgacctcctccgacgcctacgcgactcttccccaactccccctacaactacgtcacctcccacgacctcctccgacgcctacgcgactcttccccaactccccctacaactacgtcacctcccacgacctcctccgacgcctacgcgactcttccccaactccccctacaactacgtcacctaccccgacctcctccgacgcctacgcgactcttccccaactccccctacaactatatcacctcccacgacctccgacgcctacgcgaccgcgactccgccgttcaaccgcatacgcgacaacgctaaaacccgaaaaacgaaaatctaccgccgctcaacccgaaacccgctcaaaaacctcgttctaccgactcgaacgacaaccgccgttttaaatcctacattcatttcctcccaaactctaacttatcccgtcgttaatatcatctaaaaactacccaatcccgatctcactca

SEQ ID NO: 15009 - DNA, 937 bp, Artificial Sequence
  chemically treated genomic DNA (Homo sapiens) CpG-island No: 15009
cgatggtgacggtgttagggatggtggtaggtgacgatggtgacggtgttagggatggtggtaggtgacgatggtgacggtgttagggatggtggtaggtgacgatggtgacggtgttagggatggtggtaggtgacgatggtgacggtgttagggatggtggtaggtgacgatggtgacggtgttagggatggtggtaggtgacgatggtgacggtgttagggatggtggtaggtgacgatggtgacggtgttagggattggtggtaggtgacgatggtgacggtgttagggatggtggtaggtgacgatggtgacggtgttagggatggtggtaggtgatgatggtgacgttgttagggatggtggtagttgatgatggtgacgttgttagggatggtggtagttgatgatggtgacggtgttagggatggtggcgacggtgttagggatggtggtaggtgatgatggtgacggtgttagggatggtggtaggtgatgatggtgacggtgttagggatggtggtaggtgatgatggtgacggtgttagggatggtggtaggtgatggtgacggtgttagggatggtggtaggtgatgacggtgacggtgttagggatggtggtaggtgatgacggtgacggtgttagggatggtggtaggtgatgacggtgacggtgttagggatggtggtaggtgatgacggtgacggtgttagggatggtggtaggtgatgacggtgacggtgttagggatggtggtaggtgatgacggtgacggtgttagggatggtggtaggtgatgacggtgacggtgttagggatggtggtaggtgatgacggtgatggtgttagggatggtggtaggtgatgacggtgacggtgttagggatggtggtaggtgatgatggtgatggtgttagggatggttgtaggtaa

SEQ ID NO: 15010 - DNA, 937 bp, Artificial Sequence
  chemically treated genomic DNA (Homo sapiens) CpG-island No: 15010
ttacctacaaccatccctaacaccatcaccatcatcacctaccaccatccctaacaccgtcaccgtcatcacctaccaccatccctaacaccatcaccgtcatcacctaccaccatccctaacaccgtcaccgtcatcacctaccaccatccctaacaccgtcaccgtcatcacctaccaccatccctaacaccgtcaccgtcatcacctaccaccatccctaacaccgtcaccgtcatcacctaccaccatccctaacaccgtcaccgtcatcacctaccaccatccctaacaccgtcaccgtcatcacctaccaccatccctaacaccgtcaccgtcatcacctaccaccatccctaacaccgtcaccatcacctaccaccatccctaacaccgtcaccatcatcacctaccaccatccctaacaccgtcaccatcatcacctaccaccatccctaacaccgtcaccatcatcacctaccaccatccctaacaccgtcgccaccatccctaacaccgtcaccatcatcaactaccaccatccctaacaacgtcaccatcatcaactaccaccatccctaacaacgtcaccatcatcacctaccaccatccctaacaccgtcaccatcgtcacctaccaccatccctaacaccgtcaccatcgtcacctaccaccaatccctaacaccgtcaccatcgtcacctaccaccatccctaacaccgtcaccatcgtcacctaccaccatccctaacaccgtcaccatcgtcacctaccaccatccctaacaccgtcaccatcgtcacctaccaccatccctaacaccgtcaccatcgtcacctaccaccatccctaacaccgtcaccatcgtcacctaccaccatccctaacaccgtcaccatcgtcacctaccaccatccctaacaccgtcaccatcg

SEQ ID NO: 15011 - DNA, 937 bp, Artificial Sequence
  chemically treated genomic DNA (Homo sapiens) CpG-island No: 15011
ttatttataattatttttaatattattattattattatttattattatttttaatatcgttatcgttattatttattattatttttaatattattatcgttattatttattattatttttaatatcgttatcgttattatttattattatttttaatatcgttatcgttattatttattattatttttaatatcgttatcgttattatttattattatttttaatatcgttatcgttattatttgttattatttttaatatcgttatcgttattatttgttattatttttaatatcgttatcgttattatttgttattatttttaatatcgttatcgttattatttgttattatttttaatatcgttattattatttgttattatttttaatatcgttattattattatttgttattatttttaatatcgttattattattatttgttattatttttaatatcgttattattattatttgttattatttttaatatcgtcgttattatttttaatatcgttattattattagttgttattatttttaataacgttattattattaattgttattatttttaataacgttattattattatttgttattatttttaatatcgttattatcgttatttgttattatttttaatatcgttattatcgttatttgttattaatttttaatatcgttattatcgttatttgttattatttttaatatcgttattatcgttatttgttattatttttaatatcgttattatcgttatttgttattatttttaatatcgttattatcgttatttgttattatttttaatatcgttattatcgttatttgttattatttttaatatcgttattatcgttatttgttattatttttaatatcgttattatcgttatttgttattatttttaatatcgttattatcg

SEQ ID NO: 15012 - DNA, 937 bp, Artificial Sequence
  chemically treated genomic DNA (Homo sapiens) CpG-island No: 15012
cgataataacgatattaaaaataataacaaataacgataataacgatattaaaaataataacaaataacgataataacgatattaaaaataataacaaataacgataataacgatattaaaaataataacaaataacgataataacgatattaaaaataataacaaataacgataataacgatattaaaaataataacaaataacgataataacgatattaaaaataataacaaataacgataataacgatattaaaaattaataacaaataacgataataacgatattaaaaataataacaaataacgataataacgatattaaaaataataacaaataataataataacgttattaaaaataataacaattaataataataacgttattaaaaataataacaactaataataataacgatattaaaaataataacgacgatattaaaaataataacaaataataataataacgatattaaaaataataacaaataataataataacgatattaaaaataataacaaataataataataacgatattaaaaataataacaaataataataacgatattaaaaataataacaaataataacgataacgatattaaaaataataacaaataataacgataacgatattaaaaataataacaaataataacgataacgatattaaaaataataacaaataataacgataacgatattaaaaataataataaataataacgataacgatattaaaaataataataaataataacgataacgatattaaaaataataataaataataacgataacgatattaaaaataataataaataataacgataataatattaaaaataataataaataataacgataacgatattaaaaataataataaataataataataataatattaaaaataattataaataa

SEQ ID NO: 15013 - DNA, 556 bp, Artificial Sequence
  chemically treated genomic DNA (Homo sapiens) CpG-island No: 15013
  unsure (273)
gtcgcgtcggtttttcgtcgggttggttaggttaaaggggttggaggcgagggtataggttacgggttggcggggcgggtaagggggggtatttattttagtcgaggatcgtgtgataggaagcggtgataatgagttatagggtagcggggcgaagcgtttttttttttttcgtatatgttcgtgggatggttttcgaagcgagcgtggtggtttattttagttattttagcggttatataatttcgttcgcgcgggggaggggcgtttcgnatttcgttcgcggtttttatgtaattagtgtttttttgatttaattttatgtcggatttattttatagggagtcgcgcgttcggaaggggtaatattcggcggcgcgagcggcggacgtaggcgtcgatcggatattttttgttggttatagtttagaggatcgggcgtaagtgcgaggagcgcgcgaagttttttttttcgttgggaaggtgcgagtaggtgtaagaggagattaggagtgtagcgggaggagagttagaggaatagagatagtgatatcga

SEQ ID NO: 15014 - DNA, 556 bp, Artificial Sequence
  chemically treated genomic DNA (Homo sapiens) CpG-island No: 15014
  unsure (284)
tcgatatcactatctctattcctctaactctcctcccgctacactcctaatctcctcttacacctactcgcaccttcccaacgaaaaaaaaaacttcgcgcgctcctcgcacttacgcccgatcctctaaactataaccaacaaaaaatatccgatcgacgcctacgtccgccgctcgcgccgccgaatattaccccttccgaacgcgcgactccctataaaataaatccgacataaaattaaatcaaaaaaacactaattacataaaaaccgcgaacgaaatncgaaacgcccctcccccgcgcgaacgaaattatataaccgctaaaataactaaaataaaccaccacgctcgcttcgaaaaccatcccacgaacatatacgaaaaaaaaaaaaacgcttcgccccgctaccctataactcattatcaccgcttcctatcacacgatcctcgactaaaataaatacccccccttacccgccccgccaacccgtaacctataccctcgcctccaacccctttaacctaaccaacccgacgaaaaaccgacgcgac

SEQ ID NO: 15015 - DNA, 556 bp, Artificial Sequence
  chemically treated genomic DNA (Homo sapiens) CpG-island No: 15015
  unsure (284)
tcggtgttattgtttttgtttttttgatttttttttcgttgtatttttggtttttttttatatttgttcgtatttttttagcgaggagaggaatttcgcgcgtttttcgtatttgcgttcggttttttgggttgtagttagtaggagatgttcggtcggcgtttgcgttcgtcgttcgcgtcgtcgggtgttgtttttttcgggcgcgcggttttttgtggggtgggttcggtatggaattaggttaggagagtattggttgtataagggtcgcgagcgagatncggggcgtttttttttcgcgcgagcgggattgtgtaatcgttgaggtaattgaagtgggttattacgttcgtttcggaaattattttacgagtatgtgcggggggagggggagcgtttcgtttcgttgttttgtgatttattgttatcgttttttattatacgattttcggttgaaatagatgtttttttttgttcgtttcgttaattcgtagtttgtgttttcgtttttaatttttttaatttggttagttcggcgggaggtcggcgcggt

SEQ ID NO: 15016 - DNA, 556 bp, Artificial Sequence
  chemically treated genomic DNA (Homo sapiens) CpG-island No: 15016
  unsure (273)
accgcgccgacctcccgccgaactaaccaaattaaaaaaattaaaaacgaaaacacaaactacgaattaacgaaacgaacaaaaaaaaacatctatttcaaccgaaaatcgtataataaaaaacgataacaataaatcacaaaacaacgaaacgaaacgctccccctccccccgcacatactcgtaaaataatttccgaaacgaacgtaataacccacttcaattacctcaacgattacacaatcccgctcgcgcgaaaaaaaaacgccccgnatctcgctcgcgacccttatacaaccaatactctcctaacctaattccataccgaacccaccccacaaaaaaccgcgcgcccgaaaaaaacaacacccgacgacgcgaacgacgaacgcaaacgccgaccgaacatctcctactaactacaacccaaaaaaccgaacgcaaatacgaaaaacgcgcgaaattcctctcctcgctaaaaaaatacgaacaaatataaaaaaaaaccaaaaatacaacgaaaaaaaaatcaaaaaaacaaaaacaataacaccga

SEQ ID NO: 15017 - DNA, 588 bp, Artificial Sequence
  chemically treated genomic DNA (Homo sapiens) CpG-island No: 15017
ttcgtcgttcgggtcgaggttcgtttcggagttttatataggcggttcgataagaacgtcgtagtgtcggcgcggaaagtggggtagcggttgtttttcgttcggtcgtgcgagcggcggtcgttatcgcgggtcgcggcgggaaggagaagaggggtcgcgttaggcgttattttatttgagaaattagcgggagtagcgtttgttttatcgagcgagttttgatttttagtttcgagtcgagggcgaagttcgaagagtcggagtcgtagattgtttcggcgtcgttaacgtcggcgggttcgggagaggcggttatggttttcggtttatttcgtagtcgggatttcgcgtcgcggcgagtttgtcgttagttagtttattcgttcgaggcggcggcgataggatattcgcgttaatcgagatttcgtttttaggggttcgtttttttagggtttcgtcgttaattttgcgttttcgacgttcgttatcgtatgttttcgtttattttcggtttttgtttcgttcgcgtagtttagtttggtgtgggttttttgtaattttattttttaagtcgggtttcgtttt

SEQ ID NO: 15018 - DNA, 588 bp, Artificial Sequence
  chemically treated genomic DNA (Homo sapiens) CpG-island No: 15018
aaaacgaaacccgacttaaaaaataaaattacaaaaaacccacaccaaactaaactacgcgaacgaaacaaaaaccgaaaataaacgaaaacatacgataacgaacgtcgaaaacgcaaaattaacgacgaaaccctaaaaaaacgaacccctaaaaacgaaatctcgattaacgcgaatatcctatcgccgccgcctcgaacgaataaactaactaacgacaaactcgccgcgacgcgaaatcccgactacgaaataaaccgaaaaccataaccgcctctcccgaacccgccgacgttaacgacgccgaaacaatctacgactccgactcttcgaacttcgccctcgactcgaaactaaaaatcaaaactcgctcgataaaacaaacgctactcccgctaatttctcaaataaaataacgcctaacgcgacccctcttctccttcccgccgcgacccgcgataacgaccgccgctcgcacgaccgaacgaaaaacaaccgctaccccactttccgcgccgacactacgacgttcttatcgaaccgcctatataaaactccgaaacgaacctcgacccgaacgacgaa

SEQ ID NO: 15019 - DNA, 588 bp, Artificial Sequence
  chemically treated genomic DNA (Homo sapiens) CpG-island No: 15019
ggggcgggattcggtttagggggtggggttgtagggagtttatattaggttggattgcgcgggcggggtagaggtcgggggtgggcggggatatacggtgacgggcgtcggggacgtagggttggcggcggagttttgggggggcgggtttttgggggcggggtttcggttggcgcgagtgttttgtcgtcgtcgtttcgggcgggtgggttgattggcggtaggttcgtcgcggcgcggagtttcggttgcgggatagatcgagggttatggtcgtttttttcggattcgtcggcgttggcggcgtcggagtagtttacggtttcggtttttcgggtttcgttttcgattcgggattggagattaaaattcgttcggtggagtagacgttattttcgttggttttttaggtaaagtggcgtttggcgcggttttttttttttttttcgtcgcggttcgcgatggcggtcgtcgttcgtacgatcggacgggaggtagtcgttgttttatttttcgcgtcggtattgcggcgtttttgtcggatcgtttgtgtggggtttcgggacgggtttcggttcgggcggcgag

SEQ ID NO: 15020 - DNA, 588 bp, Artificial Sequence
  chemically treated genomic DNA (Homo sapiens) CpG-island No: 15020
ctcgccgcccgaaccgaaacccgtcccgaaaccccacacaaacgatccgacaaaaacgccgcaataccgacgcgaaaaataaaacaacgactacctcccgtccgatcgtacgaacgacgaccgccatcgcgaaccgcgacgaaaaaaaaaaaaaaaaccgcgccaaacgccactttacctaaaaaaccaacgaaaataacgtctactccaccgaacgaattttaatctccaatcccgaatcgaaaacgaaacccgaaaaaccgaaaccgtaaactactccgacgccgccaacgccgacgaatccgaaaaaaacgaccataaccctcgatctatcccgcaaccgaaactccgcgccgcgacgaacctaccgccaatcaacccacccgcccgaaacgacgacgacaaaacactcgcgccaaccgaaaccccgcccccaaaaacccgcccccccaaaactccgccgccaaccctacgtccccgacgcccgtcaccgtatatccccgcccacccccgacctctaccccgcccgcgcaatccaacctaatataaactccctacaaccccaccccctaaaccgaatcccgcccc

SEQ ID NO: 15021 - DNA, 1135 bp, Artificial Sequence
  chemically treated genomic DNA (Homo sapiens) CpG-island No: 15021
ttcgttttttgtttttttcggggcggcggcggatgggcgcggaggcggatgggcgcggtttttttttttatttaggtttttttacggggcggggggtcgggttttttagtttttattcgcgtcgtgtttagtttttcgcgtgttcgcggcggagttttgagcgtattgggttcgagttttgcgcgtttttttattatttttttcgtatttgtttttttttttcggtttcgtttagcgcgttagtagttcgatttttagtgttgggagaagagagggggcgtaggcggcgatataaagggtggagcggcgggatcgggattcgggaggttgcgcggtatggacgtcgagtattttgtttttgagttttcgttttgtagcgagtttaagtatttgtgtcggcggttgcgggaagcgtatcgcgagtttaaggaggattttacgttttttaaggatgatcgttattataggtgggcgcggcgcgggtagcggcgggggcggtcggaggttttcgggtcgtagtttttttcgggatttcggcgcgtttcggttttggtttggtttcgtcgacggtcgttttcgtcggtcgggcgcggagtttacggatggggacggggtcggggcggggatttgggagggattaggaaggggacggggagtagggatattggtagcggcgggtaggtttttggatttagggtagttcggcgttttcgggcgaagggtcgattttcgtttagttgaaatttaagtcgaggttttcgttttttcggaaaggagttgcgggttgtggtttttttttgcgtttcgcgtcgtttttttttcgcgttcgtttcgtcgttttcgttcgggttttacgcggcgtagtttggggaggcgatcgcgcgcgttgcggcgtcgggaggagggttttggtcgtagttttgagcgttttaggttttgtaggacgtttcggaggcgggggcgtcgttaagggttgggggcggatgggcgcggcggggaagacgcggcggggcgttatgcggggatacggcgtttgggagcggttgtgtggaatttgtttgcgtttatttttgtttttttttttagcggtttaggggagagcggtggggattgtagattttggcgtcggttttcg

SEQ ID NO: 15022 - DNA, 1135 bp, Artificial Sequence
  chemically treated genomic DNA (Homo sapiens) CpG-island No: 15022
cgaaaaccgacgccaaaatctacaatccccaccgctctcccctaaaccgctaaaaaaaaaaacaaaaataaacgcaaacaaattccacacaaccgctcccaaacgccgtatccccgcataacgccccgccgcgtcttccccgccgcgcccatccgcccccaacccttaacgacgcccccgcctccgaaacgtcctacaaaacctaaaacgctcaaaactacgaccaaaaccctcctcccgacgccgcaacgcgcgcgatcgcctccccaaactacgccgcgtaaaacccgaacgaaaacgacgaaacgaacgcgaaaaaaaaacgacgcgaaacgcaaaaaaaaaccacaacccgcaactcctttccgaaaaaacgaaaacctcgacttaaatttcaactaaacgaaaatcgacccttcgcccgaaaacgccgaactaccctaaatccaaaaacctacccgccgctaccaatatccctactccccgtccccttcctaatccctcccaaatccccgccccgaccccgtccccatccgtaaactccgcgcccgaccgacgaaaacgaccgtcgacgaaaccaaaccaaaaccgaaacgcgccgaaatcccgaaaaaaactacgacccgaaaacctccgaccgcccccgccgctacccgcgccgcgcccacctataataacgatcatccttaaaaaacgtaaaatcctccttaaactcgcgatacgcttcccgcaaccgccgacacaaatacttaaactcgctacaaaacgaaaactcaaaaacaaaatactcgacgtccataccgcgcaacctcccgaatcccgatcccgccgctccaccctttatatcgccgcctacgccccctctcttctcccaacactaaaaatcgaactactaacgcgctaaacgaaaccgaaaaaaaaaaacaaatacgaaaaaaataataaaaaaacgcgcaaaactcgaacccaatacgctcaaaactccgccgcgaacacgcgaaaaactaaacacgacgcgaataaaaactaaaaaacccgaccccccgccccgtaaaaaaacctaaataaaaaaaaaaaccgcgcccatccgcctccgcgcccatccgccgccgccccgaaaaaaacaaaaaacgaa

SEQ ID NO: 15023 - DNA, 1135 bp, Artificial Sequence
  chemically treated genomic DNA (Homo sapiens) CpG-island No: 15023
cgggggtcggcgttagggtttgtagtttttatcgtttttttttaggtcgttgaagagggagatagagatgaacgtaaataagttttatatagtcgtttttaggcgtcgtgttttcgtatggcgtttcgtcgcgtttttttcgtcgcgtttattcgtttttagtttttggcggcgttttcgttttcgaggcgttttgtaaagtttagggcgtttagagttgcggttaagatttttttttcgacgtcgtagcgcgcgcggtcgtttttttagattgcgtcgcgtgaggttcgagcgggggcggcgaggcgggcgcggggggagaacgacgcggggcgtagggaggagttataattcgtagttttttttcggggaggcgggagtttcggtttgggttttagttgaacggaaatcggtttttcgttcgggggcgtcgggttgttttgaatttaggaatttgttcgtcgttgttagtatttttgtttttcgttttttttttggttttttttagattttcgtttcgatttcgtttttattcgtaggtttcgcgttcggtcggcggaggcggtcgtcggcgggattaggttaaggtcggggcgcgtcggggtttcggaggggattgcggttcggaagttttcggtcgttttcgtcgttgttcgcgtcgcgtttatttgtagtagcggttatttttgaagggcgtgaggttttttttgagttcgcggtacgtttttcgtagtcgtcggtataggtgtttgagttcgttgtagagcgggggtttaaaggtagggtattcggcgtttatgtcgcgtagtttttcgggtttcggtttcgtcgttttattttttgtgtcgtcgtttgcgttttttttttttttttagtattggggatcgggttgttggcgcgttgggcgggatcgaggaggaggagtaggtgcgggggaggtggtgagggggcgcgtaggattcggatttagtgcgtttagggtttcgtcgcgagtacgcgaggagttggatacggcgcgggtgggggttgggggattcggtttttcgtttcgtgaagaggtttgagtgggggagggagtcgcgtttattcgttttcgcgtttattcgtcgtcgtttcgggagaggtagaaggcggg

SEQ ID NO: 15024 - DNA, 1135 bp, Artificial Sequence
  chemically treated genomic DNA (Homo sapiens) CpG-island No: 15024
cccgccttctacctctcccgaaacgacgacgaataaacgcgaaaacgaataaacgcgactccctcccccactcaaacctcttcacgaaacgaaaaaccgaatcccccaacccccacccgcgccgtatccaactcctcgcgtactcgcgacgaaaccctaaacgcactaaatccgaatcctacgcgccccctcaccacctcccccgcacctactcctcctcctcgatcccgcccaacgcgccaacaacccgatccccaatactaaaaaaaaaaaaaaaacgcaaacgacgacacaaaaaataaaacgacgaaaccgaaacccgaaaaactacgcgacataaacgccgaataccctacctttaaacccccgctctacaacgaactcaaacacctataccgacgactacgaaaaacgtaccgcgaactcaaaaaaaacctcacgcccttcaaaaataaccgctactacaaataaacgcgacgcgaacaacgacgaaaacgaccgaaaacttccgaaccgcaatcccctccgaaaccccgacgcgccccgaccttaacctaatcccgccgacgaccgcctccgccgaccgaacgcgaaacctacgaataaaaacgaaatcgaaacgaaaatctaaaaaaaaccaaaaaaaaaacgaaaaacaaaaatactaacaacgacgaacaaattcctaaattcaaaacaacccgacgcccccgaacgaaaaaccgatttccgttcaactaaaacccaaaccgaaactcccgcctccccgaaaaaaaactacgaattataactcctccctacgccccgcgtcgttctccccccgcgcccgcctcgccgcccccgctcgaacctcacgcgacgcaatctaaaaaaacgaccgcgcgcgctacgacgtcgaaaaaaaaatcttaaccgcaactctaaacgccctaaactttacaaaacgcctcgaaaacgaaaacgccgccaaaaactaaaaacgaataaacgcgacgaaaaaaacgcgacgaaacgccatacgaaaacacgacgcctaaaaacgactatataaaacttatttacgttcatctctatctccctcttcaacgacctaaaaaaaaacgataaaaactacaaaccctaacgccgacccccg

SEQ ID NO: 15025 - DNA, 823 bp, Artificial Sequence
  chemically treated genomic DNA (Homo sapiens) CpG-island No: 15025
tcgcgcgttcgcggtttcgtttttatcgcgtcgcgttttttttcgtcgtgagagtcgttttcgcgtacgtgatttcggcgtcgcgttttgatgagtttttcgcggtcggtcgttgtttagtcgttgtcgtttcggtttcggttgcggttgtcgttgtcgaggttgttgcgcggcgtttggcgggttcgggacgcgcgggtcggggtcgagggttttgggcgtcgagatggagtcgtgagttttcggtcgagcgggcgggttggttggtttttcggatatttcggtcgaaagttggggatttttggttttcggcgtcgtgtcgtagggtttttggcgtttacgtggaattgggggtagggaaaagggcgttgaagggggtttcgcgggcgggttaggcggaggtgtttgcgcggggcgagagtagatcggggtcggggtttttttttgtttgttcgttcggtcgcggttagagatcgggatgcggtcggggtttcgggacggggttgcgagttatagcgtttatcggggggtcgagagaatcgggggcgttgcggttttttttcggcgtagggtggtcgttcgtacggagtttcgtcgtttttcgggtagttttttttgtcggaaaggtttcgtttcgtcgttttttcggtatcgagagcgtttcgcgttgttttgcggtttcgtttagcgtcgggtgcgaggtttttagaggcgattggtgacgtgggtatcggggagtttgtcgtaatagtttttttggattcggggtgtcgagttatatgagttttatgcgttttacgatttgttgattttgggttttttt

SEQ ID NO: 15026 - DNA, 823 bp, Artificial Sequence
  chemically treated genomic DNA (Homo sapiens) CpG-island No: 15026
aaaaaaacccaaaatcaacaaatcgtaaaacgcataaaactcatataactcgacaccccgaatccaaaaaaactattacgacaaactccccgatacccacgtcaccaatcgcctctaaaaacctcgcacccgacgctaaacgaaaccgcaaaacaacgcgaaacgctctcgataccgaaaaaacgacgaaacgaaacctttccgacaaaaaaaactacccgaaaaacgacgaaactccgtacgaacgaccaccctacgccgaaaaaaaaccgcaacgcccccgattctctcgaccccccgataaacgctataactcgcaaccccgtcccgaaaccccgaccgcatcccgatctctaaccgcgaccgaacgaacaaacaaaaaaaaaccccgaccccgatctactctcgccccgcgcaaacacctccgcctaacccgcccgcgaaacccccttcaacgcccttttccctacccccaattccacgtaaacgccaaaaaccctacgacacgacgccgaaaaccaaaaatccccaactttcgaccgaaatatccgaaaaaccaaccaacccgcccgctcgaccgaaaactcacgactccatctcgacgcccaaaaccctcgaccccgacccgcgcgtcccgaacccgccaaacgccgcgcaacaacctcgacaacgacaaccgcaaccgaaaccgaaacgacaacgactaaacaacgaccgaccgcgaaaaactcatcaaaacgcgacgccgaaatcacgtacgcgaaaacgactctcacgacgaaaaaaaacgcgacgcgataaaaacgaaaccgcgaacgcgcga

SEQ ID NO: 15027 - DNA, 823 bp, Artificial Sequence
  chemically treated genomic DNA (Homo sapiens) CpG-island No: 15027
aaaaaagtttaaagttagtagatcgtaaaacgtataaaatttatataattcgatatttcgagtttaaaggggttgttgcggtaggtttttcggtgtttacgttattaatcgtttttgagagtttcgtattcggcgttgggcgagatcgtagggtagcgcggggcgttttcgatatcgaggggacgacggggcggggttttttcggtaggagaggttgttcgggaggcggcgggatttcgtgcgggcggttattttacgtcggggaagggtcgtagcgttttcggttttttcggtttttcggtgagcgttgtggttcgtagtttcgtttcggaatttcgatcgtatttcggtttttaatcgcggtcgggcgggtaggtaggagggagtttcggtttcggtttattttcgtttcgcgtaaatattttcgtttgattcgttcgcgaagttttttttagcgtttttttttttgtttttagttttacgtgggcgttagggattttgcggtacggcgtcgggagttagggatttttaattttcggtcggagtgttcggagagttagttagttcgttcgttcggtcggggatttacggttttatttcggcgtttagagttttcggtttcggttcgcgcgtttcgagttcgttaggcgtcgcgtagtagtttcggtagcggtagtcgtagtcggagtcggagcgatagcggttgagtagcggtcggtcgcggaaaatttattagagcgcgacgtcgagattacgtgcgcggaagcgatttttacggcggaagagggcgcggcgcggtggaagcggggtcgcgggcgcgcgg

SEQ ID NO: 15028 - DNA, 823 bp, Artificial Sequence
  chemically treated genomic DNA (Homo sapiens) CpG-island No: 15028
ccgcgcgcccgcgaccccgcttccaccgcgccgcgccctcttccgccgtaaaaatcgcttccgcgcacgtaatctcgacgtcgcgctctaataaattttccgcgaccgaccgctactcaaccgctatcgctccgactccgactacgactaccgctaccgaaactactacgcgacgcctaacgaactcgaaacgcgcgaaccgaaaccgaaaactctaaacgccgaaataaaaccgtaaatccccgaccgaacgaacgaactaactaactctccgaacactccgaccgaaaattaaaaatccctaactcccgacgccgtaccgcaaaatccctaacgcccacgtaaaactaaaaacaaaaaaaaaaacgctaaaaaaaacttcgcgaacgaatcaaacgaaaatatttacgcgaaacgaaaataaaccgaaaccgaaactccctcctacctacccgcccgaccgcgattaaaaaccgaaatacgatcgaaattccgaaacgaaactacgaaccacaacgctcaccgaaaaaccgaaaaaaccgaaaacgctacgacccttccccgacgtaaaataaccgcccgcacgaaatcccgccgcctcccgaacaacctctcctaccgaaaaaaccccgccccgtcgtcccctcgatatcgaaaacgccccgcgctaccctacgatctcgcccaacgccgaatacgaaactctcaaaaacgattaataacgtaaacaccgaaaaacctaccgcaacaacccctttaaactcgaaatatcgaattatataaattttatacgttttacgatctactaactttaaactttttt

SEQ ID NO: 15029 - DNA, 681 bp, Artificial Sequence
  chemically treated genomic DNA (Homo sapiens) CpG-island No: 15029
tattatcggttcgtttcgtggttgtgtagtacgatcgagtagtcgaatagcgtgttgtgggggttttggtaaagtagcgcgtttttagtgtttacgttgtaggggcggtcggtcgggatttttaggtatagtaatagtattatcgtttttcggacggcggtttttcgggggtcgggtttcgcgtttcgttttttaagttatgcgttttcggtggggaatatttaatattaaacggttattattttaaagttgtacgggatgcgacgtttggttaacggggaagattttttaaagaattgaggttaagttttttcggttaagcggtttaaagaaaggagagaggaaagaggagggaaattcgtttatcgcgggcgaagttttcggttcggtttggaattcgtatattcgttcggtttaattttcgttttttgtcgtaagtcgggagtttcgggtttcggttttttttcgggtacggtcgttgggtggggtttcgggcgtggtgcggaggcgtagggtcgggtttcgtttttgtttacgcgcggttgtagggggcgttggggaatttcggttgcgtaggattcgcgttttggttcgggttttttagttcgtagagcgcgggatggttttgggtttagtaagagcggatttgatggggtacgggtttttttttttaacggtggt

SEQ ID NO: 15030 - DNA, 681 bp, Artificial Sequence
  chemically treated genomic DNA (Homo sapiens) CpG-island No: 15030
accaccgttaaaaaaaaaaacccgtaccccatcaaatccgctcttactaaacccaaaaccatcccgcgctctacgaactaaaaaacccgaaccaaaacgcgaatcctacgcaaccgaaattccccaacgccccctacaaccgcgcgtaaacaaaaacgaaacccgaccctacgcctccgcaccacgcccgaaaccccacccaacgaccgtacccgaaaaaaaaccgaaacccgaaactcccgacttacgacaaaaaacgaaaattaaaccgaacgaatatacgaattccaaaccgaaccgaaaacttcgcccgcgataaacgaatttccctcctctttcctctctcctttctttaaaccgcttaaccgaaaaaacttaacctcaattctttaaaaaatcttccccgttaaccaaacgtcgcatcccgtacaactttaaaataataaccgtttaatattaaatattccccaccgaaaacgcataacttaaaaaacgaaacgcgaaacccgacccccgaaaaaccgccgtccgaaaaacgataatactattactatacctaaaaatcccgaccgaccgcccctacaacgtaaacactaaaaacgcgctactttaccaaaacccccacaacacgctattcgactactcgatcgtactacacaaccacgaaacgaaccgataata

SEQ ID NO: 15031 - DNA, 681 bp, Artificial Sequence
  chemically treated genomic DNA (Homo sapiens) CpG-island No: 15031
attatcgttaaaaggggaagttcgtgttttattaggttcgtttttgttgagtttagagttatttcgcgttttgcgggttgggaggttcgggttaggacgcgagttttgcgtagtcgaggttttttagcgttttttgtagtcgcgcgtaggtagagacggagttcggttttgcgttttcgtattacgttcgggattttatttagcggtcgtattcggagaagaatcgggattcgaagttttcggtttgcggtagaaaacgggagttgggtcgggcgagtgtgcggattttaagtcgggtcgaaagtttcgttcgcggtgggcggattttttttttttttttttttttttttttttaagtcgtttggtcggaaaagtttggttttaattttttggggggtttttttcgttggttaaacgtcgtatttcgtgtaattttggggtagtggtcgtttagtgttgaatgttttttatcgagagcgtatggtttgggaagcgaggcgcgaagttcggttttcgaagggtcgtcgttcgggagacggtgatgttgttgttgtgtttgggggtttcgatcggtcgtttttataacgtggatattgagagcgcgttgttttattagggtttttataatacgttgttcggttattcggtcgtgttgtatagttacggggcgaatcgatggtg

SEQ ID NO: 15032 - DNA, 681 bp, Artificial Sequence
  chemically treated genomic DNA (Homo sapiens) CpG-island No: 15032
caccatcgattcgccccgtaactatacaacacgaccgaataaccgaacaacgtattataaaaaccctaataaaacaacgcgctctcaatatccacgttataaaaacgaccgatcgaaacccccaaacacaacaacaacatcaccgtctcccgaacgacgacccttcgaaaaccgaacttcgcgcctcgcttcccaaaccatacgctctcgataaaaaacattcaacactaaacgaccactaccccaaaattacacgaaatacgacgtttaaccaacgaaaaaaaccccccaaaaaattaaaaccaaacttttccgaccaaacgacttaaaaaaaaaaaaaaaaaaaaaaaaaaaaaatccgcccaccgcgaacgaaactttcgacccgacttaaaatccgcacactcgcccgacccaactcccgttttctaccgcaaaccgaaaacttcgaatcccgattcttctccgaatacgaccgctaaataaaatcccgaacgtaatacgaaaacgcaaaaccgaactccgtctctacctacgcgcgactacaaaaaacgctaaaaaacctcgactacgcaaaactcgcgtcctaacccgaacctcccaacccgcaaaacgcgaaataactctaaactcaacaaaaacgaacctaataaaacacgaacttccccttttaacgataat

SEQ ID NO: 15033 - DNA, 973 bp, Artificial Sequence
  chemically treated genomic DNA (Homo sapiens) CpG-island No: 15033
gcgggtcggggttgtcgggcgacgttcggtcgtcgtcgtcgtcgtcgttagtgatttatagcgtgagtaggacgattagcgtttcggtgtttagcgtttttacgaagtcggtgaggaggtcgagcgttagcggtttcgtttaatttatggggtttcgttcgtataggggttgcggtaggcgttttacgattagttgtagggcgttttagttcggcgcggggatcgcggcgcgtcgggggcgcggggtcggggtaaagggtacgcgggcggcggcgtcgggtcgcggtaggaagcgttgttcgaatttgcgtagttgtagcgtcgtttgttggtggaggtttttgtttagttttttggttacgttcgggcggtcgttgcgtcgtagggttcgagttaggcggttttaggatagggacgcggtttggggggttagttaggtcgttagcgtttttcggtagtcgtcggatatttttttaggttcggttattttgttcgtcgggttttcggtcgtttttcgtcgtcgtcgtcggttcggagatttcgacgtggtgttgagcggtttaggtcgcgttagtcggtttttagaaagtcgggataattcggtttttacgtcgggttcgggcgtttttaggagcgatcggaaatggtcgtattttttcggggttagtagttcggttagacggacggttgcgtgagggtttatagcgtttacggttttcgtcggagttagcgtttaaatttagagcgttaggattaaggcgttcgttagagttcgcgtcgttatttttggcgggaattagggatcgaggattgtgcggggacggggacgtggacgggtttcgcgtcggtgatgggggaggggtttcgaacgttcgcggattgtgggagggaggaggtttcgaatagtcgggaagtttagtggaggaggggattggggataagggggttgttaatatttagcgacggagacggg

SEQ ID NO: 15034 - DNA, 973 bp, Artificial Sequence
  chemically treated genomic DNA (Homo sapiens) CpG-island No: 15034
cccgtctccgtcgctaaatattaacaacccccttatccccaatcccctcctccactaaacttcccgactattcgaaacctcctccctcccacaatccgcgaacgttcgaaacccctcccccatcaccgacgcgaaacccgtccacgtccccgtccccgcacaatcctcgatccctaattcccgccaaaaataacgacgcgaactctaacgaacgccttaatcctaacgctctaaatttaaacgctaactccgacgaaaaccgtaaacgctataaaccctcacgcaaccgtccgtctaaccgaactactaaccccgaaaaaatacgaccatttccgatcgctcctaaaaacgcccgaacccgacgtaaaaaccgaattatcccgactttctaaaaaccgactaacgcgacctaaaccgctcaacaccacgtcgaaatctccgaaccgacgacgacgacgaaaaacgaccgaaaacccgacgaacaaaataaccgaacctaaaaaaatatccgacgactaccgaaaaacgctaacgacctaactaaccccccaaaccgcgtccctatcctaaaaccgcctaactcgaaccctacgacgcaacgaccgcccgaacgtaaccaaaaaactaaacaaaaacctccaccaacaaacgacgctacaactacgcaaattcgaacaacgcttcctaccgcgacccgacgccgccgcccgcgtaccctttaccccgaccccgcgcccccgacgcgccgcgatccccgcgccgaactaaaacgccctacaactaatcgtaaaacgcctaccgcaacccctatacgaacgaaaccccataaattaaacgaaaccgctaacgctcgacctcctcaccgacttcgtaaaaacgctaaacaccgaaacgctaatcgtcctactcacgctataaatcactaacgacgacgacgacgacgaccgaacgtcgcccgacaaccccgacccgc

SEQ ID NO: 15035 - DNA, 973 bp, Artificial Sequence
  chemically treated genomic DNA (Homo sapiens) CpG-island No: 15035
ttcgttttcgtcgttgggtgttggtagtttttttgtttttagtttttttttttattaggtttttcgattgttcggagtttttttttttttataattcgcgggcgttcggaattttttttttattatcggcgcggagttcgtttacgttttcgttttcgtatagttttcggtttttggttttcgttagggatggcggcgcggattttggcgagcgttttggttttggcgttttgggtttgggcgttggtttcggcgggggtcgtggacgttatgggtttttacgtagtcgttcgtttggtcgagttgttgatttcggaggagtgcggttattttcggtcgtttttggaggcgttcgagttcgacgtggaggtcgagttgtttcggttttttgaagatcggttggcgcggtttgagtcgtttaatattacgtcggggttttcgagtcggcggcggcggcgagaggcggtcgaggattcggcgggtagggtagtcgggtttggagaggtgttcgacggttgtcgggaggcgttggcggtttggttggttttttaggtcgcgtttttgttttgggatcgtttggttcgggttttgcggcgtagcggtcgttcggacgtggttagggagttgggtaagaatttttattagtaggcgacgttgtagttgcgtaagttcgggtagcgttttttgtcgcggttcggcgtcgtcgttcgcgtgttttttgtttcggtttcgcgttttcggcgcgtcgcggttttcgcgtcggattgggacgttttgtagttgatcgtggagcgtttgtcgtagtttttgtacgagcggagttttatgggttgggcggggtcgttggcgttcggtttttttatcggtttcgtgggggcgttgggtatcggggcgttggtcgttttgtttacgttatggattattggcggcggcggcgacggcgatcgggcgtcgttcggtagtttcggttcgt

SEQ ID NO: 15036 - DNA, 973 bp, Artificial Sequence
  chemically treated genomic DNA (Homo sapiens) CpG-island No: 15036
acgaaccgaaactaccgaacgacgcccgatcgccgtcgccgccgccgccaataatccataacgtaaacaaaacgaccaacgccccgatacccaacgcccccacgaaaccgataaaaaaaccgaacgccaacgaccccgcccaacccataaaactccgctcgtacaaaaactacgacaaacgctccacgatcaactacaaaacgtcccaatccgacgcgaaaaccgcgacgcgccgaaaacgcgaaaccgaaacaaaaaacacgcgaacgacgacgccgaaccgcgacaaaaaacgctacccgaacttacgcaactacaacgtcgcctactaataaaaattcttacccaactccctaaccacgtccgaacgaccgctacgccgcaaaacccgaaccaaacgatcccaaaacaaaaacgcgacctaaaaaaccaaccaaaccgccaacgcctcccgacaaccgtcgaacacctctccaaacccgactaccctacccgccgaatcctcgaccgcctctcgccgccgccgccgactcgaaaaccccgacgtaatattaaacgactcaaaccgcgccaaccgatcttcaaaaaaccgaaacaactcgacctccacgtcgaactcgaacgcctccaaaaacgaccgaaaataaccgcactcctccgaaatcaacaactcgaccaaacgaacgactacgtaaaaacccataacgtccacgacccccgccgaaaccaacgcccaaacccaaaacgccaaaaccaaaacgctcgccaaaatccgcgccgccatccctaacgaaaaccaaaaaccgaaaactatacgaaaacgaaaacgtaaacgaactccgcgccgataataaaaaaaaaattccgaacgcccgcgaattataaaaaaaaaaaaactccgaacaatcgaaaaacctaataaaaaaaaaaactaaaaacaaaaaaactaccaacacccaacgacgaaaacgaa

SEQ ID NO: 15037 - DNA, 611 bp, Artificial Sequence
  chemically treated genomic DNA (Homo sapiens) CpG-island No: 15037
agcgttcgttgtatgatttgttcgcgggtcgggttgtcgggtagcgttacgtaaaagcgggatagagaagcgtcggcgggtcgtttcgtttagagtcgcgggtcgcgaggtggtgtttataattagtacgtcgttagttttcgcgtcggagttttcgtttaggtaggttaggagcggtatttgtagcgcgttttttgtcgtcgcgtcgtcgtttcgggcggggagtagcgtttttagttcgttgatgaggagtacggagggtgggcggtagcgcgcggtcgcgaaggcggtttggaggaggcgcgcgttttcggcggcgtcgggcgtagttagggtcgcgtcgcgtaggcgtaatagcgtggcgtttagttgcgtggcgaggtagcggtttagtagcgttttgttcgcgtttcgcggtttaaagagtaggacggttcgcggcgggcgtaggttgttcgggtaggcgggcggtttgagtaggggttatattagttttttttttagcgtcgttttgagcgcgttttggttcgttatattcgtttattgtatcgggggttcgtagtttattattttgttcgttattagttttagggttttagggtttacgtttt

SEQ ID NO: 15038 - DNA, 611 bp, Artificial Sequence
  chemically treated genomic DNA (Homo sapiens) CpG-island No: 15038
aaaacgtaaaccctaaaaccctaaaactaataacgaacaaaataataaactacgaacccccgatacaataaacgaatataacgaaccaaaacgcgctcaaaacgacgctaaaaaaaaaactaatataacccctactcaaaccgcccgcctacccgaacaacctacgcccgccgcgaaccgtcctactctttaaaccgcgaaacgcgaacaaaacgctactaaaccgctacctcgccacgcaactaaacgccacgctattacgcctacgcgacgcgaccctaactacgcccgacgccgccgaaaacgcgcgcctcctccaaaccgccttcgcgaccgcgcgctaccgcccaccctccgtactcctcatcaacgaactaaaaacgctactccccgcccgaaacgacgacgcgacgacaaaaaacgcgctacaaataccgctcctaacctacctaaacgaaaactccgacgcgaaaactaacgacgtactaattataaacaccacctcgcgacccgcgactctaaacgaaacgacccgccgacgcttctctatcccgcttttacgtaacgctacccgacaacccgacccgcgaacaaatcatacaacgaacgct

SEQ ID NO: 15039 - DNA, 611 bp, Artificial Sequence
  chemically treated genomic DNA (Homo sapiens) CpG-island No: 15039
aaggcgtggattttggggttttggagttggtgacgagtaagatggtggattgcgggttttcggtgtagtgggcggatgtggcgggttagggcgcgtttaaggcggcgttggaggaggagttggtgtggtttttgtttaggtcgttcgtttattcgggtagtttgcgttcgtcgcggatcgttttgttttttgggtcgcggggcgcgggtaaagcgttgttgggtcgttgtttcgttacgtagttgggcgttacgttgttgcgtttgcgcggcgcgattttggttgcgttcggcgtcgtcgagggcgcgcgttttttttaggtcgttttcgcggtcgcgcgttgtcgtttatttttcgtattttttattagcgagttagaggcgttgtttttcgttcgggacgacggcgcggcggtagggggcgcgttgtaggtgtcgtttttggtttgtttggacgggggtttcggcgcgggggttgacggcgtgttggttgtgggtattatttcgcggttcgcggttttggacgaggcgattcgtcggcgtttttttgtttcgtttttacgtggcgttgttcgatagttcggttcgcgggtagattatgtagcgggcgtt

SEQ ID NO: 15040 - DNA, 611 bp, Artificial Sequence
  chemically treated genomic DNA (Homo sapiens) CpG-island No: 15040
aacgcccgctacataatctacccgcgaaccgaactatcgaacaacgccacgtaaaaacgaaacaaaaaaacgccgacgaatcgcctcgtccaaaaccgcgaaccgcgaaataatacccacaaccaacacgccgtcaacccccgcgccgaaacccccgtccaaacaaaccaaaaacgacacctacaacgcgccccctaccgccgcgccgtcgtcccgaacgaaaaacaacgcctctaactcgctaataaaaaatacgaaaaataaacgacaacgcgcgaccgcgaaaacgacctaaaaaaaacgcgcgccctcgacgacgccgaacgcaaccaaaatcgcgccgcgcaaacgcaacaacgtaacgcccaactacgtaacgaaacaacgacccaacaacgctttacccgcgccccgcgacccaaaaaacaaaacgatccgcgacgaacgcaaactacccgaataaacgaacgacctaaacaaaaaccacaccaactcctcctccaacgccgccttaaacgcgccctaacccgccacatccgcccactacaccgaaaacccgcaatccaccatcttactcgtcaccaactccaaaaccccaaaatccacgcctt

SEQ ID NO: 15041 - DNA, 756 bp, Artificial Sequence
  chemically treated genomic DNA (Homo sapiens) CpG-island No: 15041
gacggtacggcgaattttttacgaggagtcggggttcgtttcgggaattttttaaagggttttagttgcgggtcgtagacgggggagtttaggattttgagggggacgtcgttatcgtatttgttcgacgtttttttcgcggtttttggcggtttggttcggaattcgttgtttcgatattcgtcgttgttcgcggcggggtaggaggtttcgttagttacgggggttttggcgggttcgtacgcgtatttgcggtagcggttttcgggtttttcgtcggcggttttgcgttttagcgatagttcggattcggtattcggcgcggtcgtggggaagttataggcggtgggcggtgtcggcgcgggtaggggcgtgggcgcgggtaggttcggggttaggtagggggtcgggggtgggtttgggggcggcgggagcgcgttatagtcgggttgcgttgcgtagttttttgcgggatagttgtatagcggcgttgagggttcgtatttcggaggcggtgggggttgtaggagcgcggtcgggggcggcgggggtagcgcggcgttcgtttgcgcgtagtaattcggcgttaggtatttttcgtcgtagtcggtcgcgtattcgggcgtcgtcgatgggttttcgtacgtattgtcggcgtagaggggtttagggaggttttcggttaaaattggggagttttttagggtttcggaatcgtcgttatcgttcgatttggtttttgggaggttttcgtgg

SEQ ID NO: 15042 - DNA, 756 bp, Artificial Sequence
  chemically treated genomic DNA (Homo sapiens) CpG-island No: 15042
ccacgaaaacctcccaaaaaccaaatcgaacgataacgacgattccgaaaccctaaaaaactccccaattttaaccgaaaacctccctaaacccctctacgccgacaatacgtacgaaaacccatcgacgacgcccgaatacgcgaccgactacgacgaaaaatacctaacgccgaattactacgcgcaaacgaacgccgcgctacccccgccgcccccgaccgcgctcctacaacccccaccgcctccgaaatacgaaccctcaacgccgctatacaactatcccgcaaaaaactacgcaacgcaacccgactataacgcgctcccgccgcccccaaacccacccccgaccccctacctaaccccgaacctacccgcgcccacgcccctacccgcgccgacaccgcccaccgcctataacttccccacgaccgcgccgaataccgaatccgaactatcgctaaaacgcaaaaccgccgacgaaaaacccgaaaaccgctaccgcaaatacgcgtacgaacccgccaaaacccccgtaactaacgaaacctcctaccccgccgcgaacaacgacgaatatcgaaacaacgaattccgaaccaaaccgccaaaaaccgcgaaaaaaacgtcgaacaaatacgataacgacgtccccctcaaaatcctaaactcccccgtctacgacccgcaactaaaaccctttaaaaaattcccgaaacgaaccccgactcctcgtaaaaaattcgccgtaccgtc

SEQ ID NO: 15043 - DNA, 756 bp, Artificial Sequence
  chemically treated genomic DNA (Homo sapiens) CpG-island No: 15043
ttacgaaggttttttaggaattaaatcgggcggtggcggcggtttcggggttttggggggttttttagttttagtcgggaatttttttgaatttttttacgtcggtaatgcgtgcgggggtttatcggcggcgttcgagtacgcggtcggttacggcggggggtatttggcgtcgggttattgcgcgtagacgggcgtcgcgttgttttcgtcgttttcggtcgcgtttttgtagtttttatcgttttcggggtacgggtttttagcgtcgttgtataattatttcgtagggggttacgtagcgtagttcggttatggcgcgttttcgtcgtttttaggtttattttcggttttttatttgatttcgggtttgttcgcgtttacgtttttgttcgcgtcggtatcgtttatcgtttatggtttttttacggtcgcgtcgggtgtcgaattcgggttgtcgttgaagcgtaaggtcgtcgacgaggggttcgagggtcgttatcgtaagtacgcgtacgagttcgttaaggttttcgtggttgacggagttttttatttcgtcgcggataacggcgaatgtcggggtaacgggtttcgggttaagtcgttaggagtcgcggaggaggcgtcgggtaagtacggtggcggcgttttttttaaggttttgggttttttcgtttacggttcgtaattggagttttttgaaaagttttcggagcgggtttcggtttttcgtggggggttcgtcgtgtcgtt

SEQ ID NO: 15044 - DNA, 756 bp, Artificial Sequence
  chemically treated genomic DNA (Homo sapiens) CpG-island No: 15044
aacgacacgacgaaccccccacgaaaaaccgaaacccgctccgaaaacttttcaaaaaactccaattacgaaccgtaaacgaaaaaacccaaaaccttaaaaaaaacgccgccaccgtacttacccgacgcctcctccgcgactcctaacgacttaacccgaaacccgttaccccgacattcgccgttatccgcgacgaaataaaaaactccgtcaaccacgaaaaccttaacgaactcgtacgcgtacttacgataacgaccctcgaacccctcgtcgacgaccttacgcttcaacgacaacccgaattcgacacccgacgcgaccgtaaaaaaaccataaacgataaacgataccgacgcgaacaaaaacgtaaacgcgaacaaacccgaaatcaaataaaaaaccgaaaataaacctaaaaacgacgaaaacgcgccataaccgaactacgctacgtaaccccctacgaaataattatacaacgacgctaaaaacccgtaccccgaaaacgataaaaactacaaaaacgcgaccgaaaacgacgaaaacaacgcgacgcccgtctacgcgcaataacccgacgccaaataccccccgccgtaaccgaccgcgtactcgaacgccgccgataaacccccgcacgcattaccgacgtaaaaaaattcaaaaaaattcccgactaaaactaaaaaaccccccaaaaccccgaaaccgccgccaccgcccgatttaattcctaaaaaaccttcgtaa

SEQ ID NO: 15045 - DNA, 648 bp, Artificial Sequence
  chemically treated genomic DNA (Homo sapiens) CpG-island No: 15045
cgtttcgaggatttttgaattgatttaagtagggtgaagataattcggagggaggggtttaagagggagtcgttattttttttttttttgttttaggaaagcgcgcgagagggaggggtcggaataacgaacgttggttatttaacggttcggtttagttagttaggtttttaaagtttatatcgcgcgggtcgtcgaggtggtagtatagttataatcgttttaagggttaaggagtacgttaggagtattcgaggtgatgggaaacggggggtggggattgtgttgagcgacgtcgttatgttagcgtttttttttttcgtatttttatagtttttagttttgttgatttttgtttatcgttatttatttttttaggttattagtttatgattttttcggttattcgcgagttttgagtatagtcgtgtttataaagtatttttggaggaaaaggttgaacggtattttaaaggttacgggtttttataggttttcgttttttttcgcgagatcggattgataattttcgttcgttcgtttcgttttcggtatttttattttttttttggcgttttttttttttatttatacgtttttttttgttttttttttgagggagcgttttcgagttaggtgatttcgtta

SEQ ID NO: 15046 - DNA, 648 bp, Artificial Sequence
  chemically treated genomic DNA (Homo sapiens) CpG-island No: 15046
taacgaaatcacctaactcgaaaacgctccctcaaaaaaaaaacaaaaaaaaacgtataaataaaaaaaaaaaacgccaaaaaaaaaataaaaataccgaaaacgaaacgaacgaacgaaaattatcaatccgatctcgcgaaaaaaaacgaaaacctataaaaacccgtaacctttaaaataccgttcaaccttttcctccaaaaatactttataaacacgactatactcaaaactcgcgaataaccgaaaaaatcataaactaataacctaaaaaaataaataacgataaacaaaaatcaacaaaactaaaaactataaaaatacgaaaaaaaaaaacgctaacataacgacgtcgctcaacacaatccccaccccccgtttcccatcacctcgaatactcctaacgtactccttaacccttaaaacgattataactatactaccacctcgacgacccgcgcgatataaactttaaaaacctaactaactaaaccgaaccgttaaataaccaacgttcgttattccgacccctccctctcgcgcgctttcctaaaacaaaaaaaaaaaaaataacgactccctcttaaacccctccctccgaattatcttcaccctacttaaatcaattcaaaaatcctcgaaacg

SEQ ID NO: 15047 - DNA, 648 bp, Artificial Sequence
  chemically treated genomic DNA (Homo sapiens) CpG-island No: 15047
tgacggaattatttgattcggaggcgtttttttagaaggaaggtaagaaggggcgtgtgggtgaaggggaggggcgttagaaggaaggtggggatgtcgggagcggggcgagcgggcgggggttgttagttcgatttcgcgagagaggacggaagtttgtgggagttcgtggtttttaaagtgtcgtttagtttttttttttaggggtgttttgtaaatacggttgtgtttagggttcgcgggtgatcgaaaggattatgaattagtgatttggaaaggtgagtaacgatgggtagaggttagtagggttggagattgtagggatacggagaaagaaggcgttaatatggcgacgtcgtttagtatagtttttatttttcgttttttattatttcgggtgtttttgacgtgttttttagtttttggggcgattgtggttgtgttgttatttcggcggttcgcgcggtgtgggttttgggaatttgattggttgggtcggatcgttaggtaattagcgttcgttgtttcggtttttttttttcgcgcgtttttttaaggtagaggaaaaaggaataacggtttttttttagattttttttttcgaattatttttattttatttgggttagtttagaggttttcggggcg

SEQ ID NO: 15048 - DNA, 648 bp, Artificial Sequence
  chemically treated genomic DNA (Homo sapiens) CpG-island No: 15048
cgccccgaaaacctctaaactaacccaaataaaataaaaataattcgaaaaaaaaaatctaaaaaaaaaccgttattcctttttcctctaccttaaaaaaacgcgcgaaaaaaaaaaaccgaaacaacgaacgctaattacctaacgatccgacccaaccaatcaaattcccaaaacccacaccgcgcgaaccgccgaaataacaacacaaccacaatcgccccaaaaactaaaaaacacgtcaaaaacacccgaaataataaaaaacgaaaaataaaaactatactaaacgacgtcgccatattaacgccttctttctccgtatccctacaatctccaaccctactaacctctacccatcgttactcacctttccaaatcactaattcataatcctttcgatcacccgcgaaccctaaacacaaccgtatttacaaaacacccctaaaaaaaaaaactaaacgacactttaaaaaccacgaactcccacaaacttccgtcctctctcgcgaaatcgaactaacaacccccgcccgctcgccccgctcccgacatccccaccttccttctaacgcccctccccttcacccacacgccccttcttaccttccttctaaaaaaacgcctccgaatcaaataattccgtca

SEQ ID NO: 15049 - DNA, 776 bp, Artificial Sequence
  chemically treated genomic DNA (Homo sapiens) CpG-island No: 15049
aagtttttcgggtttgttcgattcggttttttttcgtttttgtatcggttgcggtattattttttgaagttacgtttcggcgagcggggttcgcggagcgagggggtcgttgtgtcgttatttattcgagtcgttcgggttggtcgcgagcggggattcgtaagggttggcgggttttggttttcgaggacgtagatatgtggtttgaattttcgtttttttagtcgttgtttttgtgtatttttttgggcgtttttagcgaatgcgagcggcgaggcgagggcgagcgcgtcgaggaagggcggtagaggcgcggagtttggtcgcgtcgcgttgcgtcgagcgtcgggtttttttcgcgagtttttcgggttcgcgcgcgcgttttttattgttttcgtttttcgcgcggcgcgtgttttttatttttcgtcgcgcgttttcgtattcgttcggttttacgcggcgcgcgtttgttttggcggtagcggcggcggcggcggcggcgcgttttttttcgaacgtcgtttttagggttgttggttgcgttttttattgtttcgcggttgttgttcggggtgggcggttaggcgggggggaggtgtcggtttggtcgtcggggagggtttatcgttcgggcggatttttattgcgagagcgatgcggttttaagcgcggagcgcggtggttggagggcgtttagaattgtgggtttgtcgggtcgcggaggttttttttttggttttttaaggtaatttggtttgttggttgggcgg

SEQ ID NO: 15050 - DNA, 776 bp, Artificial Sequence
  chemically treated genomic DNA (Homo sapiens) CpG-island No: 15050
ccgcccaaccaacaaaccaaattaccttaaaaaaccaaaaaaaaaacctccgcgacccgacaaacccacaattctaaacgccctccaaccaccgcgctccgcgcttaaaaccgcatcgctctcgcaataaaaatccgcccgaacgataaaccctccccgacgaccaaaccgacacctcccccccgcctaaccgcccaccccgaacaacaaccgcgaaacaataaaaaacgcaaccaacaaccctaaaaacgacgttcgaaaaaaaacgcgccgccgccgccgccgccgctaccgccaaaacaaacgcgcgccgcgtaaaaccgaacgaatacgaaaacgcgcgacgaaaaataaaaaacacgcgccgcgcgaaaaacgaaaacaataaaaaacgcgcgcgcgaacccgaaaaactcgcgaaaaaaacccgacgctcgacgcaacgcgacgcgaccaaactccgcgcctctaccgcccttcctcgacgcgctcgccctcgcctcgccgctcgcattcgctaaaaacgcccaaaaaaatacacaaaaacaacgactaaaaaaacgaaaattcaaaccacatatctacgtcctcgaaaaccaaaacccgccaacccttacgaatccccgctcgcgaccaacccgaacgactcgaataaataacgacacaacgaccccctcgctccgcgaaccccgctcgccgaaacgtaacttcaaaaaataataccgcaaccgatacaaaaacgaaaaaaaaccgaatcgaacaaacccgaaaaactt

SEQ ID NO: 15051 - DNA, 776 bp, Artificial Sequence
  chemically treated genomic DNA (Homo sapiens) CpG-island No: 15051
tcgtttagttaataaattaagttgttttgggaagttagaaggaaggttttcgcggttcggtaaatttatagttttaggcgttttttagttatcgcgtttcgcgtttgggatcgtatcgttttcgtagtgagggttcgttcgagcggtaagtttttttcggcggttaagtcgatatttttttttcgtttggtcgtttatttcgggtagtagtcgcggaataatggagagcgtagttagtagttttggagacggcgttcgggggaggacgcgtcgtcgtcgtcgtcgtcgttgtcgttagggtaggcgcgcgtcgcgtggagtcgggcgggtgcgagggcgcgcggcggggggtggggggtacgcgtcgcgcggggggcgggggtagtggggggcgcgcgcgcgggttcggggagttcgcggggagagttcggcgttcggcgtagcgcggcgcggttaagtttcgcgtttttatcgttttttttcggcgcgttcgttttcgtttcgtcgttcgtattcgttgggggcgtttagaaagatgtatagaggtaacggttaggggagcggaggtttaagttatatgtttgcgttttcgggggttagagttcgttagtttttgcggattttcgttcgcggttagttcgagcggttcgggtgagtagcggtatagcggttttttcgtttcgcgggtttcgttcgtcgagacgtggttttaagaagtggtgtcgtaatcggtgtaaaagcggaggaaagtcgaatcgggtaagttcgggaggttt

SEQ ID NO: 15052 - DNA, 776 bp, Artificial Sequence
  chemically treated genomic DNA (Homo sapiens) CpG-island No: 15052
aaacctcccgaacttacccgattcgactttcctccgcttttacaccgattacgacaccacttcttaaaaccacgtctcgacgaacgaaacccgcgaaacgaaaaaaccgctataccgctactcacccgaaccgctcgaactaaccgcgaacgaaaatccgcaaaaactaacgaactctaacccccgaaaacgcaaacatataacttaaacctccgctcccctaaccgttacctctatacatctttctaaacgcccccaacgaatacgaacgacgaaacgaaaacgaacgcgccgaaaaaaaacgataaaaacgcgaaacttaaccgcgccgcgctacgccgaacgccgaactctccccgcgaactccccgaacccgcgcgcgcgccccccactacccccgccccccgcgcgacgcgtaccccccaccccccgccgcgcgccctcgcacccgcccgactccacgcgacgcgcgcctaccctaacgacaacgacgacgacgacgacgacgcgtcctcccccgaacgccgtctccaaaactactaactacgctctccattattccgcgactactacccgaaataaacgaccaaacgaaaaaaaaatatcgacttaaccgccgaaaaaaacttaccgctcgaacgaaccctcactacgaaaacgatacgatcccaaacgcgaaacgcgataactaaaaaacgcctaaaactataaatttaccgaaccgcgaaaaccttccttctaacttcccaaaacaacttaatttattaactaaacga

SEQ ID NO: 15053 - DNA, 720 bp, Artificial Sequence
  chemically treated genomic DNA (Homo sapiens) CpG-island No: 15053
cgcggaggtcgggcgtggggttttcgttcgggttcgtagttattatagtaatttcggttttaatttcgttcggtttttgttaaaggcgtgtttttttttcgggttagtgtttttcgtcggacgttagacgttttttcgcgtagtttcgtcgattttaggtagttcgggttggggtcgcgttttcgtgcgtttcgcgtcggatagacgcggtacgcggagggaaacggcgttagcgaggggttttaggcgttaaaacggaaattttcgcgaaatttcgcgggttagcggagtcgcgggcgggtattcggagcgtcggattcggaagcggcgtacgcggtcgttcggtttcgtttcgttcggttaggtagcgcggcgtcgtcgttaattttatttggtttcgcgcgtcgttgcgggacgggcgggaatgcggttaagggtcgtttcggttttcgcgtttatttcggattttttggttttcgttttttttttattgtttttaaagagcgttaaaaagtcgcgttgcggtttacgttcggagtgcgggtattttttttttgtagggcgttgtttcgtcgcgaaatatattttttgtgtggttcgtttattcgtgtttggtttttcgagagcgtagcgcgggttttatttttagggggtgtggcgtttcgtttttaaatttagtagtttagttttcgttgtatagattttttgttattttattag

SEQ ID NO: 15054 - DNA, 720 bp, Artificial Sequence
  chemically treated genomic DNA (Homo sapiens) CpG-island No: 15054
ctaataaaataacaaaaaatctatacaacgaaaactaaactactaaatttaaaaacgaaacgccacaccccctaaaaataaaacccgcgctacgctctcgaaaaaccaaacacgaataaacgaaccacacaaaaaatatatttcgcgacgaaacaacgccctacaaaaaaaaaatacccgcactccgaacgtaaaccgcaacgcgactttttaacgctctttaaaaacaataaaaaaaaaacgaaaaccaaaaaatccgaaataaacgcgaaaaccgaaacgacccttaaccgcattcccgcccgtcccgcaacgacgcgcgaaaccaaataaaattaacgacgacgccgcgctacctaaccgaacgaaacgaaaccgaacgaccgcgtacgccgcttccgaatccgacgctccgaatacccgcccgcgactccgctaacccgcgaaatttcgcgaaaatttccgttttaacgcctaaaacccctcgctaacgccgtttccctccgcgtaccgcgtctatccgacgcgaaacgcacgaaaacgcgaccccaacccgaactacctaaaatcgacgaaactacgcgaaaaaacgtctaacgtccgacgaaaaacactaacccgaaaaaaaaacacgcctttaacaaaaaccgaacgaaattaaaaccgaaattactataataactacgaacccgaacgaaaaccccacgcccgacctccgcg

SEQ ID NO: 15055 - DNA, 720 bp, Artificial Sequence
  chemically treated genomic DNA (Homo sapiens) CpG-island No: 15055
ttaatgaaatgataaagggtttgtgtagcgggggttgggttgttgggtttgggggcgaggcgttatattttttgagaataaagttcgcgttgcgttttcggagaattaggtacgagtgagcgaattatataaagaatatatttcgcgacgaaatagcgttttataggaagaaagtgttcgtatttcgagcgtgagtcgtagcgcgattttttggcgttttttgggagtagtgagagagaggcggaggttagagagttcggggtgggcgcgggagtcggggcggtttttggtcgtattttcgttcgtttcgtagcggcgcgcggagttaggtgaggttggcggcggcgtcgcgttatttggtcgggcggggcggggtcgggcggtcgcgtgcgtcgttttcgagttcggcgtttcggatgttcgttcgcggtttcgttggttcgcggagtttcgcgggagttttcgttttggcgtttaaagtttttcgttggcgtcgttttttttcgcgtgtcgcgtttgttcggcgcgggacgtacggaggcgcggttttagttcgggttgtttggggtcggcggggttgcgcgaggggacgtttggcgttcggcggagggtattggttcgggaggagggtacgtttttggtaaaggtcgggcggggttgggatcggggttgttatggtagttgcgagttcgggcgggagttttacgttcggttttcgcg

SEQ ID NO: 15056 - DNA, 720 bp, Artificial Sequence
  chemically treated genomic DNA (Homo sapiens) CpG-island No: 15056
cgcgaaaaccgaacgtaaaactcccgcccgaactcgcaactaccataacaaccccgatcccaaccccgcccgacctttaccaaaaacgtaccctcctcccgaaccaataccctccgccgaacgccaaacgtcccctcgcgcaaccccgccgaccccaaacaacccgaactaaaaccgcgcctccgtacgtcccgcgccgaacaaacgcgacacgcgaaaaaaaacgacgccaacgaaaaactttaaacgccaaaacgaaaactcccgcgaaactccgcgaaccaacgaaaccgcgaacgaacatccgaaacgccgaactcgaaaacgacgcacgcgaccgcccgaccccgccccgcccgaccaaataacgcgacgccgccgccaacctcacctaactccgcgcgccgctacgaaacgaacgaaaatacgaccaaaaaccgccccgactcccgcgcccaccccgaactctctaacctccgcctctctctcactactcccaaaaaacgccaaaaaatcgcgctacgactcacgctcgaaatacgaacactttcttcctataaaacgctatttcgtcgcgaaatatattctttatataattcgctcactcgtacctaattctccgaaaacgcaacgcgaactttattctcaaaaaatataacgcctcgcccccaaacccaacaacccaacccccgctacacaaaccctttatcatttcattaa

SEQ ID NO: 15057 - DNA, 853 bp, Artificial Sequence
  chemically treated genomic DNA (Homo sapiens) CpG-island No: 15057
ttttatcggattttagcgatcggcgttttttgcgttaggcgttcggtgtcgtatagtttttcgtcgtgtgtagtcgggtgttggtgttgttgtagcggcgttcgttaggaggtagcgtaggttcggtattggttgcggcgttttataatgtatcgggttttggggtttgtacgatagttttgaatttagttgcggggtcgcgagaaggcgggttcgggagtcggcgagggcggggttttcgaggaaagggtcgggagtcgacgcggaggcggtgggcggggcgttagggggcggggtcgggagtcgtcgagggggcggtgggcggggtattcggggggcggagtcgggagttttttagggggtagtgggtgggatcgggagtcggtcggtcgggtcggggatgcggtgagtcgagggcggggttttagggggcgggatcgtggagagggcggggtcgggtcgttggcgttgtcgtcggttgtagtggtcgtcgttggagatcgcgggatttggcgttgtagcgaggtaggggtttttcgggattttttttttcgggggtgggaagtttttttttcgtcgtgttaacgggagaagcggcgagttgttaaaatttagagacggtttcgtatttttcgttgtagttcgggttttattcgggggatcgattttaaaattttttgtttggtttcgtcgttttgttcgcgggtcggacgtggggcgtttgttttgggcgtttggggcgggcgattgtaagttcgcggtttatgttttttgtttcggagtgtggacgtgaatttcggggtgggttgggttgggtttttatagaggcgggaatttgtgagaattgggagag

SEQ ID NO: 15058 - DNA, 853 bp, Artificial Sequence
  chemically treated genomic DNA (Homo sapiens) CpG-island No: 15058
ctctcccaattctcacaaattcccgcctctataaaaacccaacccaacccaccccgaaattcacgtccacactccgaaacaaaaaacataaaccgcgaacttacaatcgcccgccccaaacgcccaaaacaaacgccccacgtccgacccgcgaacaaaacgacgaaaccaaacaaaaaattttaaaatcgatcccccgaataaaacccgaactacaacgaaaaatacgaaaccgtctctaaattttaacaactcgccgcttctcccgttaacacgacgaaaaaaaaacttcccacccccgaaaaaaaaaatcccgaaaaacccctacctcgctacaacgccaaatcccgcgatctccaacgacgaccactacaaccgacgacaacgccaacgacccgaccccgccctctccacgatcccgccccctaaaaccccgccctcgactcaccgcatccccgacccgaccgaccgactcccgatcccacccactaccccctaaaaaactcccgactccgccccccgaataccccgcccaccgccccctcgacgactcccgaccccgccccctaacgccccgcccaccgcctccgcgtcgactcccgaccctttcctcgaaaaccccgccctcgccgactcccgaacccgccttctcgcgaccccgcaactaaattcaaaactatcgtacaaaccccaaaacccgatacattataaaacgccgcaaccaataccgaacctacgctacctcctaacgaacgccgctacaacaacaccaacacccgactacacacgacgaaaaactatacgacaccgaacgcctaacgcaaaaaacgccgatcgctaaaatccgataaaa

SEQ ID NO: 15059 - DNA, 853 bp, Artificial Sequence
  chemically treated genomic DNA (Homo sapiens) CpG-island No: 15059
tttttttagtttttataaattttcgtttttgtagaaatttagtttagtttatttcggagtttacgtttatatttcgaggtaggggatatggatcgcgagtttgtaatcgttcgttttagacgtttagagtaggcgttttacgttcggttcgcgggtaggacgacggggttagataaagagttttaaaatcgatttttcgggtaaagttcgggttatagcgagaagtgcgaagtcgtttttaaattttagtagttcgtcgtttttttcgttggtacgacgaagaaaagattttttattttcgaaagggaagatttcgaagagtttttatttcgttgtagcgttaggtttcgcggtttttagcggcggttattgtagtcggcgatagcgttagcggttcggtttcgttttttttacggtttcgttttttgaggtttcgttttcggtttatcgtattttcggttcggtcggtcggttttcggttttatttattgttttttgggaggttttcggtttcgtttttcgaatatttcgtttatcgttttttcggcggttttcggtttcgttttttaacgtttcgtttatcgttttcgcgtcggttttcggtttttttttcggaggtttcgttttcgtcggttttcgggttcgttttttcgcggtttcgtagttgggtttaagattgtcgtgtaggttttagagttcggtgtattgtgggacgtcgtagttaatgtcgagtttgcgttgttttttggcgggcgtcgttgtaataatattagtattcggttgtatacggcggagggttatacggtatcgggcgtttagcgtagagggcgtcggtcgttggggttcggtaaaa

SEQ ID NO: 15060 - DNA, 853 bp, Artificial Sequence
  chemically treated genomic DNA (Homo sapiens) CpG-island No: 15060
ttttaccgaaccccaacgaccgacgccctctacgctaaacgcccgataccgtataaccctccgccgtatacaaccgaatactaatattattacaacgacgcccgccaaaaaacaacgcaaactcgacattaactacgacgtcccacaatacaccgaactctaaaacctacacgacaatcttaaacccaactacgaaaccgcgaaaaaacgaacccgaaaaccgacgaaaacgaaacctccgaaaaaaaaaccgaaaaccgacgcgaaaacgataaacgaaacgttaaaaaacgaaaccgaaaaccgccgaaaaaacgataaacgaaatattcgaaaaacgaaaccgaaaacctcccaaaaaacaataaataaaaccgaaaaccgaccgaccgaaccgaaaatacgataaaccgaaaacgaaacctcaaaaaacgaaaccgtaaaaaaaacgaaaccgaaccgctaacgctatcgccgactacaataaccgccgctaaaaaccgcgaaacctaacgctacaacgaaataaaaactcttcgaaatcttccctttcgaaaataaaaaatcttttcttcgtcgtaccaacgaaaaaaacgacgaactactaaaatttaaaaacgacttcgcacttctcgctataacccgaactttacccgaaaaatcgattttaaaactctttatctaaccccgtcgtcctacccgcgaaccgaacgtaaaacgcctactctaaacgtctaaaacgaacgattacaaactcgcgatccatatcccctacctcgaaatataaacgtaaactccgaaataaactaaactaaatttctacaaaaacgaaaatttataaaaactaaaaaaa

SEQ ID NO: 15061 - DNA, 553 bp, Artificial Sequence
  chemically treated genomic DNA (Homo sapiens) CpG-island No: 15061
gatgaacgtgtagtttgcggtgaaaaataacgaagtttatttgattgaagttaattcgcgtgcggcgcgtatcgtttcgttcgtttttaaagttatcggcgtatcgttggtaaaagtggcggcgcgcgtgatggttggtaaatcgttggttgagtagggcgtaattaaagaagttatttcgtcgtattattcggtgaaagaagtggtgttgtcgtttaataaattttcgggcgttgattcgttgttagggttagaaatgcgttttatcggggaagttatgggcgtgggtcgtattttcgttgaagcgtttgttaaagcgtagttgggtagtaattttattatgaagaaatacggtcgtgcgttgtttttcgtgcgcgaaggcgataaagaacgcgtggtggatttggcggtaaaattgttgaaatagggtttcgagttggatgcgatttacggtacggcgattgtgttgggcgaagtaggtattaattcgcgtttggtaaataggtgtatgaaggtcgttcgtatatttaggatcgtattaagaatggcgaat

SEQ ID NO: 15062 - DNA, 553 bp, Artificial Sequence
  chemically treated genomic DNA (Homo sapiens) CpG-island No: 15062
attcgccattcttaatacgatcctaaatatacgaacgaccttcatacacctatttaccaaacgcgaattaatacctacttcgcccaacacaatcgccgtaccgtaaatcgcatccaactcgaaaccctatttcaacaattttaccgccaaatccaccacgcgttctttatcgccttcgcgcacgaaaaacaacgcacgaccgtatttcttcataataaaattactacccaactacgctttaacaaacgcttcaacgaaaatacgacccacgcccataacttccccgataaaacgcatttctaaccctaacaacgaatcaacgcccgaaaatttattaaacgacaacaccacttctttcaccgaataatacgacgaaataacttctttaattacgccctactcaaccaacgatttaccaaccatcacgcgcgccgccacttttaccaacgatacgccgataactttaaaaacgaacgaaacgatacgcgccgcacgcgaattaacttcaatcaaataaacttcgttatttttcaccgcaaactacacgttcatc

SEQ ID NO: 15063 - DNA, 553 bp, Artificial Sequence
  chemically treated genomic DNA (Homo sapiens) CpG-island No: 15063
attcgttatttttgatacggttttgaatgtgcggacggtttttatgtatttgtttattagacgcgggttgatatttgtttcgtttagtataatcgtcgtgtcgtgggtcgtatttagttcgaagttttgttttagtagttttgtcgttaggtttattacgcgttttttatcgttttcgcgtacggaaagtagcgtacgatcgtgtttttttatggtggagttgttgtttagttgcgttttggtaaacgttttagcgaaggtgcggtttacgtttatgattttttcggtagagcgtatttttggttttaatagcgggttaacgttcgggaatttattgaacggtagtattattttttttatcgagtagtacggcgggataatttttttggttacgttttgtttagttagcgatttgttagttattacgcgcgtcgttatttttgttagcggtacgtcggtggttttggagacgaacggaacggtacgcgtcgtacgcgggttaattttaattaggtagatttcgttgttttttatcgtaaattgtacgtttatt

SEQ ID NO: 15064 - DNA, 553 bp, Artificial Sequence
  chemically treated genomic DNA (Homo sapiens) CpG-island No: 15064
aataaacgtacaatttacgataaaaaacaacgaaatctacctaattaaaattaacccgcgtacgacgcgtaccgttccgttcgtctccaaaaccaccgacgtaccgctaacaaaaataacgacgcgcgtaataactaacaaatcgctaactaaacaaaacgtaaccaaaaaaattatcccgccgtactactcgataaaaaaaataatactaccgttcaataaattcccgaacgttaacccgctattaaaaccaaaaatacgctctaccgaaaaaatcataaacgtaaaccgcaccttcgctaaaacgtttaccaaaacgcaactaaacaacaactccaccataaaaaaacacgatcgtacgctactttccgtacgcgaaaacgataaaaaacgcgtaataaacctaacgacaaaactactaaaacaaaacttcgaactaaatacgacccacgacacgacgattatactaaacgaaacaaatatcaacccgcgtctaataaacaaatacataaaaaccgtccgcacattcaaaaccgtatcaaaaataacgaat

SEQ ID NO: 15065 - DNA, 567 bp, Artificial Sequence
  chemically treated genomic DNA (Homo sapiens) CpG-island No: 15065
tacgtcgtcgttttgtcgttttaggtattttttttcgttttttagagattcggttagtttgttttgtcgtattcgagagcgtttcgggttttggtacggttatcgttcgtttcggttttcgttattttattcgttgagcggttgagttcgcggagttgggtgagtgtttgcggttgatcggttcgtgggagtagggagcgtatagtcggttggtgttggagggttacggggatttacggggtatcgcgggagtcgtcgagcgtagggaagttagtaggtatttgtagtgcggagtttgtaaggttgaggtaggagatcgttcgaggcggggagggcgggagcgagcgagcgagcgagcgcgtgggagacggaggcggcgtgttcgtttttaatttcggtatcgtcgtgcgtaggcggggtcgttttagttttttcgtgtttagaagcgttagagatagggagttagtgggcgcgtaattgcgttcggggattaaaagtagaaatagagatgttcgtgttttttttaagatttgggagggaatagagggagtattaaggggcgttagt

SEQ ID NO: 15066 - DNA, 567 bp, Artificial Sequence
  chemically treated genomic DNA (Homo sapiens) CpG-island No: 15066
actaacgccccttaatactccctctattccctcccaaatcttaaaaaaaacacgaacatctctatttctacttttaatccccgaacgcaattacgcgcccactaactccctatctctaacgcttctaaacacgaaaaaactaaaacgaccccgcctacgcacgacgataccgaaattaaaaacgaacacgccgcctccgtctcccacgcgctcgctcgctcgctcgctcccgccctccccgcctcgaacgatctcctacctcaaccttacaaactccgcactacaaatacctactaacttccctacgctcgacgactcccgcgataccccgtaaatccccgtaaccctccaacaccaaccgactatacgctccctactcccacgaaccgatcaaccgcaaacactcacccaactccgcgaactcaaccgctcaacgaataaaataacgaaaaccgaaacgaacgataaccgtaccaaaacccgaaacgctctcgaatacgacaaaacaaactaaccgaatctctaaaaaacgaaaaaaaatacctaaaacgacaaaacgacgacgta

SEQ ID NO: 15067 - DNA, 567 bp, Artificial Sequence
  chemically treated genomic DNA (Homo sapiens) CpG-island No: 15067
attggcgttttttggtgttttttttgtttttttttagattttgggagaagtacggatatttttgtttttgtttttggttttcgaacgtagttacgcgtttattggttttttgtttttggcgtttttgggtacgggggagttggggcggtttcgtttgcgtacggcggtgtcgggattgggggcgggtacgtcgttttcgttttttacgcgttcgttcgttcgttcgttttcgtttttttcgtttcgagcgattttttgttttagttttgtaggtttcgtattgtagatgtttgttggtttttttgcgttcggcggttttcgcggtgtttcgtaagttttcgtgattttttagtattagtcggttgtgcgttttttgtttttacgggtcggttagtcgtagatatttatttagtttcgcgagtttagtcgtttagcgagtggggtagcggggatcgagacggacggtagtcgtgttagagttcggggcgttttcggatgcggtaggataagttgatcgggtttttgaggaacggggggagatgtttgaagcggtagggcggcggcgtg

SEQ ID NO: 15068 - DNA, 567 bp, Artificial Sequence
  chemically treated genomic DNA (Homo sapiens) CpG-island No: 15068
cacgccgccgccctaccgcttcaaacatctccccccgttcctcaaaaacccgatcaacttatcctaccgcatccgaaaacgccccgaactctaacacgactaccgtccgtctcgatccccgctaccccactcgctaaacgactaaactcgcgaaactaaataaatatctacgactaaccgacccgtaaaaacaaaaaacgcacaaccgactaatactaaaaaatcacgaaaacttacgaaacaccgcgaaaaccgccgaacgcaaaaaaaccaacaaacatctacaatacgaaacctacaaaactaaaacaaaaaatcgctcgaaacgaaaaaaacgaaaacgaacgaacgaacgaacgcgtaaaaaacgaaaacgacgtacccgcccccaatcccgacaccgccgtacgcaaacgaaaccgccccaactcccccgtacccaaaaacgccaaaaacaaaaaaccaataaacgcgtaactacgttcgaaaaccaaaaacaaaaacaaaaatatccgtacttctcccaaaatctaaaaaaaaacaaaaaaaacaccaaaaaacgccaat

SEQ ID NO: 15069 - DNA, 1010 bp, Artificial Sequence
  chemically treated genomic DNA (Homo sapiens) CpG-island No: 15069
gtcgagtagtttaggtgcgcgttggagcgcgggtagagacggcgaggataattcggttttaggaagttttcgggattttgttgcgttcggtttttatttttttgtcgtaggtatagtatttgatgtcgttggttcggtcgtttttgtagtttttgtagtacgcgggagtcgtcggtatcgttgcggtcgtttaggattacgtcggagttcgaggtttcggtggagttgtcgaggttgtcgcggcgtcgtcggcggttttcggtttcgcggttttcgttcgtcgttttttttttttttgtgtagttgtatagttcgttgagtagttcgtttattagggacgtcgtgcggtttgtgcggtcgtcgtacgtttcgtcgggtttcgtgtttttatcgtcgttttacgtgtttcgggagcgtcgcggtcgtttcgtcgtttttcggaggcgcggggttgggggagttgtaggaatcgttttttttttttgattttttagtttcgtttcgttatcgtcgtcgcggaattttagtttcgttcggagtttcgggcggttttcgtcggtgggaaggacgtttatggttttcggcgcgcggttgttcggttttcgttgtttttttcgtttcgcggcgtcggttagtttcgggaggaggcgcggtttcgttttcgtcggtggtgttttttcgggcgcggcgttagcgggttttggattttcgaggtgttcgggtttttttcgagtcggtatttgagtcgttttttttcgtttcggatcgggcgagaaggagattgttacgttattgagttatttggggttatttgttgttcgggttcggtttttatttagagcgttttttcgtgcgcgagaaggcgtaggacgtggttagaatatcgttgggaagaagttagtagtacggagggggagggcgttgaggtcgtcgttatttttatttttaattaagtacgtgatttaatttaaaaagagggtgatttttgttttttatttagtcgttagtta

SEQ ID NO: 15070 - DNA, 1010 bp, Artificial Sequence
  chemically treated genomic DNA (Homo sapiens) CpG-island No: 15070
taactaacgactaaataaaaaacaaaaatcaccctctttttaaattaaatcacgtacttaattaaaaataaaaataacgacgacctcaacgccctccccctccgtactactaacttcttcccaacgatattctaaccacgtcctacgccttctcgcgcacgaaaaaacgctctaaataaaaaccgaacccgaacaacaaataaccccaaataactcaataacgtaacaatctccttctcgcccgatccgaaacgaaaaaaaacgactcaaataccgactcgaaaaaaacccgaacacctcgaaaatccaaaacccgctaacgccgcgcccgaaaaaacaccaccgacgaaaacgaaaccgcgcctcctcccgaaactaaccgacgccgcgaaacgaaaaaaacaacgaaaaccgaacaaccgcgcgccgaaaaccataaacgtccttcccaccgacgaaaaccgcccgaaactccgaacgaaactaaaattccgcgacgacgataacgaaacgaaactaaaaaatcaaaaaaaaaaaacgattcctacaactcccccaaccccgcgcctccgaaaaacgacgaaacgaccgcgacgctcccgaaacacgtaaaacgacgataaaaacacgaaacccgacgaaacgtacgacgaccgcacaaaccgcacgacgtccctaataaacgaactactcaacgaactatacaactacacaaaaaaaaaaaaaacgacgaacgaaaaccgcgaaaccgaaaaccgccgacgacgccgcgacaacctcgacaactccaccgaaacctcgaactccgacgtaatcctaaacgaccgcaacgataccgacgactcccgcgtactacaaaaactacaaaaacgaccgaaccaacgacatcaaatactatacctacgacaaaaaaataaaaaccgaacgcaacaaaatcccgaaaacttcctaaaaccgaattatcctcgccgtctctacccgcgctccaacgcgcacctaaactactcgac

SEQ ID NO: 15071 - DNA, 1010 bp, Artificial Sequence
  chemically treated genomic DNA (Homo sapiens) CpG-island No: 15071
tagttggcggttgaataagaggtaagagttattttttttttgagttaaattacgtgtttaattaaaagtgaaggtggcggcggttttagcgtttttttttttcgtgttgttggtttttttttaacggtgttttggttacgttttgcgttttttcgcgtacgggagagcgttttgggtagaggtcgggttcgggtagtaggtggttttaggtagtttagtggcgtggtagtttttttttcgttcggttcggagcggaggggagcggtttaggtgtcggttcgggggaggttcgggtatttcggggatttagagttcgttggcgtcgcgttcgggagggtattatcggcgaggacgaagtcgcgttttttttcggaattggtcggcgtcgcgaggcgggaggagtagcgggagtcgggtagtcgcgcgtcggggattatggacgttttttttatcggcgggggtcgttcggggtttcggacggagttggaatttcgcggcggcggtggcgaggcgaggttggagagttaggaggaagaaacgatttttgtagtttttttagtttcgcgttttcggggagcggcggagcggtcgcggcgttttcgggatacgtgggacggcgatgaggatacggagttcggcgaggcgtgcggcggtcgtataagtcgtacggcgtttttggtgagcgggttgtttaacgagttgtatagttgtatagaggaggaggaggcggcgggcgggggtcgcggggtcgagggtcgtcggcggcgtcgcgatagtttcgatagttttatcgaggtttcgggtttcgacgtggttttgggcggtcgtagcggtgtcggcgattttcgcgtgttgtaggagttgtaggagcgatcgagttagcggtattagatgttgtatttgcggtagaaaggtgagggtcgggcgtagtagggtttcgggggttttttggagtcgggttgttttcgtcgtttttgttcgcgttttagcgcgtatttgggttgttcggt

SEQ ID NO: 15072 - DNA, 1010 bp, Artificial Sequence
  chemically treated genomic DNA (Homo sapiens) CpG-island No: 15072
accgaacaacccaaatacgcgctaaaacgcgaacaaaaacgacgaaaacaacccgactccaaaaaacccccgaaaccctactacgcccgaccctcacctttctaccgcaaatacaacatctaataccgctaactcgatcgctcctacaactcctacaacacgcgaaaatcgccgacaccgctacgaccgcccaaaaccacgtcgaaacccgaaacctcgataaaactatcgaaactatcgcgacgccgccgacgaccctcgaccccgcgacccccgcccgccgcctcctcctcctctatacaactatacaactcgttaaacaacccgctcaccaaaaacgccgtacgacttatacgaccgccgcacgcctcgccgaactccgtatcctcatcgccgtcccacgtatcccgaaaacgccgcgaccgctccgccgctccccgaaaacgcgaaactaaaaaaactacaaaaatcgtttcttcctcctaactctccaacctcgcctcgccaccgccgccgcgaaattccaactccgtccgaaaccccgaacgacccccgccgataaaaaaaacgtccataatccccgacgcgcgactacccgactcccgctactcctcccgcctcgcgacgccgaccaattccgaaaaaaaacgcgacttcgtcctcgccgataataccctcccgaacgcgacgccaacgaactctaaatccccgaaatacccgaacctcccccgaaccgacacctaaaccgctcccctccgctccgaaccgaacgaaaaaaaaactaccacgccactaaactacctaaaaccacctactacccgaacccgacctctacccaaaacgctctcccgtacgcgaaaaaacgcaaaacgtaaccaaaacaccgttaaaaaaaaaccaacaacacgaaaaaaaaaaacgctaaaaccgccgccaccttcacttttaattaaacacgtaatttaactcaaaaaaaaaataactcttacctcttattcaaccgccaacta

SEQ ID NO: 15073 - DNA, 904 bp, Artificial Sequence
  chemically treated genomic DNA (Homo sapiens) CpG-island No: 15073
cgagggggtcgttgtgtcgttatttattcgagtcgttcgggttggtcgcgagtcgggattcgcgagggttgtcgggttttggttttcgaggacgtagatatgtggtttgaattttcgtttttttagtcgttgtttttgtgtatttttttgggcgtttttagcgaatgcgagcggcgaggcgagggcgagcgcgtcgaggaagggcgggagaggcgcggagtttggtcgcgtcgcgttgcgtcgagcgtcgggtttttttcgcgagtttttcgggttcgcgcgcgcgttttttattgttttcgtttttcgcgcggcgcgtgttttttatttttcgtcgcgcgttttcgtattcgttcggttttacgcggcgcgcgtttgttttggcggtagcggcggcggcggcggcggcgcgttttttttcgaacgtcgtttttagggttgttggttgcgttttttattgtttcgcggttgttgttcggggtgggcggttaggcgggggggaggtgtcggtttggtcgtcggggagggtttatcgttcgggcggatttttattgcgagagcgatgcgggtttaggcgcggcgcgcgggggttgtagggcgtttagtattgggggttgtcggcgcgcgggggtttttttttggtttttaggtattcgttgttgttgggcgtttttcgtattttcggttattatggatatttcgttttttcgtcgtttttttcgcgtatttcgggaggtcgtcggggcggtagtagcggcgcggtttcgcgggtgtttaggtgatcggttcggtagcggtagagtagtggtagtagtcgttattgtcgttgttattgcggtcgtcgtcgttggagagaggaggacgaggagggtaaggggtagaagtaggttttgttttgtttgtt

SEQ ID NO: 15074 - DNA, 904 bp, Artificial Sequence
  chemically treated genomic DNA (Homo sapiens) CpG-island No: 15074
aacaaacaaaacaaaacctacttctaccccttaccctcctcgtcctcctctctccaacgacgacgaccgcaataacaacgacaataacgactactaccactactctaccgctaccgaaccgatcacctaaacacccgcgaaaccgcgccgctactaccgccccgacgacctcccgaaatacgcgaaaaaaacgacgaaaaaacgaaatatccataataaccgaaaatacgaaaaacgcccaacaacaacgaatacctaaaaaccaaaaaaaaacccccgcgcgccgacaacccccaatactaaacgccctacaacccccgcgcgccgcgcctaaacccgcatcgctctcgcaataaaaatccgcccgaacgataaaccctccccgacgaccaaaccgacacctcccccccgcctaaccgcccaccccgaacaacaaccgcgaaacaataaaaaacgcaaccaacaaccctaaaaacgacgttcgaaaaaaaacgcgccgccgccgccgccgccgctaccgccaaaacaaacgcgcgccgcgtaaaaccgaacgaatacgaaaacgcgcgacgaaaaataaaaaacacgcgccgcgcgaaaaacgaaaacaataaaaaacgcgcgcgcgaacccgaaaaactcgcgaaaaaaacccgacgctcgacgcaacgcgacgcgaccaaactccgcgcctctcccgcccttcctcgacgcgctcgccctcgcctcgccgctcgcattcgctaaaaacgcccaaaaaaatacacaaaaacaacgactaaaaaaacgaaaattcaaaccacatatctacgtcctcgaaaaccaaaacccgacaaccctcgcgaatcccgactcgcgaccaacccgaacgactcgaataaataacgacacaacgaccccctcg

SEQ ID NO: 15075 - DNA, 904 bp, Artificial Sequence
  chemically treated genomic DNA (Homo sapiens) CpG-island No: 15075
ggtagatagagtaggatttgtttttgttttttgtttttttcgtttttttttttttagcggcggcgatcgtagtaatagcggtagtggcggttgttgttattgttttgtcgttgtcgagtcggttatttgggtattcgcggagtcgcgtcgttgttatcgtttcggcggtttttcggagtgcgcggagggggcggcggaggagcgagatatttatagtaatcgaggatgcgaggggcgtttagtagtagcgagtgtttgggagttaggaggaggttttcgcgcgtcggtaatttttagtgttaggcgttttgtagttttcgcgcgtcgcgtttgggttcgtatcgttttcgtagtgagggttcgttcgagcggtaagtttttttcggcggttaagtcgatatttttttttcgtttggtcgtttatttcgggtagtagtcgcggaataatggagagcgtagttagtagttttggagacggcgttcgggggaggacgcgtcgtcgtcgtcgtcgtcgttgtcgttagggtaggcgcgcgtcgcgtggagtcgggcgggtgcgagggcgcgcggcggggggtggggggtacgcgtcgcgcggggggcgggggtagtggggggcgcgcgcgcgggttcggggagttcgcggggagagttcggcgttcggcgtagcgcggcgcggttaagtttcgcgtttttttcgttttttttcggcgcgttcgttttcgtttcgtcgttcgtattcgttgggggcgtttagaaagatgtatagaggtaacggttaggggagcggaggtttaagttatatgtttgcgttttcgggggttagagttcggtagttttcgcggatttcggttcgcggttagttcgagcggttcgggtgaatagcggtatagcggttttttcg

SEQ ID NO: 15076 - DNA, 904 bp, Artificial Sequence
  chemically treated genomic DNA (Homo sapiens) CpG-island No: 15076
cgaaaaaaccgctataccgctattcacccgaaccgctcgaactaaccgcgaaccgaaatccgcgaaaactaccgaactctaacccccgaaaacgcaaacatataacttaaacctccgctcccctaaccgttacctctatacatctttctaaacgcccccaacgaatacgaacgacgaaacgaaaacgaacgcgccgaaaaaaaacgaaaaaaacgcgaaacttaaccgcgccgcgctacgccgaacgccgaactctccccgcgaactccccgaacccgcgcgcgcgccccccactacccccgccccccgcgcgacgcgtaccccccaccccccgccgcgcgccctcgcacccgcccgactccacgcgacgcgcgcctaccctaacgacaacgacgacgacgacgacgacgcgtcctcccccgaacgccgtctccaaaactactaactacgctctccattattccgcgactactacccgaaataaacgaccaaacgaaaaaaaaatatcgacttaaccgccgaaaaaaacttaccgctcgaacgaaccctcactacgaaaacgatacgaacccaaacgcgacgcgcgaaaactacaaaacgcctaacactaaaaattaccgacgcgcgaaaacctcctcctaactcccaaacactcgctactactaaacgcccctcgcatcctcgattactataaatatctcgctcctccgccgccccctccgcgcactccgaaaaaccgccgaaacgataacaacgacgcgactccgcgaatacccaaataaccgactcgacaacgacaaaacaataacaacaaccgccactaccgctattactacgatcgccgccgctaaaaaaaaaaaaacgaaaaaaacaaaaaacaaaaacaaatcctactctatctacc

SEQ ID NO: 15077 - DNA, 535 bp, Artificial Sequence
  chemically treated genomic DNA (Homo sapiens) CpG-island No: 15077
gcgtttttaggatttcgcgttacgcgtattttttttatttcgatatttattgttatttttatagcggagcgaggggtttcgtcgagggcgagcgtatttcgtgcggttgagatgttcggaacgttttttcgcgtttcggtttttttagaaggggttatagtcggttcgcgagttttcgggcgggggttgagtcgtagtgttaattaaggcgaggttattttggttcgcgcgttttttattttagggttttttcggtagagaggtgattgtaggttatcgttagtcgggtttttatttttcgttttcgtcgtttcggtttttatatttcggaattttttcggcggagtttgcgagttcgggaacgcggttttagttagagtggaagggatagcgcgggaattcggtagagagaaaaagcgggaattgggcgtcgtcgttttacgatcgggaggagattttttttcggttttttttggattttatttcggggatcgtttcggggttagagtttaggttgggagagtttttgggcgta

SEQ ID NO: 15078 - DNA, 535 bp, Artificial Sequence
  chemically treated genomic DNA (Homo sapiens) CpG-island No: 15078
tacgcccaaaaactctcccaacctaaactctaaccccgaaacgatccccgaaataaaatccaaaaaaaaccgaaaaaaaatctcctcccgatcgtaaaacgacgacgcccaattcccgctttttctctctaccgaattcccgcgctatcccttccactctaactaaaaccgcgttcccgaactcgcaaactccgccgaaaaaattccgaaatataaaaaccgaaacgacgaaaacgaaaaataaaaacccgactaacgataacctacaatcacctctctaccgaaaaaaccctaaaataaaaaacgcgcgaaccaaaataacctcgccttaattaacactacgactcaacccccgcccgaaaactcgcgaaccgactataaccccttctaaaaaaaccgaaacgcgaaaaaacgttccgaacatctcaaccgcacgaaatacgctcgccctcgacgaaacccctcgctccgctataaaaataacaataaatatcgaaataaaaaaaatacgcgtaacgcgaaatcctaaaaacgc

SEQ ID NO: 15079 - DNA, 535 bp, Artificial Sequence
  chemically treated genomic DNA (Homo sapiens) CpG-island No: 15079
tgcgtttagggatttttttagtttgggttttagtttcgaaacggttttcggagtgggatttaggaggggtcgggagggaattttttttcgatcgtgaagcggcggcgtttagttttcgttttttttttttgtcgggttttcgcgttattttttttattttggttgggatcgcgttttcgggttcgtaggtttcgtcggggaggtttcggggtgtgggggtcgggacggcggaggcggggagtaagggttcggttggcggtgatttgtagttatttttttgtcggaggggttttggaatgaaaggcgcgcgggttaaggtgatttcgttttggttggtattgcggtttagttttcgttcggggattcgcgggtcgattgtggttttttttggggaagtcggggcgcggggaggcgtttcgggtattttagtcgtacggggtacgttcgttttcggcggggtttttcgtttcgttgtgggagtggtagtgggtgtcggggtggagaaagtacgcgtggcgcggagttttggggacgt

SEQ ID NO: 15080 - DNA, 535 bp, Artificial Sequence
  chemically treated genomic DNA (Homo sapiens) CpG-island No: 15080
acgtccccaaaactccgcgccacgcgtactttctccaccccgacacccactaccactcccacaacgaaacgaaaaaccccgccgaaaacgaacgtaccccgtacgactaaaatacccgaaacgcctccccgcgccccgacttccccaaaaaaaaccacaatcgacccgcgaatccccgaacgaaaactaaaccgcaataccaaccaaaacgaaatcaccttaacccgcgcgcctttcattccaaaacccctccgacaaaaaaataactacaaatcaccgccaaccgaacccttactccccgcctccgccgtcccgacccccacaccccgaaacctccccgacgaaacctacgaacccgaaaacgcgatcccaaccaaaataaaaaaaataacgcgaaaacccgacaaaaaaaaaaaacgaaaactaaacgccgccgcttcacgatcgaaaaaaaattccctcccgacccctcctaaatcccactccgaaaaccgtttcgaaactaaaacccaaactaaaaaaatccctaaacgca

SEQ ID NO: 15081 - DNA, 742 bp, Artificial Sequence
  chemically treated genomic DNA (Homo sapiens) CpG-island No: 15081
ttattagttttaggagttttcgcgtaaatcgaagttcggggagtgagtcgtaggtagcggttttcggggaaggtgttttaggtcggttcgggtggagagtgtttttcgtcgttttttcgattttttgttgttttttttaaatttttttttaattttttacgtcggggggacgtttagggatcgtttatttttcgggatcgttcgttttttcgttttcgttttcgttttcgttttcgttttcgataaattgagtaatatttagagaggatggaaatggcgaagaggtttggcgtttgttcgttttcgcgtatgttttttgattttattaaggttacgttgtagttcgtaggaatgaaaatttattttttcgtattttcgaggtgatttggaagcggtttaattgttttggttttttagaagaggaggggatcgggcggtaacgaggagttaaggggaggagattgttcgtaaaattcggaaaagttttttcgatttattttgttagttttcgtgcgtttttagatatgcgtagtagtttttttcgcggtggcggcggcggcggcggcggcggtggttgtcgtggcggttgagagtttagagtcggacgtttcggtcgtttcgggttggcggttggagagcgttcgggttatgtttgtttagggggattgcgagtttttggtgtagcgagttcgggagttggtgtcgtaagatttgtgggtagttaaggcgtggttgattacgg

SEQ ID NO: 15082 - DNA, 742 bp, Artificial Sequence
  chemically treated genomic DNA (Homo sapiens) CpG-island No: 15082
ccgtaatcaaccacgccttaactacccacaaatcttacgacaccaactcccgaactcgctacaccaaaaactcgcaatccccctaaacaaacataacccgaacgctctccaaccgccaacccgaaacgaccgaaacgtccgactctaaactctcaaccgccacgacaaccaccgccgccgccgccgccgccgccaccgcgaaaaaaactactacgcatatctaaaaacgcacgaaaactaacaaaataaatcgaaaaaacttttccgaattttacgaacaatctcctccccttaactcctcgttaccgcccgatcccctcctcttctaaaaaaccaaaacaattaaaccgcttccaaatcacctcgaaaatacgaaaaaataaattttcattcctacgaactacaacgtaaccttaataaaatcaaaaaacatacgcgaaaacgaacaaacgccaaacctcttcgccatttccatcctctctaaatattactcaatttatcgaaaacgaaaacgaaaacgaaaacgaaaacgaaaaaacgaacgatcccgaaaaataaacgatccctaaacgtccccccgacgtaaaaaattaaaaaaaaatttaaaaaaaacaacaaaaaatcgaaaaaacgacgaaaaacactctccacccgaaccgacctaaaacaccttccccgaaaaccgctacctacgactcactccccgaacttcgatttacgcgaaaactcctaaaactaataa

SEQ ID NO: 15083 - DNA, 742 bp, Artificial Sequence
  chemically treated genomic DNA (Homo sapiens) CpG-island No: 15083
tcgtgattagttacgttttggttgtttataggttttgcggtattaattttcgggttcgttgtattaggaattcgtagtttttttgggtagatatgattcgagcgttttttagtcgttagttcgaagcggtcggaacgttcggttttggatttttagtcgttacggtagttatcgtcgtcgtcgtcgtcgtcgttatcgcgggggaggttattgcgtatgtttggaggcgtacggaggttggtagagtggatcgggaaagttttttcgggttttgcgagtagttttttttttttggtttttcgttatcgttcggttttttttttttttgagaagttagagtagttgaatcgtttttaggttatttcgaaaatgcggagaagtggatttttatttttgcgggttgtagcgtgattttggtgaagttagggagtatgcgcgggagcgggtaggcgttaggttttttcgttatttttattttttttgggtattgtttagtttgtcgggggcgggggcgggggcggaggcgggggcggggagacgggcggtttcggggaatgggcggtttttgggcgttttttcggcgtggaaggttgagaagaagtttgagaggaatagtagagggtcggggaggcggcgggaagtattttttattcgggtcggtttgaaatatttttttcgggggtcgttgtttgcgatttatttttcgggtttcgatttacgcgaaaatttttggggttggtgg

SEQ ID NO: 15084 - DNA, 742 bp, Artificial Sequence
  chemically treated genomic DNA (Homo sapiens) CpG-island No: 15084
ccaccaaccccaaaaattttcgcgtaaatcgaaacccgaaaaataaatcgcaaacaacgacccccgaaaaaaatatttcaaaccgacccgaataaaaaatacttcccgccgcctccccgaccctctactattcctctcaaacttcttctcaaccttccacgccgaaaaaacgcccaaaaaccgcccattccccgaaaccgcccgtctccccgcccccgcctccgcccccgcccccgcccccgacaaactaaacaatacccaaaaaaaataaaaataacgaaaaaacctaacgcctacccgctcccgcgcatactccctaacttcaccaaaatcacgctacaacccgcaaaaataaaaatccacttctccgcattttcgaaataacctaaaaacgattcaactactctaacttctcaaaaaaaaaaaaaaccgaacgataacgaaaaaccaaaaaaaaaaaactactcgcaaaacccgaaaaaactttcccgatccactctaccaacctccgtacgcctccaaacatacgcaataacctcccccgcgataacgacgacgacgacgacgacgataactaccgtaacgactaaaaatccaaaaccgaacgttccgaccgcttcgaactaacgactaaaaaacgctcgaatcatatctacccaaaaaaactacgaattcctaatacaacgaacccgaaaattaataccgcaaaacctataaacaaccaaaacgtaactaatcacga

SEQ ID NO: 15085 - DNA, 522 bp, Artificial Sequence
  chemically treated genomic DNA (Homo sapiens) CpG-island No: 15085
attcgattcgttcggagtttttagtgacgaagttaatatggtcgttttttacgaggtttttcgggttcgagtgatttgttagtcgtggcggggtgttcgggaggtttagatcgtaggtcgttttttagcggtgggttgttatcgttcggttacgtcgtttttatttcgcgcgcgttttcgacggttcgcgtcgcgtcggtgaagttgcgggcgggggaggggaatagggtgttcgtacgggggttgtttcgcgtcgttttagtttttttttttcggcgtttagaattttggttcgagatcgcgcgcgaaagtagggcgcgaatattttcgttcgttattcgggtattatagattttaagtggtcggttcgcggtcgtataggtgtatcggattttgttttcgtttcgtacgttggtcgggattttcggtttattttttcggatttgttttttttcgggcgttttttaatttttcggggtttgtttattttttttatggttcgttttttagtttatattgggg

SEQ ID NO: 15086 - DNA, 522 bp, Artificial Sequence
  chemically treated genomic DNA (Homo sapiens) CpG-island No: 15086
ccccaatataaactaaaaaacgaaccataaaaaaaataaacaaaccccgaaaaattaaaaaacgcccgaaaaaaaacaaatccgaaaaaataaaccgaaaatcccgaccaacgtacgaaacgaaaacaaaatccgatacacctatacgaccgcgaaccgaccacttaaaatctataatacccgaataacgaacgaaaatattcgcgccctactttcgcgcgcgatctcgaaccaaaattctaaacgccgaaaaaaaaaaactaaaacgacgcgaaacaacccccgtacgaacaccctattcccctcccccgcccgcaacttcaccgacgcgacgcgaaccgtcgaaaacgcgcgcgaaataaaaacgacgtaaccgaacgataacaacccaccgctaaaaaacgacctacgatctaaacctcccgaacaccccgccacgactaacaaatcactcgaacccgaaaaacctcgtaaaaaacgaccatattaacttcgtcactaaaaactccgaacgaatcgaat

SEQ ID NO: 15087 - DNA, 522 bp, Artificial Sequence
  chemically treated genomic DNA (Homo sapiens) CpG-island No: 15087
ttttagtgtgagttagagagcggattatgaaggaagtgggtagatttcgggaagttagaggacgttcggggaaaagtaggttcggggaggtgggtcgagagtttcggttagcgtgcggggcggaggtagggttcggtgtatttgtgcggtcgcgggtcggttatttggggtttgtggtgttcgagtggcgggcgggggtgttcgcgttttgttttcgcgcgcggtttcgggttaaggttttgggcgtcgggagaggagagttggggcggcgcggagtagttttcgtgcgggtattttgtttttttttttcgttcgtaattttatcggcgcggcgcgagtcgtcgggggcgcgcgcggggtgggggcggcgtggtcgggcggtggtagtttatcgttggggagcgatttgcggtttgggtttttcgggtatttcgttacggttggtaggttattcgggttcgaggggtttcgtggggagcggttatgttggtttcgttattgaggatttcgggcgggtcgggt

SEQ ID NO: 15088 - DNA, 522 bp, Artificial Sequence
  chemically treated genomic DNA (Homo sapiens) CpG-island No: 15088
acccgacccgcccgaaatcctcaataacgaaaccaacataaccgctccccacgaaacccctcgaacccgaataacctaccaaccgtaacgaaatacccgaaaaacccaaaccgcaaatcgctccccaacgataaactaccaccgcccgaccacgccgcccccaccccgcgcgcgcccccgacgactcgcgccgcgccgataaaattacgaacgaaaaaaaaaaacaaaatacccgcacgaaaactactccgcgccgccccaactctcctctcccgacgcccaaaaccttaacccgaaaccgcgcgcgaaaacaaaacgcgaacacccccgcccgccactcgaacaccacaaaccccaaataaccgacccgcgaccgcacaaatacaccgaaccctacctccgccccgcacgctaaccgaaactctcgacccacctccccgaacctacttttccccgaacgtcctctaacttcccgaaatctacccacttccttcataatccgctctctaactcacactaaaa

SEQ ID NO: 15089 - DNA, 543 bp, Artificial Sequence
  chemically treated genomic DNA (Homo sapiens) CpG-island No: 15089
gcgttacggcggggtagggagggaaggtttcggcggtcggtcggtttcggggttgtttttgttcgtttttcgggggtcgtgaggggtcggtggttcgggtgagattgtggggttacgagcggagtttggcgaggtcgggaagagaggaggggcgggaaggagtaagagaggaagtcgaaatagggggacggaagcggggagcgggtgttcgggtgggggaagggagaggtcggcggggggtaggggcgacgaggttcgaggttttttcgcgtcgcgtttcgacgtttttttcggtttgtttgtttttggtcgttttgtttatagttatgcggtcgggcgggggttcggagtatacgttcgatcgttatttttgtagggggataggggttgcggcggggaatgggggggtcggttttcgtagcgaagatataataatgagttttttcgtttcggaggggttaattttcgcgaattttcgtttttggggaaaacggggtttttttaatttttttttattttcgttttcgggtttttcggtggtta

SEQ ID NO: 15090 - DNA, 543 bp, Artificial Sequence
  chemically treated genomic DNA (Homo sapiens) CpG-island No: 15090
taaccaccgaaaaacccgaaaacgaaaataaaaaaaaattaaaaaaaccccgttttccccaaaaacgaaaattcgcgaaaattaacccctccgaaacgaaaaaactcattattatatcttcgctacgaaaaccgacccccccattccccgccgcaacccctatccccctacaaaaataacgatcgaacgtatactccgaacccccgcccgaccgcataactataaacaaaacgaccaaaaacaaacaaaccgaaaaaaacgtcgaaacgcgacgcgaaaaaacctcgaacctcgtcgcccctaccccccgccgacctctcccttcccccacccgaacacccgctccccgcttccgtccccctatttcgacttcctctcttactccttcccgcccctcctctcttcccgacctcgccaaactccgctcgtaaccccacaatctcacccgaaccaccgacccctcacgacccccgaaaaacgaacaaaaacaaccccgaaaccgaccgaccgccgaaaccttccctccctaccccgccgtaacgc

SEQ ID NO: 15091 - DNA, 543 bp, Artificial Sequence
  chemically treated genomic DNA (Homo sapiens) CpG-island No: 15091
tggttatcgaggggttcgggagcgggggtgggagggagttgggggagtttcgttttttttaggggcgggggttcgcggggattaattttttcggggcggaagggtttattgttatgttttcgttgcggaggtcgatttttttatttttcgtcgtagtttttatttttttataggagtggcgatcgggcgtgtgtttcggattttcgttcggtcgtatagttgtgagtagggcggttagaggtaggtaggtcgggaggggcgtcggggcgcggcgcgggggggtttcgggtttcgtcgtttttgtttttcgtcggtttttttttttttttattcgggtattcgtttttcgttttcgtttttttgtttcggtttttttttttattttttttcgtttttttttttttttcgatttcgttaaatttcgttcgtggttttatagttttattcgggttatcggttttttacgattttcggaaagcggataaaaatagtttcgaggtcggtcggtcgtcgggattttttttttttgtttcgtcgtggcgt

SEQ ID NO: 15092 - DNA, 543 bp, Artificial Sequence
  chemically treated genomic DNA (Homo sapiens) CpG-island No: 15092
acgccacgacgaaacaaaaaaaaaaaatcccgacgaccgaccgacctcgaaactatttttatccgctttccgaaaatcgtaaaaaaccgataacccgaataaaactataaaaccacgaacgaaatttaacgaaatcgaaaaaaaaaaaaaaacgaaaaaaaataaaaaaaaaaaccgaaacaaaaaaacgaaaacgaaaaacgaatacccgaataaaaaaaaaaaaaaaccgacgaaaaacaaaaacgacgaaacccgaaacccccccgcgccgcgccccgacgcccctcccgacctacctacctctaaccgccctactcacaactatacgaccgaacgaaaatccgaaacacacgcccgatcgccactcctataaaaaaataaaaactacgacgaaaaataaaaaaatcgacctccgcaacgaaaacataacaataaacccttccgccccgaaaaaattaatccccgcgaacccccgcccctaaaaaaaacgaaactcccccaactccctcccacccccgctcccgaacccctcgataacca

SEQ ID NO: 15093 - DNA, 754 bp, Artificial Sequence
  chemically treated genomic DNA (Homo sapiens) CpG-island No: 15093
ggttggtggtatcgagtagtttgggtttagagcggttgtcgggtcgatagattcgggcggggtaaagtcgggcggggaaagttgggttcgtttcgtttcggtttcgtttttatttcgggagttcgatatcggttttagagttttgggtagcgtgcgcgttttttttggcggttgcgtaggtaagtgggatcggggtggggttacgtgatcgggagaggagggttcggcggttttcggtttaggtgtgttgcgacggacggttgttcgcgttcggcgtttagtttgttatagttcgcgggggaggtcggagttagggattcggggaggttcgcgtttcgttaggtttcgttttgcggacgtaggtgcggtcgagtcgtcgttttttcgggcgcggggcggggcgcgtatttcggggcgatttcggtgttttttatttgggaggtttttcggtttagtttcggtttcgttgggtcggaatttttaaagatagtgggttttagttagaaacgcgaagacgaacgtttagtcggcgcgggtagaatcgaggatataatgagatttgtgggatcgggcgtttagaggttggcgcgggggagattttatagttaaaatgttcggtattttcgggtagtcgtgggttagttagaatcgtagagtttttttcgatttttcggaagcgtagaagtattcgaaatttattcgttttttgggtttagtaaaatttttaagttaggtaaatcggtggttttgtttg

SEQ ID NO: 15094 - DNA, 754 bp, Artificial Sequence
  chemically treated genomic DNA (Homo sapiens) CpG-island No: 15094
caaacaaaaccaccgatttacctaacttaaaaattttactaaacccaaaaaacgaataaatttcgaatacttctacgcttccgaaaaatcgaaaaaaactctacgattctaactaacccacgactacccgaaaataccgaacattttaactataaaatctcccccgcgccaacctctaaacgcccgatcccacaaatctcattatatcctcgattctacccgcgccgactaaacgttcgtcttcgcgtttctaactaaaacccactatctttaaaaattccgacccaacgaaaccgaaactaaaccgaaaaacctcccaaataaaaaacaccgaaatcgccccgaaatacgcgccccgccccgcgcccgaaaaaacgacgactcgaccgcacctacgtccgcaaaacgaaacctaacgaaacgcgaacctccccgaatccctaactccgacctcccccgcgaactataacaaactaaacgccgaacgcgaacaaccgtccgtcgcaacacacctaaaccgaaaaccgccgaaccctcctctcccgatcacgtaaccccaccccgatcccacttacctacgcaaccgccaaaaaaaacgcgcacgctacccaaaactctaaaaccgatatcgaactcccgaaataaaaacgaaaccgaaacgaaacgaacccaactttccccgcccgactttaccccgcccgaatctatcgacccgacaaccgctctaaacccaaactactcgataccaccaacc

SEQ ID NO: 15095 - DNA, 754 bp, Artificial Sequence
  chemically treated genomic DNA (Homo sapiens) CpG-island No: 15095
taaatagaattatcggtttatttggtttaaaagttttgttggatttaagaaacgggtagatttcggatatttttgcgttttcgaggggtcgggaaaggttttgcggttttaattaatttacgattgttcgggggtatcgagtattttagttgtggggtttttttcgcgttagtttttgggcgttcggttttataaattttattgtgttttcggttttgttcgcgtcggttaggcgttcgttttcgcgtttttggttgaaatttattgtttttggagatttcgatttaacgaggtcgaaattaagtcgggagattttttaggtaaggagtatcgagatcgtttcgaggtgcgcgtttcgtttcgcgttcggaaggacggcggttcggtcgtatttgcgttcgtagagcgaaatttggcgggacgcgggttttttcggatttttggtttcggtttttttcgcgggttatggtaggttgagcgtcgagcgcgggtagtcgttcgtcgtagtatatttgggtcgggggtcgtcgggtttttttttttcggttacgtggttttatttcggttttatttatttgcgtagtcgttaggaagagcgcgtacgttgtttaggattttgaaatcggtatcgggttttcggggtgggggcggggtcgggacgggacgagtttagtttttttcgttcggttttgtttcgttcggatttgtcggttcgataatcgttttgggtttaggttgttcggtgttattagtt

SEQ ID NO: 15096 - DNA, 754 bp, Artificial Sequence
  chemically treated genomic DNA (Homo sapiens) CpG-island No: 15096
aactaataacaccgaacaacctaaacccaaaacgattatcgaaccgacaaatccgaacgaaacaaaaccgaacgaaaaaaactaaactcgtcccgtcccgaccccgcccccaccccgaaaacccgataccgatttcaaaatcctaaacaacgtacgcgctcttcctaacgactacgcaaataaataaaaccgaaataaaaccacgtaaccgaaaaaaaaaaacccgacgacccccgacccaaatatactacgacgaacgactacccgcgctcgacgctcaacctaccataacccgcgaaaaaaaccgaaaccaaaaatccgaaaaaacccgcgtcccgccaaatttcgctctacgaacgcaaatacgaccgaaccgccgtccttccgaacgcgaaacgaaacgcgcacctcgaaacgatctcgatactccttacctaaaaaatctcccgacttaatttcgacctcgttaaatcgaaatctccaaaaacaataaatttcaaccaaaaacgcgaaaacgaacgcctaaccgacgcgaacaaaaccgaaaacacaataaaatttataaaaccgaacgcccaaaaactaacgcgaaaaaaaccccacaactaaaatactcgatacccccgaacaatcgtaaattaattaaaaccgcaaaacctttcccgacccctcgaaaacgcaaaaatatccgaaatctacccgtttcttaaatccaacaaaacttttaaaccaaataaaccgataattctattta

SEQ ID NO: 15097 - DNA, 590 bp, Artificial Sequence
  chemically treated genomic DNA (Homo sapiens) CpG-island No: 15097
ttttagtttcgtagcgggttcgttttaatcgtttgttgattggtattttaggggaatgcggcggagagtggagtcggtggaaacgtagggtaacgtcgcgggggtttgtggggttggttttacggggcgggtttttgtcgtttttcgcgtattttcgtagtttgtcgtttatttcgtcgtcgttgatcgcgtcgatgtcgtcgaattttcggtttagttcgtcggagtcgtcgagtacgtacgcgtcgtcgggcgttagtagcgtatatagtagtaagggtatcgcggcgcggttcgtcgaattcgcggtcgtagttatagttttcgttcggcgttgttaggaagtcgagagtagttatttagttattgtgtgggttatatgatttcggcgtttagggaggcgggtttcgtcgtcgttacgatagatacgggtaggaggtcgttgatgttgacgtcgtcgtcgttattttgagtgcgggttaagggtttttgacgtagttggcggagtgttgagaaaagaagtagcgagtttttttttatcgttcgcgtgtttgtggttagttattggattttatatgtatttattgttg

SEQ ID NO: 15098 - DNA, 590 bp, Artificial Sequence
  chemically treated genomic DNA (Homo sapiens) CpG-island No: 15098
caacaataaatacatataaaatccaataactaaccacaaacacgcgaacgataaaaaaaaactcgctacttcttttctcaacactccgccaactacgtcaaaaacccttaacccgcactcaaaataacgacgacgacgtcaacatcaacgacctcctacccgtatctatcgtaacgacgacgaaacccgcctccctaaacgccgaaatcatataacccacacaataactaaataactactctcgacttcctaacaacgccgaacgaaaactataactacgaccgcgaattcgacgaaccgcgccgcgatacccttactactatatacgctactaacgcccgacgacgcgtacgtactcgacgactccgacgaactaaaccgaaaattcgacgacatcgacgcgatcaacgacgacgaaataaacgacaaactacgaaaatacgcgaaaaacgacaaaaacccgccccgtaaaaccaaccccacaaacccccgcgacgttaccctacgtttccaccgactccactctccgccgcattcccctaaaataccaatcaacaaacgattaaaacgaacccgctacgaaactaaaa

SEQ ID NO: 15099 - DNA, 590 bp, Artificial Sequence
  chemically treated genomic DNA (Homo sapiens) CpG-island No: 15099
tagtagtaagtatatgtgaaatttagtagttgattatagatacgcgagcgataagaaaaagttcgttgtttttttttttaatatttcgttagttgcgttagaggtttttgattcgtatttaaaatggcggcggcggcgttagtattagcggttttttgttcgtatttatcgtggcggcgacgggattcgtttttttgggcgtcggagttatgtgatttatataatggttgagtggttattttcggttttttggtaacgtcgagcgaaagttatgattgcggtcgcgggttcggcgggtcgcgtcgcggtgtttttgttgttgtgtgcgttgttggcgttcggcggcgcgtacgtgttcgacgatttcgacgggttgggtcgggagttcgacggtatcggcgcggttagcggcggcggggtgagcggtaagttgcggggatacgcggggggcggtaagagttcgtttcgtggggttagttttataagttttcgcggcgttgttttgcgtttttatcggttttatttttcgtcgtatttttttagggtgttagttagtaggcggttggggcgggttcgttgcggggttgggg

SEQ ID NO: 15100 - DNA, 590 bp, Artificial Sequence
  chemically treated genomic DNA (Homo sapiens) CpG-island No: 15100
ccccaaccccgcaacgaacccgccccaaccgcctactaactaacaccctaaaaaaatacgacgaaaaataaaaccgataaaaacgcaaaacaacgccgcgaaaacttataaaactaaccccacgaaacgaactcttaccgccccccgcgtatccccgcaacttaccgctcaccccgccgccgctaaccgcgccgataccgtcgaactcccgacccaacccgtcgaaatcgtcgaacacgtacgcgccgccgaacgccaacaacgcacacaacaacaaaaacaccgcgacgcgacccgccgaacccgcgaccgcaatcataactttcgctcgacgttaccaaaaaaccgaaaataaccactcaaccattatataaatcacataactccgacgcccaaaaaaacgaatcccgtcgccgccacgataaatacgaacaaaaaaccgctaatactaacgccgccgccgccattttaaatacgaatcaaaaacctctaacgcaactaacgaaatattaaaaaaaaaaacaacgaactttttcttatcgctcgcgtatctataatcaactactaaatttcacatatacttactacta

SEQ ID NO: 15101 - DNA, 714 bp, Artificial Sequence
  chemically treated genomic DNA (Homo sapiens) CpG-island No: 15101
gttatagttattttcgtttgttttttttcgtcgggttcgttagtgttatgggagggggcggtagtcgtaagggcgttttttggtcgttatttcgtcggtcggcggcgcgaggggtaggttcgggatttatcgggtggaggtgttttttcgtatatcgtatattatgtatttgaaggtttcggcgttgtttcggaaggtgtagacgttatagttttagtaatttttattcgaggacggtttcggttgtcgtttcggtttgtaggatataattcggatacgacgcggcgcggggttattagtaggtcgcgttcggtgttcgggtttcgcggtcgttttcgtttcgtttttcgttttaattttgcgattttcgtttcgcgggttttcggcgcgtcgcgtttcggttgagggggaagggagttaggaagaggtagggcgcgagcgcggtcgtagtcgtcgtcgttatagtcgttttgatattcgggcggtcgtttcggtcgtcgtcgttatcgcggttttattgtggggcggtcggcgtcggtttttttaagcggtagtattcgtatattagcggcgttgttttcgtgttcgtttcggtgttcgggcggttagcgaggcggttattcgaagttttgtacgagggttttgtcgttcgtatagttcgggtttcggggttcgggcgttgttatttggtggggttttttttgttttttatgg

SEQ ID NO: 15102 - DNA, 714 bp, Artificial Sequence
  chemically treated genomic DNA (Homo sapiens) CpG-island No: 15102
ccataaaaaacaaaaaaaaccccaccaaataacaacgcccgaaccccgaaacccgaactatacgaacgacaaaaccctcgtacaaaacttcgaataaccgcctcgctaaccgcccgaacaccgaaacgaacacgaaaacaacgccgctaatatacgaatactaccgcttaaaaaaaccgacgccgaccgccccacaataaaaccgcgataacgacgacgaccgaaacgaccgcccgaatatcaaaacgactataacgacgacgactacgaccgcgctcgcgccctacctcttcctaactcccttccccctcaaccgaaacgcgacgcgccgaaaacccgcgaaacgaaaatcgcaaaattaaaacgaaaaacgaaacgaaaacgaccgcgaaacccgaacaccgaacgcgacctactaataaccccgcgccgcgtcgtatccgaattatatcctacaaaccgaaacgacaaccgaaaccgtcctcgaataaaaattactaaaactataacgtctacaccttccgaaacaacgccgaaaccttcaaatacataatatacgatatacgaaaaaacacctccacccgataaatcccgaacctacccctcgcgccgccgaccgacgaaataacgaccaaaaaacgcccttacgactaccgccccctcccataacactaacgaacccgacgaaaaaaaacaaacgaaaataactataac

SEQ ID NO: 15103 - DNA, 714 bp, Artificial Sequence
  chemically treated genomic DNA (Homo sapiens) CpG-island No: 15103
ttatgggagataagaagagttttattaggtaatagcgttcgggtttcggggttcggattgtgcgggcggtagggttttcgtgtagggtttcgggtggtcgtttcgttagtcgttcgggtatcggggcgagtacgggggtagcgtcgttggtgtgcgagtgttgtcgtttgagggggtcggcgtcggtcgttttataatggagtcgcgatggcggcggcgatcggagcggtcgttcgggtgttagagcggttgtggcggcggcgattgcggtcgcgttcgcgttttgtttttttttgattttttttttttttagtcggagcgcggcgcgtcgagggttcgcggggcgggggtcgtagaattggggcggggggcggggcgggggcggtcgcggggttcgggtatcgggcgcggtttgttggtgatttcgcgtcgcgtcgtgttcgggttgtgttttgtaggtcgaagcggtagtcgaagtcgttttcggatgagggttattgggattgtagcgtttgtatttttcggaatagcgtcgaggtttttaagtgtatgatgtgcgatgtgcggaagggtatttttattcggtgagtttcgggtttgtttttcgcgtcgtcggtcggcggggtggcgattagaggacgtttttgcggttgtcgtttttttttatgatattggcggattcggcgggaggaggtagacggaggtggttgtggt

SEQ ID NO: 15104 - DNA, 714 bp, Artificial Sequence
  chemically treated genomic DNA (Homo sapiens) CpG-island No: 15104
accacaaccacctccgtctacctcctcccgccgaatccgccaatatcataaaaaaaaacgacaaccgcaaaaacgtcctctaatcgccaccccgccgaccgacgacgcgaaaaacaaacccgaaactcaccgaataaaaatacccttccgcacatcgcacatcatacacttaaaaacctcgacgctattccgaaaaatacaaacgctacaatcccaataaccctcatccgaaaacgacttcgactaccgcttcgacctacaaaacacaacccgaacacgacgcgacgcgaaatcaccaacaaaccgcgcccgatacccgaaccccgcgaccgcccccgccccgccccccgccccaattctacgacccccgccccgcgaaccctcgacgcgccgcgctccgactaaaaaaaaaaaaaatcaaaaaaaaacaaaacgcgaacgcgaccgcaatcgccgccgccacaaccgctctaacacccgaacgaccgctccgatcgccgccgccatcgcgactccattataaaacgaccgacgccgaccccctcaaacgacaacactcgcacaccaacgacgctacccccgtactcgccccgatacccgaacgactaacgaaacgaccacccgaaaccctacacgaaaaccctaccgcccgcacaatccgaaccccgaaacccgaacgctattacctaataaaactcttcttatctcccataa

SEQ ID NO: 15105 - DNA, 1265 bp, Artificial Sequence
  chemically treated genomic DNA (Homo sapiens) CpG-island No: 15105
  unsure (702)
ttcgcggggcgtcgaggttggggttatggttaggtcgggggcggaggcggtttcgcgcggttgtgagtcgaggttcgggcggcgcggggggcggggaggtagcgggaggaggggatgcggagggtttttcggcggcggcgagcgggcgagaagggaggagcggcgcgagcggtcggagcggcgtagggttcgaagcgtgtatggcgcgttttgagtcgggttttcgcgggttttttcggagcgtttttcgggcgtcgcggtttttaggcgggtttttttgggtcggttgtttttgagtttcggcgttggatttttggatgttttatttttcgggagaagtttgtttgcgtcggggtagaatcgcggtagcgttgcgtcggatttcgtttttcgtttagtcgtttcgcgtcggtcgcggtgggttcgtagtcggcgacgaggagtttggggtttgcgaagcgggcgcgatagtttttcgggtcggtaggtttcggtcggtttcgtttcgtttgcgggaaagggagaggcgagaggggaagggtcgtatcgtaggagtttttttttgattcggatttcgttttttgcgcggacgcgtcgaaggttcggttcggttttcgtcggggttacgtatttattttcgtcgcgagaggtgggggatgcgggtaacgggttttttcgggttttaggattttttttttcggngtttcggagttgttgtttcgttcgtcgttttttttttcgttttttttattttttattttatttttttatttttcgtaagaaaataatgttggttggcgttcgtattttttagtcgtttttagttcgttgcgaggaaagcgtattcgtagtgttttttcgtcgggattttcgtcgagtcgttttcgtcgtcgtcgagtttcgagagtagttgggtttcgtttaggcggaattagcgagcgtcgcgttcgggtattgtcggttcgaggaggtatcgttcgtaaggatattatttcgtttcgtttcgttcgtaatttcggttttcgtcgagttcgacgcgagttaggatttcggacgttttttcgcgtgcggcgtagtagtagttagattagtttttgcgattttatttcggaggtaattttatttcggatttgggatttttgacgcggatttttagttattttttatttcggggttgtgtttttttttttcgtttaggacgggggtgttaagatgtttcgttgtagcgtagggtttcgggtcgttttcgacgtgtgattttagtt

SEQ ID NO: 15106 - DNA, 1265 bp, Artificial Sequence
  chemically treated genomic DNA (Homo sapiens) CpG-island No: 15106
  unsure (564)
aactaaaatcacacgtcgaaaacgacccgaaaccctacgctacaacgaaacatcttaacacccccgtcctaaacgaaaaaaaaaaacacaaccccgaaataaaaaataactaaaaatccgcgtcaaaaatcccaaatccgaaataaaattacctccgaaataaaatcgcaaaaactaatctaactactactacgccgcacgcgaaaaaacgtccgaaatcctaactcgcgtcgaactcgacgaaaaccgaaattacgaacgaaacgaaacgaaataatatccttacgaacgatacctcctcgaaccgacaatacccgaacgcgacgctcgctaattccgcctaaacgaaacccaactactctcgaaactcgacgacgacgaaaacgactcgacgaaaatcccgacgaaaaaacactacgaatacgctttcctcgcaacgaactaaaaacgactaaaaaatacgaacgccaaccaacattattttcttacgaaaaataaaaaaataaaataaaaaataaaaaaaacgaaaaaaaaaacgacgaacgaaacaacaactccgaaacnccgaaaaaaaaaatcctaaaacccgaaaaaacccgttacccgcatcccccacctctcgcgacgaaaataaatacgtaaccccgacgaaaaccgaaccgaaccttcgacgcgtccgcgcaaaaaacgaaatccgaatcaaaaaaaaactcctacgatacgacccttcccctctcgcctctccctttcccgcaaacgaaacgaaaccgaccgaaacctaccgacccgaaaaactatcgcgcccgcttcgcaaaccccaaactcctcgtcgccgactacgaacccaccgcgaccgacgcgaaacgactaaacgaaaaacgaaatccgacgcaacgctaccgcgattctaccccgacgcaaacaaacttctcccgaaaaataaaacatccaaaaatccaacgccgaaactcaaaaacaaccgacccaaaaaaacccgcctaaaaaccgcgacgcccgaaaaacgctccgaaaaaacccgcgaaaacccgactcaaaacgcgccatacacgcttcgaaccctacgccgctccgaccgctcgcgccgctcctcccttctcgcccgctcgccgccgccgaaaaaccctccgcatcccctcctcccgctacctccccgccccccgcgccgcccgaacctcgactcacaaccgcgcgaaaccgcctccgcccccgacctaaccataaccccaacctcgacgccccgcgaa

SEQ ID NO: 15107 - DNA, 1265 bp, Artificial Sequence
  chemically treated genomic DNA (Homo sapiens) CpG-island No: 15107
  unsure (564)
ggttagggttatacgtcgggggcggttcggggttttgcgttgtagcggggtattttggtattttcgttttgagcggaggaggagggtatagtttcgaggtgagaagtagttgaggattcgcgttagaagttttaggttcgaaatggagttgttttcgaggtggggtcgtagggattggtttggttgttgttgcgtcgtacgcggagagacgttcgggattttggttcgcgtcgagttcgacgagggtcggagttgcggacgagacgggacggagtggtgtttttgcgggcggtgttttttcgggtcggtagtgttcgggcgcggcgttcgttgatttcgtttaagcggagtttagttgttttcggggttcggcggcggcgagggcggttcggcgggggtttcggcgaagagatattgcgggtgcgtttttttcgtagcggattgggagcgattgggaggtgcgggcgttagttagtattatttttttacgaggggtggggaggtgggatgggaggtggagaggacgggggagggggcgacgggcggagtaatagtttcggagtntcgggggggagggttttggagttcgggggggttcgttgttcgtattttttatttttcgcggcgagagtggatgcgtggtttcggcgaaagtcgagtcgagttttcggcgcgttcgcgtagggggcggggttcgggttagggaagagtttttgcggtgcggttttttttttttcgtttttttttttttcgtaaacggagcggggtcggtcgggatttgtcggttcggagagttgtcgcgttcgtttcgtaagttttaagtttttcgtcgtcggttgcgggtttatcgcggtcggcgcggaacgattaggcggaggacggaattcggcgtagcgttgtcgcggttttgtttcgacgtaggtaggtttttttcggggagtaaggtatttagagatttagcgtcggggtttagaagtagtcggtttagaggggttcgtttgagagtcgcggcgttcgagaggcgtttcgggggggttcgcgggagttcggtttagggcgcgttatgtacgtttcgggttttgcgtcgtttcggtcgttcgcgtcgttttttttttttcgttcgttcgtcgtcgtcggagagtttttcgtatttttttttttcgttgttttttcgtttttcgcgtcgttcgggtttcggtttatagtcgcgcgaggtcgttttcgttttcggtttggttatggttttagtttcggcgtttcgcggg

SEQ ID NO: 15108 - DNA, 1265 bp, Artificial Sequence
  chemically treated genomic DNA (Homo sapiens) CpG-island No: 15108
  unsure (702)
cccgcgaaacgccgaaactaaaaccataaccaaaccgaaaacgaaaacgacctcgcgcgactataaaccgaaacccgaacgacgcgaaaaacgaaaaaacaacgaaaaaaaaaaatacgaaaaactctccgacgacgacgaacgaacgaaaaaaaaaaaacgacgcgaacgaccgaaacgacgcaaaacccgaaacgtacataacgcgccctaaaccgaactcccgcgaacccccccgaaacgcctctcgaacgccgcgactctcaaacgaacccctctaaaccgactacttctaaaccccgacgctaaatctctaaataccttactccccgaaaaaaacctacctacgtcgaaacaaaaccgcgacaacgctacgccgaattccgtcctccgcctaatcgttccgcgccgaccgcgataaacccgcaaccgacgacgaaaaacttaaaacttacgaaacgaacgcgacaactctccgaaccgacaaatcccgaccgaccccgctccgtttacgaaaaaaaaaaaaacgaaaaaaaaaaaaccgcaccgcaaaaactcttccctaacccgaaccccgccccctacgcgaacgcgccgaaaactcgactcgactttcgccgaaaccacgcatccactctcgccgcgaaaaataaaaaatacgaacaacgaacccccccgaactccaaaaccctcccccccganactccgaaactattactccgcccgtcgccccctcccccgtcctctccacctcccatcccacctccccacccctcgtaaaaaaataatactaactaacgcccgcacctcccaatcgctcccaatccgctacgaaaaaaacgcacccgcaatatctcttcgccgaaacccccgccgaaccgccctcgccgccgccgaaccccgaaaacaactaaactccgcttaaacgaaatcaacgaacgccgcgcccgaacactaccgacccgaaaaaacaccgcccgcaaaaacaccactccgtcccgtctcgtccgcaactccgaccctcgtcgaactcgacgcgaaccaaaatcccgaacgtctctccgcgtacgacgcaacaacaaccaaaccaatccctacgaccccacctcgaaaacaactccatttcgaacctaaaacttctaacgcgaatcctcaactacttctcacctcgaaactataccctcctcctccgctcaaaacgaaaataccaaaataccccgctacaacgcaaaaccccgaaccgcccccgacgtataaccctaacc

SEQ ID NO: 15109 - DNA, 546 bp, Artificial Sequence
  chemically treated genomic DNA (Homo sapiens) CpG-island No: 15109
gcgtagcgacgacgacgacgatttttcgttgagcggtgacgattttttggtcgggggtttcggttttagttttcgttttaagttcgtttggtaggagcgcggcggcgacgattgcggtcgcggtagtcgtcggtagcggcggggcgcggttagcgggggtagtattcgggcgttttttgcgggcggcggcggcggttcggcggcggcggttgtttcggcgggcgggacggaggtgcgttttcgttcggtggaggtgggtttggaggagcggcggggtaaggggcgcgcggtcgacgagttggaggtcggcgtcgtcgagggcggcgaggggttcggggatggcggtagttcggcggattcgggttcgggcgcggggttcggcgcggtgttgtttttgggcgtttgttgtttggcgttgttgtagatatttcgttttaagaagttttcgtcggataaattggagcggttgtattagcgttatttttttcgtttgaattagagtagttttattatgtttatggtcgtgttggtgttcgtgtgtttggt

SEQ ID NO: 15110 - DNA, 546 bp, Artificial Sequence
  chemically treated genomic DNA (Homo sapiens) CpG-island No: 15110
accaaacacacgaacaccaacacgaccataaacataataaaactactctaattcaaacgaaaaaaataacgctaatacaaccgctccaatttatccgacgaaaacttcttaaaacgaaatatctacaacaacgccaaacaacaaacgcccaaaaacaacaccgcgccgaaccccgcgcccgaacccgaatccgccgaactaccgccatccccgaacccctcgccgccctcgacgacgccgacctccaactcgtcgaccgcgcgccccttaccccgccgctcctccaaacccacctccaccgaacgaaaacgcacctccgtcccgcccgccgaaacaaccgccgccgccgaaccgccgccgccgcccgcaaaaaacgcccgaatactacccccgctaaccgcgccccgccgctaccgacgactaccgcgaccgcaatcgtcgccgccgcgctcctaccaaacgaacttaaaacgaaaactaaaaccgaaacccccgaccaaaaaatcgtcaccgctcaacgaaaaatcgtcgtcgtcgtcgctacgc

SEQ ID NO: 15111 - DNA, 546 bp, Artificial Sequence
  chemically treated genomic DNA (Homo sapiens) CpG-island No: 15111
attaggtatacgagtattagtacggttatgagtatggtgaggttgttttggtttaggcggaagaagtagcgttggtatagtcgttttagtttgttcgacgggaattttttggagcggaatatttgtagtaacgttaggtagtaggcgtttagggatagtatcgcgtcgggtttcgcgttcgagttcgagttcgtcgagttgtcgttattttcggatttttcgtcgttttcgacggcgtcggtttttagttcgtcggtcgcgcgttttttgtttcgtcgtttttttagatttatttttatcgagcgagggcgtattttcgtttcgttcgtcgaggtagtcgtcgtcgtcgagtcgtcgtcgtcgttcgtagggggcgttcgggtgttgttttcgttggtcgcgtttcgtcgttgtcggcggttgtcgcgatcgtagtcgtcgtcgtcgcgtttttgttaggcggatttggagcggaagttgaagtcgaagttttcggttagggggtcgttatcgtttagcggaggatcgtcgtcgtcgtcgttgcgt

SEQ ID NO: 15112 - DNA, 546 bp, Artificial Sequence
  chemically treated genomic DNA (Homo sapiens) CpG-island No: 15112
acgcaacgacgacgacgacgatcctccgctaaacgataacgaccccctaaccgaaaacttcgacttcaacttccgctccaaatccgcctaacaaaaacgcgacgacgacgactacgatcgcgacaaccgccgacaacgacgaaacgcgaccaacgaaaacaacacccgaacgccccctacgaacgacgacgacgactcgacgacgacgactacctcgacgaacgaaacgaaaatacgccctcgctcgataaaaataaatctaaaaaaacgacgaaacaaaaaacgcgcgaccgacgaactaaaaaccgacgccgtcgaaaacgacgaaaaatccgaaaataacgacaactcgacgaactcgaactcgaacgcgaaacccgacgcgatactatccctaaacgcctactacctaacgttactacaaatattccgctccaaaaaattcccgtcgaacaaactaaaacgactataccaacgctacttcttccgcctaaaccaaaacaacctcaccatactcataaccgtactaatactcgtatacctaat

SEQ ID NO: 15113 - DNA, 778 bp, Artificial Sequence
  chemically treated genomic DNA (Homo sapiens) CpG-island No: 15113
cgggttaaggcgggggtgtttgagattcgttttcggggcgtaattttagcgcgcggggtttcgcggcggcgtcgggtcgggggttggggttggagggcgagtcgcgttgcggggtcggggtgtcggggatttaggagcgcgcggggttcggcgggggcgcgggcgcgtttatagtattatggtcggtaggtggtgcgcggcggcggcggcggcggcggcggcggcggcggcgagcgcgggcgcgtgcgcgtgcggggcgggtagcgcgggcgagtgtgtttgtagcgcggtgttgggcggtcggtgtcgcgcgtttttttggtgggcgcgtaggtcggttagttgcgagtaggcgttttggtatatttggtatttgtaggggcgttcgttcgtgtgtaggcgtacgtggttgcgtagcgtggacgattggttgaagcggcggttgtagaagcggtatacgaagggtttgtttagcgtgtggatgcgtatgtgcgagcgtaggttgttgcgcgagttgaagtcgcggtggtagatgacgtatcgtatgcggttcgcggggttagtcgtcgagttcgtcgggtggaagttttttggtcgcggggcggggcggggcgggggaagggagacggagaaggggagagagtagtttcgttagaatcggcgtttcgtagttcgggtttttagcgtttttagttcggggtcggttcgtttttgagggtgggtgttgtttggacggtggtagacggattggagggatagcgaagggtatttcggttgg

SEQ ID NO: 15114 - DNA, 778 bp, Artificial Sequence
  chemically treated genomic DNA (Homo sapiens) CpG-island No: 15114
ccaaccgaaatacccttcgctatccctccaatccgtctaccaccgtccaaacaacacccaccctcaaaaacgaaccgaccccgaactaaaaacgctaaaaacccgaactacgaaacgccgattctaacgaaactactctctccccttctccgtctcccttcccccgccccgccccgccccgcgaccaaaaaacttccacccgacgaactcgacgactaaccccgcgaaccgcatacgatacgtcatctaccaccgcgacttcaactcgcgcaacaacctacgctcgcacatacgcatccacacgctaaacaaacccttcgtataccgcttctacaaccgccgcttcaaccaatcgtccacgctacgcaaccacgtacgcctacacacgaacgaacgcccctacaaataccaaatataccaaaacgcctactcgcaactaaccgacctacgcgcccaccaaaaaaacgcgcgacaccgaccgcccaacaccgcgctacaaacacactcgcccgcgctacccgccccgcacgcgcacgcgcccgcgctcgccgccgccgccgccgccgccgccgccgccgccgcgcaccacctaccgaccataatactataaacgcgcccgcgcccccgccgaaccccgcgcgctcctaaatccccgacaccccgaccccgcaacgcgactcgccctccaaccccaacccccgacccgacgccgccgcgaaaccccgcgcgctaaaattacgccccgaaaacgaatctcaaacacccccgccttaacccg

SEQ ID NO: 15115 - DNA, 778 bp, Artificial Sequence
  chemically treated genomic DNA (Homo sapiens) CpG-island No: 15115
ttagtcggggtatttttcgttgtttttttagttcgtttgttatcgtttaagtagtatttatttttaaggacggatcggtttcgggttgggggcgttgagggttcgggttgcggggcgtcggttttaacggggttgtttttttttttttttcgttttttttttttcgtttcgtttcgtttcgcggttagaggatttttattcggcggattcggcggttggtttcgcgggtcgtatgcgatgcgttatttgttatcgcggttttaattcgcgtagtaatttgcgttcgtatatgcgtatttatacgttggataagtttttcgtgtgtcgtttttgtaatcgtcgttttagttagtcgtttacgttgcgtaattacgtgcgtttgtatacgggcgagcgtttttataagtgttaggtgtgttagagcgtttattcgtagttggtcggtttgcgcgtttattagaagagcgcgcggtatcggtcgtttagtatcgcgttgtaggtatattcgttcgcgttgttcgtttcgtacgcgtacgcgttcgcgttcgtcgtcgtcgtcgtcgtcgtcgtcgtcgtcgtcgcgtattatttgtcggttatggtgttgtgagcgcgttcgcgttttcgtcgggtttcgcgcgtttttgggttttcggtatttcggtttcgtagcgcgattcgttttttagttttaattttcggttcggcgtcgtcgcggagtttcgcgcgttggggttgcgtttcggaggcggattttaggtattttcgttttggttcg

SEQ ID NO: 15116 - DNA, 778 bp, Artificial Sequence
  chemically treated genomic DNA (Homo sapiens) CpG-island No: 15116
cgaaccaaaacgaaaatacctaaaatccgcctccgaaacgcaaccccaacgcgcgaaactccgcgacgacgccgaaccgaaaattaaaactaaaaaacgaatcgcgctacgaaaccgaaataccgaaaacccaaaaacgcgcgaaacccgacgaaaacgcgaacgcgctcacaacaccataaccgacaaataatacgcgacgacgacgacgacgacgacgacgacgacgacgaacgcgaacgcgtacgcgtacgaaacgaacaacgcgaacgaatatacctacaacgcgatactaaacgaccgataccgcgcgctcttctaataaacgcgcaaaccgaccaactacgaataaacgctctaacacacctaacacttataaaaacgctcgcccgtatacaaacgcacgtaattacgcaacgtaaacgactaactaaaacgacgattacaaaaacgacacacgaaaaacttatccaacgtataaatacgcatatacgaacgcaaattactacgcgaattaaaaccgcgataacaaataacgcatcgcatacgacccgcgaaaccaaccgccgaatccgccgaataaaaatcctctaaccgcgaaacgaaacgaaacgaaaaaaaaaaaacgaaaaaaaaaaaaaaacaaccccgttaaaaccgacgccccgcaacccgaaccctcaacgcccccaacccgaaaccgatccgtccttaaaaataaatactacttaaacgataacaaacgaactaaaaaaacaacgaaaaataccccgactaa

SEQ ID NO: 15117 - DNA, 1112 bp, Artificial Sequence
  chemically treated genomic DNA (Homo sapiens) CpG-island No: 15117
gggaggggtcggcgggggcgtcggggtcgagcgacggggtcgtcggggtcggtttttgagtcgggtgggttgcggagttgtttggtggttcgcgttttggtttggtttatggggaaattgaggtgtatcgagcgtcgggagagtttaggttggcgcgagtagtagcgaggtcgggtattttagtcgcgtttcgcgtatcgttaggacgggaatgggggtcgtcgggaggagggattgcgtcgggtttcgacggttggatttatcgtcggagaaggattgcgttagtatttcggcggtgaaggttgttttggggttggcgtggtggtttttgttttcgaagagttgtttttcgagtacgttgcgttagcggtcgtataggaagttgtgtaggatgtcggaggtgataatttcggttagcgttagtttcggcgtttttagttcggttttgagtattagggttttagtcgggagtacggagtttattatgggcggttcggagtttttcggcgtcgggggacggtcgggtcgacgggggaggtgggcgggcgagaggggagtttaaggggcgagaggagagcgttgcgatggagaaggaattagagtagggggaggacggagaggaggaggacgtaggagggagcgggaggtgagggggcgattgggaggaaagcgaacgagggggagaggggaagagagatggtgaaatttgtagagatggtaaaggcggcgcggagggtggagagacgcgggtggaggcggaggcgggtgcggggggtgtagggtgggtgagaggcgggtggttgtagggaagcggtagtaaggggtttaggcgcgcgttagtttttcgtatattcggtcggggtcgttttttttttggtaaaattttagcgtttttataggagtcgtagtgatttttttaattggttattaatgattttttgacgtcggaggatagatttgttgtattcggttgggttcgaggagttttcgtcgcgagagcgcgaggggcgggggcgcgcggatcgttttaaatagtatttttttattttttttttttttttttggttttttttttttttttttgttttttttttttttttcgtgggaagcgt

SEQ ID NO: 15118 - DNA, 1112 bp, Artificial Sequence
  chemically treated genomic DNA (Homo sapiens) CpG-island No: 15118
acgcttcccacgaaaaaaaaaaaaaaaacaaaaaaaaaaaaaaaaaaccaaaaaaaaaaaaaaaaaataaaaaaatactatttaaaacgatccgcgcgcccccgcccctcgcgctctcgcgacgaaaactcctcgaacccaaccgaatacaacaaatctatcctccgacgtcaaaaaatcattaataaccaattaaaaaaatcactacgactcctataaaaacgctaaaattttaccaaaaaaaaaacgaccccgaccgaatatacgaaaaactaacgcgcgcctaaaccccttactaccgcttccctacaaccacccgcctctcacccaccctacaccccccgcacccgcctccgcctccacccgcgtctctccaccctccgcgccgcctttaccatctctacaaatttcaccatctctcttcccctctccccctcgttcgctttcctcccaatcgccccctcacctcccgctccctcctacgtcctcctcctctccgtcctccccctactctaattccttctccatcgcaacgctctcctctcgccccttaaactcccctctcgcccgcccacctcccccgtcgacccgaccgtcccccgacgccgaaaaactccgaaccgcccataataaactccgtactcccgactaaaaccctaatactcaaaaccgaactaaaaacgccgaaactaacgctaaccgaaattatcacctccgacatcctacacaacttcctatacgaccgctaacgcaacgtactcgaaaaacaactcttcgaaaacaaaaaccaccacgccaaccccaaaacaaccttcaccgccgaaatactaacgcaatccttctccgacgataaatccaaccgtcgaaacccgacgcaatccctcctcccgacgacccccattcccgtcctaacgatacgcgaaacgcgactaaaatacccgacctcgctactactcgcgccaacctaaactctcccgacgctcgatacacctcaatttccccataaaccaaaccaaaacgcgaaccaccaaacaactccgcaacccacccgactcaaaaaccgaccccgacgaccccgtcgctcgaccccgacgcccccgccgacccctccc

SEQ ID NO: 15119 - DNA, 1112 bp, Artificial Sequence
  chemically treated genomic DNA (Homo sapiens) CpG-island No: 15119
gcgttttttacggggagagaaggaaaaataggaggggggaggaaggattaggaaggggagagaggagtggaggggtattgtttggagcggttcgcgcgttttcgtttttcgcgttttcgcgacgaaggtttttcgagtttagtcgggtataataagtttgtttttcgacgttagggggttattaataattaattaggagggttattgcggtttttataaaggcgttgagattttgttaaggggaagacggtttcggtcgagtgtgcgagaggttagcgcgcgtttgagttttttgttgtcgtttttttgtaattattcgttttttatttattttgtatttttcgtattcgttttcgtttttattcgcgtttttttatttttcgcgtcgtttttgttatttttatagattttattatttttttttttttttttttttcgttcgttttttttttagtcgtttttttatttttcgtttttttttgcgtttttttttttttcgttttttttttgttttggttttttttttatcgtagcgtttttttttcgttttttgggtttttttttcgttcgtttatttttttcgtcggttcggtcgtttttcggcgtcggggagtttcgggtcgtttatgatgggtttcgtgttttcggttgaggttttggtgtttaagatcgggttgaaggcgtcgggattggcgttggtcgaggttattattttcgatattttgtatagttttttgtacggtcgttggcgtaacgtgttcggggagtagtttttcgaggataagagttattacgttagttttaagatagtttttatcgtcgaggtgttggcgtagttttttttcggcggtgagtttagtcgtcggagttcggcgtaattttttttttcggcgatttttattttcgttttggcgatgcgcgagacgcggttgggatattcggtttcgttgttattcgcgttaatttgggttttttcggcgttcggtgtattttagtttttttatgggttaaattaggacgcgagttattaagtagtttcgtagtttattcggtttaaggatcgatttcggcgatttcgtcgttcggtttcgacgttttcgtcggtttttttt

SEQ ID NO: 15120 - DNA, 1112 bp, Artificial Sequence
  chemically treated genomic DNA (Homo sapiens) CpG-island No: 15120
aaaaaaaaccgacgaaaacgtcgaaaccgaacgacgaaatcgccgaaatcgatccttaaaccgaataaactacgaaactacttaataactcgcgtcctaatttaacccataaaaaaactaaaatacaccgaacgccgaaaaaacccaaattaacgcgaataacaacgaaaccgaatatcccaaccgcgtctcgcgcatcgccaaaacgaaaataaaaatcgccgaaaaaaaaaattacgccgaactccgacgactaaactcaccgccgaaaaaaaactacgccaacacctcgacgataaaaactatcttaaaactaacgtaataactcttatcctcgaaaaactactccccgaacacgttacgccaacgaccgtacaaaaaactatacaaaatatcgaaaataataacctcgaccaacgccaatcccgacgccttcaacccgatcttaaacaccaaaacctcaaccgaaaacacgaaacccatcataaacgacccgaaactccccgacgccgaaaaacgaccgaaccgacgaaaaaaataaacgaacgaaaaaaaaacccaaaaaacgaaaaaaaaacgctacgataaaaaaaaaaccaaaacaaaaaaaaaacgaaaaaaaaaaaaacgcaaaaaaaaacgaaaaataaaaaaacgactaaaaaaaaaacgaacgaaaaaaaaaaaaaaaaaaaaataataaaatctataaaaataacaaaaacgacgcgaaaaataaaaaaacgcgaataaaaacgaaaacgaatacgaaaaatacaaaataaataaaaaacgaataattacaaaaaaacgacaacaaaaaactcaaacgcgcgctaacctctcgcacactcgaccgaaaccgtcttccccttaacaaaatctcaacgcctttataaaaaccgcaataaccctcctaattaattattaataaccccctaacgtcgaaaaacaaacttattatacccgactaaactcgaaaaaccttcgtcgcgaaaacgcgaaaaacgaaaacgcgcgaaccgctccaaacaatacccctccactcctctctccccttcctaatccttcctcccccctcctatttttccttctctccccgtaaaaaacgc

SEQ ID NO: 15121 - DNA, 577 bp, Artificial Sequence
  chemically treated genomic DNA (Homo sapiens) CpG-island No: 15121
ttcgtgttattttgttatttttcgcggggtttaggcgcggaatgtgttcgcgtaaaagtttttttttttcggtcgggtcggagtttttaggtttcgtcgtttttttcgttcgttggtcgttatttggcgatttttttaatatttatgggcgttaatagagaggtttttagtatatcggtttattgtgggcggttcgtaggatttgaataggtttcggtttttttttttcggcgcggtttttcgaggggtcgggttaggagtgaatggtttcgtttttcgtttcgcgtttttttttttttttagggagaatatttttattttttttttcgttgtcgtcgtcgttcgggtttttatttacgcggtttcggtttcgggcggaacgaattaatttgtcgcggtttttcggaggttattttcgtcgttcgggtgttttttttttttgagtttacgggagtggagagagggtcgtcgcggtaggtcgacggttttacggagggatattgaaggggaagtggaggagaagagtaggggcgattcggaggggtggttgggtcggggcgggtaagatagttttagg

SEQ ID NO: 15122 - DNA, 577 bp, Artificial Sequence
  chemically treated genomic DNA (Homo sapiens) CpG-island No: 15122
cctaaaactatcttacccgccccgacccaaccacccctccgaatcgcccctactcttctcctccacttccccttcaatatccctccgtaaaaccgtcgacctaccgcgacgaccctctctccactcccgtaaactcaaaaaaaaaaaacacccgaacgacgaaaataacctccgaaaaaccgcgacaaattaattcgttccgcccgaaaccgaaaccgcgtaaataaaaacccgaacgacgacgacaacgaaaaaaaaaataaaaatattctccctaaaaaaaaaaaaaaacgcgaaacgaaaaacgaaaccattcactcctaacccgacccctcgaaaaaccgcgccgaaaaaaaaaaaccgaaacctattcaaatcctacgaaccgcccacaataaaccgatatactaaaaacctctctattaacgcccataaatattaaaaaaatcgccaaataacgaccaacgaacgaaaaaaacgacgaaacctaaaaactccgacccgaccgaaaaaaaaaaacttttacgcgaacacattccgcgcctaaaccccgcgaaaaataacaaaataacacgaa

SEQ ID NO: 15123 - DNA, 577 bp, Artificial Sequence
  chemically treated genomic DNA (Homo sapiens) CpG-island No: 15123
tttgagattgttttgttcgtttcggtttagttattttttcgggtcgtttttgttttttttttttattttttttttaatgttttttcgtggggtcgtcggtttgtcgcggcggttttttttttattttcgtgggtttaggggaagagggtattcgggcggcgaggatgattttcgaagagtcgcggtaaattgattcgtttcgttcggagtcggggtcgcgtgaatgggggttcgggcggcggcggtagcggagaagaggataaagatgttttttttgaaagggggagggggcgcggagcgggaagcggggttatttatttttggttcggtttttcgggaagtcgcgtcgaagaaagggggtcgaggtttatttaagttttacgagtcgtttataatggatcgatatattgagggtttttttattaacgtttatgaatattaaagagatcgttaagtggcggttagcgggcgaggggggcgacggagtttgagagtttcggttcggtcgaggggagggggtttttgcgcgagtatatttcgcgtttgggtttcgcggaaaatgataaaataatacggg

SEQ ID NO: 15124 - DNA, 577 bp, Artificial Sequence
  chemically treated genomic DNA (Homo sapiens) CpG-island No: 15124
cccgtattattttatcattttccgcgaaacccaaacgcgaaatatactcgcgcaaaaaccccctcccctcgaccgaaccgaaactctcaaactccgtcgcccccctcgcccgctaaccgccacttaacgatctctttaatattcataaacgttaataaaaaaaccctcaatatatcgatccattataaacgactcgtaaaacttaaataaacctcgaccccctttcttcgacgcgacttcccgaaaaaccgaaccaaaaataaataaccccgcttcccgctccgcgccccctccccctttcaaaaaaaacatctttatcctcttctccgctaccgccgccgcccgaacccccattcacgcgaccccgactccgaacgaaacgaatcaatttaccgcgactcttcgaaaatcatcctcgccgcccgaataccctcttcccctaaacccacgaaaataaaaaaaaaaccgccgcgacaaaccgacgaccccacgaaaaaacattaaaaaaaaaataaaaaaaaaaaacaaaaacgacccgaaaaaataactaaaccgaaacgaacaaaacaatctcaaa

SEQ ID NO: 15125 - DNA, 860 bp, Artificial Sequence
  chemically treated genomic DNA (Homo sapiens) CpG-island No: 15125
tttttttcgggagtttcgcgcgtttttttttttcgaaatatttgtcgggggaaaatttattttggagggtagatcgcgttcgttttaagtttggcgaatttattaaaaagatattagcggcgggggtaggtttcgcgtaggtatcgatcggtcggaatgagttcgaggaagaaaaggcgaagaatgcgttcgcgtcgcgtttagacgtttattcgtttcgtttagtttttgcgttttagtttcgtatagggagaggggttttcgcgtcgtttcgtattgtttgtgagtttcgcggttcgcggtttagtcgtttttattcgggtttttcggtatagtttttcggtaatttttttttgtcggtgttgcgtttcgttttggttttttttgcgcgtaggttttcggtcgtttttttttttcgttcgttgtcgtcgcgcgtttagtattcgcgttttttttttttttttttttttttttttttttttttttagcgtttttttttttcgttggcgtttcgattttttttttagtttcgtatatttttttcgtttttttttcgtacgtttttttttggttttttgagttttaatttttcgtagtggtttaggaaatttttttttcgcgtggggttcgcgtcgtttttttttttttattttcgtttttcgtaagacggtttagggttttagggcgttttcgtcggcgcgtataaaggcgcggttggttgttaaggcgggtgggggcgaggtcgaaaaaaacggttttaatagacgtgattcggggttaggtttgcgcggggttgtcggcggagtggcggtttcggtttagtgaatggggatagcggtttttttttttattttattttt

SEQ ID NO: 15126 - DNA, 860 bp, Artificial Sequence
  chemically treated genomic DNA (Homo sapiens) CpG-island No: 15126
aaaaataaaataaaaaaaaaaaccgctatccccattcactaaaccgaaaccgccactccgccgacaaccccgcgcaaacctaaccccgaatcacgtctattaaaaccgtttttttcgacctcgcccccacccgccttaacaaccaaccgcgcctttatacgcgccgacgaaaacgccctaaaaccctaaaccgtcttacgaaaaacgaaaataaaaaaaaaaaaacgacgcgaaccccacgcgaaaaaaaaatttcctaaaccactacgaaaaattaaaactcaaaaaaccaaaaaaaaacgtacgaaaaaaaaacgaaaaaaatatacgaaactaaaaaaaaaatcgaaacgccaacgaaaaaaaaaaacgctaaaaaaaaaaaaaaaaaaaaaaaaaaaaaaaaaaaaaacgcgaatactaaacgcgcgacgacaacgaacgaaaaaaaaaaacgaccgaaaacctacgcgcaaaaaaaaccaaaacgaaacgcaacaccgacaaaaaaaaattaccgaaaaactataccgaaaaacccgaataaaaacgactaaaccgcgaaccgcgaaactcacaaacaatacgaaacgacgcgaaaacccctctccctatacgaaactaaaacgcaaaaactaaacgaaacgaataaacgtctaaacgcgacgcgaacgcattcttcgccttttcttcctcgaactcattccgaccgatcgatacctacgcgaaacctacccccgccgctaatatctttttaataaattcgccaaacttaaaacgaacgcgatctaccctccaaaataaattttcccccgacaaatatttcgaaaaaaaaaaacgcgcgaaactcccgaaaaaaa

SEQ ID NO: 15127 - DNA, 860 bp, Artificial Sequence
  chemically treated genomic DNA (Homo sapiens) CpG-island No: 15127
aggggtggggtgggagagggggtcgttgtttttatttattgagtcgaggtcgttatttcgtcggtagtttcgcgtaggtttggtttcgagttacgtttgttgaaatcgtttttttcggtttcgtttttattcgttttggtagttagtcgcgtttttgtacgcgtcggcgggggcgttttggaattttgaatcgttttacggggaacgggggtggggggaggggagcggcgcgggttttacgcgaggaaggaattttttgggttattgcgaaagattgaggtttagaaagttagagagagacgtgcgaggaggaagcggagagggtgtgcgaagttggagagggagtcggagcgttagcgaaagaggggagcgttggggaaggaggaagagaaggagagggggagaagagagacgcggatgttgggcgcgcgacggtagcgggcggaggaggggagcggtcgggaatttgcgcgtaggggaagttaggacggagcgtagtatcggtaggggagggttgtcgaggggttgtgtcgaggagttcgggtgggggcggttggatcgcgggtcgcgggatttatagatagtgcgaggcggcgcgggggtttttttttttatgcggggttggggcgtaggggttgggcggggcgggtgggcgtttgagcgcggcgcgggcgtatttttcgttttttttttttcgggtttatttcggtcgatcgatatttgcgcgggatttgttttcgtcgttaatatttttttaatgagttcgttaggtttaaagcgagcgcgatttgttttttagggtggattttttttcggtagatgtttcgggaggaggaggcgcgcggagttttcgggagggg

SEQ ID NO: 15128 - DNA, 860 bp, Artificial Sequence
  chemically treated genomic DNA (Homo sapiens) CpG-island No: 15128
cccctcccgaaaactccgcgcgcctcctcctcccgaaacatctaccgaaaaaaaatccaccctaaaaaacaaatcgcgctcgctttaaacctaacgaactcattaaaaaaatattaacgacgaaaacaaatcccgcgcaaatatcgatcgaccgaaataaacccgaaaaaaaaaaaacgaaaaatacgcccgcgccgcgctcaaacgcccacccgccccgcccaacccctacgccccaaccccgcataaaaaaaaaaacccccgcgccgcctcgcactatctataaatcccgcgacccgcgatccaaccgcccccacccgaactcctcgacacaacccctcgacaaccctcccctaccgatactacgctccgtcctaacttcccctacgcgcaaattcccgaccgctcccctcctccgcccgctaccgtcgcgcgcccaacatccgcgtctctcttctccccctctccttctcttcctccttccccaacgctcccctctttcgctaacgctccgactccctctccaacttcgcacaccctctccgcttcctcctcgcacgtctctctctaactttctaaacctcaatctttcgcaataacccaaaaaattccttcctcgcgtaaaacccgcgccgctcccctccccccacccccgttccccgtaaaacgattcaaaattccaaaacgcccccgccgacgcgtacaaaaacgcgactaactaccaaaacgaataaaaacgaaaccgaaaaaaacgatttcaacaaacgtaactcgaaaccaaacctacgcgaaactaccgacgaaataacgacctcgactcaataaataaaaacaacgaccccctctcccaccccacccct

SEQ ID NO: 15129 - DNA, 530 bp, Artificial Sequence
  chemically treated genomic DNA (Homo sapiens) CpG-island No: 15129
ggtgtcgtcgcggcgttgttttttcgtttttttcgttttttttttttgttttttagagttttattttggaggtcgttattttcgtttaggttttgagcgagcgcgttttaatacgtttgcgtcgttatcgtttaggttgttacgagatttagttagttgattttaattttttcgttttttgtttcgtttttttcgtttttttcgtttcgatcgttttttttttgaaattttgttttttttcggttagtttttagtagttatatatgcgtagagtaacgatatcggtcgtgggatttggattttacgtagcgcgttagggggttggcgtttcggtgggtgttgaaaaggatacgtttttgggcgcgcgcgggtgtttatgattacgttttttcggcgggtgtttatgattacgttttttcggcgtgtgttttagggtcgcgttttttcgtttatgttttgcggagagtagggtcgtaattcggtatttaagttttaagttcgaggaaattttgttttaaattatttttttt

SEQ ID NO: 15130 - DNA, 530 bp, Artificial Sequence
  chemically treated genomic DNA (Homo sapiens) CpG-island No: 15130
aaaaaaaataatttaaaacaaaatttcctcgaacttaaaacttaaataccgaattacgaccctactctccgcaaaacataaacgaaaaaacgcgaccctaaaacacacgccgaaaaaacgtaatcataaacacccgccgaaaaaacgtaatcataaacacccgcgcgcgcccaaaaacgtatccttttcaacacccaccgaaacgccaaccccctaacgcgctacgtaaaatccaaatcccacgaccgatatcgttactctacgcatatataactactaaaaactaaccgaaaaaaaacaaaatttcaaaaaaaaaacgatcgaaacgaaaaaaacgaaaaaaacgaaacaaaaaacgaaaaaattaaaatcaactaactaaatctcgtaacaacctaaacgataacgacgcaaacgtattaaaacgcgctcgctcaaaacctaaacgaaaataacgacctccaaaataaaactctaaaaaacaaaaaaaaaaaacgaaaaaaacgaaaaaacaacgccgcgacgacacc

SEQ ID NO: 15131 - DNA, 530 bp, Artificial Sequence
  chemically treated genomic DNA (Homo sapiens) CpG-island No: 15131
aaaagaggtgatttaaaataagattttttcggatttaaagtttaagtatcgggttgcgattttatttttcgtaggatataagcggaggggcgcggttttaaggtatacgtcggaggggcgtggttatgggtattcgtcggaggggcgtggttatgggtattcgcgcgcgtttaggggcgtgttttttttagtatttatcgaggcgttagttttttgacgcgttgcgtggaatttaaattttacggtcggtgtcgttattttgcgtatgtgtagttgttgggggttggtcggaggaaagtagaattttagggaaagaacgatcgggacggggaggacggggagggcggggtagaagacggaagagttgaaattagttgattgggtttcgtgatagtttgggcggtggcgacgtaggcgtattagagcgcgttcgtttaaagtttgagcgaagatggcggtttttagagtgaaattttgagaggtagagggaggaggcggagggggcggggaggtagcgtcgcggcggtatt

SEQ ID NO: 15132 - DNA, 530 bp, Artificial Sequence
  chemically treated genomic DNA (Homo sapiens) CpG-island No: 15132
aataccgccgcgacgctacctccccgccccctccgcctcctccctctacctctcaaaatttcactctaaaaaccgccatcttcgctcaaactttaaacgaacgcgctctaatacgcctacgtcgccaccgcccaaactatcacgaaacccaatcaactaatttcaactcttccgtcttctaccccgccctccccgtcctccccgtcccgatcgttctttccctaaaattctactttcctccgaccaacccccaacaactacacatacgcaaaataacgacaccgaccgtaaaatttaaattccacgcaacgcgtcaaaaaactaacgcctcgataaatactaaaaaaaacacgcccctaaacgcgcgcgaatacccataaccacgcccctccgacgaatacccataaccacgcccctccgacgtataccttaaaaccgcgcccctccgcttatatcctacgaaaaataaaatcgcaacccgatacttaaactttaaatccgaaaaaatcttattttaaatcacctctttt

SEQ ID NO: 15133 - DNA, 665 bp, Artificial Sequence
  chemically treated genomic DNA (Homo sapiens) CpG-island No: 15133
agggataacgttttcgtcgtgtagaagtagtatcggtttattttgtgcgtcgtttacgggtcgggtcgggtcgtattcgttagggatttaattgtaaggagggaggagtcgtcgtagaggcgtcgaagattcgggatttttcggcgttacgtttacgttttttcggcgtacggttcgtgcgcgtagttttgggtttcgcggtttggcgagcgcggtttcgggtgtatcgggcggatggggtcgcggagggacgggttcggattcggtttcggtttttttcgtcgggtagtcgtggcgttcgtttagcgtagttcgggagagtgtagggagcgcgtagggacgtgacgttcgcgggtcgggttcgtcgtaatttcgcgaggtaatcgtcggcgattgcgcggggaggcgggcgggggcggaggtcgtagttatgtgttttgcggcggcggtagtgattcggttcgcgtttttttcggtcggttttcggtggttttgagtggttgcggcgtttgagttaggttcggtttggtcgtttttagcgttttgtatcgtaggtttagcgttcgttttatcgaaattgtcgaatttggtttatatatttatttatttatttcgtagataggtttgagggttttttatgggttacgcgttggggatttaaggtg

SEQ ID NO: 15134 - DNA, 665 bp, Artificial Sequence
  chemically treated genomic DNA (Homo sapiens) CpG-island No: 15134
caccttaaatccccaacgcgtaacccataaaaaaccctcaaacctatctacgaaataaataaataaatatataaaccaaattcgacaatttcgataaaacgaacgctaaacctacgatacaaaacgctaaaaacgaccaaaccgaacctaactcaaacgccgcaaccactcaaaaccaccgaaaaccgaccgaaaaaaacgcgaaccgaatcactaccgccgccgcaaaacacataactacgacctccgcccccgcccgcctccccgcgcaatcgccgacgattacctcgcgaaattacgacgaacccgacccgcgaacgtcacgtccctacgcgctccctacactctcccgaactacgctaaacgaacgccacgactacccgacgaaaaaaaccgaaaccgaatccgaacccgtccctccgcgaccccatccgcccgatacacccgaaaccgcgctcgccaaaccgcgaaacccaaaactacgcgcacgaaccgtacgccgaaaaaacgtaaacgtaacgccgaaaaatcccgaatcttcgacgcctctacgacgactcctccctccttacaattaaatccctaacgaatacgacccgacccgacccgtaaacgacgcacaaaataaaccgatactacttctacacgacgaaaacgttatccct

SEQ ID NO: 15135 - DNA, 665 bp, Artificial Sequence
  chemically treated genomic DNA (Homo sapiens) CpG-island No: 15135
tattttgaatttttagcgcgtggtttatgggaggtttttagatttatttgcggaatgagtaaatgagtgtgtgaattaggttcggtaatttcggtggggcgagcgttgggtttgcggtgtagggcgttgggagcggttaggtcgggtttggtttaggcgtcgtagttatttagggttatcggggatcggtcggggagggcgcgggtcgaattattgtcgtcgtcgtagggtatatgattgcggttttcgttttcgttcgttttttcgcgtagtcgtcggcggttgtttcgcggggttgcggcgagttcggttcgcgaacgttacgtttttgcgcgttttttgtattttttcgagttgcgttaggcgggcgttacggttgttcggcgaaggaaatcgaaatcgagttcgggttcgttttttcgcggttttattcgttcggtgtattcggggtcgcgttcgttaggtcgcggagtttagagttgcgcgtacgaatcgtgcgtcgggagggcgtgggcgtggcgtcgaagggtttcgggttttcgacgtttttgcggcggtttttttttttttgtagttggatttttggcgggtgcggttcggttcggttcgtgagcggcgtatagaatgggtcgatgttgtttttatacggcggggacgttgttttt

SEQ ID NO: 15136 - DNA, 665 bp, Artificial Sequence
  chemically treated genomic DNA (Homo sapiens) CpG-island No: 15136
aaaaacaacgtccccgccgtataaaaacaacatcgacccattctatacgccgctcacgaaccgaaccgaaccgcacccgccaaaaatccaactacaaaaaaaaaaaaaccgccgcaaaaacgtcgaaaacccgaaacccttcgacgccacgcccacgccctcccgacgcacgattcgtacgcgcaactctaaactccgcgacctaacgaacgcgaccccgaatacaccgaacgaataaaaccgcgaaaaaacgaacccgaactcgatttcgatttccttcgccgaacaaccgtaacgcccgcctaacgcaactcgaaaaaatacaaaaaacgcgcaaaaacgtaacgttcgcgaaccgaactcgccgcaaccccgcgaaacaaccgccgacgactacgcgaaaaaacgaacgaaaacgaaaaccgcaatcatataccctacgacgacgacaataattcgacccgcgccctccccgaccgatccccgataaccctaaataactacgacgcctaaaccaaacccgacctaaccgctcccaacgccctacaccgcaaacccaacgctcgccccaccgaaattaccgaacctaattcacacactcatttactcattccgcaaataaatctaaaaacctcccataaaccacgcgctaaaaattcaaaata

SEQ ID NO: 15137 - DNA, 567 bp, Artificial Sequence
  chemically treated genomic DNA (Homo sapiens) CpG-island No: 15137
cgttcgaagttggaggggtcgtcggagtttgcgattggttgtttcgggtatatcgtttcgtttcgatttgtagttttttttaggttttcgttgttaaggacgcgtcgtcggttgttgttaagatggcggttgtagggttgttgtcgttttatttgttattgttcggcgaggtcgtcgttgttttagttgttatcgtcgttataggtattagtgtcgttgcgcgggagttagggttgtcgaggttaattttttcgcgttcgtgacgcggggtttgagagacggagtgtagggaggggtcgagtaggaggaggaggaagtcggagttgttatgagggaggttttgggggcgagtagataggcggcgttgaagtgaaggatgttggcggggaggttcggaattcggagcgcggtcggggaattgggtattgaattatcggataatttcgatagagtttttttcggttttcgggagagcggcgggtattatcgatttggtttttatttgtattttttttagtttgtggttgttagggtagcgatgttgaaaacggggtttattttttttta

SEQ ID NO: 15138 - DNA, 567 bp, Artificial Sequence
  chemically treated genomic DNA (Homo sapiens) CpG-island No: 15138
taaaaaaaaataaaccccgttttcaacatcgctaccctaacaaccacaaactaaaaaaaatacaaataaaaaccaaatcgataatacccgccgctctcccgaaaaccgaaaaaaactctatcgaaattatccgataattcaatacccaattccccgaccgcgctccgaattccgaacctccccgccaacatccttcacttcaacgccgcctatctactcgcccccaaaacctccctcataacaactccgacttcctcctcctcctactcgacccctccctacactccgtctctcaaaccccgcgtcacgaacgcgaaaaaattaacctcgacaaccctaactcccgcgcaacgacactaatacctataacgacgataacaactaaaacaacgacgacctcgccgaacaataacaaataaaacgacaacaaccctacaaccgccatcttaacaacaaccgacgacgcgtccttaacaacgaaaacctaaaaaaaactacaaatcgaaacgaaacgatatacccgaaacaaccaatcgcaaactccgacgacccctccaacttcgaacg

SEQ ID NO: 15139 - DNA, 567 bp, Artificial Sequence
  chemically treated genomic DNA (Homo sapiens) CpG-island No: 15139
tggaaaaagatgggtttcgtttttaatatcgttattttggtagttataggttgggaaggatataggtaagagttaggtcggtgatgttcgtcgttttttcgagggtcgaggggggttttgtcgaggttgttcgatgatttagtgtttagtttttcgatcgcgtttcgggtttcgggttttttcgttagtattttttattttagcgtcgtttgtttgttcgtttttagaattttttttatggtagtttcggtttttttttttttttgttcggtttttttttatatttcgttttttaggtttcgcgttacgggcgcggaagggttggtttcgatagttttagttttcgcgtagcggtattggtgtttgtagcggcgatggtagttgaggtagcggcgatttcgtcgggtaatagtagatggggcggtagtaattttgtagtcgttattttgataataatcgacggcgcgtttttgataacggaaatttgggaggagttataggtcggggcgggacgatgtgttcgaagtagttaatcgtaggtttcggcggtttttttagtttcgagcg

SEQ ID NO: 15140 - DNA, 567 bp, Artificial Sequence
  chemically treated genomic DNA (Homo sapiens) CpG-island No: 15140
cgctcgaaactaaaaaaaccgccgaaacctacgattaactacttcgaacacatcgtcccgccccgacctataactcctcccaaatttccgttatcaaaaacgcgccgtcgattattatcaaaataacgactacaaaattactaccgccccatctactattacccgacgaaatcgccgctacctcaactaccatcgccgctacaaacaccaataccgctacgcgaaaactaaaactatcgaaaccaacccttccgcgcccgtaacgcgaaacctaaaaaacgaaatataaaaaaaaaccgaacaaaaaaaaaaaaaaaccgaaactaccataaaaaaaattctaaaaacgaacaaacaaacgacgctaaaataaaaaatactaacgaaaaaacccgaaacccgaaacgcgatcgaaaaactaaacactaaatcatcgaacaacctcgacaaaacccccctcgaccctcgaaaaaacgacgaacatcaccgacctaactcttacctatatccttcccaacctataactaccaaaataacgatattaaaaacgaaacccatctttttcca

SEQ ID NO: 15141 - DNA, 513 bp, Artificial Sequence
  chemically treated genomic DNA (Homo sapiens) CpG-island No: 15141
atttatcgcgcgttttcgtgtttttatttacggttatgtcgcgcgtttcgtaggcggttgtattgtacgcgtaattatatttatatgtatttgtttttgttttttatgttgcgcgtcgtgagtattttcgttaaggacgttgtgttttattttggcgttacgtttgatgaggttgagcgttttatcgaggaggagttgcgcgttatcgtttaggcgttttcgtcgtttgttatcgtcgttgtcggttacgtgagtatttttttgttcgttcgttttcggtgtcgttattggtttcgtggggtttcgtttcgtttcgttttagttcggttttcgttttgttcgttttttgttagcgttattggttttagttatttaaattcgttttatagggtttttcgtaatttttagttttgtcgtcgattttgttgttaagggtttcgagtgttttatacgtttcgcgttgttattaaggtttttattttaatttagtattttttagttattttatttttt

SEQ ID NO: 15142 - DNA, 513 bp, Artificial Sequence
  chemically treated genomic DNA (Homo sapiens) CpG-island No: 15142
aaaaaataaaataactaaaaaatactaaattaaaataaaaaccttaataacaacgcgaaacgtataaaacactcgaaacccttaacaacaaaatcgacgacaaaactaaaaattacgaaaaaccctataaaacgaatttaaataactaaaaccaataacgctaacaaaaaacgaacaaaacgaaaaccgaactaaaacgaaacgaaacgaaaccccacgaaaccaataacgacaccgaaaacgaacgaacaaaaaaatactcacgtaaccgacaacgacgataacaaacgacgaaaacgcctaaacgataacgcgcaactcctcctcgataaaacgctcaacctcatcaaacgtaacgccaaaataaaacacaacgtccttaacgaaaatactcacgacgcgcaacataaaaaacaaaaacaaatacatataaatataattacgcgtacaatacaaccgcctacgaaacgcgcgacataaccgtaaataaaaacacgaaaacgcgcgataaat

SEQ ID NO: 15143 - DNA, 513 bp, Artificial Sequence
  chemically treated genomic DNA (Homo sapiens) CpG-island No: 15143
aagaggtagagtggttagagggtattgggttgaggtaggagttttgatggtagcgcggggcgtgtgggatattcggagtttttggtagtagggtcggcggtagagttgagggttgcgagggattttataagacgggtttgagtggttgaagttagtggcgttggtaggaggcgggtagggcgagggtcgggttggagcggggcggggcggggttttacgaggttagtggcggtatcgggagcgggcgggtagaggggtatttacgtagtcggtagcggcggtggtaggcggcgggggcgtttgggcgatggcgcgtagttttttttcggtgaggcgtttagttttattaagcgtggcgttagagtagagtatagcgtttttgacgaagatgtttacggcgcgtagtatgaaggataggaataggtgtatgtggatgtagttgcgcgtgtagtgtagtcgtttgcggggcgcgcgatatgatcgtgggtgggggtacggggacgcgcggtgggt

SEQ ID NO: 15144 - DNA, 513 bp, Artificial Sequence
  chemically treated genomic DNA (Homo sapiens) CpG-island No: 15144
acccaccgcgcgtccccgtacccccacccacgatcatatcgcgcgccccgcaaacgactacactacacgcgcaactacatccacatacacctattcctatccttcatactacgcgccgtaaacatcttcgtcaaaaacgctatactctactctaacgccacgcttaataaaactaaacgcctcaccgaaaaaaaactacgcgccatcgcccaaacgcccccgccgcctaccaccgccgctaccgactacgtaaatacccctctacccgcccgctcccgataccgccactaacctcgtaaaaccccgccccgccccgctccaacccgaccctcgccctacccgcctcctaccaacgccactaacttcaaccactcaaacccgtcttataaaatccctcgcaaccctcaactctaccgccgaccctactaccaaaaactccgaatatcccacacgccccgcgctaccatcaaaactcctacctcaacccaataccctctaaccactctacctctt

SEQ ID NO: 15145 - DNA, 576 bp, Artificial Sequence
  chemically treated genomic DNA (Homo sapiens) CpG-island No: 15145
ttgtttcggagtgttggcggcgggggatttattagcgcgtacgcggagttgagtacggggtagtagagtaggagcgttaggtcgggtgcgattcgggcggtttttatcgttatcgtttagggtcgcgtttttcggggtagtcgtcgtcgtcggttttggtggtggtagggggtgtagagttgcgttaggttggtcgtttcgtttacgtttcggtttatgggatttcggcgtttcggcggttcgaggtttcggggttcggcgcggggtttatgcgttgagggcgagcgagcgagcgagcgagcgagtagcgtaaaggagggagggagggagggataggagggagggagggagagtcggaggtcgggcgggcggcgggcgggcgtcgagcgttgcggagcggttcgtttgtttcggagcgaagaaattatatttatatggtcgggttcgtttttttcggttcgttattcgtttttttttcgcgtcgtttttttttttttttttttttttttttttttttttttttttttttggggaaatgggagttgtggtttcgttttacgtttagtggggggaggg

SEQ ID NO: 15146 - DNA, 576 bp, Artificial Sequence
  chemically treated genomic DNA (Homo sapiens) CpG-island No: 15146
ccctccccccactaaacgtaaaacgaaaccacaactcccatttccccaaaaaaaaaaaaaaaaaaaaaaaaaaaaaaaaaaaaaaaaaaaaacgacgcgaaaaaaaaacgaataacgaaccgaaaaaaacgaacccgaccatataaatataatttcttcgctccgaaacaaacgaaccgctccgcaacgctcgacgcccgcccgccgcccgcccgacctccgactctccctccctccctcctatccctccctccctccctcctttacgctactcgctcgctcgctcgctcgctcgccctcaacgcataaaccccgcgccgaaccccgaaacctcgaaccgccgaaacgccgaaatcccataaaccgaaacgtaaacgaaacgaccaacctaacgcaactctacaccccctaccaccaccaaaaccgacgacgacgactaccccgaaaaacgcgaccctaaacgataacgataaaaaccgcccgaatcgcacccgacctaacgctcctactctactaccccgtactcaactccgcgtacgcgctaataaatcccccgccgccaacactccgaaacaa

SEQ ID NO: 15147 - DNA, 576 bp, Artificial Sequence
  chemically treated genomic DNA (Homo sapiens) CpG-island No: 15147
ttttttttttattgggcgtggggcgaagttatagtttttatttttttaaaagaaaaaaaaagaaagaaagaaagaaagaaagaaagaaaaggcggcgcgggaggggggcgggtggcgggtcgggggaggcgggttcggttatatggatgtgattttttcgtttcgaggtagacgggtcgtttcgtagcgttcggcgttcgttcgtcgttcgttcggttttcggtttttttttttttttttttgttttttttttttttttttttttgcgttgttcgttcgttcgttcgttcgttcgtttttagcgtatgggtttcgcgtcgggtttcggggtttcgggtcgtcgggacgtcggggttttataggtcggggcgtgggcggggcggttagtttgacgtagttttgtattttttattattattagggtcggcggcggcggttgtttcgagggacgcggttttaggcggtggcgatggggatcgttcggatcgtattcggtttggcgtttttgttttgttgtttcgtgtttagtttcgcgtacgcgttggtgagtttttcgtcgttaatatttcgggatag

SEQ ID NO: 15148 - DNA, 576 bp, Artificial Sequence
  chemically treated genomic DNA (Homo sapiens) CpG-island No: 15148
ctatcccgaaatattaacgacgaaaaactcaccaacgcgtacgcgaaactaaacacgaaacaacaaaacaaaaacgccaaaccgaatacgatccgaacgatccccatcgccaccgcctaaaaccgcgtccctcgaaacaaccgccgccgccgaccctaataataataaaaaatacaaaactacgtcaaactaaccgccccgcccacgccccgacctataaaaccccgacgtcccgacgacccgaaaccccgaaacccgacgcgaaacccatacgctaaaaacgaacgaacgaacgaacgaacgaacaacgcaaaaaaaaaaaaaaaaaaaaaacaaaaaaaaaaaaaaaaaaaccgaaaaccgaacgaacgacgaacgaacgccgaacgctacgaaacgacccgtctacctcgaaacgaaaaaatcacatccatataaccgaacccgcctcccccgacccgccacccgcccccctcccgcgccgccttttctttctttctttctttctttctttctttttttttcttttaaaaaaataaaaactataacttcgccccacgcccaataaaaaaaaaa

SEQ ID NO: 15149 - DNA, 1371 bp, Artificial Sequence
  chemically treated genomic DNA (Homo sapiens) CpG-island No: 15149
ggggtcgcggtttgcggggggcgcgtaggattgttatttttagtttcgcgattttcggcgtagggagttagggtcgggtagggggcgcgttttgagtcgcgcggggcgtgtagttagggggtgcgattttaattttgtagttatattgagtttttaggtgtttcggtcgttagttttcggtcgttcggttttttgagattttagattttcggtagtcgtttttcgtattttttttttatttttggttaaagtttcgtttgcgtttgtgcggttcgggcgcgtagcggtttcgacgttttgtcggtttgtttgtttgttagttcgtttttagttttttcggttttggttttagtttttttagcggttttaagtttcgtttcggttattttttcgtttttttttttttttttttttttttacgaaaatatttgtaagtttttaaaaaagttatcgagtcgagcggcgcggggttggcgattttttcgggtttcgaggaggcgtcgtcgattgatatcgagatagagtagtttggttgtttcggttaggttcggagtcgttttttttcgatttcggttattttttttcggcgcgggtttttagtttcgatttatttcgagcgcgtcgtcgcggttttcgttttgttatggatgtcggggttttttcgatagtttttttaagttagcgtttcgttcgcggtttcggggggattttatggagttttcgggatatttttcgttggtcggtttggtttttagcgtttttcgttcggtcgtcgttcggagttatcgttcgtcgcgcgtatttttcgtttcggcgtttgtcgtttttttttttttcggtcgggcgttttttttttttttcgcgttttttcgggtttttttcgtttttatttttttcgtagtcgtcgacgcgggagtgtggagaggtcgagaggagtttttcgtttttcgtttcgggatattgcgttagaggtcgaggttcggagttttacggcggcgggatgtgagtgttggggagacggggcgggggtagttgtaatatcgagattcgagtagggaattcgggacgtcgtcgtcgttttatttttttttggaaagtacgggtttttaaatttttttttttttgattattcggttttcgttggcgaatagagattttgagtcgagaagcgagtttttttttattatgggcgaattttttgaggaggttgttcggtattttcgcgcgttttcggtcgcgacgttgttagtttattgggttttcgttcgggtcgggtcggggtttttggggaggtcgttcggttgttagtttcgagttcggtttggttgttgtcgtttttttttacgtttagttttattttcgtttcgtttt

SEQ ID NO: 15150 - DNA, 1371 bp, Artificial Sequence
  chemically treated genomic DNA (Homo sapiens) CpG-island No: 15150
aaaacgaaacgaaaataaaactaaacgtaaaaaaaaacgacaacaaccaaaccgaactcgaaactaacaaccgaacgacctccccaaaaaccccgacccgacccgaacgaaaacccaataaactaacaacgtcgcgaccgaaaacgcgcgaaaataccgaacaacctcctcaaaaaattcgcccataataaaaaaaaactcgcttctcgactcaaaatctctattcgccaacgaaaaccgaataatcaaaaaaaaaaaaatttaaaaacccgtactttccaaaaaaaaataaaacgacgacgacgtcccgaattccctactcgaatctcgatattacaactacccccgccccgtctccccaacactcacatcccgccgccgtaaaactccgaacctcgacctctaacgcaatatcccgaaacgaaaaacgaaaaactcctctcgacctctccacactcccgcgtcgacgactacgaaaaaaataaaaacgaaaaaaacccgaaaaaacgcgaaaaaaaaaaaaaacgcccgaccgaaaaaaaaaaaaacgacaaacgccgaaacgaaaaatacgcgcgacgaacgataactccgaacgacgaccgaacgaaaaacgctaaaaaccaaaccgaccaacgaaaaatatcccgaaaactccataaaatccccccgaaaccgcgaacgaaacgctaacttaaaaaaactatcgaaaaaaccccgacatccataacaaaacgaaaaccgcgacgacgcgctcgaaataaatcgaaactaaaaacccgcgccgaaaaaaaataaccgaaatcgaaaaaaaacgactccgaacctaaccgaaacaaccaaactactctatctcgatatcaatcgacgacgcctcctcgaaacccgaaaaaatcgccaaccccgcgccgctcgactcgataacttttttaaaaacttacaaatattttcgtaaaaaaaaaaaaaaaaaaaaaaaaacgaaaaaataaccgaaacgaaacttaaaaccgctaaaaaaactaaaaccaaaaccgaaaaaactaaaaacgaactaacaaacaaacaaaccgacaaaacgtcgaaaccgctacgcgcccgaaccgcacaaacgcaaacgaaactttaaccaaaaataaaaaaaaaatacgaaaaacgactaccgaaaatctaaaatctcaaaaaaccgaacgaccgaaaactaacgaccgaaacacctaaaaactcaatataactacaaaattaaaatcgcaccccctaactacacgccccgcgcgactcaaaacgcgccccctacccgaccctaactccctacgccgaaaatcgcgaaactaaaaataacaatcctacgcgccccccgcaaaccgcgacccc

SEQ ID NO: 15151 - DNA, 1371 bp, Artificial Sequence
  chemically treated genomic DNA (Homo sapiens) CpG-island No: 15151
gggacgaggcgagggtggggttggacgtgggggagggcggtagtagttaagtcgggttcggggttggtagtcgagcggtttttttagggatttcgattcggttcgaacgggagtttagtggattgatagcgtcgcggtcgggggcgcgcgggggtatcgggtagtttttttaggggattcgtttatgatgaaagagggttcgtttttcggtttagggtttttattcgttagcgggggtcggatgattaagggaaaaaaaatttaaaagttcgtgttttttagaagagaatgaagcggcggcggcgtttcgggttttttgttcgggtttcgatgttatagttgttttcgtttcgtttttttagtatttatatttcgtcgtcgtaagatttcgggtttcggtttttagcgtaatgtttcggggcggggggcggaaggtttttttcggtttttttatattttcgcgtcggcggttgcggagggggtgggggcgggagaggttcgggagggcgcgggggagggaagaggcgttcggtcggggagaaggggagcggtagacgtcgaggcgagggatgcgcgcggcgggcggtggtttcgagcggcggtcgggcggggggcgttggaggttaggtcggttagcggggggtatttcgagagttttatgaagttttttcggggtcgcggacggggcgttggtttggggaggttgtcgggggggtttcgatatttatggtaaggcgggggtcgcggcggcgcgttcggagtaagtcggggttggggattcgcgtcgaggggaagtggtcggagtcggggaggagcgatttcgggtttggtcggagtagttaggttgttttgtttcggtgttagtcggcggcgttttttcggaattcgggggagtcgttagtttcgcgtcgttcggttcggtggtttttttggaaatttgtaaatgttttcgtagagagaaaagggggagggagggagcgagggagtgatcgaaacggagtttggggtcgttggaagaattgaggttaaggtcgggggagttagagacggattgatagataggtagatcgatagagcgtcggggtcgttgcgcgttcgagtcgtataggcgtaagcggggttttggttaaggatggggaaggggtgcgggaggcggttgtcgagggtttgggattttaggaggtcgaacggtcgggggttggcggtcggaatatttaagggtttagtgtggttgtaaagttgagatcgtattttttaattgtacgtttcgcgcggtttagaacgcgttttttgttcggttttgattttttacgtcgaaagtcgcggagttaaaaataatagttttgcgcgtttttcgtagatcgcgatttt

SEQ ID NO: 15152 - DNA, 1371 bp, Artificial Sequence
  chemically treated genomic DNA (Homo sapiens) CpG-island No: 15152
aaaatcgcgatctacgaaaaacgcgcaaaactattatttttaactccgcgactttcgacgtaaaaaatcaaaaccgaacaaaaaacgcgttctaaaccgcgcgaaacgtacaattaaaaaatacgatctcaactttacaaccacactaaacccttaaatattccgaccgccaacccccgaccgttcgacctcctaaaatcccaaaccctcgacaaccgcctcccgcaccccttccccatccttaaccaaaaccccgcttacgcctatacgactcgaacgcgcaacgaccccgacgctctatcgatctacctatctatcaatccgtctctaactcccccgaccttaacctcaattcttccaacgaccccaaactccgtttcgatcactccctcgctccctccctcccccttttctctctacgaaaacatttacaaatttccaaaaaaaccaccgaaccgaacgacgcgaaactaacgactcccccgaattccgaaaaaacgccgccgactaacaccgaaacaaaacaacctaactactccgaccaaacccgaaatcgctcctccccgactccgaccacttcccctcgacgcgaatccccaaccccgacttactccgaacgcgccgccgcgacccccgccttaccataaatatcgaaacccccccgacaacctccccaaaccaacgccccgtccgcgaccccgaaaaaacttcataaaactctcgaaataccccccgctaaccgacctaacctccaacgccccccgcccgaccgccgctcgaaaccaccgcccgccgcgcgcatccctcgcctcgacgtctaccgctccccttctccccgaccgaacgcctcttccctcccccgcgccctcccgaacctctcccgcccccaccccctccgcaaccgccgacgcgaaaatataaaaaaaccgaaaaaaaccttccgccccccgccccgaaacattacgctaaaaaccgaaacccgaaatcttacgacgacgaaatataaatactaaaaaaacgaaacgaaaacaactataacatcgaaacccgaacaaaaaacccgaaacgccgccgccgcttcattctcttctaaaaaacacgaacttttaaattttttttcccttaatcatccgacccccgctaacgaataaaaaccctaaaccgaaaaacgaaccctctttcatcataaacgaatcccctaaaaaaactacccgatacccccgcgcgcccccgaccgcgacgctatcaatccactaaactcccgttcgaaccgaatcgaaatccctaaaaaaaccgctcgactaccaaccccgaacccgacttaactactaccgccctcccccacgtccaaccccaccctcgcctcgtccc

SEQ ID NO: 15153 - DNA, 591 bp, Artificial Sequence
  chemically treated genomic DNA (Homo sapiens) CpG-island No: 15153
cgcgggggtgggttgttatgaagtgtacgatcgcgagttttgtttttaaggtataagtgttagaggtattcggcgggttgggggtatatacgtgtgtgcggagtcggagtatgttttgcgcgcgcgcgttcgcgcgcgcggttacgcggttttagcggcgcggggcgttaggtgtagtaggcgcggggcgcgcgaagttgggggtatcgcgggtgcgggtgcgggcgcggggcggggcgggtttatttgcgcgtagtagagtagttataattcgtatagtcgtttcgaggcggttatggttcggttcggtttcggttttgttgcgcgttatttgtcgtcgtttttttcgcgtcgttcgtcggttgttttcggttaggtttatgggcggagggcgttatttcggggcggagcggcgcggtattattggggaagtttgcggttgtggttttcgcggcgtagagttatttaagtttgttcgttttttttttttattgtcggtcgtcgtttagttttttgtatttcgttgtagttatcgtcgtttcgttttttttgggattatgtaaagggcggagagtttggtaggaggagggg

SEQ ID NO: 15154 - DNA, 591 bp, Artificial Sequence
  chemically treated genomic DNA (Homo sapiens) CpG-island No: 15154
cccctcctcctaccaaactctccgccctttacataatcccaaaaaaaacgaaacgacgataactacaacgaaatacaaaaaactaaacgacgaccgacaataaaaaaaaaaaacgaacaaacttaaataactctacgccgcgaaaaccacaaccgcaaacttccccaataataccgcgccgctccgccccgaaataacgccctccgcccataaacctaaccgaaaacaaccgacgaacgacgcgaaaaaaacgacgacaaataacgcgcaacaaaaccgaaaccgaaccgaaccataaccgcctcgaaacgactatacgaattataactactctactacgcgcaaataaacccgccccgccccgcgcccgcacccgcacccgcgatacccccaacttcgcgcgccccgcgcctactacacctaacgccccgcgccgctaaaaccgcgtaaccgcgcgcgcgaacgcgcgcgcgcaaaacatactccgactccgcacacacgtatatacccccaacccgccgaatacctctaacacttataccttaaaaacaaaactcgcgatcgtacacttcataacaacccacccccgcg

SEQ ID NO: 15155 - DNA, 591 bp, Artificial Sequence
  chemically treated genomic DNA (Homo sapiens) CpG-island No: 15155
tttttttttttgttaggtttttcgttttttatatggttttaggagaggcggggcggcggtgattgtagcgaagtgtaggaagttgggcggcggtcggtagtgaggaggaggagcgagtagatttgggtggttttgcgtcgcggaggttatagtcgtagatttttttagtagtatcgcgtcgtttcgtttcggagtgacgtttttcgtttatgggtttggtcgagggtaatcggcgggcggcgcggaggaggcggcgataggtggcgcgtagtagggtcggagtcgggtcgggttatggtcgtttcggagcggttgtacgagttgtggttgttttattacgcgtaggtgagttcgtttcgtttcgcgttcgtattcgtattcgcggtgtttttagtttcgcgcgtttcgcgtttgttgtatttggcgtttcgcgtcgttggggtcgcgtagtcgcgcgcgcgggcgcgcgcgcgtagggtatgtttcggtttcgtatatacgtgtgtgtttttagttcgtcgggtgtttttggtatttatgttttggggatagagttcgcggtcgtgtattttatagtaatttattttcgcg

SEQ ID NO: 15156 - DNA, 591 bp, Artificial Sequence
  chemically treated genomic DNA (Homo sapiens) CpG-island No: 15156
cgcgaaaataaattactataaaatacacgaccgcgaactctatccccaaaacataaataccaaaaacacccgacgaactaaaaacacacacgtatatacgaaaccgaaacataccctacgcgcgcgcgcccgcgcgcgcgactacgcgaccccaacgacgcgaaacgccaaatacaacaaacgcgaaacgcgcgaaactaaaaacaccgcgaatacgaatacgaacgcgaaacgaaacgaactcacctacgcgtaataaaacaaccacaactcgtacaaccgctccgaaacgaccataacccgacccgactccgaccctactacgcgccacctatcgccgcctcctccgcgccgcccgccgattaccctcgaccaaacccataaacgaaaaacgtcactccgaaacgaaacgacgcgatactactaaaaaaatctacgactataacctccgcgacgcaaaaccacccaaatctactcgctcctcctcctcactaccgaccgccgcccaacttcctacacttcgctacaatcaccgccgccccgcctctcctaaaaccatataaaaaacgaaaaacctaacaaaaaaaaaaa

SEQ ID NO: 15157 - DNA, 574 bp, Artificial Sequence
  chemically treated genomic DNA (Homo sapiens) CpG-island No: 15157
gcgtatgcgcgacgatcgtattagcgttagaggagttttacgttaagtagttttagatatcgtgggagggcgtcgttttttcgcgtatgcgttagcgttcgcgtatgcgcgttttcggtagttgtttttttttattagttttttgttttttttaagcgcgattcggatttcgaacgttggacgttttaattgcgatttttattttatattttttattttgcgttcggttttttttcgtagggtttttagtcgtttttttcgtcgtaacgtttttttttttagtcggtttatattagtcgtagttgtttttattttgttcgcgtacgtttttttttttttttcgttttgtatcgcgtaggtttaaggagagtggataaatgtttcgcggttaatttaaggacgagaatgagagattgggaggttttgaaagttaattaatgcggggttattatgggcgagttttttttcgttttgtttcgtttcgtttcgtttcgtttttattttttcggataatttgtttagtgggtggggagttagtaaaaaaaaaaaagaaaaaaaaaaaagttaaggttcg

SEQ ID NO: 15158 - DNA, 574 bp, Artificial Sequence
  chemically treated genomic DNA (Homo sapiens) CpG-island No: 15158
cgaaccttaacttttttttttttcttttttttttttactaactccccacccactaaacaaattatccgaaaaaataaaaacgaaacgaaacgaaacgaaacaaaacgaaaaaaaactcgcccataataaccccgcattaattaactttcaaaacctcccaatctctcattctcgtccttaaattaaccgcgaaacatttatccactctccttaaacctacgcgatacaaaacgaaaaaaaaaaaaaaacgtacgcgaacaaaataaaaacaactacgactaatataaaccgactaaaaaaaaaaacgttacgacgaaaaaaacgactaaaaaccctacgaaaaaaaaccgaacgcaaaataaaaaatataaaataaaaatcgcaattaaaacgtccaacgttcgaaatccgaatcgcgcttaaaaaaaacaaaaaactaataaaaaaaaacaactaccgaaaacgcgcatacgcgaacgctaacgcatacgcgaaaaaacgacgccctcccacgatatctaaaactacttaacgtaaaactcctctaacgctaatacgatcgtcgcgcatacgc

SEQ ID NO: 15159 - DNA, 574 bp, Artificial Sequence
  chemically treated genomic DNA (Homo sapiens) CpG-island No: 15159
cgagttttagttttttttttttttttttttttttttgttggttttttatttattaggtaagttgttcggaagaataagggcggggcggggcggggcggggtaaggcggggaggggttcgtttataataatttcgtattgattggtttttaggattttttagttttttattttcgtttttggattggtcgcgagatatttatttattttttttaggtttgcgcgatgtaagacgggagaaaaggaggggcgtacgcgggtaagatggaggtaattacggttggtgtgggtcggttagaggaagaggcgttgcggcgaaaggaacggttgaaggttttacgggagaaaatcgggcgtaaggtgagaagtgtggagtgagggtcgtagttgaggcgtttagcgttcggggttcgggtcgcgtttgaggagagtaaagggttaataaggaaagatagttgtcgagggcgcgtatgcgcgggcgttaacgtatgcgcgagaagacggcgtttttttacgatgtttggggttgtttggcgtgggatttttttggcgttggtgcggtcgtcgcgtatgcgt

SEQ ID NO: 15160 - DNA, 574 bp, Artificial Sequence
  chemically treated genomic DNA (Homo sapiens) CpG-island No: 15160
acgcatacgcgacgaccgcaccaacgccaaaaaaatcccacgccaaacaaccccaaacatcgtaaaaaaacgccgtcttctcgcgcatacgttaacgcccgcgcatacgcgccctcgacaactatctttccttattaaccctttactctcctcaaacgcgacccgaaccccgaacgctaaacgcctcaactacgaccctcactccacacttctcaccttacgcccgattttctcccgtaaaaccttcaaccgttcctttcgccgcaacgcctcttcctctaaccgacccacaccaaccgtaattacctccatcttacccgcgtacgcccctccttttctcccgtcttacatcgcgcaaacctaaaaaaaataaataaatatctcgcgaccaatccaaaaacgaaaataaaaaactaaaaaatcctaaaaaccaatcaatacgaaattattataaacgaacccctccccgccttaccccgccccgccccgccccgcccttattcttccgaacaacttacctaataaataaaaaaccaacaaaaaaaaaaaaaaaaaaaaaaaaaactaaaactcg

SEQ ID NO: 15161 - DNA, 507 bp, Artificial Sequence
  chemically treated genomic DNA (Homo sapiens) CpG-island No: 15161
tttcgtcggcgcgtgttcgttgggttggtagaagttttcgggtggttcgcgcgtggttcggtcgcggcgggggtggtttcgcggttagttttggagttcgtcgtcgtcgtattaaggacggagtcggttttagacgcgttttggttcggttttttttcgtcggggagcgttttcggtttatatttaggttgcgtcggggtttggtaggttcggtcggaggaggcgtttttgaagtttcggttggtcgatcgggagggagatggatgatcgggtaggggtagggacgttggggtttcgtttggtttttacgattaggttagcgtaaggggttatcgtgcggcgcgggcgggtttcggggtagaaggggacgagcgtgcgtcggcgcgatcgagggagaattggcggtcgtttaatacgaaattggagtgggtgtgagataggagatggtgggagttagagaatagtgtgtgtgcgatagggggtgtgatagaagacgtagtgtgagtg

SEQ ID NO: 15162 - DNA, 507 bp, Artificial Sequence
  chemically treated genomic DNA (Homo sapiens) CpG-island No: 15162
cactcacactacgtcttctatcacaccccctatcgcacacacactattctctaactcccaccatctcctatctcacacccactccaatttcgtattaaacgaccgccaattctccctcgatcgcgccgacgcacgctcgtccccttctaccccgaaacccgcccgcgccgcacgataaccccttacgctaacctaatcgtaaaaaccaaacgaaaccccaacgtccctacccctacccgatcatccatctccctcccgatcgaccaaccgaaacttcaaaaacgcctcctccgaccgaacctaccaaaccccgacgcaacctaaatataaaccgaaaacgctccccgacgaaaaaaaaccgaaccaaaacgcgtctaaaaccgactccgtccttaatacgacgacgacgaactccaaaactaaccgcgaaaccacccccgccgcgaccgaaccacgcgcgaaccacccgaaaacttctaccaacccaacgaacacgcgccgacgaaa

SEQ ID NO: 15163 - DNA, 507 bp, Artificial Sequence
  chemically treated genomic DNA (Homo sapiens) CpG-island No: 15163
tatttatattgcgttttttgttatattttttgtcgtatatatattgttttttgatttttattattttttgttttatatttattttagtttcgtgttgagcggtcgttagttttttttcggtcgcgtcggcgtacgttcgtttttttttgtttcggagttcgttcgcgtcgtacggtggttttttgcgttggtttgatcgtgggaattaggcggggttttagcgtttttgtttttgttcggttatttatttttttttcggtcggttagtcgagattttaaaggcgtttttttcggtcgggtttgttaaatttcgacgtagtttggatgtgggtcgggggcgtttttcggcggggggaggtcgggttagggcgcgtttggggtcggtttcgtttttagtgcggcggcggcggattttagagttgatcgcggggttattttcgtcgcggtcgggttacgcgcgggttattcgggagtttttattagtttagcgagtacgcgtcggcggga

SEQ ID NO: 15164 - DNA, 507 bp, Artificial Sequence
  chemically treated genomic DNA (Homo sapiens) CpG-island No: 15164
tcccgccgacgcgtactcgctaaactaataaaaactcccgaataacccgcgcgtaacccgaccgcgacgaaaataaccccgcgatcaactctaaaatccgccgccgccgcactaaaaacgaaaccgaccccaaacgcgccctaacccgacctccccccgccgaaaaacgcccccgacccacatccaaactacgtcgaaatttaacaaacccgaccgaaaaaaacgcctttaaaatctcgactaaccgaccgaaaaaaaaataaataaccgaacaaaaacaaaaacgctaaaaccccgcctaattcccacgatcaaaccaacgcaaaaaaccaccgtacgacgcgaacgaactccgaaacaaaaaaaaacgaacgtacgccgacgcgaccgaaaaaaaactaacgaccgctcaacacgaaactaaaataaatataaaacaaaaaataataaaaatcaaaaaacaatatatatacgacaaaaaatataacaaaaaacgcaatataaata

SEQ ID NO: 15165 - DNA, 1021 bp, Artificial Sequence
  chemically treated genomic DNA (Homo sapiens) CpG-island No: 15165
tcgttttgcggggaattaggtttttcgtagtttttgtttcgggtttttttcggcggtcgtcgtatatttaaagagtttaaaaaggattaggtagtcgggtttttatgcgttttttgtcgggagggcgcgagttttgggttatcgagagtttggaggagggcgttaagggggcggttgcggcgcgttagttttcgattcgcgagtagtttcgggaggcgggagaaagagttttcggtttttaagattttagtttttttagtttagatcggtcgaagcgttcgggttttcggtattttttttttttcgggtagttgtaaaagtaattcggaaagcgtttgcgagttcgggtttgtcggatttcggtcgtttttagttattgggcgatatcgcgttattcggggtcgtgtataatagcgaaagttcgaggacgcgtttcgttcgattttatttttcgtttttttcgggtcgttcgtcgcggttttttattttttcgttcggagggttgttggcgtttcggggtcgcgcggcgtattcgtggggtttgcgtcgtttttttcggtcggtcggcgggtagtgtgcgacggtcgcggcgattgggttttcgtatttcggtcgtttcgcgcgtgtttgggtttcggtagtggggacggggtgggttggtgtttttatcgcgttttcgtattgatttgttgttgttttttggggcggtcgcgtttttttttttgaggcgttggggcggtaggttgtttttgggttgaagtggacggttgtttcgcgtttttatcgcgtgcgtttattttgtttttcgtcgtcgttatcgtcgttgtagtcgtttcgtttcgatcgtttcggagttgtttagtatttttcgggagatgaggtgatagggttggggacgtcggcggggcgagcgcgagttggcgggttgcgagggttgttgttgtttaggttgtcgtcgttgttattattaatatcggacgtttagcggttgttaaaaagagaagaggggaggaggaggagg

SEQ ID NO: 15166 - DNA, 1021 bp, Artificial Sequence
  chemically treated genomic DNA (Homo sapiens) CpG-island No: 15166
cctcctcctcctcccctcttctctttttaacaaccgctaaacgtccgatattaataataacaacgacgacaacctaaacaacaacaaccctcgcaacccgccaactcgcgctcgccccgccgacgtccccaaccctatcacctcatctcccgaaaaatactaaacaactccgaaacgatcgaaacgaaacgactacaacgacgataacgacgacgaaaaacaaaataaacgcacgcgataaaaacgcgaaacaaccgtccacttcaacccaaaaacaacctaccgccccaacgcctcaaaaaaaaaaacgcgaccgccccaaaaaacaacaacaaatcaatacgaaaacgcgataaaaacaccaacccaccccgtccccactaccgaaacccaaacacgcgcgaaacgaccgaaatacgaaaacccaatcgccgcgaccgtcgcacactacccgccgaccgaccgaaaaaaacgacgcaaaccccacgaatacgccgcgcgaccccgaaacgccaacaaccctccgaacgaaaaaataaaaaaccgcgacgaacgacccgaaaaaaacgaaaaataaaatcgaacgaaacgcgtcctcgaactttcgctattatacacgaccccgaataacgcgatatcgcccaataactaaaaacgaccgaaatccgacaaacccgaactcgcaaacgctttccgaattacttttacaactacccgaaaaaaaaaaaataccgaaaacccgaacgcttcgaccgatctaaactaaaaaaactaaaatcttaaaaaccgaaaactctttctcccgcctcccgaaactactcgcgaatcgaaaactaacgcgccgcaaccgcccccttaacgccctcctccaaactctcgataacccaaaactcgcgccctcccgacaaaaaacgcataaaaacccgactacctaatcctttttaaactctttaaatatacgacgaccgccgaaaaaaacccgaaacaaaaactacgaaaaacctaattccccgcaaaacga

SEQ ID NO: 15167 - DNA, 1021 bp, Artificial Sequence
  chemically treated genomic DNA (Homo sapiens) CpG-island No: 15167
ttttttttttttttttttttttttttttggtagtcgttggacgttcggtgttgatggtggtagcggcggtagtttaagtaatagtagttttcgtagttcgttagttcgcgttcgtttcgtcggcgtttttagttttattattttatttttcgaaaggtgttgggtagtttcggggcggtcgaggcgaagcggttgtagcggcggtagcggcggcgggaggtaggatgagcgtacgcggtgagggcgcggggtagtcgtttattttagtttagggataatttgtcgttttagcgttttagaagagaggacgcggtcgttttaggaagtagtagtaagttagtacgagggcgcggtgggggtattagtttatttcgtttttattgtcggggtttagatacgcgcggggcggtcggagtgcgggagtttagtcgtcgcggtcgtcgtatattgttcgtcggtcggtcggggggagcggcgtagattttacgagtgcgtcgcgcggtttcggggcgttagtaatttttcgggcggggaggtggggagtcgcggcgggcggttcggggaaggcgggaggtggggtcgggcgaagcgcgttttcggattttcgttattgtgtacggtttcgagtggcgcggtgtcgtttagtgattggaagcgatcgggattcgataaattcgggttcgtaggcgtttttcgagttgtttttgtaattgttcgggaggaaggaggtgtcggggattcgggcgtttcggtcgatttgggttgaaggggttagagttttgggggtcggaggttttttttttcgtttttcggggttgttcgcgggtcgggggttggcgcgtcgtagtcgtttttttggcgtttttttttaagttttcggtggtttaagattcgcgttttttcgataaagaacgtatggagattcggttgtttggttttttttgggttttttaaatatgcggcggtcgtcggagggagttcggggtaggggttacggggagtttggtttttcgtaggacgg

SEQ ID NO: 15168 - DNA, 1021 bp, Artificial Sequence
  chemically treated genomic DNA (Homo sapiens) CpG-island No: 15168
ccgtcctacgaaaaaccaaactccccgtaacccctaccccgaactccctccgacgaccgccgcatatttaaaaaacccaaaaaaaaccaaacaaccgaatctccatacgttctttatcgaaaaaacgcgaatcttaaaccaccgaaaacttaaaaaaaaacgccaaaaaaacgactacgacgcgccaacccccgacccgcgaacaaccccgaaaaacgaaaaaaaaaacctccgacccccaaaactctaaccccttcaacccaaatcgaccgaaacgcccgaatccccgacacctccttcctcccgaacaattacaaaaacaactcgaaaaacgcctacgaacccgaatttatcgaatcccgatcgcttccaatcactaaacgacaccgcgccactcgaaaccgtacacaataacgaaaatccgaaaacgcgcttcgcccgaccccacctcccgccttccccgaaccgcccgccgcgactccccacctccccgcccgaaaaattactaacgccccgaaaccgcgcgacgcactcgtaaaatctacgccgctccccccgaccgaccgacgaacaatatacgacgaccgcgacgactaaactcccgcactccgaccgccccgcgcgtatctaaaccccgacaataaaaacgaaataaactaatacccccaccgcgccctcgtactaacttactactacttcctaaaacgaccgcgtcctctcttctaaaacgctaaaacgacaaattatccctaaactaaaataaacgactaccccgcgccctcaccgcgtacgctcatcctacctcccgccgccgctaccgccgctacaaccgcttcgcctcgaccgccccgaaactacccaacacctttcgaaaaataaaataataaaactaaaaacgccgacgaaacgaacgcgaactaacgaactacgaaaactactattacttaaactaccgccgctaccaccatcaacaccgaacgtccaacgactaccaaaaaaaaaaaaaaaaaaaaaaaaaaaa

SEQ ID NO: 15169 - DNA, 801 bp, Artificial Sequence
  chemically treated genomic DNA (Homo sapiens) CpG-island No: 15169
gagcgatgggttggtggaagtcggagaggagcgttaggagtcgcggcggcggcgcgaggtgtagaaggaggcgaacgcgttcgtagtggcggtgatgggcggaggaggaggaagaggaggaggaggaagaggaggagggggaaaacgatgataggagttggggtcggggggggaaattggggggacgcgggcggaggcgcggtgcgcgtcggcggtggcgggtacgagtttcgcgtttggaggaggaggagttaggtcgggtaggagggttaaggaggttttcgggaaggtagggttttttttacggtcgataggttatgattcgcgttagtaatgtattcgggatatcgttaatacgtgggttaaaatcgataaacggcgttacgttttgtagtttttttagttattttattaataattcgtcgtagggcgaggttagttgataatcggaaaaatagagtaggttgttaggcgtaacggttaatcgcgttagttattggcgattttattgatttttaatatcgttgaatgatataaaagtgcgttcgttttttttttttttttatatatatatatttttttgtttcgatttttcgatttttggtaattgatcgtcgttcgtttggtattagtagcggcgtagattcgggcggcgtcgggcgtttgggtgcgttcggagcgtcgtttttttcgtttatatttcgtcggaggagcggagtttacgcgtagtttcgggttgtttttcgaggtcgtttgttggggttttcgagaggttttaaggtttttgatagagttgttgtt

SEQ ID NO: 15170 - DNA, 801 bp, Artificial Sequence
  chemically treated genomic DNA (Homo sapiens) CpG-island No: 15170
aacaacaactctatcaaaaaccttaaaacctctcgaaaaccccaacaaacgacctcgaaaaacaacccgaaactacgcgtaaactccgctcctccgacgaaatataaacgaaaaaaacgacgctccgaacgcacccaaacgcccgacgccgcccgaatctacgccgctactaataccaaacgaacgacgatcaattaccaaaaatcgaaaaatcgaaacaaaaaaatatatatatataaaaaaaaaaaaaaaacgaacgcacttttatatcattcaacgatattaaaaatcaataaaatcgccaataactaacgcgattaaccgttacgcctaacaacctactctatttttccgattatcaactaacctcgccctacgacgaattattaataaaataactaaaaaaactacaaaacgtaacgccgtttatcgattttaacccacgtattaacgatatcccgaatacattactaacgcgaatcataacctatcgaccgtaaaaaaaaccctaccttcccgaaaacctccttaaccctcctacccgacctaactcctcctcctccaaacgcgaaactcgtacccgccaccgccgacgcgcaccgcgcctccgcccgcgtccccccaatttccccccccgaccccaactcctatcatcgttttccccctcctcctcttcctcctcctcctcttcctcctcctccgcccatcaccgccactacgaacgcgttcgcctccttctacacctcgcgccgccgccgcgactcctaacgctcctctccgacttccaccaacccatcgctc

SEQ ID NO: 15171 - DNA, 801 bp, Artificial Sequence
  chemically treated genomic DNA (Homo sapiens) CpG-island No: 15171
aatagtagttttgttaggaattttggggtttttcgggagttttagtaagcggtttcggggagtagttcgaggttgcgcgtgggtttcgttttttcggcgaggtgtgggcgaggggagcggcgtttcgagcgtatttaggcgttcgacgtcgttcgggtttgcgtcgttgttagtgttaggcgggcgacggttagttattagggatcgagggatcgaggtaggggagtgtgtgtgtgtggggggggggggagggcgaacgtatttttatgttatttagcggtgttgaaaattagtggaatcgttagtggttggcgcgattaatcgttgcgtttggtagtttgttttattttttcggttattaattggtttcgttttgcggcgaattgttagtggaatggttggaagagttgtaagacgtgacgtcgtttatcgattttggtttacgtattggcgatatttcggatgtattattggcgcggattatggtttgtcgatcgtaaggggggttttgttttttcgggaatttttttagtttttttattcggtttgatttttttttttttaggcgcggggttcgtgttcgttatcgtcggcgcgtatcgcgttttcgttcgcgtttttttaattttttttttcggttttagtttttgttatcgttttttttttttttttttttttttttttttttttttttttttttcgtttattatcgttattacgaacgcgttcgtttttttttatatttcgcgtcgtcgtcgcggtttttagcgttttttttcggtttttattagtttatcgttt

SEQ ID NO: 15172 - DNA, 801 bp, Artificial Sequence
  chemically treated genomic DNA (Homo sapiens) CpG-island No: 15172
aaacgataaactaataaaaaccgaaaaaaaacgctaaaaaccgcgacgacgacgcgaaatataaaaaaaaacgaacgcgttcgtaataacgataataaacgaaaaaaaaaaaaaaaaaaaaaaaaaaaaaaaaaaaaaaaaaaaacgataacaaaaactaaaaccgaaaaaaaaaattaaaaaaacgcgaacgaaaacgcgatacgcgccgacgataacgaacacgaaccccgcgcctaaaaaaaaaaaaatcaaaccgaataaaaaaactaaaaaaattcccgaaaaaacaaaaccccccttacgatcgacaaaccataatccgcgccaataatacatccgaaatatcgccaatacgtaaaccaaaatcgataaacgacgtcacgtcttacaactcttccaaccattccactaacaattcgccgcaaaacgaaaccaattaataaccgaaaaaataaaacaaactaccaaacgcaacgattaatcgcgccaaccactaacgattccactaattttcaacaccgctaaataacataaaaatacgttcgccctccccccccccccacacacacacactcccctacctcgatccctcgatccctaataactaaccgtcgcccgcctaacactaacaacgacgcaaacccgaacgacgtcgaacgcctaaatacgctcgaaacgccgctcccctcgcccacacctcgccgaaaaaacgaaacccacgcgcaacctcgaactactccccgaaaccgcttactaaaactcccgaaaaaccccaaaattcctaacaaaactactatt

SEQ ID NO: 15173 - DNA, 523 bp, Artificial Sequence
  chemically treated genomic DNA (Homo sapiens) CpG-island No: 15173
ttcgagatcgtgcggacgcgggttcggatattagattcggattttagttcgataagtgaattttaatttttaacgttttcgatatcggaattcgaattttcgaattttcgatttttagtttcggttttcggattcggttttttttttttgattcgaattcggattttcgttacgtatttgtttttagttttttcggtggagtttagttttcgttcgcggggtagtcgcgtcgatagtaagtataaggcgaaggtgtagtcggcgaagattagaaggaggtcgagaagcgggcgtatgtcggtttcgtatttcggttcgcggggtagtcgagaagtttatttgtatttcgggacgtagcggcgggcggattgagttcgcggagtacgtttattgacggattagggaggggttcgcgtcgagattcgttttcgaattaggttttattttttgagttaggttttcgttttcgattttgatttcgttttttttgtttttcggtggagatttcgggaaaaatttgttt

SEQ ID NO: 15174 - DNA, 523 bp, Artificial Sequence
  chemically treated genomic DNA (Homo sapiens) CpG-island No: 15174
aaacaaatttttcccgaaatctccaccgaaaaacaaaaaaaacgaaatcaaaatcgaaaacgaaaacctaactcaaaaaataaaacctaattcgaaaacgaatctcgacgcgaacccctccctaatccgtcaataaacgtactccgcgaactcaatccgcccgccgctacgtcccgaaatacaaataaacttctcgactaccccgcgaaccgaaatacgaaaccgacatacgcccgcttctcgacctccttctaatcttcgccgactacaccttcgccttatacttactatcgacgcgactaccccgcgaacgaaaactaaactccaccgaaaaaactaaaaacaaatacgtaacgaaaatccgaattcgaatcaaaaaaaaaaaaccgaatccgaaaaccgaaactaaaaatcgaaaattcgaaaattcgaattccgatatcgaaaacgttaaaaattaaaattcacttatcgaactaaaatccgaatctaatatccgaacccgcgtccgcacgatctcgaa

SEQ ID NO: 15175 - DNA, 523 bp, Artificial Sequence
  chemically treated genomic DNA (Homo sapiens) CpG-island No: 15175
aggtaggtttttttcggagtttttatcgaaggatagagagggcggagttagaatcgggggcgggggtttggtttaggaggtggggtttggttcggaggcgggtttcggcgcggatttttttttggttcgttagtgaacgtgtttcgcgggtttagttcgttcgtcgttgcgtttcggagtgtaagtgagtttttcggttgtttcgcgggtcggggtgcggagtcgatatgcgttcgtttttcggtttttttttggttttcgtcggttgtattttcgttttgtatttgttgtcgacgcgattgtttcgcgggcggagattgggttttatcgaggaggttggaggtaggtgcgtggcgggaattcgggttcgggttagaggaagggagtcgggttcgaggatcggggttgggaatcggagattcggagattcgggtttcggtatcggaggcgttgggaattgaggtttatttatcggattggaattcgggtttggtattcgggttcgcgttcgtacggtttcgga

SEQ ID NO: 15176 - DNA, 523 bp, Artificial Sequence
  chemically treated genomic DNA (Homo sapiens) CpG-island No: 15176
tccgaaaccgtacgaacgcgaacccgaataccaaacccgaattccaatccgataaataaacctcaattcccaacgcctccgataccgaaacccgaatctccgaatctccgattcccaaccccgatcctcgaacccgactcccttcctctaacccgaacccgaattcccgccacgcacctacctccaacctcctcgataaaacccaatctccgcccgcgaaacaatcgcgtcgacaacaaatacaaaacgaaaatacaaccgacgaaaaccaaaaaaaaaccgaaaaacgaacgcatatcgactccgcaccccgacccgcgaaacaaccgaaaaactcacttacactccgaaacgcaacgacgaacgaactaaacccgcgaaacacgttcactaacgaaccaaaaaaaaatccgcgccgaaacccgcctccgaaccaaaccccacctcctaaaccaaacccccgcccccgattctaactccgccctctctatccttcgataaaaactccgaaaaaaacctacct

SEQ ID NO: 15177 - DNA, 577 bp, Artificial Sequence
  chemically treated genomic DNA (Homo sapiens) CpG-island No: 15177
gaggaggtcgttgtgagtcggcgacgcgaggttgggggagtgggaggtaaattcgttaatttgtcgtcgaatggttatttttagtttttcgtttacgagggtggaaaggtagaaggtttgaaggtaaggcgtgagggagcgtttaggacgttttcggaggggtcgggtcggggtttgcgttgtagttcgtacgtattttattttcgcgtcgcggcgttcggtcgttcgtttttttttttgggttttttttggtcgtcgtcgtttttttttttttagttttttttttttttttttttttcggtttttcgtttttatcgttgatttgttagcgtttttgttcgtttttttttcggcgttcgttgttttttttgtagcgtgtttttcgtttttatttcggatggggatggggtagggggcgcggggtgagttattaattttagtcgtttgtttggtcgcgtaaggcgggaaagtgggggcgtttttgcgttttacgttaagtttagggttacgagtatttttgtggagatcgggagcggttgggttagggatgatgtttttttttttttttttttttttt

SEQ ID NO: 15178 - DNA, 577 bp, Artificial Sequence
  chemically treated genomic DNA (Homo sapiens) CpG-island No: 15178
aaaaaaaaaaaaaaaaaaaaaaaacatcatccctaacccaaccgctcccgatctccacaaaaatactcgtaaccctaaacttaacgtaaaacgcaaaaacgcccccactttcccgccttacgcgaccaaacaaacgactaaaattaataactcaccccgcgccccctaccccatccccatccgaaataaaaacgaaaaacacgctacaaaaaaaacaacgaacgccgaaaaaaaaacgaacaaaaacgctaacaaatcaacgataaaaacgaaaaaccgaaaaaaaaaaaaaaaaaaaaaactaaaaaaaaaaaaacgacgacgaccaaaaaaaacccaaaaaaaaaaacgaacgaccgaacgccgcgacgcgaaaataaaatacgtacgaactacaacgcaaaccccgacccgacccctccgaaaacgtcctaaacgctccctcacgccttaccttcaaaccttctacctttccaccctcgtaaacgaaaaactaaaaataaccattcgacgacaaattaacgaatttacctcccactcccccaacctcgcgtcgccgactcacaacgacctcctc

SEQ ID NO: 15179 - DNA, 577 bp, Artificial Sequence
  chemically treated genomic DNA (Homo sapiens) CpG-island No: 15179
gggggaaggggaaagaggaagaggtattatttttagtttaatcgttttcgatttttataagagtgttcgtgattttaaatttaacgtgaggcgtaaaagcgtttttattttttcgttttgcgcggttaggtaggcggttggagttgatggtttatttcgcgttttttgttttatttttattcgagatagggacgaggagtacgttgtagggaaagtagcgagcgtcgggagaggggcgggtagaagcgttgataaattagcggtgggggcggagagtcgaggagaaggagaaggaggaggattaggaggaggaggacggcgacgattagaaggggtttaagagagggggcgagcgatcgagcgtcgcgacgcggaagtgaggtgcgtgcgggttgtagcgtagatttcggttcggttttttcgagagcgttttgggcgtttttttacgttttgtttttaagttttttgtttttttattttcgtgagcggagaattgggagtggttattcgacgataggttagcgggtttgttttttatttttttagtttcgcgtcgtcggtttatagcggttttttt

SEQ ID NO: 15180 - DNA, 577 bp, Artificial Sequence
  chemically treated genomic DNA (Homo sapiens) CpG-island No: 15180
aaaaaaaccgctataaaccgacgacgcgaaactaaaaaaataaaaaacaaacccgctaacctatcgtcgaataaccactcccaattctccgctcacgaaaataaaaaaacaaaaaacttaaaaacaaaacgtaaaaaaacgcccaaaacgctctcgaaaaaaccgaaccgaaatctacgctacaacccgcacgcacctcacttccgcgtcgcgacgctcgatcgctcgccccctctcttaaaccccttctaatcgtcgccgtcctcctcctcctaatcctcctccttctccttctcctcgactctccgcccccaccgctaatttatcaacgcttctacccgcccctctcccgacgctcgctactttccctacaacgtactcctcgtccctatctcgaataaaaataaaacaaaaaacgcgaaataaaccatcaactccaaccgcctacctaaccgcgcaaaacgaaaaaataaaaacgcttttacgcctcacgttaaatttaaaatcacgaacactcttataaaaatcgaaaacgattaaactaaaaataatacctcttcctctttccccttccccc

SEQ ID NO: 15181 - DNA, 664 bp, Artificial Sequence
  chemically treated genomic DNA (Homo sapiens) CpG-island No: 15181
cgtagtttaggtagaagaaggcggcgcgtagacgtagcgataggtagttgaatacgtgcgtcgtgtagtttatggcgaaggttagtagtattttcgacgcgtagtattataacggtagtagttacgggtggtggaagggtacgtcgtcgtcgtttaggaagaatagacggtagaatttgtttaggaatagtagtagcgggatgaagtgcgtttagaagttgagcgtttcgttggtaggttttagtatcgaggttaggtatttttgggtcgtgtacggtagacgtcggtagttcgataggatgaagtattttacgaagtcgtcgggtatttcgttttagcgtagtagcggtttggtagacgttggggggtttcgggaggcggtagagtgggagtttcgggcggttttcgaagttgtcggggtcggggtcggagggttttttgtgttcgcgtttcggggttgtaggcgtcgcggtatggtgttcggggttcggttagggcgcgcgtaggcgatttttggcgtcggttttcgggcgttgggtagttttcgtcggtcgtcgtcggagtttttgtgtttacgtcgggggcgtcgttgtaggtttaggagaagattcgtgttttcgagtagtcgtttttaaaaattaaataaattaataagagaattaat

SEQ ID NO: 15182 - DNA, 664 bp, Artificial Sequence
  chemically treated genomic DNA (Homo sapiens) CpG-island No: 15182
attaattctcttattaatttatttaatttttaaaaacgactactcgaaaacacgaatcttctcctaaacctacaacgacgcccccgacgtaaacacaaaaactccgacgacgaccgacgaaaactacccaacgcccgaaaaccgacgccaaaaatcgcctacgcgcgccctaaccgaaccccgaacaccataccgcgacgcctacaaccccgaaacgcgaacacaaaaaaccctccgaccccgaccccgacaacttcgaaaaccgcccgaaactcccactctaccgcctcccgaaaccccccaacgtctaccaaaccgctactacgctaaaacgaaatacccgacgacttcgtaaaatacttcatcctatcgaactaccgacgtctaccgtacacgacccaaaaatacctaacctcgatactaaaacctaccaacgaaacgctcaacttctaaacgcacttcatcccgctactactattcctaaacaaattctaccgtctattcttcctaaacgacgacgacgtacccttccaccacccgtaactactaccgttataatactacgcgtcgaaaatactactaaccttcgccataaactacacgacgcacgtattcaactacctatcgctacgtctacgcgccgccttcttctacctaaactacg

SEQ ID NO: 15183 - DNA, 664 bp, Artificial Sequence
  chemically treated genomic DNA (Homo sapiens) CpG-island No: 15183
attgatttttttattgatttatttaatttttaggagcggttgttcggaggtacgggtttttttttaaatttgtagcgacgttttcggcgtgggtataaaggtttcgacggcggtcggcgggggttgtttagcgttcgggagtcggcgttagaggtcgtttgcgcgcgttttagtcgagtttcgggtattatgtcgcggcgtttgtagtttcggggcgcgggtataaaaggtttttcggtttcggtttcggtagtttcgggggtcgttcggaatttttattttgtcgtttttcgggattttttagcgtttgttaagtcgttgttgcgttgggacgaggtgttcgacgatttcgtggagtgttttattttgtcgggttatcggcgtttgtcgtgtacggtttaggagtgtttagtttcggtgttgaagtttattaacgagacgtttaatttttggacgtattttatttcgttgttgttgtttttgagtaagttttgtcgtttgttttttttgagcggcggcgacgtgtttttttattattcgtggttgttatcgttgtggtgttacgcgtcgggagtgttgttgattttcgttatgagttgtacggcgtacgtgtttagttgtttgtcgttgcgtttgcgcgtcgtttttttttatttggattacg

SEQ ID NO: 15184 - DNA, 664 bp, Artificial Sequence
  chemically treated genomic DNA (Homo sapiens) CpG-island No: 15184
cgtaatccaaataaaaaaaaacgacgcgcaaacgcaacgacaaacaactaaacacgtacgccgtacaactcataacgaaaatcaacaacactcccgacgcgtaacaccacaacgataacaaccacgaataataaaaaaacacgtcgccgccgctcaaaaaaaacaaacgacaaaacttactcaaaaacaacaacaacgaaataaaatacgtccaaaaattaaacgtctcgttaataaacttcaacaccgaaactaaacactcctaaaccgtacacgacaaacgccgataacccgacaaaataaaacactccacgaaatcgtcgaacacctcgtcccaacgcaacaacgacttaacaaacgctaaaaaatcccgaaaaacgacaaaataaaaattccgaacgacccccgaaactaccgaaaccgaaaccgaaaaaccttttatacccgcgccccgaaactacaaacgccgcgacataatacccgaaactcgactaaaacgcgcgcaaacgacctctaacgccgactcccgaacgctaaacaacccccgccgaccgccgtcgaaacctttatacccacgccgaaaacgtcgctacaaatttaaaaaaaaacccgtacctccgaacaaccgctcctaaaaattaaataaatcaataaaaaaatcaat

SEQ ID NO: 15185 - DNA, 745 bp, Artificial Sequence
  chemically treated genomic DNA (Homo sapiens) CpG-island No: 15185
agttcgacgttattttttttttttttatttattttataggttttgcgttttacgcgcgttacgcgttcgtgaggtttatacgtttttcggttatatttgttacgttattagttttatattttttacgttattttttttttattacgattattcgtaatattttcgagagttatttttttagaaggtatcgcgtaatagcggtagcgttttcgcgattatcgtttattcgaatcgcgtattttttttttttttcgtttatttttatttttatcgttttattattttaattttttttttattttttatagcgaaacgaatgtattcgtttgtttttttagtagcgttatttttttttgtttcgtatcgtttatttttcgggttatttttttattttcgttacgtttcggttttgtcgcgtatttttttttttattcgtatttcgttcgtttttttttttttttcgcgttttttattttttgtttttatttatttatttattttttattttattttattttaatttacgttgttcgcgatatttttatatataatttttcgttgtatttttcgtttaacgttaatttgtaattttatcgcgtaaacgataatttatttatagcgtattttttattcgaatacgcgttatttttattgttatttttttttttattatttttattttattcgtattattttattcgacgacgtatatttattttgtttttagtttatatcgtacgattat

SEQ ID NO: 15186 - DNA, 745 bp, Artificial Sequence
  chemically treated genomic DNA (Homo sapiens) CpG-island No: 15186
ataatcgtacgatataaactaaaaacaaaataaatatacgtcgtcgaataaaataatacgaataaaataaaaataataaaaaaaaaaataacaataaaaataacgcgtattcgaataaaaaatacgctataaataaattatcgtttacgcgataaaattacaaattaacgttaaacgaaaaatacaacgaaaaattatatataaaaatatcgcgaacaacgtaaattaaaataaaataaaataaaaaataaataaataaataaaaacaaaaaataaaaaacgcgaaaaaaaaaaaaaaacgaacgaaatacgaataaaaaaaaaaatacgcgacaaaaccgaaacgtaacgaaaataaaaaaataacccgaaaaataaacgatacgaaacaaaaaaaaataacgctactaaaaaaacaaacgaatacattcgtttcgctataaaaaataaaaaaaaaattaaaataataaaacgataaaaataaaaataaacgaaaaaaaaaaaaaatacgcgattcgaataaacgataatcgcgaaaacgctaccgctattacgcgataccttctaaaaaaataactctcgaaaatattacgaataatcgtaataaaaaaaaaataacgtaaaaaatataaaactaataacgtaacaaatataaccgaaaaacgtataaacctcacgaacgcgtaacgcgcgtaaaacgcaaaacctataaaataaataaaaaaaaaaaaaataacgtcgaact

SEQ ID NO: 15187 - DNA, 745 bp, Artificial Sequence
  chemically treated genomic DNA (Homo sapiens) CpG-island No: 15187
ataatcgtgcgatgtaggttggagatagagtagatgtgcgtcgtcgaatggggtgatgcggatggagtgaaagtagtaagaggaggagtaatagtgagggtagcgcgtgttcgggtagagggtgcgttatagatgggttgtcgtttgcgcggtagagttgtagattggcgttggacgagaggtatagcgggaggttgtatatggaggtgtcgcgagtagcgtggattaaggtggggtgaggtggaaagtgagtgagtgagtgagggtagagggtgagaggcgcggggagggaagaggagcgggcggggtgcgggtgggggagggagtgcgcgatagggtcgaagcgtagcgagggtgggggagtggttcggggagtaggcggtgcggagtagagagaaatagcgttgttgaagggatagacgagtgtattcgtttcgttatgggggatggggggggggttgaggtgatgaagcggtgggggtaagagtaagcgggaagagggggaggtacgcgattcgggtagacggtggtcgcgagagcgttgtcgttgttacgcggtgttttttgggagggtagttttcgagggtgttacgaatggtcgtggtgggggaaagatggcgtgaggagtatgaagttagtggcgtgataagtgtgatcggggagcgtgtaggttttacggacgcgtggcgcgcgtaaggcgtagggtttataaggtaggtgaggaagaggaaggtgacgtcgagtt

SEQ ID NO: 15188 - DNA, 745 bp, Artificial Sequence
  chemically treated genomic DNA (Homo sapiens) CpG-island No: 15188
aactcgacgtcaccttcctcttcctcacctaccttataaaccctacgccttacgcgcgccacgcgtccgtaaaacctacacgctccccgatcacacttatcacgccactaacttcatactcctcacgccatctttcccccaccacgaccattcgtaacaccctcgaaaactaccctcccaaaaaacaccgcgtaacaacgacaacgctctcgcgaccaccgtctacccgaatcgcgtacctccccctcttcccgcttactcttacccccaccgcttcatcacctcaaccccccccccatcccccataacgaaacgaatacactcgtctatcccttcaacaacgctatttctctctactccgcaccgcctactccccgaaccactcccccaccctcgctacgcttcgaccctatcgcgcactccctcccccacccgcaccccgcccgctcctcttccctccccgcgcctctcaccctctaccctcactcactcactcactttccacctcaccccaccttaatccacgctactcgcgacacctccatatacaacctcccgctatacctctcgtccaacgccaatctacaactctaccgcgcaaacgacaacccatctataacgcaccctctacccgaacacgcgctaccctcactattactcctcctcttactactttcactccatccgcatcaccccattcgacgacgcacatctactctatctccaacctacatcgcacgattat

SEQ ID NO: 15189 - DNA, 796 bp, Artificial Sequence
  chemically treated genomic DNA (Homo sapiens) CpG-island No: 15189
ttaaaggcgtcgtcgggcggcgtagtttagtttttcgagacggcgggttcgggtttttcggtttttacgggacgtcgggattcggatttttgggaaagttcgcgggtatagttcgaggttttattttttgtcgagagtgataggttttttttacgtttgtcggttttagtttagtcgcgggtattagacggttcgcgcggttttttttggtcgtttcggggcgtagatttcgttcgttcgttttattttcggtcgaggcgtttttcggggtgatcgattgatcggagtttcgttggtttatatatcgggtcgttcgttttttttcgtcgcgtttcgttttttcgttcgagtttttagtcgtcggttcgttaagttcggtcgcggtcgtcggttatcgtttttagttcggggggagttcggggggtaggacggggaggaggacgtggcgtgttcggaggtggttagtagcggggcggggagtgtttcggagaggtttagtcggggacgggggggttaggtcggcgcgggttcgggatttttttcgcgagtattttcgggttcgaggttttcgatcgttttcgtcggcgcggagaggcggttttaatttttagttttatttcgtattttcgtttttttttttttattatatggaaatttatagttttagaaagtgatacgtcgaagatttttcggtttcgtcgttcgtttttttttttttgggtagcgtttttgtcgcggagatttcgggagggggagcggatttttcggataaaatttgttgggaaggttgggggtg

SEQ ID NO: 15190 - DNA, 796 bp, Artificial Sequence
  chemically treated genomic DNA (Homo sapiens) CpG-island No: 15190
cacccccaaccttcccaacaaattttatccgaaaaatccgctccccctcccgaaatctccgcgacaaaaacgctacccaaaaaaaaaaaaacgaacgacgaaaccgaaaaatcttcgacgtatcactttctaaaactataaatttccatataataaaaaaaaaaaaacgaaaatacgaaataaaactaaaaattaaaaccgcctctccgcgccgacgaaaacgatcgaaaacctcgaacccgaaaatactcgcgaaaaaaatcccgaacccgcgccgacctaacccccccgtccccgactaaacctctccgaaacactccccgccccgctactaaccacctccgaacacgccacgtcctcctccccgtcctaccccccgaactccccccgaactaaaaacgataaccgacgaccgcgaccgaacttaacgaaccgacgactaaaaactcgaacgaaaaaacgaaacgcgacgaaaaaaaacgaacgacccgatatataaaccaacgaaactccgatcaatcgatcaccccgaaaaacgcctcgaccgaaaataaaacgaacgaacgaaatctacgccccgaaacgaccaaaaaaaaccgcgcgaaccgtctaatacccgcgactaaactaaaaccgacaaacgtaaaaaaaacctatcactctcgacaaaaaataaaacctcgaactatacccgcgaactttcccaaaaatccgaatcccgacgtcccgtaaaaaccgaaaaacccgaacccgccgtctcgaaaaactaaactacgccgcccgacgacgcctttaa

SEQ ID NO: 15191 - DNA, 796 bp, Artificial Sequence
  chemically treated genomic DNA (Homo sapiens) CpG-island No: 15191
tatttttagtttttttagtagattttgttcgaggaattcgttttttttttcggaattttcgcggtaggaacgttgtttaggagggggagggcgggcggcgaggtcgaggaattttcgacgtgttattttttgaggttgtagatttttatatggtggagggaagagggcgggagtgcgaagtggggttggaagttggggtcgttttttcgcgtcggcgggggcggtcgggggtttcgaattcggggatgttcgcggggagggtttcgagttcgcgtcggtttggttttttcgttttcggttgggttttttcgggatatttttcgtttcgttgttggttattttcgagtacgttacgttttttttttcgttttgtttttcgggtttttttcgggttgggggcggtaatcggcggtcgcggtcggatttggcgagtcggcggttggaagttcgggcgggggagcggggcgcggcgggaaggagcgggcgattcggtgtgtgggttagcggagtttcggttagtcggttatttcgaggggcgtttcggtcggggatagggcgggcgggcggaatttgcgtttcgaggcggttaggaggggtcgcgcggatcgtttggtgttcgcggttgggttggggtcggtaggcgtgggaagggtttgttattttcggtagaaagtggggtttcgggttgtgttcgcgaatttttttagaggttcgggtttcggcgtttcgtgggaatcggaggattcgggttcgtcgtttcgggagattgggttgcgtcgttcggcggcgtttttgg

SEQ ID NO: 15192 - DNA, 796 bp, Artificial Sequence
  chemically treated genomic DNA (Homo sapiens) CpG-island No: 15192
ccaaaaacgccgccgaacgacgcaacccaatctcccgaaacgacgaacccgaatcctccgattcccacgaaacgccgaaacccgaacctctaaaaaaattcgcgaacacaacccgaaaccccactttctaccgaaaataacaaacccttcccacgcctaccgaccccaacccaaccgcgaacaccaaacgatccgcgcgacccctcctaaccgcctcgaaacgcaaattccgcccgcccgccctatccccgaccgaaacgcccctcgaaataaccgactaaccgaaactccgctaacccacacaccgaatcgcccgctccttcccgccgcgccccgctcccccgcccgaacttccaaccgccgactcgccaaatccgaccgcgaccgccgattaccgcccccaacccgaaaaaaacccgaaaaacaaaacgaaaaaaaaaacgtaacgtactcgaaaataaccaacaacgaaacgaaaaatatcccgaaaaaacccaaccgaaaacgaaaaaaccaaaccgacgcgaactcgaaaccctccccgcgaacatccccgaattcgaaacccccgaccgcccccgccgacgcgaaaaaacgaccccaacttccaaccccacttcgcactcccgccctcttccctccaccatataaaaatctacaacctcaaaaaataacacgtcgaaaattcctcgacctcgccgcccgccctccccctcctaaacaacgttcctaccgcgaaaattccgaaaaaaaaaacgaattcctcgaacaaaatctactaaaaaaactaaaaata

SEQ ID NO: 15193 - DNA, 508 bp, Artificial Sequence
  chemically treated genomic DNA (Homo sapiens) CpG-island No: 15193
ttcggcgttaagtttttgtcgggaagtttagggcgttttcgggatagggacgtattttggcggattcggcgttaggtcggggttttttagtgtatcgggattcggcgatcgcgttcggggtttcggttttttttagttttcggtttttgtacgttttattttttttagggttgaaacgcggggttttgggcgcgttatatatcgggtcgtttacgtttttttagtcggtagtttggaggatttttgtcgtttttttcgttgttttcgtcgtcgtcgttttttttttttagtcgtcgtcgtcgtcgtttaaataattattaggagggtttgatgggggatttcgttatgttaatgatgtcgggattatatggggatttggggttcgtttattatcgtaaatcgtcgaatatatcggtcgttataatcgtagattcgtagaagttgttgtttttcggttttgtttagttaagtagaaattttttttggtttagttagattaaagaaattt

SEQ ID NO: 15194 - DNA, 508 bp, Artificial Sequence
  chemically treated genomic DNA (Homo sapiens) CpG-island No: 15194
aaatttctttaatctaactaaaccaaaaaaaatttctacttaactaaacaaaaccgaaaaacaacaacttctacgaatctacgattataacgaccgatatattcgacgatttacgataataaacgaaccccaaatccccatataatcccgacatcattaacataacgaaatcccccatcaaaccctcctaataattatttaaacgacgacgacgacgactaaaaaaaaaaaacgacgacgacgaaaacaacgaaaaaaacgacaaaaatcctccaaactaccgactaaaaaaacgtaaacgacccgatatataacgcgcccaaaaccccgcgtttcaaccctaaaaaaaataaaacgtacaaaaaccgaaaactaaaaaaaaccgaaaccccgaacgcgatcgccgaatcccgatacactaaaaaaccccgacctaacgccgaatccgccaaaatacgtccctatcccgaaaacgccctaaacttcccgacaaaaacttaacgccgaa

SEQ ID NO: 15195 - DNA, 508 bp, Artificial Sequence
  chemically treated genomic DNA (Homo sapiens) CpG-island No: 15195
aggtttttttagtttggttgaattaaaaggagtttttgtttagttaggtagggtcgggggataatagtttttgcgagtttgcgattgtggcggtcggtatattcggcggtttacggtaatgggcgggttttaaatttttatgtggtttcgatattattgatatggcggaattttttattaaatttttttggtagttatttgagcggcggcggcggcggttggaggaggagagcggcggcggcgggagtagcgaagggggcggtagggattttttaggttgtcggttgggaaggcgtgggcgattcggtgtgtggcgcgtttagagtttcgcgttttagttttagggaaggtaaggcgtgtaagagtcggggattagaggagatcgggatttcgagcgcgatcgtcgggtttcggtgtattggaaagtttcggtttgacgtcgagttcgttaaagtgcgtttttgtttcgggagcgttttgggtttttcggtaaaaatttggcgtcgga

SEQ ID NO: 15196 - DNA, 508 bp, Artificial Sequence
  chemically treated genomic DNA (Homo sapiens) CpG-island No: 15196
tccgacgccaaatttttaccgaaaaacccaaaacgctcccgaaacaaaaacgcactttaacgaactcgacgtcaaaccgaaactttccaatacaccgaaacccgacgatcgcgctcgaaatcccgatctcctctaatccccgactcttacacgccttaccttccctaaaactaaaacgcgaaactctaaacgcgccacacaccgaatcgcccacgccttcccaaccgacaacctaaaaaatccctaccgcccccttcgctactcccgccgccgccgctctcctcctccaaccgccgccgccgccgctcaaataactaccaaaaaaatttaataaaaaattccgccatatcaataatatcgaaaccacataaaaatttaaaacccgcccattaccgtaaaccgccgaatataccgaccgccacaatcgcaaactcgcaaaaactattatcccccgaccctacctaactaaacaaaaactccttttaattcaaccaaactaaaaaaacct

SEQ ID NO: 15197 - DNA, 530 bp, Artificial Sequence
  chemically treated genomic DNA (Homo sapiens) CpG-island No: 15197
ggcgtttagggatgtcgtcgttcgggttgacgtcgtcggttttttttttcgttaggcgggcgtttgtagtcgcgggcgtacgggtttcgtttcgtttatcggttcgttgtcggcgttcgcggtgcgtttcgttttgtgtttttcgtagtcggcgtgtatttggtgtaagtaaaggcggttagttgatgggtcgcgcgcggattggttgtttcgtcgtttttttttttttcgttcgatttttttcgcggtttttcgttttcgttttcggcgcggtttcgtgttgggtattatttgtggatcgtttaataaaggcgtagcgcggcggggttcgggtggtcgggtcgcggtcgtcgttttttgtttaggggacggtaggttgcggttgggtagggaggcgaagcgtattgtcggtttttagtaaaagaaaatatacgttcgtgttaggaggttagttaggtataatggggttttatttttttgcggcgtagaattcgggttcgggggttgagaattagatatagttcggtttg

SEQ ID NO: 15198 - DNA, 530 bp, Artificial Sequence
  chemically treated genomic DNA (Homo sapiens) CpG-island No: 15198
caaaccgaactatatctaattctcaacccccgaacccgaattctacgccgcaaaaaaataaaaccccattatacctaactaacctcctaacacgaacgtatattttcttttactaaaaaccgacaatacgcttcgcctccctacccaaccgcaacctaccgtcccctaaacaaaaaacgacgaccgcgacccgaccacccgaaccccgccgcgctacgcctttattaaacgatccacaaataatacccaacacgaaaccgcgccgaaaacgaaaacgaaaaaccgcgaaaaaaatcgaacgaaaaaaaaaaaaacgacgaaacaaccaatccgcgcgcgacccatcaactaaccgcctttacttacaccaaatacacgccgactacgaaaaacacaaaacgaaacgcaccgcgaacgccgacaacgaaccgataaacgaaacgaaacccgtacgcccgcgactacaaacgcccgcctaacgaaaaaaaaaaccgacgacgtcaacccgaacgacgacatccctaaacgcc

SEQ ID NO: 15199 - DNA, 530 bp, Artificial Sequence
  chemically treated genomic DNA (Homo sapiens) CpG-island No: 15199
taggtcgaattgtgtttggtttttagttttcgagttcgagttttacgtcgtaaagagatggggttttattgtgtttagttggttttttagtacggacgtgtatttttttttgttaaaaatcggtagtgcgtttcgtttttttgtttagtcgtagtttgtcgttttttagataaaaagcggcgatcgcggttcggttattcgagtttcgtcgcgttgcgtttttgttgggcggtttatagatggtgtttagtacggggtcgcgtcgagggcgggggcgggaggtcgcgaagagggtcgggcgggaggggaggagacggcggagtagttaattcgcgcgcggtttattagttgatcgtttttgtttatattaggtgtacgtcggttgcggggagtataaagcggggcgtatcgcgggcgtcggtaacgagtcggtgaacgaggcgaggttcgtgcgttcgcggttgtaagcgttcgtttggcggggagaggggtcggcggcgttagttcgggcggcggtatttttaggcgtt

SEQ ID NO: 15200 - DNA, 530 bp, Artificial Sequence
  chemically treated genomic DNA (Homo sapiens) CpG-island No: 15200
aacgcctaaaaataccgccgcccgaactaacgccgccgacccctctccccgccaaacgaacgcttacaaccgcgaacgcacgaacctcgcctcgttcaccgactcgttaccgacgcccgcgatacgccccgctttatactccccgcaaccgacgtacacctaatataaacaaaaacgatcaactaataaaccgcgcgcgaattaactactccgccgtctcctcccctcccgcccgaccctcttcgcgacctcccgcccccgccctcgacgcgaccccgtactaaacaccatctataaaccgcccaacaaaaacgcaacgcgacgaaactcgaataaccgaaccgcgatcgccgctttttatctaaaaaacgacaaactacgactaaacaaaaaaacgaaacgcactaccgatttttaacaaaaaaaaatacacgtccgtactaaaaaaccaactaaacacaataaaaccccatctctttacgacgtaaaactcgaactcgaaaactaaaaaccaaacacaattcgaccta

SEQ ID NO: 15201 - DNA, 717 bp, Artificial Sequence
  chemically treated genomic DNA (Homo sapiens) CpG-island No: 15201
  unsure (470, 613, 676)
gcgtcgcgcgtttttttttcgggcgtttaggttcggcgggggtttagagggtagggatggttcgggcgagggacggggtttcggaggcgggaggcgggaggcgggaggcgggaagcgggaggttggaagtcgcgcgttgtcggggtttttcggtgaagggtaggtaaataatcggtcggtttgggcggagtcgggcgggcggggcgagggcggagggcggagggcgtattgttttattttgtatattttattggaaatcggacgtattcggaggaggggttgggaggcggttcgggtatcgttaatggtcgggtcgggcgtcggggaggtcggcgagcgttgcggttcgttaaatattttggtagtttcgcgtcgcgttcgtattggttcgcgtcgttcgttcgtcgatagttttttgagttagttcgggaggtagtcgcgcgtagcgagtcggtggcgtaggtgtcggngttttcgagcgtttagtttgggagtatgattgtggataagttgttggacgatagttcgcgcggaaaggggttgcgggacgcggtcgggcggttggggttttatggattagttcgtttaatttgagttatttttacggggcgtnggcggtcgtcgtcggtttcgggcggttgggaagttagtttggttgggttttgggtttttcggngttcgggtgggtcggtttcgattttttcgatttttttttgg

SEQ ID NO: 15202 - DNA, 717 bp, Artificial Sequence
  chemically treated genomic DNA (Homo sapiens) CpG-island No: 15202
  unsure (42, 105, 248)
ccaaaaaaaaatcgaaaaaatcgaaaccgacccacccgaacnccgaaaaacccaaaacccaaccaaactaacttcccaaccgcccgaaaccgacgacgaccgccnacgccccgtaaaaataactcaaattaaacgaactaatccataaaaccccaaccgcccgaccgcgtcccgcaacccctttccgcgcgaactatcgtccaacaacttatccacaatcatactcccaaactaaacgctcgaaaacnccgacacctacgccaccgactcgctacgcgcgactacctcccgaactaactcaaaaaactatcgacgaacgaacgacgcgaaccaatacgaacgcgacgcgaaactaccaaaatatttaacgaaccgcaacgctcgccgacctccccgacgcccgacccgaccattaacgatacccgaaccgcctcccaacccctcctccgaatacgtccgatttccaataaaatatacaaaataaaacaatacgccctccgccctccgccctcgccccgcccgcccgactccgcccaaaccgaccgattatttacctacccttcaccgaaaaaccccgacaacgcgcgacttccaacctcccgcttcccgcctcccgcctcccgcctcccgcctccgaaaccccgtccctcgcccgaaccatccctaccctctaaacccccgccgaacctaaacgcccgaaaaaaaaacgcgcgacgc

SEQ ID NO: 15203 - DNA, 717 bp, Artificial Sequence
  chemically treated genomic DNA (Homo sapiens) CpG-island No: 15203
  unsure (42, 105, 248)
ttaaggaaaaatcggaagagtcggaatcggtttattcgggtntcgaggggtttaagatttaattaagttggttttttagtcgttcggggtcggcggcggtcgttnacgtttcgtagaagtagtttaggttgagcgggttggtttatgaggttttagtcgttcggtcgcgtttcgtagttttttttcgcgcgggttgtcgtttagtagtttgtttataattatgtttttaggttgggcgttcgaggatntcgatatttgcgttatcggttcgttgcgcgcggttgtttttcgggttggtttagggagttgtcggcgggcggacggcgcgggttagtacgggcgcggcgcgggattgttagggtatttaacgggtcgtagcgttcgtcgattttttcggcgttcggttcggttattggcggtgttcgggtcgttttttagtttttttttcggatgcgttcgatttttagtaaaatgtataggatgaggtaatgcgtttttcgtttttcgttttcgtttcgttcgttcggtttcgtttagatcgatcggttgtttgtttgttttttatcgggaaatttcgatagcgcgcggtttttagtttttcgtttttcgtttttcgtttttcgtttttcgttttcgggatttcgtttttcgttcgggttatttttgttttttaggttttcgtcgggtttgggcgttcggggagagggcgcgcggcgt

SEQ ID NO: 15204 - DNA, 717 bp, Artificial Sequence
  chemically treated genomic DNA (Homo sapiens) CpG-island No: 15204
  unsure (470, 613, 676)
acgccgcgcgccctctccccgaacgcccaaacccgacgaaaacctaaaaaacaaaaataacccgaacgaaaaacgaaatcccgaaaacgaaaaacgaaaaacgaaaaacgaaaaacgaaaaactaaaaaccgcgcgctatcgaaatttcccgataaaaaacaaacaaacaaccgatcgatctaaacgaaaccgaacgaacgaaacgaaaacgaaaaacgaaaaacgcattacctcatcctatacattttactaaaaatcgaacgcatccgaaaaaaaaactaaaaaacgacccgaacaccgccaataaccgaaccgaacgccgaaaaaatcgacgaacgctacgacccgttaaataccctaacaatcccgcgccgcgcccgtactaacccgcgccgtccgcccgccgacaactccctaaaccaacccgaaaaacaaccgcgcgcaacgaaccgataacgcaaatatcganatcctcgaacgcccaacctaaaaacataattataaacaaactactaaacgacaacccgcgcgaaaaaaaactacgaaacgcgaccgaacgactaaaacctcataaaccaacccgctcaacctaaactacttctacgaaacgtnaacgaccgccgccgaccccgaacgactaaaaaaccaacttaattaaatcttaaacccctcganacccgaataaaccgattccgactcttccgatttttccttaa

SEQ ID NO: 15205 - DNA, 524 bp, Artificial Sequence
  chemically treated genomic DNA (Homo sapiens) CpG-island No: 15205
gtaattcgttcgcgggattttttaatcgtttcgggaattcggaatcggtattttatcggcgatcgatatcggattcgcgatcgtatcgtttttcggatggtagtttattggagacgtaatttatttttaatcgtacgggtttttcgcgaattttatcggattgaattggaatttaagggatcgtatcggaattaaatcgattgatttttatatcggttcggaattgtttcgattcggttcggtacggttttgtacgcgacgtttttcgatttgttacgttatcgattcgcgaagcgattcgtatgcgttttcgttttcgtatcgttatcgaaattggtatttttatcgcggttttttcgtttcgtttcgcgattatgtaattacggatacggcgtttttggttattgcggatgttgaatttttcggatttttcgtttacgggatttttgatatgtttgaatttcggtttttattttcgtttttacgtcgtttattatcggggtatcgttcgttttcgcgttacg

SEQ ID NO: 15206 - DNA, 524 bp, Artificial Sequence
  chemically treated genomic DNA (Homo sapiens) CpG-island No: 15206
cgtaacgcgaaaacgaacgataccccgataataaacgacgtaaaaacgaaaataaaaaccgaaattcaaacatatcaaaaatcccgtaaacgaaaaatccgaaaaattcaacatccgcaataaccaaaaacgccgtatccgtaattacataatcgcgaaacgaaacgaaaaaaccgcgataaaaataccaatttcgataacgatacgaaaacgaaaacgcatacgaatcgcttcgcgaatcgataacgtaacaaatcgaaaaacgtcgcgtacaaaaccgtaccgaaccgaatcgaaacaattccgaaccgatataaaaatcaatcgatttaattccgatacgatcccttaaattccaattcaatccgataaaattcgcgaaaaacccgtacgattaaaaataaattacgtctccaataaactaccatccgaaaaacgatacgatcgcgaatccgatatcgatcgccgataaaataccgattccgaattcccgaaacgattaaaaaatcccgcgaacgaattac

SEQ ID NO: 15207 - DNA, 524 bp, Artificial Sequence
  chemically treated genomic DNA (Homo sapiens) CpG-island No: 15207
cgtagcgcgaggacgagcggtgtttcgataatggacgacgtgggggcgagggtgaaggtcggggtttagatatattaggagtttcgtggacggagaattcggagagtttagtattcgtagtgattaagaacgtcgtattcgtgattgtatgatcgcggagcggaacgggagagtcgcgatgggagtgttagtttcgatagcggtacggaggcggaagcgtatacgagtcgtttcgcgggtcgatggcgtggtagatcgaggggcgtcgcgtatagaatcgtgtcgaatcgagtcggagtagtttcggatcgatgtggaagttagtcggtttgatttcgatgcggttttttgggttttagtttagttcggtaaaattcgcgggaggttcgtgcggttggaagtaggttgcgtttttagtgggttattattcggggagcgatgcggtcgcgagttcgatgtcggtcgtcggtagagtatcgatttcgaattttcgaggcgattgggagatttcgcgagcggattgt

SEQ ID NO: 15208 - DNA, 524 bp, Artificial Sequence
  chemically treated genomic DNA (Homo sapiens) CpG-island No: 15208
acaatccgctcgcgaaatctcccaatcgcctcgaaaattcgaaatcgatactctaccgacgaccgacatcgaactcgcgaccgcatcgctccccgaataataacccactaaaaacgcaacctacttccaaccgcacgaacctcccgcgaattttaccgaactaaactaaaacccaaaaaaccgcatcgaaatcaaaccgactaacttccacatcgatccgaaactactccgactcgattcgacacgattctatacgcgacgcccctcgatctaccacgccatcgacccgcgaaacgactcgtatacgcttccgcctccgtaccgctatcgaaactaacactcccatcgcgactctcccgttccgctccgcgatcatacaatcacgaatacgacgttcttaatcactacgaatactaaactctccgaattctccgtccacgaaactcctaatatatctaaaccccgaccttcaccctcgcccccacgtcgtccattatcgaaacaccgctcgtcctcgcgctacg

SEQ ID NO: 15209 - DNA, 611 bp, Artificial Sequence
  chemically treated genomic DNA (Homo sapiens) CpG-island No: 15209
gttttttttaaacgggggttttgtttataaggaggtcgtagtagttttcgagtgatttcggtgtaaatttgtagagaaaaattattttattttacggaagcgggtggaggagtcgcgtttttcggtaggttacgtggggcggaaagatttatttagttttttcgtattttcgtttcgatttaggaaaacgttttggggaattttagttttgaaaaggcgcgttttattttttacgtcgggtgttggcgataaggtttagtgaaaaagcgtttcggggtcgttcgcgcggaggggaaagtgttgagggaagttaaggaattcgcgtttgcggtcgtcggaaacgtggcggggatacgattttcgcgtcggggttattttgtttattgttgaggaggtttttcgttacgtttcgttttcgtttttttcgaggatcgggcgcggtggcgtttttggtttatagtaggaaggaaggggtagtaatttacgttattaattttgtttttatgagcggcgcgcgttcgtttatcggtttcgttattgtcgtagtcgttacgtagttacgcgtattttcgggttggtagacgttaatagaatattggattaattgtggt

SEQ ID NO: 15210 - DNA, 611 bp, Artificial Sequence
  chemically treated genomic DNA (Homo sapiens) CpG-island No: 15210
accacaattaatccaatattctattaacgtctaccaacccgaaaatacgcgtaactacgtaacgactacgacaataacgaaaccgataaacgaacgcgcgccgctcataaaaacaaaattaataacgtaaattactaccccttccttcctactataaaccaaaaacgccaccgcgcccgatcctcgaaaaaaacgaaaacgaaacgtaacgaaaaacctcctcaacaataaacaaaataaccccgacgcgaaaatcgtatccccgccacgtttccgacgaccgcaaacgcgaattccttaacttccctcaacactttcccctccgcgcgaacgaccccgaaacgctttttcactaaaccttatcgccaacacccgacgtaaaaaataaaacgcgccttttcaaaactaaaattccccaaaacgttttcctaaatcgaaacgaaaatacgaaaaaactaaataaatctttccgccccacgtaacctaccgaaaaacgcgactcctccacccgcttccgtaaaataaaataatttttctctacaaatttacaccgaaatcactcgaaaactactacgacctccttataaacaaaacccccgtttaaaaaaaac

SEQ ID NO: 15211 - DNA, 611 bp, Artificial Sequence
  chemically treated genomic DNA (Homo sapiens) CpG-island No: 15211
gttatagttggtttaatgttttattgacgtttattagttcggaagtgcgcgtggttgcgtggcggttgcggtaatagcggggtcggtaagcgggcgcgcgtcgtttataggggtagagttggtggcgtgagttgttgtttttttttttttgttgtgggttagaggcgttatcgcgttcggttttcgaggaagacgggagcgggacgtggcgagaggtttttttagtagtgggtaaaatagtttcgacgcggaggtcgtgttttcgttacgttttcggcgatcgtaggcgcggattttttggttttttttagtattttttttttcgcgcggacggtttcgagacgtttttttattgggttttgtcgttagtattcggcgtggggggtgagacgcgtttttttagggttggggttttttagagcgtttttttaagtcgaggcggaggtgcgaggaaattgagtgggttttttcgttttacgtggtttgtcgggaagcgcggtttttttattcgttttcgtggaatggaatggtttttttttgtaggtttatatcggggttattcgagagttgttgcggtttttttatgggtaggattttcgtttggggagaat

SEQ ID NO: 15212 - DNA, 611 bp, Artificial Sequence
  chemically treated genomic DNA (Homo sapiens) CpG-island No: 15212
attctccccaaacgaaaatcctacccataaaaaaaccgcaacaactctcgaataaccccgatataaacctacaaaaaaaaaccattccattccacgaaaacgaataaaaaaaccgcgcttcccgacaaaccacgtaaaacgaaaaaacccactcaatttcctcgcacctccgcctcgacttaaaaaaacgctctaaaaaaccccaaccctaaaaaaacgcgtctcaccccccacgccgaatactaacgacaaaacccaataaaaaaacgtctcgaaaccgtccgcgcgaaaaaaaaaatactaaaaaaaaccaaaaaatccgcgcctacgatcgccgaaaacgtaacgaaaacacgacctccgcgtcgaaactattttacccactactaaaaaaacctctcgccacgtcccgctcccgtcttcctcgaaaaccgaacgcgataacgcctctaacccacaacaaaaaaaaaaaaacaacaactcacgccaccaactctacccctataaacgacgcgcgcccgcttaccgaccccgctattaccgcaaccgccacgcaaccacgcgcacttccgaactaataaacgtcaataaaacattaaaccaactataac

SEQ ID NO: 15213 - DNA, 558 bp, Artificial Sequence
  chemically treated genomic DNA (Homo sapiens) CpG-island No: 15213
gatggtaggggacggcgttttgttttcgggacggagcgtaggtttgtaattgtttttttcgtttaggttattatttttaggtttgggtacgcgtcgtcgtttgtttttttggggtcgttagggggcgttgtggtttcggtgcgcggtagtcgcgcgatacgggttttttttcggagttttcggtatcgttttgttttagttttttttgcgggtaaatagatatggtcggcgaaggagattagtaggacgttgcgtataatatgggtaattatttgtcgtttttgtttggtaatcgttcggagtagttttttgtagtcgggagtggggcgaggttcggagtcgttagcggtgtagttgggtttgggaggcgggcgtgggggcgttaagtttggcgagttagtttagtagggtcgtatcggaaagttgttttacgtcggttttcggttagcgatggagtcgcggcgtttttttcgttgttttgttgtttcgagtcgtgagttagggtgtcggggggagtatttgttattaagaataggaaatttattttttttatttttt

SEQ ID NO: 15214 - DNA, 558 bp, Artificial Sequence
  chemically treated genomic DNA (Homo sapiens) CpG-island No: 15214
aaaaaataaaaaaaataaatttcctattcttaataacaaatactccccccgacaccctaactcacgactcgaaacaacaaaacaacgaaaaaaacgccgcgactccatcgctaaccgaaaaccgacgtaaaacaactttccgatacgaccctactaaactaactcgccaaacttaacgcccccacgcccgcctcccaaacccaactacaccgctaacgactccgaacctcgccccactcccgactacaaaaaactactccgaacgattaccaaacaaaaacgacaaataattacccatattatacgcaacgtcctactaatctccttcgccgaccatatctatttacccgcaaaaaaaactaaaacaaaacgataccgaaaactccgaaaaaaaacccgtatcgcgcgactaccgcgcaccgaaaccacaacgccccctaacgaccccaaaaaaacaaacgacgacgcgtacccaaacctaaaaataataacctaaacgaaaaaaacaattacaaacctacgctccgtcccgaaaacaaaacgccgtcccctaccatc

SEQ ID NO: 15215 - DNA, 558 bp, Artificial Sequence
  chemically treated genomic DNA (Homo sapiens) CpG-island No: 15215
ggaggatggagaggatgggttttttgtttttaatagtaaatgtttttttcgatattttggtttacggttcggggtaatagagtagcgaagaaagcgtcgcgattttatcgttggtcgagggtcgacgtgaagtagtttttcggtgcggttttgttgggttggttcgttaggtttggcgtttttacgttcgttttttaggtttagttgtatcgttagcggtttcgagtttcgttttattttcgattatagggaattatttcgggcggttattaggtaggagcggtaggtggttgtttatgttgtgcgtagcgttttgttgatttttttcgtcggttatgtttgtttattcgtaaaggaggttgggatagggcggtgtcgaagatttcgagggagggttcgtgtcgcgcggttgtcgcgtatcggggttatagcgttttttggcggttttaggggagtagacggcggcgcgtatttaagtttgaaagtgatggtttaggcgggagggataattataggtttgcgtttcgtttcggggatagaacgtcgttttttgttatt

SEQ ID NO: 15216 - DNA, 558 bp, Artificial Sequence
  chemically treated genomic DNA (Homo sapiens) CpG-island No: 15216
aataacaaaaaacgacgttctatccccgaaacgaaacgcaaacctataattatccctcccgcctaaaccatcactttcaaacttaaatacgcgccgccgtctactcccctaaaaccgccaaaaaacgctataaccccgatacgcgacaaccgcgcgacacgaaccctccctcgaaatcttcgacaccgccctatcccaacctcctttacgaataaacaaacataaccgacgaaaaaaatcaacaaaacgctacgcacaacataaacaaccacctaccgctcctacctaataaccgcccgaaataattccctataatcgaaaataaaacgaaactcgaaaccgctaacgatacaactaaacctaaaaaacgaacgtaaaaacgccaaacctaacgaaccaacccaacaaaaccgcaccgaaaaactacttcacgtcgaccctcgaccaacgataaaatcgcgacgctttcttcgctactctattaccccgaaccgtaaaccaaaatatcgaaaaaaacatttactattaaaaacaaaaaacccatcctctccatcctcc

SEQ ID NO: 15217 - DNA, 504 bp, Artificial Sequence
  chemically treated genomic DNA (Homo sapiens) CpG-island No: 15217
tcgggtttcgttttaggttattcgggttttgcgcgtacgtgtagttttttggagtttcggaagcggatcgcggtgtgtgaaggtgatatcgtcgagtaagagtgtgtttaggtgtagattaagttttcgattcgtcgtttcgtttttttatattcgttttgttgattttaaaattttcgtatcgcgttttttattcgaggtaaatacggatttcgttatgtgggtaaaattcgttttgagattagtttttgttttttgttattcgcgtttttttttcgtataaaatttttttttgattttttttttcgtttcgcgttttttaaagtttttatttgcgaggtggattttcgttttgagcgttttttagttttttcgtcgtcggttttggagcgtagcgtcgtagatcgcgtttttcgtttggttttaggtttttgtagattttattttgttttaaggcgtcgtcgttttttatttttttttttttcgtgtcgggttttgttgttt

SEQ ID NO: 15218 - DNA, 504 bp, Artificial Sequence
  chemically treated genomic DNA (Homo sapiens) CpG-island No: 15218
aaacaacaaaacccgacacgaaaaaaaaaaaaataaaaaacgacgacgccttaaaacaaaataaaatctacaaaaacctaaaaccaaacgaaaaacgcgatctacgacgctacgctccaaaaccgacgacgaaaaaactaaaaaacgctcaaaacgaaaatccacctcgcaaataaaaactttaaaaaacgcgaaacgaaaaaaaaaatcaaaaaaaaattttatacgaaaaaaaaacgcgaataacaaaaaacaaaaactaatctcaaaacgaattttacccacataacgaaatccgtatttacctcgaataaaaaacgcgatacgaaaattttaaaatcaacaaaacgaatataaaaaaacgaaacgacgaatcgaaaacttaatctacacctaaacacactcttactcgacgatatcaccttcacacaccgcgatccgcttccgaaactccaaaaaactacacgtacgcgcaaaacccgaataacctaaaacgaaacccga

SEQ ID NO: 15219 - DNA, 504 bp, Artificial Sequence
  chemically treated genomic DNA (Homo sapiens) CpG-island No: 15219
gagtagtagggttcggtacgaggaggagggaggtggggggcgacggcgttttaggatagggtagggtttgtaggagtttaggattaggcggaggacgcggtttgcggcgttgcgttttagggtcgacgacggagaggttgggaggcgtttaggacgggaatttatttcgtaggtgaggattttaaaaagcgcggggcgggaggaggggttaggaaagggttttatgcgggaagaagacgcgaatggtaggggatagggattggttttagagcgagttttatttatatggcgaggttcgtatttatttcgggtgaagggcgcgatgcggggattttaaggttagtagagcgggtgtggaaaagcgggacggcgaatcgaaggtttaatttatatttaggtatatttttgttcggcggtgttatttttatatatcgcgattcgttttcgggattttaagaaattgtacgtgcgcgtagagttcgggtagtttggggcggagttcgg

SEQ ID NO: 15220 - DNA, 504 bp, Artificial Sequence
  chemically treated genomic DNA (Homo sapiens) CpG-island No: 15220
ccgaactccgccccaaactacccgaactctacgcgcacgtacaatttcttaaaatcccgaaaacgaatcgcgatatataaaaataacaccgccgaacaaaaatatacctaaatataaattaaaccttcgattcgccgtcccgcttttccacacccgctctactaaccttaaaatccccgcatcgcgcccttcacccgaaataaatacgaacctcgccatataaataaaactcgctctaaaaccaatccctatcccctaccattcgcgtcttcttcccgcataaaaccctttcctaacccctcctcccgccccgcgctttttaaaatcctcacctacgaaataaattcccgtcctaaacgcctcccaacctctccgtcgtcgaccctaaaacgcaacgccgcaaaccgcgtcctccgcctaatcctaaactcctacaaaccctaccctatcctaaaacgccgtcgccccccacctccctcctcctcgtaccgaaccctactactc

SEQ ID NO: 15221 - DNA, 530 bp, Artificial Sequence
  chemically treated genomic DNA (Homo sapiens) CpG-island No: 15221
gtttcgtatatagtattagaaggacggtttgtgaggcgacgttaacggcgttaacggatgtgagaagttgtcgttgcgtttcggttttttcgttcgagttagggtatttaatgttttcgattttttttttttttttttttcgttgttgtttttttgttttcgcggtcgtcgatgcgacgtaggtttggcggagaatcgattttttttcgttgtaggttttcgtttttttcgattttcgttagtttttttttttttttttcgattgtggtttgtaggttcgtgttttttttttttaatcgattttcgttcgcgcgtcgttttgcggtagcggtcggtttaaggtgtttaaaatcggggggaagtggaagagttttacgtttgtcgagttgtttgtgtcgttttcgaggggagtaaaagttggtcggcgtgttcgttgtgaagtagtaagtatcggcgtttattaggtcgtttatttttggtagtttggttgtttgtgtgttcgttttgtcggtttttcgggttagatagtg

SEQ ID NO: 15222 - DNA, 530 bp, Artificial Sequence
  chemically treated genomic DNA (Homo sapiens) CpG-island No: 15222
cactatctaacccgaaaaaccgacaaaacgaacacacaaacaaccaaactaccaaaaataaacgacctaataaacgccgatacttactacttcacaacgaacacgccgaccaacttttactcccctcgaaaacgacacaaacaactcgacaaacgtaaaactcttccacttccccccgattttaaacaccttaaaccgaccgctaccgcaaaacgacgcgcgaacgaaaatcgattaaaaaaaaaaaacacgaacctacaaaccacaatcgaaaaaaaaaaaaaaaaactaacgaaaatcgaaaaaaacgaaaacctacaacgaaaaaaaatcgattctccgccaaacctacgtcgcatcgacgaccgcgaaaacaaaaaaacaacaacgaaaaaaaaaaaaaaaaaaaatcgaaaacattaaataccctaactcgaacgaaaaaaccgaaacgcaacgacaacttctcacatccgttaacgccgttaacgtcgcctcacaaaccgtccttctaatactatatacgaaac

SEQ ID NO: 15223 - DNA, 530 bp, Artificial Sequence
  chemically treated genomic DNA (Homo sapiens) CpG-island No: 15223
tattgtttgattcgagaggtcgataggacgagtatataggtagttagattgttaaagatgggcggtttgatgggcgtcgatgtttgttgttttatagcgagtacgtcggttagtttttatttttttcgaggacgatatagatagttcgataggcgtggagtttttttattttttttcgattttgagtattttgaatcgatcgttgtcgtaagacgacgcgcggacgagaatcgattggggggggggggtacgggtttgtaagttatagtcgaaaggggaggaggggggttggcgagaatcggggaggacgggagtttgtagcggaggggaatcgatttttcgttaggtttgcgtcgtatcgacgatcgcggaagtaagagagtaatagcgagaggaggaagaaagagggatcgagagtattggatgttttgattcggacggaaaagtcgaggcgtaacggtaattttttatattcgttaacgtcgttaacgtcgttttataagtcgtttttttggtattgtgtgcgggat

SEQ ID NO: 15224 - DNA, 530 bp, Artificial Sequence
  chemically treated genomic DNA (Homo sapiens) CpG-island No: 15224
atcccgcacacaataccaaaaaaacgacttataaaacgacgttaacgacgttaacgaatataaaaaattaccgttacgcctcgacttttccgtccgaatcaaaacatccaatactctcgatccctctttcttcctcctctcgctattactctcttacttccgcgatcgtcgatacgacgcaaacctaacgaaaaatcgattcccctccgctacaaactcccgtcctccccgattctcgccaacccccctcctcccctttcgactataacttacaaacccgtaccccccccccccaatcgattctcgtccgcgcgtcgtcttacgacaacgatcgattcaaaatactcaaaatcgaaaaaaaataaaaaaactccacgcctatcgaactatctatatcgtcctcgaaaaaaataaaaactaaccgacgtactcgctataaaacaacaaacatcgacgcccatcaaaccgcccatctttaacaatctaactacctatatactcgtcctatcgacctctcgaatcaaacaata

SEQ ID NO: 15225 - DNA, 536 bp, Artificial Sequence
  chemically treated genomic DNA (Homo sapiens) CpG-island No: 15225
ttcgtaagtcgttgtgtttattcgcgtttgttaggtgtgatttatttacgttttagttttgttcggatagcgttatcgtcgatcgatttcgtttgtcgcgtcgttatggttatgttagagtttgtttaaattttgcgtgtttaattaggtttatttttttcgcggtcgtgtcgtttttaagttcgttcgcgtgtattgttttcggttttttttagatgcgttatttttaagtttatttaatttatgaacgttcgaagtgttattgtttagttcgtcgtcggtattgtcgggttcgtacggaagtaaagttttttagattattgtcggcgtttttgagtttttttaaatatgttgttttcgatcgagtttatttatcggtttttaaattcgtttcgaagtattattttcgcgttcgttgcgggttcgtttgagtgtcgattcgtttttttttgttttggattcgttgtttatcgatttaagagtcgtcgtttttagtatgttagaattagttgttattatttaaggttttaatttgt

SEQ ID NO: 15226 - DNA, 536 bp, Artificial Sequence
  chemically treated genomic DNA (Homo sapiens) CpG-island No: 15226
acaaattaaaaccttaaataataacaactaattctaacatactaaaaacgacgactcttaaatcgataaacaacgaatccaaaacaaaaaaaaacgaatcgacactcaaacgaacccgcaacgaacgcgaaaataatacttcgaaacgaatttaaaaaccgataaataaactcgatcgaaaacaacatatttaaaaaaactcaaaaacgccgacaataatctaaaaaactttacttccgtacgaacccgacaataccgacgacgaactaaacaataacacttcgaacgttcataaattaaataaacttaaaaataacgcatctaaaaaaaaccgaaaacaatacacgcgaacgaacttaaaaacgacacgaccgcgaaaaaaataaacctaattaaacacgcaaaatttaaacaaactctaacataaccataacgacgcgacaaacgaaatcgatcgacgataacgctatccgaacaaaactaaaacgtaaataaatcacacctaacaaacgcgaataaacacaacgacttacgaa

SEQ ID NO: 15227 - DNA, 536 bp, Artificial Sequence
  chemically treated genomic DNA (Homo sapiens) CpG-island No: 15227
gtaagttggagttttggatggtggtagttggttttggtatgttagaggcggcggtttttgggtcggtagataacggatttagggtaaggaggagcgggtcggtatttaggcgagttcgtaacgagcgcgagggtggtgtttcggggcgaatttgagggtcgatggatgagttcgatcgagggtagtatgtttgagagagtttaagggcgtcgataataatttggagggttttgttttcgtgcggattcgataatgtcggcgacgagttggataatgatatttcgggcgtttatggattggatgagtttgaggatgacgtatttaggggagatcgagggtagtgtacgcggacgaatttggaagcggtacggtcgcggaggaaatggatttggttgagtacgtaagatttgaataagttttagtatggttatggcggcgcggtagacgagatcgatcgacgatggcgttgttcgggtaaagttagaacgtggatagattatatttagtaagcgcggatgaatatagcggtttgcgga

SEQ ID NO: 15228 - DNA, 536 bp, Artificial Sequence
  chemically treated genomic DNA (Homo sapiens) CpG-island No: 15228
tccgcaaaccgctatattcatccgcgcttactaaatataatctatccacgttctaactttacccgaacaacgccatcgtcgatcgatctcgtctaccgcgccgccataaccatactaaaacttattcaaatcttacgtactcaaccaaatccatttcctccgcgaccgtaccgcttccaaattcgtccgcgtacactaccctcgatctcccctaaatacgtcatcctcaaactcatccaatccataaacgcccgaaatatcattatccaactcgtcgccgacattatcgaatccgcacgaaaacaaaaccctccaaattattatcgacgcccttaaactctctcaaacatactaccctcgatcgaactcatccatcgaccctcaaattcgccccgaaacaccaccctcgcgctcgttacgaactcgcctaaataccgacccgctcctccttaccctaaatccgttatctaccgacccaaaaaccgccgcctctaacataccaaaaccaactaccaccatccaaaactccaacttac

SEQ ID NO: 15229 - DNA, 604 bp, Artificial Sequence
  chemically treated genomic DNA (Homo sapiens) CpG-island No: 15229
cgttcggtgttagagacggggttagcgcggtttatagaggttgaattatcggttcggcgattcggcgtcgggcggcggggcgggcgtttatttcgatgagagagtagttgatttttacgttcgatttgacgaagttatcgtagtttattacgatgtttttcgagtcgtgcgtcggttttacgtcgtttagtagtagtattatcgcggcggtgattatcgcgggttttagcggtttcgcgttttggtttattagtatggttcgattttttttagttagatttatcgtcggtagtcgggtttcgttttttatattgtacgtcgtaggtttttttttttttttaggtcggttgatagtttatgtttcgttttatcgtcgtcgttagagtcgtcgcgtacgcgcgtttcgattttacgtttatagttttagaagagagaattaatgcgtatgttcggtaaggaaacgagattatttttgttttttagaggtttggaggatttcgcgcgatatttggtaggcgtaacgtaaggtgtatgtttatagggagaagttttaaagatgaattttattttagaattttttatcgtagttggaaaggacgggaga

SEQ ID NO: 15230 - DNA, 604 bp, Artificial Sequence
  chemically treated genomic DNA (Homo sapiens) CpG-island No: 15230
tctcccgtcctttccaactacgataaaaaattctaaaataaaattcatctttaaaacttctccctataaacatacaccttacgttacgcctaccaaatatcgcgcgaaatcctccaaacctctaaaaaacaaaaataatctcgtttccttaccgaacatacgcattaattctctcttctaaaactataaacgtaaaatcgaaacgcgcgtacgcgacgactctaacgacgacgataaaacgaaacataaactatcaaccgacctaaaaaaaaaaaaaaacctacgacgtacaatataaaaaacgaaacccgactaccgacgataaatctaactaaaaaaaatcgaaccatactaataaaccaaaacgcgaaaccgctaaaacccgcgataatcaccgccgcgataatactactactaaacgacgtaaaaccgacgcacgactcgaaaaacatcgtaataaactacgataacttcgtcaaatcgaacgtaaaaatcaactactctctcatcgaaataaacgcccgccccgccgcccgacgccgaatcgccgaaccgataattcaacctctataaaccgcgctaaccccgtctctaacaccgaacg

SEQ ID NO: 15231 - DNA, 604 bp, Artificial Sequence
  chemically treated genomic DNA (Homo sapiens) CpG-island No: 15231
tttttcgttttttttagttgcgatggagaattttaaagtagaatttatttttggagtttttttttgtaggtatgtattttgcgttgcgtttgttagatgtcgcgcggagttttttaggtttttagaaggtagagatggtttcgtttttttgtcgagtatgcgtattagtttttttttttggggttgtgaacgtggggtcgaagcgcgcgtgcgcggcggttttggcgacggcggtggggcggggtatgggttgttagtcggtttaggaggaggaaggagtttgcggcgtgtagtgtgaggggcgggattcggttgtcggcggtgggtttagttgggggaggtcgggttatgttggtgggttagggcgcggggtcgttggggttcgcggtggttatcgtcgcggtggtgttgttgttgagcggcgtggggtcggcgtacggttcggaggatatcgtggtgggttgcggtggtttcgttaagtcggacgtggagattaattatttttttatcgaggtgagcgttcgtttcgtcgttcggcgtcgagtcgtcgggtcggtggtttagtttttatgggtcgcgttggtttcgtttttgatatcgggcg

SEQ ID NO: 15232 - DNA, 604 bp, Artificial Sequence
  chemically treated genomic DNA (Homo sapiens) CpG-island No: 15232
cgcccgatatcaaaaacgaaaccaacgcgacccataaaaactaaaccaccgacccgacgactcgacgccgaacgacgaaacgaacgctcacctcgataaaaaaataattaatctccacgtccgacttaacgaaaccaccgcaacccaccacgatatcctccgaaccgtacgccgaccccacgccgctcaacaacaacaccaccgcgacgataaccaccgcgaaccccaacgaccccgcgccctaacccaccaacataacccgacctcccccaactaaacccaccgccgacaaccgaatcccgcccctcacactacacgccgcaaactccttcctcctcctaaaccgactaacaacccataccccgccccaccgccgtcgccaaaaccgccgcgcacgcgcgcttcgaccccacgttcacaaccccaaaaaaaaaaactaatacgcatactcgacaaaaaaacgaaaccatctctaccttctaaaaacctaaaaaactccgcgcgacatctaacaaacgcaacgcaaaatacatacctacaaaaaaaaactccaaaaataaattctactttaaaattctccatcgcaactaaaaaaaacgaaaaa

SEQ ID NO: 15233 - DNA, 920 bp, Artificial Sequence
  chemically treated genomic DNA (Homo sapiens) CpG-island No: 15233
tatcgttggcgattttttcgagatggacgtcgttggcgtttttcgtttttttttattgcgtcgtgatgatagtacgttgtcggtacgtttttgcggtttgttttaaggtaagtcgttagacgttattaggattgggttgttttgaaggaatcgaggatgttttttagtttgttttcgatttcgtcgttgtagttatcggtttggttgattttttgtattaacggagcgtgattacggtcgacgtaagttagtagagcggtttcgaagttgttaattttcgatagtttaatattcgttaggtaattacgttttgttgcgaatagaattagagattgttgcgtaacggatatcggcgtatattgtttttgttttagtagttcggttattttttgatcgtggttaagttgtttacgtgttgtatcgttaaggtcggatgtaaattgagagaacgttgttagtttacgatattgtgttagagcggtacggatattatcggatagtttttttatgattttggtttgtgttgtattattaatacgggatacggaaatattcgggttaatcgtaggacgaatatcggcgttgaataggttggtttttaggaagatttgattatcggtaatggagattacgttggtcggaacgaacgtagaaacgttattcgtttgagtttcgataatcggtagtgcggttagagaatcggtttttttttttattttatttttggtgaaggttttaacgtattcggcgttaatacgtgtagtacgttttagtagacgagagtggaggtagaaaacgtcgttcgggaatgttttacgttttggcggacgagcgtagtagtattgcggtaaaaggtttaatcggcgaaggttataaaggttacgttttttgggatatagaagtatttttgttatcgtttt

SEQ ID NO: 15234 - DNA, 920 bp, Artificial Sequence
  chemically treated genomic DNA (Homo sapiens) CpG-island No: 15234
aaaacgataacaaaaatacttctatatcccaaaaaacgtaacctttataaccttcgccgattaaaccttttaccgcaatactactacgctcgtccgccaaaacgtaaaacattcccgaacgacgttttctacctccactctcgtctactaaaacgtactacacgtattaacgccgaatacgttaaaaccttcaccaaaaataaaataaaaaaaaaaaccgattctctaaccgcactaccgattatcgaaactcaaacgaataacgtttctacgttcgttccgaccaacgtaatctccattaccgataatcaaatcttcctaaaaaccaacctattcaacgccgatattcgtcctacgattaacccgaatatttccgtatcccgtattaataatacaacacaaaccaaaatcataaaaaaactatccgataatatccgtaccgctctaacacaatatcgtaaactaacaacgttctctcaatttacatccgaccttaacgatacaacacgtaaacaacttaaccacgatcaaaaaataaccgaactactaaaacaaaaacaatatacgccgatatccgttacgcaacaatctctaattctattcgcaacaaaacgtaattacctaacgaatattaaactatcgaaaattaacaacttcgaaaccgctctactaacttacgtcgaccgtaatcacgctccgttaatacaaaaaatcaaccaaaccgataactacaacgacgaaatcgaaaacaaactaaaaaacatcctcgattccttcaaaacaacccaatcctaataacgtctaacgacttaccttaaaacaaaccgcaaaaacgtaccgacaacgtactatcatcacgacgcaataaaaaaaaacgaaaaacgccaacgacgtccatctcgaaaaaatcgccaacgata

SEQ ID NO: 15235 - DNA, 920 bp, Artificial Sequence
  chemically treated genomic DNA (Homo sapiens) CpG-island No: 15235
gaaacggtaataaaaatatttttgtattttagaaaacgtggtttttgtagttttcgtcggttaagttttttgtcgtaatgttgttgcgttcgttcgttaggacgtgaagtattttcgggcgacgttttttatttttattttcgtttgttggagcgtgttgtacgtgttaacgtcgaatacgttgaagtttttattaaaggtgaagtgaaagggaaaatcggttttttgatcgtattgtcgattatcgaaatttaggcgggtgacgtttttgcgttcgtttcgattaacgtaatttttattatcgatggttagatttttttggaaattaatttgtttaacgtcggtattcgttttgcggttaattcgggtattttcgtatttcgtgttggtggtgtagtatagattaagattatgaaaaaattgttcggtggtattcgtatcgttttggtatagtatcgtgaattggtagcgtttttttagtttgtattcgattttgacgatgtaatacgtaagtagtttgattacggttagaaagtgatcgaattgttgaaatagaaatagtatgcgtcgatgttcgttgcgtagtagtttttggttttgttcgtagtagaacgtggttatttggcggatgttgaattgtcgaaaattggtagtttcgaagtcgttttgttggtttacgtcgatcgtgattacgtttcgttgatgtaagagattaattagatcggtggttataacgacgaaatcgaaggtaagttgaaaggtattttcgatttttttaaagtaatttaattttggtaacgtttggcggtttgttttagggtaggtcgtaaggacgtgtcgatagcgtgttattattacgacgtaatggagaaagacggagagcgttaacggcgtttatttcgaaggagtcgttagcgata

SEQ ID NO: 15236 - DNA, 920 bp, Artificial Sequence
  chemically treated genomic DNA (Homo sapiens) CpG-island No: 15236
tatcgctaacgactccttcgaaataaacgccgttaacgctctccgtctttctccattacgtcgtaataataacacgctatcgacacgtccttacgacctaccctaaaacaaaccgccaaacgttaccaaaattaaattactttaaaaaaatcgaaaatacctttcaacttaccttcgatttcgtcgttataaccaccgatctaattaatctcttacatcaacgaaacgtaatcacgatcgacgtaaaccaacaaaacgacttcgaaactaccaattttcgacaattcaacatccgccaaataaccacgttctactacgaacaaaaccaaaaactactacgcaacgaacatcgacgcatactatttctatttcaacaattcgatcactttctaaccgtaatcaaactacttacgtattacatcgtcaaaatcgaatacaaactaaaaaaacgctaccaattcacgatactataccaaaacgatacgaataccaccgaacaattttttcataatcttaatctatactacaccaccaacacgaaatacgaaaatacccgaattaaccgcaaaacgaataccgacgttaaacaaattaatttccaaaaaaatctaaccatcgataataaaaattacgttaatcgaaacgaacgcaaaaacgtcacccgcctaaatttcgataatcgacaatacgatcaaaaaaccgattttccctttcacttcacctttaataaaaacttcaacgtattcgacgttaacacgtacaacacgctccaacaaacgaaaataaaaataaaaaacgtcgcccgaaaatacttcacgtcctaacgaacgaacgcaacaacattacgacaaaaaacttaaccgacgaaaactacaaaaaccacgttttctaaaatacaaaaatatttttattaccgtttc

SEQ ID NO: 15237 - DNA, 602 bp, Artificial Sequence
  chemically treated genomic DNA (Homo sapiens) CpG-island No: 15237
ggcggtgcggagcggggaattacgtatttattcgtcgagttcgacgggttcggtaggggtgggtaaggtattgggaatagtcgttagttttagagggcgtgaggcggggcgtacggggagggggtgcggttaacgcgcgcgtgcgcggtttatgtgtgggttcgcgggggcgcgcgcgcggttagcgggtagcgagggttatttgggcggtgcgtagtacggcgggaatatggcgcgcggaatcggcgcgcgcgtttagttggcgggatcgttagatcgaggcggatgcggttcggatttcgtggatatggagtaatcgtcgtcgttggcgtcggagtttatttaagggttaattattataaggagttgaaggcggcgggagttcgagtcgtcgtcggcgtcggtgtcggtgagtgcgtgaggggttcgggtcgggagattttttttgtgaaatttcggcggtgggagttaggtcgggtttgaggttgaggagcgtttgtgaggcggaaggcgtttcgtagttcgggttttattttagttgcgagtttttaggcggcgggatttggtttaaagtttgtttgttttagtttttattagagtgg

SEQ ID NO: 15238 - DNA, 602 bp, Artificial Sequence
  chemically treated genomic DNA (Homo sapiens) CpG-island No: 15238
ccactctaataaaaactaaaacaaacaaactttaaaccaaatcccgccgcctaaaaactcgcaactaaaataaaacccgaactacgaaacgccttccgcctcacaaacgctcctcaacctcaaacccgacctaactcccaccgccgaaatttcacaaaaaaaatctcccgacccgaacccctcacgcactcaccgacaccgacgccgacgacgactcgaactcccgccgccttcaactccttataataattaacccttaaataaactccgacgccaacgacgacgattactccatatccacgaaatccgaaccgcatccgcctcgatctaacgatcccgccaactaaacgcgcgcgccgattccgcgcgccatattcccgccgtactacgcaccgcccaaataaccctcgctacccgctaaccgcgcgcgcgcccccgcgaacccacacataaaccgcgcacgcgcgcgttaaccgcaccccctccccgtacgccccgcctcacgccctctaaaactaacgactattcccaataccttacccacccctaccgaacccgtcgaactcgacgaataaatacgtaattccccgctccgcaccgcc

SEQ ID NO: 15239 - DNA, 602 bp, Artificial Sequence
  chemically treated genomic DNA (Homo sapiens) CpG-island No: 15239
ttattttagtggaaattgaggtaggtaggttttggattaggtttcgtcgtttgaaggttcgtagttgggatggaattcggattgcgagacgtttttcgttttataggcgttttttagttttaggttcggtttggtttttatcgtcggagttttataaagaaagtttttcggttcgagttttttacgtatttatcggtatcgacgtcggcggcgattcgggttttcgtcgtttttagttttttgtggtggttggtttttgggtgggtttcggcgttagcggcggcgattgttttatatttacggggttcgggtcgtattcgtttcgatttaacggtttcgttagttaggcgcgcgcgtcggtttcgcgcgttatgttttcgtcgtgttgcgtatcgtttaggtgattttcgttgttcgttaatcgcgcgcgcgttttcgcgggtttatatatgaatcgcgtacgcgcgcgttagtcgtatttttttttcgtgcgtttcgttttacgttttttagagttggcggttgtttttaatgttttgtttatttttgtcgggttcgtcggattcggcgggtgagtgcgtggtttttcgtttcgtatcgtt

SEQ ID NO: 15240 - DNA, 602 bp, Artificial Sequence
  chemically treated genomic DNA (Homo sapiens) CpG-island No: 15240
aacgatacgaaacgaaaaaccacgcactcacccgccgaatccgacgaacccgacaaaaataaacaaaacattaaaaacaaccgccaactctaaaaaacgtaaaacgaaacgcacgaaaaaaaaatacgactaacgcgcgcgtacgcgattcatatataaacccgcgaaaacgcgcgcgcgattaacgaacaacgaaaatcacctaaacgatacgcaacacgacgaaaacataacgcgcgaaaccgacgcgcgcgcctaactaacgaaaccgttaaatcgaaacgaatacgacccgaaccccgtaaatataaaacaatcgccgccgctaacgccgaaacccacccaaaaaccaaccaccacaaaaaactaaaaacgacgaaaacccgaatcgccgccgacgtcgataccgataaatacgtaaaaaactcgaaccgaaaaactttctttataaaactccgacgataaaaaccaaaccgaacctaaaactaaaaaacgcctataaaacgaaaaacgtctcgcaatccgaattccatcccaactacgaaccttcaaacgacgaaacctaatccaaaacctacctacctcaatttccactaaaataa

SEQ ID NO: 15241 - DNA, 549 bp, Artificial Sequence
  chemically treated genomic DNA (Homo sapiens) CpG-island No: 15241
  unsure (388, 498, 508, 530, 533)
cgggagaggaggcgtattgggggacgcgtagaataggcgaggagcgttttacgaagttagagtgtgtaaagatattttgagatcgtgataatacgcgcgagagcgtgcgcgcgagtatgataacgagtatataagagacgtatgagtgaggaaagaatcgacgcgcgcgtgggagatacgagcgagggtacgcgataggcgtatagacgagcgagagatacggagttatagttacgatagttacgagtggatatcgtagatagatacgtgatagataggaatgaacgcgaacgagataaacgggcgagacgttaggtgcgagcgacgattgacgtacgatagtcgaagagtaagatttttaatacgtatagatgacgtgtcggcgcgngatatcgtattattatcgagcgttacgaagagacgcgtagatatagcgcgagaaacgagaagacgttagtatacgttttacgttcgttattttagtttttttttataatnattttttttnttttttttcgtttttttgtatnttntgtaggttttcgaatt

SEQ ID NO: 15242 - DNA, 549 bp, Artificial Sequence
  chemically treated genomic DNA (Homo sapiens) CpG-island No: 15242
  unsure (17, 20, 42, 52, 162)
aattcgaaaacctacanaanatacaaaaaaacgaaaaaaaanaaaaaaaatnattataaaaaaaaactaaaataacgaacgtaaaacgtatactaacgtcttctcgtttctcgcgctatatctacgcgtctcttcgtaacgctcgataataatacgatatcncgcgccgacacgtcatctatacgtattaaaaatcttactcttcgactatcgtacgtcaatcgtcgctcgcacctaacgtctcgcccgtttatctcgttcgcgttcattcctatctatcacgtatctatctacgatatccactcgtaactatcgtaactataactccgtatctctcgctcgtctatacgcctatcgcgtaccctcgctcgtatctcccacgcgcgcgtcgattctttcctcactcatacgtctcttatatactcgttatcatactcgcgcgcacgctctcgcgcgtattatcacgatctcaaaatatctttacacactctaacttcgtaaaacgctcctcgcctattctacgcgtcccccaatacgcctcctctcccg

SEQ ID NO: 15243 - DNA, 549 bp, Artificial Sequence
  chemically treated genomic DNA (Homo sapiens) CpG-island No: 15243
  unsure (17, 20, 42, 52, 162)
agttcggaaatttatanaangtgtaagggggcgagaggaganaaagagggtngttataagaaagggttagagtggcgagcgtgggacgtatgttagcgttttttcgtttttcgcgttgtatttacgcgttttttcgtgacgttcgatgatagtacggtgttncgcgtcgatacgttatttgtacgtattagagattttgtttttcggttatcgtgcgttagtcgtcgttcgtatttgacgtttcgttcgtttgtttcgttcgcgtttatttttgtttgttacgtgtttgtttgcgatgtttattcgtggttgtcgtggttgtgatttcgtgtttttcgttcgtttgtgcgtttgtcgcgtgttttcgttcgtgttttttacgcgcgcgtcggttttttttttatttatgcgttttttgtgtgttcgttgttatgttcgcgcgtacgttttcgcgcgtgttgttacggttttagggtgtttttgtatattttggtttcgtggggcgtttttcgtttgttttgcgcgttttttagtgcgttttttttttcg

SEQ ID NO: 15244 - DNA, 549 bp, Artificial Sequence
  chemically treated genomic DNA (Homo sapiens) CpG-island No: 15244
  unsure (388, 498, 508, 530, 533)
cgaaaaaaaaaacgcactaaaaaacgcgcaaaacaaacgaaaaacgccccacgaaaccaaaatatacaaaaacaccctaaaaccgtaacaacacgcgcgaaaacgtacgcgcgaacataacaacgaacacacaaaaaacgcataaataaaaaaaaaaccgacgcgcgcgtaaaaaacacgaacgaaaacacgcgacaaacgcacaaacgaacgaaaaacacgaaatcacaaccacgacaaccacgaataaacatcgcaaacaaacacgtaacaaacaaaaataaacgcgaacgaaacaaacgaacgaaacgtcaaatacgaacgacgactaacgcacgataaccgaaaaacaaaatctctaatacgtacaaataacgtatcgacgcgnaacaccgtactatcatcgaacgtcacgaaaaaacgcgtaaatacaacgcgaaaaacgaaaaaacgctaacatacgtcccacgctcgccactctaaccctttcttataacnaccctctttntctcctctcgcccccttacacnttntataaatttccgaact

SEQ ID NO: 15245 - DNA, 501 bp, Artificial Sequence
  chemically treated genomic DNA (Homo sapiens) CpG-island No: 15245
atcgcgcgagtcgtatacggacgggaaagggttaatttcggtttgtttttggcgaattttggagaggcggtgttatggtaatcggtataatttaagttgttgacgattttcggatcgtcgcgcgtttatttatcgtggaagtagttattttcgtcgtttttttggattagacgcgttatattcgggtttttataattttagtatgttatcggtagcggattatttttagcgtttttcggcgtatcggtacgtagggttttacgtatatcggttatagtaaaagtatgtttacgcggtttgttgtaatcgcgcgagaagggatatttcgtttataggattattagtcgtggatttttcgttagggcgttaatacgttttgattgtttcgaggtggttttttaggagagatattgatcgggatgttgcggggtaaaggttttatttttcgtttttatagttataggttttgcgggagtagtcgtttgtttagcgtgaatagaa

SEQ ID NO: 15246 - DNA, 501 bp, Artificial Sequence
  chemically treated genomic DNA (Homo sapiens) CpG-island No: 15246
ttctattcacgctaaacaaacgactactcccgcaaaacctataactataaaaacgaaaaataaaacctttaccccgcaacatcccgatcaatatctctcctaaaaaaccacctcgaaacaatcaaaacgtattaacgccctaacgaaaaatccacgactaataatcctataaacgaaatatcccttctcgcgcgattacaacaaaccgcgtaaacatacttttactataaccgatatacgtaaaaccctacgtaccgatacgccgaaaaacgctaaaaataatccgctaccgataacatactaaaattataaaaacccgaatataacgcgtctaatccaaaaaaacgacgaaaataactacttccacgataaataaacgcgcgacgatccgaaaatcgtcaacaacttaaattataccgattaccataacaccgcctctccaaaattcgccaaaaacaaaccgaaattaaccctttcccgtccgtatacgactcgcgcgat

SEQ ID NO: 15247 - DNA, 501 bp, Artificial Sequence
  chemically treated genomic DNA (Homo sapiens) CpG-island No: 15247
ttttgtttacgttgaataaacggttgttttcgtaaaatttgtaattgtggaagcgaagaatgaaatttttgtttcgtagtatttcgattaatattttttttggaaagttatttcggaatagttagagcgtgttgacgttttggcggaagatttacggttggtgattttgtgggcggggtattttttttcgcgcgattataataagtcgcgtggatatgtttttgttgtgatcgatgtgcgtgaaattttgcgtatcggtgcgtcgaaaaacgttgaagatggttcgttatcgatggtatgttggagttgtaaaagttcggatgtggcgcgtttgatttagaaagacggcgaagatggttatttttacggtaaatgggcgcgcggcggttcggaaatcgttaataatttaggttgtgtcgattgttataatatcgtttttttagagttcgttaaaggtaaatcggagttaattttttttcgttcgtatgcggttcgcgcgat

SEQ ID NO: 15248 - DNA, 501 bp, Artificial Sequence
  chemically treated genomic DNA (Homo sapiens) CpG-island No: 15248
atcgcgcgaaccgcatacgaacgaaaaaaaattaactccgatttacctttaacgaactctaaaaaaacgatattataacaatcgacacaacctaaattattaacgatttccgaaccgccgcgcgcccatttaccgtaaaaataaccatcttcgccgtctttctaaatcaaacgcgccacatccgaacttttacaactccaacataccatcgataacgaaccatcttcaacgtttttcgacgcaccgatacgcaaaatttcacgcacatcgatcacaacaaaaacatatccacgcgacttattataatcgcgcgaaaaaaaataccccgcccacaaaatcaccaaccgtaaatcttccgccaaaacgtcaacacgctctaactattccgaaataactttccaaaaaaaatattaatcgaaatactacgaaacaaaaatttcattcttcgcttccacaattacaaattttacgaaaacaaccgtttattcaacgtaaacaaaa

SEQ ID NO: 15249 - DNA, 839 bp, Artificial Sequence
  chemically treated genomic DNA (Homo sapiens) CpG-island No: 15249
  unsure (123, 165, 277)
ggagtaatcggtatcgtaaattcgatattcgttttttttagtagtaggtggatagttagtacgtttgacggcgttttcgttatcgagattacgtatgtcgtaatggagttttgcggtgttttngtaattattttgtaggtatcgagtatttcgcgtcgtttcgtnttttggttgtagttgcgcggtagaaatcgatcgttgggagttaattcgcggattaaggacgtttgtttggtcgtttttgataatttttttaagtttcgattattaggtaatnggttattttgtttacggtttcgtttgattcgtgtttttttgatcggttttaatttcggattatcgttttttcgaaatattttacggcggggtagggggattacgttaggatcggtaagcgtcgaggtatcgtttaggttgttggtatcgttcgtcgtaattttgcgtagaatacggcgtataattttgtcggagcgggttttaggtagggagtcggtttagtgtagtacgtttggcgtcgttagcgggttaatttttttacgtatttagttgcggatttttgcgtatagttttggtgacggttttttttcgtgattaagcgtgacgtaggcgtagatcgtttgatttttaatattgtgcggaatatttattacggcggtttcggtaattttcggatgcgttattagcgtcgatttaatttttgtcgtttttagacggtgatcggagacgtttagtacgtcgtttatacgtttcgttatttagtaatagttatttttatcgcgacgcgcgtcgtcgtcgttgaaatatatatttttgaaggtggagaagtaggtttgtttaaa

SEQ ID NO: 15250 - DNA, 839 bp, Artificial Sequence
  chemically treated genomic DNA (Homo sapiens) CpG-island No: 15250
  unsure (563, 675, 717)
tttaaacaaacctacttctccaccttcaaaaatatatatttcaacgacgacgacgcgcgtcgcgataaaaataactattactaaataacgaaacgtataaacgacgtactaaacgtctccgatcaccgtctaaaaacgacaaaaattaaatcgacgctaataacgcatccgaaaattaccgaaaccgccgtaataaatattccgcacaatattaaaaatcaaacgatctacgcctacgtcacgcttaatcacgaaaaaaaaccgtcaccaaaactatacgcaaaaatccgcaactaaatacgtaaaaaaattaacccgctaacgacgccaaacgtactacactaaaccgactccctacctaaaacccgctccgacaaaattatacgccgtattctacgcaaaattacgacgaacgataccaacaacctaaacgatacctcgacgcttaccgatcctaacgtaatccccctaccccgccgtaaaatatttcgaaaaaacgataatccgaaattaaaaccgatcaaaaaaacacgaatcaaacgaaaccgtaaacaaaataaccnattacctaataatcgaaacttaaaaaaattatcaaaaacgaccaaacaaacgtccttaatccgcgaattaactcccaacgatcgatttctaccgcgcaactacaaccaaaanacgaaacgacgcgaaatactcgatacctacaaaataattacnaaaacaccgcaaaactccattacgacatacgtaatctcgataacgaaaacgccgtcaaacgtactaactatccacctactactaaaaaaaacgaatatcgaatttacgataccgattactcc

SEQ ID NO: 15251 - DNA, 839 bp, Artificial Sequence
  chemically treated genomic DNA (Homo sapiens) CpG-island No: 15251
  unsure (563, 675, 717)
tttgaatagatttatttttttatttttaaaaatatgtattttagcggcgacggcgcgcgtcgcgatgaagatggttattattggataacggggcgtgtggacgacgtgttgaacgttttcggttatcgtttggggacggtagagattgagtcggcgttggtggcgtattcgaagattgtcgaagtcgtcgtagtaggtatttcgtataatattaaaggttaggcgatttacgtttacgttacgtttaattacggggaggaatcgttattagaattgtacgtagaagttcgtaattgggtgcgtaaagagattggttcgttggcgacgttagacgtgttgtattggatcgattttttgtttaaaattcgtttcggtaaaattatgcgtcgtattttgcgtaaaattgcggcgggcgatattagtaatttgggcgatatttcgacgtttgtcgattttggcgtagtttttttgtttcgtcgtaaaatgtttcgggggaacggtggttcggaattgaaatcggttagaaaagtacgggttaaacgaagtcgtgggtaaggtgattngttatttggtaatcgggatttagaaaagttgttaaaggcggttaaataggcgtttttgattcgcgaattgatttttaacggtcggtttttgtcgcgtaattgtaattaaagngcggaacggcgcgaagtgttcgatatttgtaaggtgattgtnaaagtatcgtagggttttattgcggtatacgtgatttcgatggcgaaaacgtcgttagacgtattggttgtttatttgttgttgaaagaagcgggtatcgggtttgcgatgtcggttgtttt

SEQ ID NO: 15252 - DNA, 839 bp, Artificial Sequence
  chemically treated genomic DNA (Homo sapiens) CpG-island No: 15252
  unsure (123, 165, 277)
aaaacaaccgacatcgcaaacccgatacccgcttctttcaacaacaaataaacaaccaatacgtctaacgacgttttcgccatcgaaatcacgtataccgcaataaaaccctacgatactttnacaatcaccttacaaatatcgaacacttcgcgccgttccgcnctttaattacaattacgcgacaaaaaccgaccgttaaaaatcaattcgcgaatcaaaaacgcctatttaaccgcctttaacaacttttctaaatcccgattaccaaataacnaatcaccttacccacgacttcgtttaacccgtacttttctaaccgatttcaattccgaaccaccgttcccccgaaacattttacgacgaaacaaaaaaactacgccaaaatcgacaaacgtcgaaatatcgcccaaattactaatatcgcccgccgcaattttacgcaaaatacgacgcataattttaccgaaacgaattttaaacaaaaaatcgatccaatacaacacgtctaacgtcgccaacgaaccaatctctttacgcacccaattacgaacttctacgtacaattctaataacgattcctccccgtaattaaacgtaacgtaaacgtaaatcgcctaacctttaatattatacgaaatacctactacgacgacttcgacaatcttcgaatacgccaccaacgccgactcaatctctaccgtccccaaacgataaccgaaaacgttcaacacgtcgtccacacgccccgttatccaataataaccatcttcatcgcgacgcgcgccgtcgccgctaaaatacatatttttaaaaataaaaaaataaatctattcaaa

SEQ ID NO: 15253 - DNA, 560 bp, Artificial Sequence
  chemically treated genomic DNA (Homo sapiens) CpG-island No: 15253
agcgtacgcgtttgattcggttaggagtcggtgattattaggttattttcggtggttttttttagcgggttattttcgttatcgattagcgtcggttgtacgtcgaagaacggacgtgttgtcgaatcggtttttagttcggtagcgttaggtagcggggtgattatgaaatcgtcggtttcggtttgttattaggtatcgattatcggatatttttcgttgtcgatttttttttagtattatttttacgttttcgggttaattggttcgtttacggaatcgagaatgcgtagcgacgaacggtcggtgttttcgatcgttttatcgtttttcgttattagcgcgcggatcgtcgtgggtgcggtatagagaatattgatttgatgtttgtttattatttgcgttatacgggtaggcgtcggttagttgggtacgtttttaaatattagcgtggtcgtatcgtaggttaacgggtcgtatagtaagttattgtgttcggttatttaatttatatcgggggtgtattagtagatattattcggatgataatttaagatata

SEQ ID NO: 15254 - DNA, 560 bp, Artificial Sequence
  chemically treated genomic DNA (Homo sapiens) CpG-island No: 15254
tatatcttaaattatcatccgaataatatctactaatacacccccgatataaattaaataaccgaacacaataacttactatacgacccgttaacctacgatacgaccacgctaatatttaaaaacgtacccaactaaccgacgcctacccgtataacgcaaataataaacaaacatcaaatcaatattctctataccgcacccacgacgatccgcgcgctaataacgaaaaacgataaaacgatcgaaaacaccgaccgttcgtcgctacgcattctcgattccgtaaacgaaccaattaacccgaaaacgtaaaaataatactaaaaaaaaatcgacaacgaaaaatatccgataatcgatacctaataacaaaccgaaaccgacgatttcataatcaccccgctacctaacgctaccgaactaaaaaccgattcgacaacacgtccgttcttcgacgtacaaccgacgctaatcgataacgaaaataacccgctaaaaaaaaccaccgaaaataacctaataatcaccgactcctaaccgaatcaaacgcgtacgct

SEQ ID NO: 15255 - DNA, 560 bp, Artificial Sequence
  chemically treated genomic DNA (Homo sapiens) CpG-island No: 15255
tatgttttgaattattattcgggtaatatttattggtgtattttcgatgtgggttgggtgatcgaatatagtaatttgttgtacggttcgttggtttgcggtgcgattacgttgatgtttgaaggcgtatttaattggtcgacgtttgttcgtatggcgtaggtggtggataagtattaggttaatattttttatatcgtatttacggcgattcgcgcgttgatggcggaaggcgataaagcgatcgaaggtatcgatcgttcgtcgttgcgtattttcggtttcgtgggcgagttaattaattcggaagcgtgggagtggtattggaaaaaaatcggtaacgagaaatgttcggtggtcgatatttggtggtagatcgaaatcggcggttttatgattatttcgttgtttggcgttatcgagttgaaagtcggttcggtaatacgttcgtttttcggcgtgtaatcggcgttggtcgataacgaaggtaattcgttggagggggttatcgaaggtagtttggtaattatcgatttttggtcgggttaggcgcgtacgtt

SEQ ID NO: 15256 - DNA, 560 bp, Artificial Sequence
  chemically treated genomic DNA (Homo sapiens) CpG-island No: 15256
aacgtacgcgcctaacccgaccaaaaatcgataattaccaaactaccttcgataaccccctccaacgaattaccttcgttatcgaccaacgccgattacacgccgaaaaacgaacgtattaccgaaccgactttcaactcgataacgccaaacaacgaaataatcataaaaccgccgatttcgatctaccaccaaatatcgaccaccgaacatttctcgttaccgatttttttccaataccactcccacgcttccgaattaattaactcgcccacgaaaccgaaaatacgcaacgacgaacgatcgataccttcgatcgctttatcgccttccgccatcaacgcgcgaatcgccgtaaatacgatataaaaaatattaacctaatacttatccaccacctacgccatacgaacaaacgtcgaccaattaaatacgccttcaaacatcaacgtaatcgcaccgcaaaccaacgaaccgtacaacaaattactatattcgatcacccaacccacatcgaaaatacaccaataaatattacccgaataataattcaaaacata

SEQ ID NO: 15257 - DNA, 622 bp, Artificial Sequence
  chemically treated genomic DNA (Homo sapiens) CpG-island No: 15257
aaatcggcgtcgcgcgtacggataaaggcgttgaaagttttttgagtttgagttttgtagtattcgtttggtttgagttttgttagtcgttttttgcggcgtttgcgttcgttttttttagtttttttttgttttttgatgcgtttagtcgcggtttttatttttttttttttgcgtttttttattgcgaggattgcgttatgtttcgggttgtattatcggattcggatgtcgtggaatttcggtacgaagtatttatcgtatattttgtatttacggcgggatggtttacgtatgggtattattttgaatttgtattagcgtgaggttttcgtagaatacggtattagtatcgatgtatatttggttggtatattttaggggttggcgcgtaggggtgtggtcgaagataaatagattagtattagttattattttgtcgcgtatggtggcgttcgttagtttttttagttttataatgatgtttagtttgttgagattggattgtgtcgttagagtaataggtttttagttcggatcgttatcggagtagagaaacgttaggttggtgggtttgttcgttattttattttattcggttttggttttcgtttcgttatgg

SEQ ID NO: 15258 - DNA, 622 bp, Artificial Sequence
  chemically treated genomic DNA (Homo sapiens) CpG-island No: 15258
ccataacgaaacgaaaaccaaaaccgaataaaataaaataacgaacaaacccaccaacctaacgtttctctactccgataacgatccgaactaaaaacctattactctaacgacacaatccaatctcaacaaactaaacatcattataaaactaaaaaaactaacgaacgccaccatacgcgacaaaataataactaatactaatctatttatcttcgaccacacccctacgcgccaacccctaaaatataccaaccaaatatacatcgatactaataccgtattctacgaaaacctcacgctaatacaaattcaaaataatacccatacgtaaaccatcccgccgtaaatacaaaatatacgataaatacttcgtaccgaaattccacgacatccgaatccgataatacaacccgaaacataacgcaatcctcgcaataaaaaaacgcaaaaaaaaaaaaataaaaaccgcgactaaacgcatcaaaaaacaaaaaaaaactaaaaaaaacgaacgcaaacgccgcaaaaaacgactaacaaaactcaaaccaaacgaatactacaaaactcaaactcaaaaaactttcaacgcctttatccgtacgcgcgacgccgattt

SEQ ID NO: 15259 - DNA, 622 bp, Artificial Sequence
  chemically treated genomic DNA (Homo sapiens) CpG-island No: 15259
ttatgacgaaacgaaagttaaagtcgaatgggataaagtgacgagtaaatttattagtttgacgtttttttatttcgataacgattcgaattgggagtttattgttttggcgatataatttagttttaataagttgggtattattgtgaagttggaaaagttggcgaacgttattatgcgcgatagagtggtagttggtgttgatttgtttattttcggttatatttttgcgcgttagtttttgaagtatgttaattagatgtatatcgatattggtgtcgtgttttgcggaaattttacgttggtataggtttaaggtggtgtttatgcgtaaattatttcgtcgtaagtgtaaagtatgcggtgaatatttcgtgtcgaaattttacgatattcggattcggtggtgtagttcggagtatggcgtaattttcgtaatggaagaacgtaagaaggagaaggtgaaagtcgcggttaagcgtattaaggagtaaaaagaggttgaaaaggacgggcgtaaacgtcgtaaggagcggttggtagagtttaggttagacggatattataaggtttaggtttagaaagtttttaacgtttttattcgtgcgcgcgacgtcgattt

SEQ ID NO: 15260 - DNA, 622 bp, Artificial Sequence
  chemically treated genomic DNA (Homo sapiens) CpG-island No: 15260
aaatcgacgtcgcgcgcacgaataaaaacgttaaaaactttctaaacctaaaccttataatatccgtctaacctaaactctaccaaccgctccttacgacgtttacgcccgtccttttcaacctctttttactccttaatacgcttaaccgcgactttcaccttctccttcttacgttcttccattacgaaaattacgccatactccgaactacaccaccgaatccgaatatcgtaaaatttcgacacgaaatattcaccgcatactttacacttacgacgaaataatttacgcataaacaccaccttaaacctataccaacgtaaaatttccgcaaaacacgacaccaatatcgatatacatctaattaacatacttcaaaaactaacgcgcaaaaatataaccgaaaataaacaaatcaacaccaactaccactctatcgcgcataataacgttcgccaacttttccaacttcacaataatacccaacttattaaaactaaattatatcgccaaaacaataaactcccaattcgaatcgttatcgaaataaaaaaacgtcaaactaataaatttactcgtcactttatcccattcgactttaactttcgtttcgtcataa

SEQ ID NO: 15261 - DNA, 607 bp, Artificial Sequence
  chemically treated genomic DNA (Homo sapiens) CpG-island No: 15261
tagtcggtattgttgtcggatgcggcgtaaacgttttattcggtttacggagggtgcgggaatttgtaggtttgataagacgcgtaagcgtcgtattaggtattgatgtcggatgcggcgtaaacgttttattcgatttataaaattacgttaaattaggttattgcgttgtttggcgtaggtttgataagacgcgttaagcgtcgtattaggcgttgatgtcggatgcggtataaacgttttattcgatttataaaattacgttaaattaggttattgcgttgtttggcgtaggtttgataagacgcggtaagcgtcgtattaggcgttgatgtcggatgcggcgtaaacgttttattcgatttataaaattacgttaaattaggttattgcgttgtttggcgtaggtttgataagacgcgttaagcgtcgtattaggcgttgatgtcggatgcggtataaacgttttattcgatttataaaaattcgttaaattaggttattgcgttgtttggcgtaggtttgataaaacgcggtaagcgtcgtataaggtatttatatattgtcggggggatattcgcggaaattttaattattgattcgtatt

SEQ ID NO: 15262 - DNA, 607 bp, Artificial Sequence
  chemically treated genomic DNA (Homo sapiens) CpG-island No: 15262
aatacgaatcaataattaaaatttccgcgaatatccccccgacaatatataaataccttatacgacgcttaccgcgttttatcaaacctacgccaaacaacgcaataacctaatttaacgaatttttataaatcgaataaaacgtttataccgcatccgacatcaacgcctaatacgacgcttaacgcgtcttatcaaacctacgccaaacaacgcaataacctaatttaacgtaattttataaatcgaataaaacgtttacgccgcatccgacatcaacgcctaatacgacgcttaccgcgtcttatcaaacctacgccaaacaacgcaataacctaatttaacgtaattttataaatcgaataaaacgtttataccgcatccgacatcaacgcctaatacgacgcttaacgcgtcttatcaaacctacgccaaacaacgcaataacctaatttaacgtaattttataaatcgaataaaacgtttacgccgcatccgacatcaatacctaatacgacgcttacgcgtcttatcaaacctacaaattcccgcaccctccgtaaaccgaataaaacgtttacgccgcatccgacaacaataccgacta

SEQ ID NO: 15263 - DNA, 607 bp, Artificial Sequence
  chemically treated genomic DNA (Homo sapiens) CpG-island No: 15263
aatgcggattaataattgagattttcgcggatattttttcggtaatgtgtgaatgttttatgcgacgtttgtcgcgttttattaggtttacgttagatagcgtaatagtttgatttagcggatttttgtaggtcggataaggcgtttatgtcgtattcgatattaacgtttgatgcgacgtttaacgcgttttattaggtttacgttagatagcgtaatagtttgatttagcgtgattttgtaggtcggataaggcgtttacgtcgtattcgatattaacgtttgatgcgacgtttgtcgcgttttattaggtttacgttagatagcgtaatagtttgatttagcgtgattttgtaggtcggataaggcgtttatgtcgtattcgatattaacgtttgatgcgacgtttaacgcgttttattaggtttacgttagatagcgtaatagtttgatttagcgtgattttgtaggtcggataaggcgtttacgtcgtattcgatattaatgtttgatgcgacgtttgcgcgttttattaggtttataaattttcgtatttttcgtaggtcggataaggcgtttacgtcgtattcggtaatagtgtcgattg

SEQ ID NO: 15264 - DNA, 607 bp, Artificial Sequence
  chemically treated genomic DNA (Homo sapiens) CpG-island No: 15264
caatcgacactattaccgaatacgacgtaaacgccttatccgacctacgaaaaatacgaaaatttataaacctaataaaacgcgcaaacgtcgcatcaaacattaatatcgaatacgacgtaaacgccttatccgacctacaaaatcacgctaaatcaaactattacgctatctaacgtaaacctaataaaacgcgttaaacgtcgcatcaaacgttaatatcgaatacgacataaacgccttatccgacctacaaaatcacgctaaatcaaactattacgctatctaacgtaaacctaataaaacgcgacaaacgtcgcatcaaacgttaatatcgaatacgacgtaaacgccttatccgacctacaaaatcacgctaaatcaaactattacgctatctaacgtaaacctaataaaacgcgttaaacgtcgcatcaaacgttaatatcgaatacgacataaacgccttatccgacctacaaaaatccgctaaatcaaactattacgctatctaacgtaaacctaataaaacgcgacaaacgtcgcataaaacattcacacattaccgaaaaaatatccgcgaaaatctcaattattaatccgcatt

SEQ ID NO: 15265 - DNA, 1023 bp, Artificial Sequence
  chemically treated genomic DNA (Homo sapiens) CpG-island No: 15265
  unsure (639, 649, 686)
ggcgaagcgacgttcgattttattttttagtttcgttttgatttcggtattttggggataagcggtatcgatagcgacggttcgttgttggagttcgattattacgaagttcgtattaaacgcgttattattgagaattcgcgttacgttatgttggttgtcgattattcgaaatttggtcgtaacgcgatggttaatatgggtagtattagtatggtagatgtcgtttatatcgacgtttcgtcgttagtaagcgtgatgtaggtgttgacggattattatatttaattggagttgtgttgattttgtacggttttttacgttagattaaaacgcgttaggtatttgcgtagtcgattcgcgttattgacgttggttttgttttggcgcgaaacgttaaaaagttggcgttcggttgcggaaagcgattttgtttggcggtagatagcgataacgtgttttagttgtatacggtcgaagagatcgatgttttttgtttttgcgtttagtaacgtcgtaagcgcggaggggcggtttttttgttagttatagcgtagacggtttattttatttttaattacgtttagagtgatgcgttcgttagtggtaaaggtggttattcgcgtgacgttggtaganagttcgcganagttatcgcgttatgttgtttggggagaggtcgtaanagttaattaggcgcgtcgcgtttcggtgttaaaacgtacgttgtcgttagtgagtgaggcgtggcgttttattttataatttaggttcggtttaatatttttttggcgttggcgtagattcggtagggtgaaggtttagagattgattcgcgcgtatagattttcgcgaaatttgttttcggtaattagttggcgtaaatcgcgtatcgtttcggcgataagttgaaaattattgtttatttggcgatcgttgttaaacgggtaaaaggttttttttttaatggtttttagtagtattgtttgttcgtttgcgtttagttcgttaattttattaaga

SEQ ID NO: 15266 - DNA, 1023 bp, Artificial Sequence
  chemically treated genomic DNA (Homo sapiens) CpG-island No: 15266
  unsure (338, 375, 385)
tcttaataaaattaacgaactaaacgcaaacgaacaaacaatactactaaaaaccattaaaaaaaaaaccttttacccgtttaacaacgatcgccaaataaacaataattttcaacttatcgccgaaacgatacgcgatttacgccaactaattaccgaaaacaaatttcgcgaaaatctatacgcgcgaatcaatctctaaaccttcaccctaccgaatctacgccaacgccaaaaaaatattaaaccgaacctaaattataaaataaaacgccacgcctcactcactaacgacaacgtacgttttaacaccgaaacgcgacgcgcctaattaactnttacgacctctccccaaacaacataacgcgataactntcgcgaactntctaccaacgtcacgcgaataaccacctttaccactaacgaacgcatcactctaaacgtaattaaaaataaaataaaccgtctacgctataactaacaaaaaaaccgcccctccgcgcttacgacgttactaaacgcaaaaacaaaaaacatcgatctcttcgaccgtatacaactaaaacacgttatcgctatctaccgccaaacaaaatcgctttccgcaaccgaacgccaactttttaacgtttcgcgccaaaacaaaaccaacgtcaataacgcgaatcgactacgcaaatacctaacgcgttttaatctaacgtaaaaaaccgtacaaaatcaacacaactccaattaaatataataatccgtcaacacctacatcacgcttactaacgacgaaacgtcgatataaacgacatctaccatactaatactacccatattaaccatcgcgttacgaccaaatttcgaataatcgacaaccaacataacgtaacgcgaattctcaataataacgcgtttaatacgaacttcgtaataatcgaactccaacaacgaaccgtcgctatcgataccgcttatccccaaaataccgaaatcaaaacgaaactaaaaaataaaatcgaacgtcgcttcgcc

SEQ ID NO: 15267 - DNA, 1023 bp, Artificial Sequence
  chemically treated genomic DNA (Homo sapiens) CpG-island No: 15267
  unsure (338, 375, 385)
ttttgatgagattggcgaattgggcgtagacgaataggtaatgttgttgaaagttattgaagagaaaattttttattcgtttggtagcgatcgttaggtgagtagtgatttttagtttatcgtcggaacggtgcgcgatttgcgttagttggttgtcgaaggtaaatttcgcgaagatttgtacgcgcggattaatttttggatttttattttgtcgggtttacgttagcgttaggaagatattgaatcgaatttggattatgaagtggagcgttacgttttatttattggcgatagcgtgcgttttaatatcgaagcgcggcgcgtttggttggttnttgcgatttttttttaggtaatatggcgcggtaattntcgcgaattntttgttagcgttacgcggatggttatttttgttattagcggacgtattattttggacgtggttgaagatgagataaatcgtttgcgttataattggtaggagagtcgttttttcgcgtttacggcgttgttgggcgtagaggtagaaaatatcgattttttcgatcgtatgtaattggaatacgttatcgttatttgtcgttaggtaaagtcgtttttcgtagtcggacgttagttttttgacgtttcgcgttagggtaaagttagcgttaatgacgcggatcggttacgtaaatatttggcgcgttttggtttgacgtgggaagtcgtgtaggattagtatagttttagttgaatatggtggttcgttagtatttgtattacgtttattggcggcggggcgtcggtgtagacggtatttattatgttgatgttgtttatattgattatcgcgttacggttaaatttcgagtgatcgataattagtataacgtggcgcgagtttttaataatggcgcgtttggtgcgaatttcgtggtaatcgaattttagtagcgagtcgtcgttatcgatgtcgtttatttttagaatgtcgaaattaaggcggaattgggagataaaatcgagcgtcgtttcgtt

SEQ ID NO: 15268 - DNA, 1023 bp, Artificial Sequence
  chemically treated genomic DNA (Homo sapiens) CpG-island No: 15268
  unsure (639, 649, 686)
aacgaaacgacgctcgattttatctcccaattccgccttaatttcgacattctaaaaataaacgacatcgataacgacgactcgctactaaaattcgattaccacgaaattcgcaccaaacgcgccattattaaaaactcgcgccacgttatactaattatcgatcactcgaaatttaaccgtaacgcgataatcaatataaacaacatcaacataataaataccgtctacaccgacgccccgccgccaataaacgtaatacaaatactaacgaaccaccatattcaactaaaactatactaatcctacacgacttcccacgtcaaaccaaaacgcgccaaatatttacgtaaccgatccgcgtcattaacgctaactttaccctaacgcgaaacgtcaaaaaactaacgtccgactacgaaaaacgactttacctaacgacaaataacgataacgtattccaattacatacgatcgaaaaaatcgatattttctacctctacgcccaacaacgccgtaaacgcgaaaaaacgactctcctaccaattataacgcaaacgatttatctcatcttcaaccacgtccaaaataatacgtccgctaataacaaaaataaccatccgcgtaacgctaacaaanaattcgcganaattaccgcgccatattacctaaaaaaaaatcgcaanaaccaaccaaacgcgccgcgcttcgatattaaaacgcacgctatcgccaataaataaaacgtaacgctccacttcataatccaaattcgattcaatatcttcctaacgctaacgtaaacccgacaaaataaaaatccaaaaattaatccgcgcgtacaaatcttcgcgaaatttaccttcgacaaccaactaacgcaaatcgcgcaccgttccgacgataaactaaaaatcactactcacctaacgatcgctaccaaacgaataaaaaattttctcttcaataactttcaacaacattacctattcgtctacgcccaattcgccaatctcatcaaaa

SEQ ID NO: 15269 - DNA, 707 bp, Artificial Sequence
  chemically treated genomic DNA (Homo sapiens) CpG-island No: 15269
  unsure (515, 704, 706)
tttatatacgtcgattgtttacgtttttcgtttttttttatcgtagttttcgttttacgttatttttcgtttatattttcgattttttgtttttttcgcgttttttcgttttttcgtttgtaatttatgaaaatttttgttttttaataaaatttttcgaattaattcgttatgatttttcgtttttttcgttttatttttcgtttatttcggattttagttcgttatttttcggatttttatttcgttagttattttatatattttcgttttatttttttatgtagtcgattatagatttcgtgaattatttttgtattatttcgtcgggaattttcgtttcgagttcgtgttaataatttttttatttattgtttcgtaaaatcgcgcgtatataattcgtgatatatttacgcgtttttcgtcgttatattattttttgtatttattgcgtaaattttatacgtcgaattattttttatatattttttcgtatatttcgcgcgaattttcgngttataattttcgttacgataatttttcgtgtaattttcgttttgaatttcgtttttatcgtttttttcgttttattacgtcgcgttttattattttgcgtttaaacgtatcgttatgttataacgtcgcgcgagtaatttacgcggagattatatagttttttggatgaatatttggagcgtttatantnt

SEQ ID NO: 15270 - DNA, 707 bp, Artificial Sequence
  chemically treated genomic DNA (Homo sapiens) CpG-island No: 15270
  unsure (2, 4, 193)
anantataaacgctccaaatattcatccaaaaaactatataatctccgcgtaaattactcgcgcgacgttataacataacgatacgtttaaacgcaaaataataaaacgcgacgtaataaaacgaaaaaaacgataaaaacgaaattcaaaacgaaaattacacgaaaaattatcgtaacgaaaattataacncgaaaattcgcgcgaaatatacgaaaaaatatataaaaaataattcgacgtataaaatttacgcaataaatacaaaaaataatataacgacgaaaaacgcgtaaatatatcacgaattatatacgcgcgattttacgaaacaataaataaaaaaattattaacacgaactcgaaacgaaaattcccgacgaaataatacaaaaataattcacgaaatctataatcgactacataaaaaaataaaacgaaaatatataaaataactaacgaaataaaaatccgaaaaataacgaactaaaatccgaaataaacgaaaaataaaacgaaaaaaacgaaaaatcataacgaattaattcgaaaaattttattaaaaaacaaaaattttcataaattacaaacgaaaaaacgaaaaaacgcgaaaaaaacaaaaaatcgaaaatataaacgaaaaataacgtaaaacgaaaactacgataaaaaaaaacgaaaaacgtaaacaatcgacgtatataaa

SEQ ID NO: 15271 - DNA, 707 bp, Artificial Sequence
  chemically treated genomic DNA (Homo sapiens) CpG-island No: 15271
  unsure (2, 4, 193)
anantatggacgttttagatatttatttagagaattgtatagttttcgcgtaggttgttcgcgcggcgttgtgatatggcgatacgtttgagcgtaggatggtgaagcgcggcgtagtagagcggagaaaacgatggaggcggaatttagggcgagaattgtacgagaggttgtcgtggcggaggttgtgatncgggagttcgcgcgggatgtgcgagaagatatgtgagagatggttcggcgtgtgagatttacgtagtgaatgtagagggtggtatgacgacggagaacgcgtgaatgtgttacgggttatgtgcgcgcggttttgcggagtagtaggtgaggaggttgttggtacgagttcgggacgagagttttcgacggagtggtgtagaggtggtttacggggtttgtagtcgattatatgggaggatggggcgaggatgtgtggggtaattggcggggtaagagttcgaggggtggcgggttaggattcgagatggacggaggatgggacggaagggacggaggattatggcggattagttcgagagattttgttggagagtaaggatttttataggttgtaggcgagagggcgagaggacgcggaggggataggggatcgggggtgtgagcggagaatgacgtagagcgagggttacgatgaagggggacggagagcgtgggtagtcggcgtatatggg

SEQ ID NO: 15272 - DNA, 707 bp, Artificial Sequence
  chemically treated genomic DNA (Homo sapiens) CpG-island No: 15272
  unsure (515, 704, 706)
cccatatacgccgactacccacgctctccgtcccccttcatcgtaaccctcgctctacgtcattctccgctcacacccccgatcccctatcccctccgcgtcctctcgccctctcgcctacaacctataaaaatccttactctccaacaaaatctctcgaactaatccgccataatcctccgtcccttccgtcccatcctccgtccatctcgaatcctaacccgccacccctcgaactcttaccccgccaattaccccacacatcctcgccccatcctcccatataatcgactacaaaccccgtaaaccacctctacaccactccgtcgaaaactctcgtcccgaactcgtaccaacaacctcctcacctactactccgcaaaaccgcgcgcacataacccgtaacacattcacgcgttctccgtcgtcataccaccctctacattcactacgtaaatctcacacgccgaaccatctctcacatatcttctcgcacatcccgcgcgaactcccgnatcacaacctccgccacgacaacctctcgtacaattctcgccctaaattccgcctccatcgttttctccgctctactacgccgcgcttcaccatcctacgctcaaacgtatcgccatatcacaacgccgcgcgaacaacctacgcgaaaactatacaattctctaaataaatatctaaaacgtccatantnt

SEQ ID NO: 15273 - DNA, 543 bp, Artificial Sequence
  chemically treated genomic DNA (Homo sapiens) CpG-island No: 15273
acgagttgggtgtgttcggggcgtttaatcgtttatgagttcggggagtaggtaggtgtaagtgtcggttgttgtaacgtagtaattgttggaggttggcgaggttcggaggcggtgtaggaagttttcgattacgcgggtttttgatcgcgggcgtttatagcgcggatatggcgggttggtggtcggcgttgtcgcgtacggttcggcgttattcgtggtttattaacgtgttgttttacgttgttcgagtaacgtagttgtacgttttacgagcgtgtcgtagttcgttcgttttcgtcggggacgtgttgtaataacggttgtacggtcgttaggtcgattggcgttagacgcggcgcgtggttacgttggtggtgattttttacgttaattttaattacgtgtggttgggtttgttggagcgcgcgtttgtcggtcgagcgtcgtgcgttatgttgggtaaatttgttgtgcgattaagtggggcggtgtttttatcgcgggttttggttttttatttttagtgaaggggtcgggggg

SEQ ID NO: 15274 - DNA, 543 bp, Artificial Sequence
  chemically treated genomic DNA (Homo sapiens) CpG-island No: 15274
ccccccgaccccttcactaaaaataaaaaaccaaaacccgcgataaaaacaccgccccacttaatcgcacaacaaatttacccaacataacgcacgacgctcgaccgacaaacgcgcgctccaacaaacccaaccacacgtaattaaaattaacgtaaaaaatcaccaccaacgtaaccacgcgccgcgtctaacgccaatcgacctaacgaccgtacaaccgttattacaacacgtccccgacgaaaacgaacgaactacgacacgctcgtaaaacgtacaactacgttactcgaacaacgtaaaacaacacgttaataaaccacgaataacgccgaaccgtacgcgacaacgccgaccaccaacccgccatatccgcgctataaacgcccgcgatcaaaaacccgcgtaatcgaaaacttcctacaccgcctccgaacctcgccaacctccaacaattactacgttacaacaaccgacacttacacctacctactccccgaactcataaacgattaaacgccccgaacacacccaactcgt

SEQ ID NO: 15275 - DNA, 543 bp, Artificial Sequence
  chemically treated genomic DNA (Homo sapiens) CpG-island No: 15275
tttttcggtttttttattgggggtaaaaggttaagattcgcgatgggggtatcgttttatttggtcgtatagtaaatttgtttagtatggcgtacggcgttcggtcggtaagcgcgcgttttagtaggtttagttatacgtagttgaagttggcgtgaaaggttattattaacgtggttacgcgtcgcgtttggcgttagtcggtttagcggtcgtgtagtcgttgttatagtacgttttcggcggagacgagcgagttacggtacgttcgtagagcgtatagttacgttgttcgagtaacgtagagtagtacgttggtgggttacgggtggcgtcgggtcgtgcgcgataacgtcggttattagttcgttatgttcgcgttgtgggcgttcgcgattaggagttcgcgtggtcgaaggttttttgtatcgttttcgggtttcgttagtttttagtagttattgcgttgtagtagtcggtatttgtatttgtttatttttcgagtttatgagcggttgggcgtttcgagtatatttagttcgt

SEQ ID NO: 15276 - DNA, 543 bp, Artificial Sequence
  chemically treated genomic DNA (Homo sapiens) CpG-island No: 15276
acgaactaaatatactcgaaacgcccaaccgctcataaactcgaaaaataaacaaatacaaataccgactactacaacgcaataactactaaaaactaacgaaacccgaaaacgatacaaaaaaccttcgaccacgcgaactcctaatcgcgaacgcccacaacgcgaacataacgaactaataaccgacgttatcgcgcacgacccgacgccacccgtaacccaccaacgtactactctacgttactcgaacaacgtaactatacgctctacgaacgtaccgtaactcgctcgtctccgccgaaaacgtactataacaacgactacacgaccgctaaaccgactaacgccaaacgcgacgcgtaaccacgttaataataacctttcacgccaacttcaactacgtataactaaacctactaaaacgcgcgcttaccgaccgaacgccgtacgccatactaaacaaatttactatacgaccaaataaaacgatacccccatcgcgaatcttaaccttttacccccaataaaaaaaccgaaaaa

SEQ ID NO: 15277 - DNA, 850 bp, Artificial Sequence
  chemically treated genomic DNA (Homo sapiens) CpG-island No: 15277
tgcgaggggtagcggtcgtcgcgagggttttttacggtcgttcgcggagcgaggggatttcgatcggcggagggacggttgcgttttgtaggtcgttgcgtttaggtaggtttttgcgttcgggtaggtttcggttttttgtcgcgttttcggttcgcgataatttcggtaggatgggcggtaggacgcggaggggtatttgcggagttcgtcgggaacgtttttttggttttcggtgtcgggtagcggcgggcgcggcgtttatagcgtttttagtttcgggatttggttttagttcgtttttaggcgaacggtttttttcgttcggagcgcgtcggtttagttttcgcgtacgcgcgtatttttagttttttattttcgttcgtttttttcgtagtcgttgtcgtcgaggtcgaggggtcgtatcgggtgcggcggggcggggcgttttttttattaggcggggagaatcgggggcggagtttgcgtcgcgcgagagaggtttaggtcggggcggaggcgaggtcggggtcgaggcgggggcgggggcggggtcgggcgttaggggtcgcgggtttgcggcgtttatagggattattttgggcggaaacgtttggtgagttttttcgtttgtagtttcgtatcgtcgggtaagttaggttttttttgtacgtacgaaggaggattttataggaacgaattacgatttttaaggtttcgtagttgtaagatcgtagcgtaggatcgaaatttcgattcggttgtagagtttttttgcggtttggtcgggttttaaaggtttgaaatttttgatttatcgtttagttagaacgaggggacgttttatgtt

SEQ ID NO: 15278 - DNA, 850 bp, Artificial Sequence
  chemically treated genomic DNA (Homo sapiens) CpG-island No: 15278
aacataaaacgtcccctcgttctaactaaacgataaatcaaaaatttcaaacctttaaaacccgaccaaaccgcaaaaaaactctacaaccgaatcgaaatttcgatcctacgctacgatcttacaactacgaaaccttaaaaatcgtaattcgttcctataaaatcctccttcgtacgtacaaaaaaaacctaacttacccgacgatacgaaactacaaacgaaaaaactcaccaaacgtttccgcccaaaataatccctataaacgccgcaaacccgcgacccctaacgcccgaccccgcccccgcccccgcctcgaccccgacctcgcctccgccccgacctaaacctctctcgcgcgacgcaaactccgcccccgattctccccgcctaataaaaaaaacgccccgccccgccgcacccgatacgacccctcgacctcgacgacaacgactacgaaaaaaacgaacgaaaataaaaaactaaaaatacgcgcgtacgcgaaaactaaaccgacgcgctccgaacgaaaaaaaccgttcgcctaaaaacgaactaaaaccaaatcccgaaactaaaaacgctataaacgccgcgcccgccgctacccgacaccgaaaaccaaaaaaacgttcccgacgaactccgcaaatacccctccgcgtcctaccgcccatcctaccgaaattatcgcgaaccgaaaacgcgacaaaaaaccgaaacctacccgaacgcaaaaacctacctaaacgcaacgacctacaaaacgcaaccgtccctccgccgatcgaaatcccctcgctccgcgaacgaccgtaaaaaaccctcgcgacgaccgctacccctcgca

SEQ ID NO: 15279 - DNA, 850 bp, Artificial Sequence
  chemically treated genomic DNA (Homo sapiens) CpG-island No: 15279
ggtatgaaacgttttttcgttttggttgggcgatgggttaggagttttaggtttttgaggttcggttaaatcgtagggggattttgtagtcgggtcggggtttcgattttgcgttgcggttttataattgcgaaattttgggggtcgtggttcgtttttgtggaattttttttcgtgcgtgtaggaggagtttagtttgttcggcggtgcgaggttgtaagcgggagggtttattaggcgttttcgtttagggtggtttttgtaagcgtcgtagattcgcggtttttggcgttcggtttcgttttcgttttcgtttcggtttcggtttcgttttcgtttcggtttgagtttttttcgcgcggcgtaggtttcgttttcggtttttttcgtttagtggaagggacgtttcgtttcgtcgtattcggtgcggtttttcggtttcggcggtagcggttgcggagaaggcgagcgaaggtaggaggttgggggtgcgcgcgtgcgcgggggttggatcgacgcgtttcgggcgaaggaggtcgttcgtttgggggcgggttggagttaagtttcggggttaggggcgttgtgggcgtcgcgttcgtcgttgttcggtatcggaagttaagagggcgttttcgacgggtttcgtagatgttttttcgcgttttgtcgtttattttgtcgggattgtcgcgggtcgggggcgcgataggaggtcgaggtttgttcgggcgtagaggtttgtttgggcgtagcggtttgtagggcgtagtcgttttttcgtcggtcggggttttttcgtttcgcgggcggtcgtgggaggttttcgcgacggtcgttatttttcgta

SEQ ID NO: 15280 - DNA, 850 bp, Artificial Sequence
  chemically treated genomic DNA (Homo sapiens) CpG-island No: 15280
tacgaaaaataacgaccgtcgcgaaaacctcccacgaccgcccgcgaaacgaaaaaaccccgaccgacgaaaaaacgactacgccctacaaaccgctacgcccaaacaaacctctacgcccgaacaaacctcgacctcctatcgcgcccccgacccgcgacaatcccgacaaaataaacgacaaaacgcgaaaaaacatctacgaaacccgtcgaaaacgccctcttaacttccgataccgaacaacgacgaacgcgacgcccacaacgcccctaaccccgaaacttaactccaacccgcccccaaacgaacgacctccttcgcccgaaacgcgtcgatccaacccccgcgcacgcgcgcacccccaacctcctaccttcgctcgccttctccgcaaccgctaccgccgaaaccgaaaaaccgcaccgaatacgacgaaacgaaacgtcccttccactaaacgaaaaaaaccgaaaacgaaacctacgccgcgcgaaaaaaactcaaaccgaaacgaaaacgaaaccgaaaccgaaacgaaaacgaaaacgaaaccgaacgccaaaaaccgcgaatctacgacgcttacaaaaaccaccctaaacgaaaacgcctaataaaccctcccgcttacaacctcgcaccgccgaacaaactaaactcctcctacacgcacgaaaaaaaattccacaaaaacgaaccacgacccccaaaatttcgcaattataaaaccgcaacgcaaaatcgaaaccccgacccgactacaaaatccccctacgatttaaccgaacctcaaaaacctaaaactcctaacccatcgcccaaccaaaacgaaaaaacgtttcatacc

SEQ ID NO: 15281 - DNA, 516 bp, Artificial Sequence
  chemically treated genomic DNA (Homo sapiens) CpG-island No: 15281
tatagcgttaagtacgttggtatataggtatttacgagcgataataaataagagttatagaatacgagatagtaagtgtagttatatatattattatattattagattacgatattattacgtacgatgttaaattattatacgatatttatgttttataatatacgaatacgatatttcgtatggcgcgttgttatttttagacgtttatgttatttaggagattacgttttacggtagtcgcgattatcgcgtaggatacggatcgagcggaggaggacgtattgtcgtcgtcgtatattacggggggtacgatcgacgacgcggcgtatagcgtttatcgatagcgaggtcgggtaaagggataattagaagtagatagagtaatacgtacgggttagtatacgggcgaacgatcggtaggggcgcgtcgcgtagcgcggtgtgacgtaggtataagttatcgcgtcgtttttgtttcgttgttatagatttatgaacgtatgtatgatataa

SEQ ID NO: 15282 - DNA, 516 bp, Artificial Sequence
  chemically treated genomic DNA (Homo sapiens) CpG-island No: 15282
ttatatcatacatacgttcataaatctataacaacgaaacaaaaacgacgcgataacttatacctacgtcacaccgcgctacgcgacgcgcccctaccgatcgttcgcccgtatactaacccgtacgtattactctatctacttctaattatccctttacccgacctcgctatcgataaacgctatacgccgcgtcgtcgatcgtaccccccgtaatatacgacgacgacaatacgtcctcctccgctcgatccgtatcctacgcgataatcgcgactaccgtaaaacgtaatctcctaaataacataaacgtctaaaaataacaacgcgccatacgaaatatcgtattcgtatattataaaacataaatatcgtataataatttaacatcgtacgtaataatatcgtaatctaataatataataatatatataactacacttactatctcgtattctataactcttatttattatcgctcgtaaatacctatataccaacgtacttaacgctata

SEQ ID NO: 15283 - DNA, 516 bp, Artificial Sequence
  chemically treated genomic DNA (Homo sapiens) CpG-island No: 15283
ttgtgttatgtatgcgtttatgagtttgtagtagcgaagtagaggcgacgcggtggtttgtgtttgcgttatatcgcgttgcgcggcgcgtttttgtcggtcgttcgttcgtgtgttggttcgtgcgtgttgttttgtttgtttttggttgtttttttgttcggtttcgttgtcggtaggcgttgtgcgtcgcgtcgtcggtcgtgtttttcgtggtgtgcggcggcggtagtgcgttttttttcgttcgattcgtgttttgcgcggtggtcgcggttgtcgtggagcgtggttttttaggtgatataagcgtttggaagtggtagcgcgttatgcgaggtgtcgtgttcgtgtgttgtgaggtatgggtgtcgtgtggtggtttggtatcgtgcgtggtggtgtcgtggtttggtggtgtggtggtgtgtgtggttgtatttgttgtttcgtgttttgtagtttttgtttgttgtcgttcgtaggtgtttgtgtgttagcgtgtttggcgttatg

SEQ ID NO: 15284 - DNA, 516 bp, Artificial Sequence
  chemically treated genomic DNA (Homo sapiens) CpG-island No: 15284
cataacgccaaacacgctaacacacaaacacctacgaacgacaacaaacaaaaactacaaaacacgaaacaacaaatacaaccacacacaccaccacaccaccaaaccacgacaccaccacgcacgataccaaaccaccacacgacacccatacctcacaacacacgaacacgacacctcgcataacgcgctaccacttccaaacgcttatatcacctaaaaaaccacgctccacgacaaccgcgaccaccgcgcaaaacacgaatcgaacgaaaaaaaacgcactaccgccgccgcacaccacgaaaaacacgaccgacgacgcgacgcacaacgcctaccgacaacgaaaccgaacaaaaaaacaaccaaaaacaaacaaaacaacacgcacgaaccaacacacgaacgaacgaccgacaaaaacgcgccgcgcaacgcgatataacgcaaacacaaaccaccgcgtcgcctctacttcgctactacaaactcataaacgcatacataacacaa

SEQ ID NO: 15285 - DNA, 1216 bp, Artificial Sequence
  chemically treated genomic DNA (Homo sapiens) CpG-island No: 15285
tcgtcgttttatttttagttcgcgggggaggtttcgcgcgttaatcgagtttagcgttttttagtaagttaggagcgaagtcgtcgttttcgcgattttagttttttcgggttttcgggcggcgttttcgttatttttgcgggcggattcgggggggcgcgtagagttggagaaatttttttcgttttagggtggggggtatcggtgtagatatttacgtcggggttagcgttcggagttattttttcgttttcggtttcgtcgtttaggggcgtgggaagcgggcgttcgttgtcgtttttgtcgtcggcgtcgtcgtttgtttgtttttagtttcggtttcgggttggtttcgagtttttcgtttcgacgtcgcgcgttcgttttatataattttattcgagcgcgttcggttttatgtaaaggttggcggaggttcgtagttaatggcgcggtagttggagtcgggggttcggggtggggggcgtcggcgcggttaatcgcggtttcgagagttcggagagtcgggcgtggggagggagcgttttttcgcgttgatttaggagtcgggattgcggtggtagtagtcggtagttaggttggttcggcgcggcgcggcggttattggggtgggcggcggcgaaggcggcggcgagggcgggcgtttttcgcgtttcgttattgcgtcgcgtaatttttaggcggtagcgaggtttggcgaggaggggagagggcgtttggttgggcgttgggggttttaggtcggagggaagcgagggtttttcgggaggtagcgtagggaaggaacgcgaagggggaggggagggcggcgagttttaggatttcgcggttatttttgcgcgtaggatcgagggtggaggcgggagcggttgtattgtttttttatttttttttaggatagcgatttggcgtcgtcgggtcgggttaaagcggttaagcgagtcgcgttgatggcgagatttcgattacggagttagcgtcgagtcgatttttatttagtttggggacgtgttcgagtatttttcggggattgtttagtatggagagtagggtttcgcgacggttttcgtaggcggggagcgggcgagcgtagttcggagattaggcgcgtagaggtttaggcggttgcgggtagcgtcgtttttattttatttcgtttttattagtagtgtttttattttattttatttagttt

SEQ ID NO: 15286 - DNA, 1216 bp, Artificial Sequence
  chemically treated genomic DNA (Homo sapiens) CpG-island No: 15286
aaactaaataaaataaaataaaaacactactaataaaaacgaaataaaataaaaacgacgctacccgcaaccgcctaaacctctacgcgcctaatctccgaactacgctcgcccgctccccgcctacgaaaaccgtcgcgaaaccctactctccatactaaacaatccccgaaaaatactcgaacacgtccccaaactaaataaaaatcgactcgacgctaactccgtaatcgaaatctcgccatcaacgcgactcgcttaaccgctttaacccgacccgacgacgccaaatcgctatcctaaaaaaaaataaaaaaacaatacaaccgctcccgcctccaccctcgatcctacgcgcaaaaataaccgcgaaatcctaaaactcgccgccctcccctcccccttcgcgttccttccctacgctacctcccgaaaaaccctcgcttccctccgacctaaaacccccaacgcccaaccaaacgccctctcccctcctcgccaaacctcgctaccgcctaaaaattacgcgacgcaataacgaaacgcgaaaaacgcccgccctcgccgccgccttcgccgccgcccaccccaataaccgccgcgccgcgccgaaccaacctaactaccgactactaccaccgcaatcccgactcctaaatcaacgcgaaaaaacgctccctccccacgcccgactctccgaactctcgaaaccgcgattaaccgcgccgacgccccccaccccgaacccccgactccaactaccgcgccattaactacgaacctccgccaacctttacataaaaccgaacgcgctcgaataaaattatataaaacgaacgcgcgacgtcgaaacgaaaaactcgaaaccaacccgaaaccgaaactaaaaacaaacaaacgacgacgccgacgacaaaaacgacaacgaacgcccgcttcccacgcccctaaacgacgaaaccgaaaacgaaaaaataactccgaacgctaaccccgacgtaaatatctacaccgataccccccaccctaaaacgaaaaaaatttctccaactctacgcgcccccccgaatccgcccgcaaaaataacgaaaacgccgcccgaaaacccgaaaaaactaaaatcgcgaaaacgacgacttcgctcctaacttactaaaaaacgctaaactcgattaacgcgcgaaacctcccccgcgaactaaaaataaaacgacga

SEQ ID NO: 15287 - DNA, 1216 bp, Artificial Sequence
  chemically treated genomic DNA (Homo sapiens) CpG-island No: 15287
ggattaggtgggatggggtgggggtattgttggtggggacggggtggggtagaagcggcgttgttcgtagtcgtttgggtttttgcgcgtttgattttcgagttgcgttcgttcgtttttcgtttgcgggggtcgtcgcggagttttgttttttatattgagtagttttcgggaggtgttcggatacgtttttaggttggataaagatcggttcggcgttagtttcgtagtcgaaatttcgttattagcgcggttcgtttggtcgttttggttcggttcggcgacgttagatcgttattttggggggaaatgggaaggtagtgtagtcgttttcgtttttattttcggttttgcgcgtaggggtggtcgcggggttttggggttcgtcgttttttttttttttttcgcgttttttttttgcgttgtttttcgagggattttcgttttttttcggtttggggtttttagcgtttagttaggcgttttttttttttttcgttaggtttcgttgtcgtttgaaggttacgcgacgtagtggcggggcgcggggggcgttcgttttcgtcgtcgttttcgtcgtcgtttattttagtggtcgtcgcgtcgcgtcgggttagtttggttgtcggttgttgttatcgtaatttcggtttttaaattagcgcggggaggcgttttttttttacgttcggtttttcgggttttcggggtcgcgattggtcgcgtcggcgttttttatttcgggttttcggttttagttgtcgcgttattggttgcgggttttcgttagtttttatataagatcgggcgcgttcgagtggagttgtataaagcgagcgcgcggcgtcggggcgggaggttcgaggttagttcgggatcggggttgggagtaagtaggcggcggcgtcggcggtagaggcggtagcgagcgttcgttttttacgtttttaggcggcggggtcgagagcgggaggatggtttcgagcgttgatttcggcgtgagtatttgtatcggtgttttttattttaaggcggagaaagtttttttagttttgcgcgttttttcggattcgttcgtaagggtggcggggacgtcgttcgggaattcgggaagattgggatcgcgaaggcggcggtttcgtttttaatttgttgggaggcgttggattcgattggcgcgcggagtttttttcgcgggttgggggtgaggcggcgg

SEQ ID NO: 15288 - DNA, 1216 bp, Artificial Sequence
  chemically treated genomic DNA (Homo sapiens) CpG-island No: 15288
ccgccgcctcacccccaacccgcgaaaaaaactccgcgcgccaatcgaatccaacgcctcccaacaaattaaaaacgaaaccgccgccttcgcgatcccaatcttcccgaattcccgaacgacgtccccgccacccttacgaacgaatccgaaaaaacgcgcaaaactaaaaaaactttctccgccttaaaataaaaaacaccgatacaaatactcacgccgaaatcaacgctcgaaaccatcctcccgctctcgaccccgccgcctaaaaacgtaaaaaacgaacgctcgctaccgcctctaccgccgacgccgccgcctacttactcccaaccccgatcccgaactaacctcgaacctcccgccccgacgccgcgcgctcgctttatacaactccactcgaacgcgcccgatcttatataaaaactaacgaaaacccgcaaccaataacgcgacaactaaaaccgaaaacccgaaataaaaaacgccgacgcgaccaatcgcgaccccgaaaacccgaaaaaccgaacgtaaaaaaaaaacgcctccccgcgctaatttaaaaaccgaaattacgataacaacaaccgacaaccaaactaacccgacgcgacgcgacgaccactaaaataaacgacgacgaaaacgacgacgaaaacgaacgccccccgcgccccgccactacgtcgcgtaaccttcaaacgacaacgaaacctaacgaaaaaaaaaaaaaacgcctaactaaacgctaaaaaccccaaaccgaaaaaaaacgaaaatccctcgaaaaacaacgcaaaaaaaaaacgcgaaaaaaaaaaaaaaaacgacgaaccccaaaaccccgcgaccacccctacgcgcaaaaccgaaaataaaaacgaaaacgactacactaccttcccatttccccccaaaataacgatctaacgtcgccgaaccgaaccaaaacgaccaaacgaaccgcgctaataacgaaatttcgactacgaaactaacgccgaaccgatctttatccaacctaaaaacgtatccgaacacctcccgaaaactactcaatataaaaaacaaaactccgcgacgacccccgcaaacgaaaaacgaacgaacgcaactcgaaaatcaaacgcgcaaaaacccaaacgactacgaacaacgccgcttctaccccaccccgtccccaccaacaatacccccaccccatcccacctaatcc

SEQ ID NO: 15289 - DNA, 718 bp, Artificial Sequence
  chemically treated genomic DNA (Homo sapiens) CpG-island No: 15289
tgcgtggagattcggcggatggtatcgttataggttagtaatgttagcgtcgtagttagttagtaaattattgtcgaggttggttacgcgttagcgtattggttatttcgcgttagtttgcgcgtcgtcgttttttttagttttttatattagtaattacgaacgacgaattgcgttagaatgacgtgtataattgttgttttgttatcgggaattaaatataggtcgttagttaggcgtaattaacgtttattagtatttagatcgttgcggttatagttgttagagatgacgttttttattcgaaattaatacgtatttagcgtcgcgtatttgtatttaatacggtagtcgtcgttgtcgtatgttcgttagttaatagtaagttagcgttagtatatagcgattaatacggtaatatatagttacggtttatatttattttcgtttaatttattatagatttaaggatatatcgcgtacgttatattttttacggtttatataatatattatttaataataaatgtacggtttattatatattgtaaagtatttagtattcgtaggtttgttatataacggtcgtagttaacggcgttattagacgtaatattttttaaatatataatttagataatatataatagataacggatatttataataacgtagttaatatttagcgcgtattttaattagcgagatagttttattt

SEQ ID NO: 15290 - DNA, 718 bp, Artificial Sequence
  chemically treated genomic DNA (Homo sapiens) CpG-island No: 15290
aaataaaactatctcgctaattaaaatacgcgctaaatattaactacgttattataaatatccgttatctattatatattatctaaattatatatttaaaaaatattacgtctaataacgccgttaactacgaccgttatataacaaacctacgaatactaaatactttacaatatataataaaccgtacatttattattaaataatatattatataaaccgtaaaaaatataacgtacgcgatatatccttaaatctataataaattaaacgaaaataaatataaaccgtaactatatattaccgtattaatcgctatatactaacgctaacttactattaactaacgaacatacgacaacgacgactaccgtattaaatacaaatacgcgacgctaaatacgtattaatttcgaataaaaaacgtcatctctaacaactataaccgcaacgatctaaatactaataaacgttaattacgcctaactaacgacctatatttaattcccgataacaaaacaacaattatacacgtcattctaacgcaattcgtcgttcgtaattactaatataaaaaactaaaaaaaacgacgacgcgcaaactaacgcgaaataaccaatacgctaacgcgtaaccaacctcgacaataatttactaactaactacgacgctaacattactaacctataacgataccatccgccgaatctccacgca

SEQ ID NO: 15291 - DNA, 718 bp, Artificial Sequence
  chemically treated genomic DNA (Homo sapiens) CpG-island No: 15291
gggtggggttgtttcgttggttggggtgcgcgttgggtgttggttgcgttgttgtgggtgttcgttgtttgttgtgtgttgtttgggttgtgtgtttgaggggtgttgcgtttggtggcgtcgttggttacggtcgttgtgtggtaagtttgcggatgttgggtgttttgtagtgtgtggtaggtcgtgtatttgttgttggatggtatgttgtatgggtcgtggggagtgtggcgtgcgcgatgtatttttgggtttgtaatgggttggacgagggtgagtgtgggtcgtgattgtatgttgtcgtgttgatcgttgtgtgttggcgttggtttgttgttggttggcgggtatgcggtagcggcggttgtcgtgttgagtgtaggtacgcggcgttgggtgcgtgttagtttcgggtgaggggcgttatttttggtagttgtggtcgtagcgatttggatgttggtgggcgttggttgcgtttggttggcggtttgtgtttagttttcggtggtaaggtagtagttgtgtacgttattttggcgtaattcgtcgttcgtagttgttggtgtggggagttggagaaggcggcgacgcgtaagttggcgcggaatggttagtgcgttggcgcgtagttagtttcggtagtggtttgttggttggttgcggcgttggtattgttggtttgtagcgatgttattcgtcgaatttttacgta

SEQ ID NO: 15292 - DNA, 718 bp, Artificial Sequence
  chemically treated genomic DNA (Homo sapiens) CpG-island No: 15292
tacgtaaaaattcgacgaataacatcgctacaaaccaacaataccaacgccgcaaccaaccaacaaaccactaccgaaactaactacgcgccaacgcactaaccattccgcgccaacttacgcgtcgccgccttctccaactccccacaccaacaactacgaacgacgaattacgccaaaataacgtacacaactactaccttaccaccgaaaactaaacacaaaccgccaaccaaacgcaaccaacgcccaccaacatccaaatcgctacgaccacaactaccaaaaataacgcccctcacccgaaactaacacgcacccaacgccgcgtacctacactcaacacgacaaccgccgctaccgcatacccgccaaccaacaacaaaccaacgccaacacacaacgatcaacacgacaacatacaatcacgacccacactcaccctcgtccaacccattacaaacccaaaaatacatcgcgcacgccacactccccacgacccatacaacataccatccaacaacaaatacacgacctaccacacactacaaaacacccaacatccgcaaacttaccacacaacgaccgtaaccaacgacgccaccaaacgcaacacccctcaaacacacaacccaaacaacacacaacaaacaacgaacacccacaacaacgcaaccaacacccaacgcgcaccccaaccaacgaaacaaccccaccc

SEQ ID NO: 15293 - DNA, 690 bp, Artificial Sequence
  chemically treated genomic DNA (Homo sapiens) CpG-island No: 15293
ggattagttttagacgggtatcgttacgatattgttagcgtggataatacggttttttagttcgtttatcgtcgtagtgagcggcggttcgttttttagtaacgaaaattatttagttatttgcgtattggcgatttgcgttagttgtttatcgtttagtttacgggagaataattgcgttagttaggcgtaaatataggtaatttgttgtgttgttagcgtggttatgattttatttgcgacgcgggaatatattcgtattgcgttattatttttacggggtcgttaaacgtcgttatttgttttattgtttcgttgtattttttaatttttattagcgtagtgtgcgtattggtcgtttgcgttagttgcgatgtatcgatgtcgatggttaatacgttggggttatcgtatttgtatagcgtattaggttcgtcgtttttatttggatcgtattatgttttttcgtgaattcgtgttacgtcgggtgtatagcggttagaaattattgattttgataatatttgatcgcgagcgttaaagacgcgtattatattatcgttacgaatatcgcgcgcgttggtatattgcgggttattgaataattggttttttattcgttatcgtatattgttgacgtaagcgttttcgatttatataattgcgagtgaacgtcggaattcggatgta

SEQ ID NO: 15294 - DNA, 690 bp, Artificial Sequence
  chemically treated genomic DNA (Homo sapiens) CpG-island No: 15294
tacatccgaattccgacgttcactcgcaattatataaatcgaaaacgcttacgtcaacaatatacgataacgaataaaaaaccaattattcaataacccgcaatataccaacgcgcgcgatattcgtaacgataatataatacgcgtctttaacgctcgcgatcaaatattatcaaaatcaataatttctaaccgctatacacccgacgtaacacgaattcacgaaaaaacataatacgatccaaataaaaacgacgaacctaatacgctatacaaatacgataaccccaacgtattaaccatcgacatcgatacatcgcaactaacgcaaacgaccaatacgcacactacgctaataaaaattaaaaaatacaacgaaacaataaaacaaataacgacgtttaacgaccccgtaaaaataataacgcaatacgaatatattcccgcgtcgcaaataaaatcataaccacgctaacaacacaacaaattacctatatttacgcctaactaacgcaattattctcccgtaaactaaacgataaacaactaacgcaaatcgccaatacgcaaataactaaataattttcgttactaaaaaacgaaccgccgctcactacgacgataaacgaactaaaaaaccgtattatccacgctaacaatatcgtaacgatacccgtctaaaactaatcc

SEQ ID NO: 15295 - DNA, 690 bp, Artificial Sequence
  chemically treated genomic DNA (Homo sapiens) CpG-island No: 15295
tgtattcggatttcgacgtttattcgtagttatgtgagtcggaaacgtttgcgttagtaatatacggtagcgggtaaagagttagttatttagtaattcgtagtatgttagcgcgcgcggtattcgtaacggtgatgtggtacgcgtttttaacgttcgcggttaggtgttgttagggttagtggtttttgatcgttatgtattcggcgtggtacgaatttacgaaggggtatggtacgatttagataaaggcggcgagtttggtgcgttgtgtaaatacggtaattttaacgtgttgattatcgatatcggtatatcgtagttggcgtaggcgattagtgcgtatattacgttggtggaaattgagaagtataacggaatagtggagtaggtgacggcgtttaacggtttcgtggagatggtggcgtagtgcgaatatgttttcgcgtcgtaggtgaaattatgattacgttgatagtataatagattgtttgtgtttacgtttggttagcgtagttgttttttcgtgagttggacgatgaataattgacgtaaatcgttagtgcgtagatggttgaatggttttcgttgttgaaaaacgaatcgtcgtttattgcggcggtgaacgagttggaaaatcgtattgtttacgttgatagtatcgtgacgatgttcgtttggaattggttt

SEQ ID NO: 15296 - DNA, 690 bp, Artificial Sequence
  chemically treated genomic DNA (Homo sapiens) CpG-island No: 15296
aaaccaattccaaacgaacatcgtcacgatactatcaacgtaaacaatacgattttccaactcgttcaccgccgcaataaacgacgattcgtttttcaacaacgaaaaccattcaaccatctacgcactaacgatttacgtcaattattcatcgtccaactcacgaaaaaacaactacgctaaccaaacgtaaacacaaacaatctattatactatcaacgtaatcataatttcacctacgacgcgaaaacatattcgcactacgccaccatctccacgaaaccgttaaacgccgtcacctactccactattccgttatacttctcaatttccaccaacgtaatatacgcactaatcgcctacgccaactacgatataccgatatcgataatcaacacgttaaaattaccgtatttacacaacgcaccaaactcgccgcctttatctaaatcgtaccataccccttcgtaaattcgtaccacgccgaatacataacgatcaaaaaccactaaccctaacaacacctaaccgcgaacgttaaaaacgcgtaccacatcaccgttacgaataccgcgcgcgctaacatactacgaattactaaataactaactctttacccgctaccgtatattactaacgcaaacgtttccgactcacataactacgaataaacgtcgaaatccgaataca

SEQ ID NO: 15297 - DNA, 1057 bp, Artificial Sequence
  chemically treated genomic DNA (Homo sapiens) CpG-island No: 15297
cgcgtgttttttttcgggcggggttcggaaattggttattgtagtcgtgtttttgggttggggacgtattttagcgaaacgaatttagtcgtatttttcggttggtattcgcgcgttttaatttagggaaaatagatcggaacgcgtatgcgtcgcggcgcgtcgtatcgtttattagttttttaggttatatttttcgaaaattaaggtaagaaaggcggtaattgcgtttgcgggtagagaagtcggaggggcgggggcggagtcggaggaagggggtggaggcgcgtttgcgcggtgatttcgttagtaggaagtaggcgcgcgggggcgggggcgcgcggcggtaggaggcggggttttcggggtcgttgtcgtcgtcgtcgtcgcgtattgtgtagtaggcgggttttcgcgcggtagggttttggattcgcgcggttttcggggatggtgagtaaggcgttgttgcgtttcgtgtttgtcgttaatcgtaggaggatgaagttgttgttgggtatcgttttgttggtttacgtcgtttgtgagtgcgcgttcgttgttagttggggagttttatttatttttcggcgtcgcggtgggtcgggcggcggtggttcggggtttcgaggcggttttgtagtttcgcgttgtttttcgtttcgggcggggtcggcgttttttgtttttatttttttttatttttgtagtaaagcgggttaatttgggcgtatattttttatcgtttaggttcgggcgcggatttcgggcggaggggtttttagtagttttcgggcggttttaggtttttgttttttgttcgggcgcgggggattcggcggcggcgttgtcgtttatgtcgcgttgggagtcggcgagggtttcggtcggggatttcggagcgtgtcgcgtggggatatttttggggatagtcgaggtcgcgtcgcggtgtcggttaagtcggataaaaatattgtggttattggtagagttttcgtttcgattgtttgttttttaggaaaattatttagcgtttaatttttggggagttaagtgt

SEQ ID NO: 15298 - DNA, 1057 bp, Artificial Sequence
  chemically treated genomic DNA (Homo sapiens) CpG-island No: 15298
acacttaactccccaaaaattaaacgctaaataattttcctaaaaaacaaacaatcgaaacgaaaactctaccaataaccacaatatttttatccgacttaaccgacaccgcgacgcgacctcgactatccccaaaaatatccccacgcgacacgctccgaaatccccgaccgaaaccctcgccgactcccaacgcgacataaacgacaacgccgccgccgaatcccccgcgcccgaacaaaaaacaaaaacctaaaaccgcccgaaaactactaaaaacccctccgcccgaaatccgcgcccgaacctaaacgataaaaaatatacgcccaaattaacccgctttactacaaaaataaaaaaaaataaaaacaaaaaacgccgaccccgcccgaaacgaaaaacaacgcgaaactacaaaaccgcctcgaaaccccgaaccaccgccgcccgacccaccgcgacgccgaaaaataaataaaactccccaactaacaacgaacgcgcactcacaaacgacgtaaaccaacaaaacgatacccaacaacaacttcatcctcctacgattaacgacaaacacgaaacgcaacaacgccttactcaccatccccgaaaaccgcgcgaatccaaaaccctaccgcgcgaaaacccgcctactacacaatacgcgacgacgacgacgacaacgaccccgaaaaccccgcctcctaccgccgcgcgcccccgcccccgcgcgcctacttcctactaacgaaatcaccgcgcaaacgcgcctccacccccttcctccgactccgcccccgcccctccgacttctctacccgcaaacgcaattaccgcctttcttaccttaattttcgaaaaatataacctaaaaaactaataaacgatacgacgcgccgcgacgcatacgcgttccgatctattttccctaaattaaaacgcgcgaataccaaccgaaaaatacgactaaattcgtttcgctaaaatacgtccccaacccaaaaacacgactacaataaccaatttccgaaccccgcccgaaaaaaaacacgcg

SEQ ID NO: 15299 - DNA, 1057 bp, Artificial Sequence
  chemically treated genomic DNA (Homo sapiens) CpG-island No: 15299
atatttggttttttaagagttaaacgttgagtaatttttttgaggagtaaatagtcggagcgggggttttgttaatggttatagtatttttattcgatttaatcgatatcgcggcgcgatttcggttgtttttaagggtatttttacgcggtacgtttcggagttttcgatcgggattttcgtcggtttttagcgcgatatggacgatagcgtcgtcgtcgagtttttcgcgttcgggtaggaggtagagatttggggtcgttcgaggattgttaggggttttttcgttcggggttcgcgttcgggtttaagcggtagggggtgtgcgtttaagttggttcgttttgttgtaagagtggaaaggggtgggagtagaaagcgtcggtttcgttcggggcggggagtaacgcggggttgtagggtcgtttcggggtttcgaattatcgtcgttcggtttatcgcggcgtcggggaatgaatggggttttttagttggtagcgggcgcgtatttataggcgacgtaggttagtaaggcgatgtttagtagtagttttatttttttgcggttgacggtagatacgaggcgtagtagcgttttgtttattattttcgggagtcgcgcgggtttagggttttatcgcgcgggggttcgtttgttgtataatgcgcggcggcggcggcggtagcggtttcgagagtttcgttttttgtcgtcgcgcgttttcgttttcgcgcgtttgttttttgttggcgggattatcgcgtaggcgcgtttttatttttttttttcggtttcgttttcgttttttcggtttttttattcgtaggcgtagttgtcgttttttttgttttggttttcgaagaatgtgatttggagggttggtgggcggtgcggcgcgtcgcggcgtatgcgcgtttcggtttgttttttttgagttaaagcgcgcgggtgttagtcgggaggtgcggttggattcgtttcgttgaggtgcgtttttaatttaagggtacgattgtagtggttagttttcgagtttcgttcggaggggggtacgcg

SEQ ID NO: 15300 - DNA, 1057 bp, Artificial Sequence
  chemically treated genomic DNA (Homo sapiens) CpG-island No: 15300
cgcgtacccccctccgaacgaaactcgaaaactaaccactacaatcgtacccttaaattaaaaacgcacctcaacgaaacgaatccaaccgcacctcccgactaacacccgcgcgctttaactcaaaaaaaacaaaccgaaacgcgcatacgccgcgacgcgccgcaccgcccaccaaccctccaaatcacattcttcgaaaaccaaaacaaaaaaaacgacaactacgcctacgaataaaaaaaccgaaaaaacgaaaacgaaaccgaaaaaaaaaaataaaaacgcgcctacgcgataatcccgccaacaaaaaacaaacgcgcgaaaacgaaaacgcgcgacgacaaaaaacgaaactctcgaaaccgctaccgccgccgccgccgcgcattatacaacaaacgaacccccgcgcgataaaaccctaaacccgcgcgactcccgaaaataataaacaaaacgctactacgcctcgtatctaccgtcaaccgcaaaaaaataaaactactactaaacatcgccttactaacctacgtcgcctataaatacgcgcccgctaccaactaaaaaaccccattcattccccgacgccgcgataaaccgaacgacgataattcgaaaccccgaaacgaccctacaaccccgcgttactccccgccccgaacgaaaccgacgctttctactcccacccctttccactcttacaacaaaacgaaccaacttaaacgcacaccccctaccgcttaaacccgaacgcgaaccccgaacgaaaaaacccctaacaatcctcgaacgaccccaaatctctacctcctacccgaacgcgaaaaactcgacgacgacgctatcgtccatatcgcgctaaaaaccgacgaaaatcccgatcgaaaactccgaaacgtaccgcgtaaaaatacccttaaaaacaaccgaaatcgcgccgcgatatcgattaaatcgaataaaaatactataaccattaacaaaacccccgctccgactatttactcctcaaaaaaattactcaacgtttaactcttaaaaaaccaaatat

SEQ ID NO: 15301 - DNA, 636 bp, Artificial Sequence
  chemically treated genomic DNA (Homo sapiens) CpG-island No: 15301
gcgcgttagcgtaatgttgtaatttagagtcggggagaaagtatcgtatggtgataatgtttttatgttggttgttttgcgtatcggtaaagcgtatcggtagtttattacgtagtacgtttttttcggttattattagattaattagtttttttgtattatgtttacgttgtatttttagggttttacgatcgataaagttacgatttgtcggtttttaggcgatggtttagtttatgttggcggttaaaggagagatggtttcgtttattttttgattataaagatttatgttcgtttttagacgtagcgtgttacgcgcgtttaagttatatggtttaatattcgtttttattagcgtacgttagaaatcggttcgtttttttattgggtagtcgtaattttatagttcgttttatcggtataattagtggtggtaataaatagatcgttcgtttgtacgtttaaagaacggttttattttttttatcgtttgacgttgggcgttattaaatagtgtggtagtttttgtttgcgtattcggtttttgtacggtaattatggaaaggttattacgaacggtaatttcgatgtcgaataggtttagcgtgttgggtaatttaggagatggttttt

SEQ ID NO: 15302 - DNA, 636 bp, Artificial Sequence
  chemically treated genomic DNA (Homo sapiens) CpG-island No: 15302
aaaaaccatctcctaaattacccaacacgctaaacctattcgacatcgaaattaccgttcgtaataacctttccataattaccgtacaaaaaccgaatacgcaaacaaaaactaccacactatttaataacgcccaacgtcaaacgataaaaaaaataaaaccgttctttaaacgtacaaacgaacgatctatttattaccaccactaattataccgataaaacgaactataaaattacgactacccaataaaaaaacgaaccgatttctaacgtacgctaataaaaacgaatattaaaccatataacttaaacgcgcgtaacacgctacgtctaaaaacgaacataaatctttataatcaaaaaataaacgaaaccatctctcctttaaccgccaacataaactaaaccatcgcctaaaaaccgacaaatcgtaactttatcgatcgtaaaaccctaaaaatacaacgtaaacataatacaaaaaaactaattaatctaataataaccgaaaaaaacgtactacgtaataaactaccgatacgctttaccgatacgcaaaacaaccaacataaaaacattatcaccatacgatactttctccccgactctaaattacaacattacgctaacgcgc

SEQ ID NO: 15303 - DNA, 636 bp, Artificial Sequence
  chemically treated genomic DNA (Homo sapiens) CpG-island No: 15303
aaagattattttttggattatttaatacgttgaatttattcggtatcgaaattatcgttcgtgatgatttttttatgattgtcgtgtaagggtcgaatgcgtaggtaaaagttgttatattgtttaatgacgtttagcgttaggcggtggaagggatgaaatcgttttttggacgtgtaggcgggcgatttgtttattgttattattggttatatcggtgaagcgggttatgaaattgcgattgtttaatgaaaaagcggatcgatttttggcgtgcgttggtggaagcgggtgttaagttatgtggtttgggcgcgcgtgatacgttgcgtttggaagcgggtatgaatttttatggttaggagatggacgaaattattttttttttagtcgttaatatgggttggattatcgtttgggaatcggtagatcgtgattttatcggtcgtgaagttttggaagtgtagcgtgagtatggtatagaaaaattggttggtttggtgatgatcgaaaaaggcgtgttgcgtaatgaattgtcggtacgttttatcgatgcgtagggtaattagtatgaaggtattattattatgcggtatttttttttcgattttgggttatagtattgcgttggcgcgt

SEQ ID NO: 15304 - DNA, 636 bp, Artificial Sequence
  chemically treated genomic DNA (Homo sapiens) CpG-island No: 15304
acgcgccaacgcaatactataacccaaaatcgaaaaaaaaataccgcataataataataccttcatactaattaccctacgcatcgataaaacgtaccgacaattcattacgcaacacgcctttttcgatcatcaccaaaccaaccaatttttctataccatactcacgctacacttccaaaacttcacgaccgataaaatcacgatctaccgattcccaaacgataatccaacccatattaacgactaaaaaaaaaataatttcgtccatctcctaaccataaaaattcatacccgcttccaaacgcaacgtatcacgcgcgcccaaaccacataacttaacacccgcttccaccaacgcacgccaaaaatcgatccgctttttcattaaacaatcgcaatttcataacccgcttcaccgatataaccaataataacaataaacaaatcgcccgcctacacgtccaaaaaacgatttcatcccttccaccgcctaacgctaaacgtcattaaacaatataacaacttttacctacgcattcgacccttacacgacaatcataaaaaaatcatcacgaacgataatttcgataccgaataaattcaacgtattaaataatccaaaaaataatcttt

SEQ ID NO: 15305 - DNA, 848 bp, Artificial Sequence
  chemically treated genomic DNA (Homo sapiens) CpG-island No: 15305
gttcggtattaatttgtttagtgttcgtagttgacggttatttagttttttgagttgttttttagttatcggtaattttgtcggaatttgcggatcgcggttgtttttacgtataaaacgttttataatacggttttttagcgagtggaagttgatgatcgaaagtcgtttattcggggttagtacgttgagcgagttttttagcgtttgttttattttttttagtttattgtttatttaaatgcgtatcgtttggaaggtacgggtcgcgggatgtttaaatttattttttatcggcgttgtagtagttacgattttcgttagttttttggtgcgggttatcggttgttcgcggttacgttcgataatggcgcgggtaatgcgtttggtaaaacgttttttattataggtttttaatatttaggcgatatcggttttttttgcggtttgtagttatttagcggttgattgtttacgggttgggtttatacgtatgtttagcggattatcgcgtataaaggaaaagtcgcgtttagtattattaagttgcggtgaagagacgttaagatcgaggagaatgtcgtcgattttgtcgataagatcgcgttcggtaacgtattcgtttagcgcggagaaaggttcgtggatgatggagaagcgcggattattaatagttttcgtaacggcgatagtttgcgggtcgcgatcgatcgttagtaaacgttttttttcgttaagttgcgagaggattagacgtgagtgattatcgtgattaaaagttttattaatgtagatgttattaggacggatattgaggttattaacggttttatttagtagtatcgtag

SEQ ID NO: 15306 - DNA, 848 bp, Artificial Sequence
  chemically treated genomic DNA (Homo sapiens) CpG-island No: 15306
ctacgatactactaaataaaaccgttaataacctcaatatccgtcctaataacatctacattaataaaacttttaatcacgataatcactcacgtctaatcctctcgcaacttaacgaaaaaaaacgtttactaacgatcgatcgcgacccgcaaactatcgccgttacgaaaactattaataatccgcgcttctccatcatccacgaacctttctccgcgctaaacgaatacgttaccgaacgcgatcttatcgacaaaatcgacgacattctcctcgatcttaacgtctcttcaccgcaacttaataatactaaacgcgacttttcctttatacgcgataatccgctaaacatacgtataaacccaacccgtaaacaatcaaccgctaaataactacaaaccgcaaaaaaaaccgatatcgcctaaatattaaaaacctataataaaaaacgttttaccaaacgcattacccgcgccattatcgaacgtaaccgcgaacaaccgataacccgcaccaaaaaactaacgaaaatcgtaactactacaacgccgataaaaaataaatttaaacatcccgcgacccgtaccttccaaacgatacgcatttaaataaacaataaactaaaaaaaataaaacaaacgctaaaaaactcgctcaacgtactaaccccgaataaacgactttcgatcatcaacttccactcgctaaaaaaccgtattataaaacgttttatacgtaaaaacaaccgcgatccgcaaattccgacaaaattaccgataactaaaaaacaactcaaaaaactaaataaccgtcaactacgaacactaaacaaattaataccgaac

SEQ ID NO: 15307 - DNA, 848 bp, Artificial Sequence
  chemically treated genomic DNA (Homo sapiens) CpG-island No: 15307
ttacggtgttgttggatgaagtcgttaatggttttaatattcgttttgatggtatttatattgatgggatttttggttacggtggttatttacgtttgattttttcgtagtttggcgaagaggggcgtttgttggcgatcgatcgcgattcgtaggttatcgtcgttgcgaagattattgatgattcgcgtttttttattatttacggattttttttcgcgttgggcgaatacgttgtcgagcgcgattttatcggtaagatcgacggtatttttttcgattttggcgtttttttatcgtaatttgatgatgttgagcgcggttttttttttatgcgcgatggttcgttggatatgcgtatggatttaattcgtgggtagttagtcgttgaatggttataaatcgtagaagaagtcgatatcgtttgggtattgaaaatttatggtgaagagcgttttgttaaacgtattgttcgcgttattgtcgagcgtaatcgcgaatagtcgatgattcgtattaaagaattggcggaagtcgtggttgttgtaacgtcggtgaaagataagtttaaatatttcgcgattcgtattttttaggcggtgcgtatttgggtaaatagtgaattggaggagatagagtaggcgttaaaaagttcgtttaacgtgttggtttcgggtgggcggttttcgattattagtttttattcgttggaagatcgtattgtgaaacgttttatgcgtgaaaatagtcgcggttcgtaagtttcggtagggttatcgatgattgaagagtagtttaaaaaattgggtggtcgttagttgcgagtattaggtaagttaatgtcgggt

SEQ ID NO: 15308 - DNA, 848 bp, Artificial Sequence
  chemically treated genomic DNA (Homo sapiens) CpG-island No: 15308
acccgacattaacttacctaatactcgcaactaacgaccacccaattttttaaactactcttcaatcatcgataaccctaccgaaacttacgaaccgcgactattttcacgcataaaacgtttcacaatacgatcttccaacgaataaaaactaataatcgaaaaccgcccacccgaaaccaacacgttaaacgaactttttaacgcctactctatctcctccaattcactatttacccaaatacgcaccgcctaaaaaatacgaatcgcgaaatatttaaacttatctttcaccgacgttacaacaaccacgacttccgccaattctttaatacgaatcatcgactattcgcgattacgctcgacaataacgcgaacaatacgtttaacaaaacgctcttcaccataaattttcaatacccaaacgatatcgacttcttctacgatttataaccattcaacgactaactacccacgaattaaatccatacgcatatccaacgaaccatcgcgcataaaaaaaaaaccgcgctcaacatcatcaaattacgataaaaaaacgccaaaatcgaaaaaaataccgtcgatcttaccgataaaatcgcgctcgacaacgtattcgcccaacgcgaaaaaaaatccgtaaataataaaaaaacgcgaatcatcaataatcttcgcaacgacgataacctacgaatcgcgatcgatcgccaacaaacgcccctcttcgccaaactacgaaaaaatcaaacgtaaataaccaccgtaaccaaaaatcccatcaatataaataccatcaaaacgaatattaaaaccattaacgacttcatccaacaacaccgtaa

SEQ ID NO: 15309 - DNA, 597 bp, Artificial Sequence
  chemically treated genomic DNA (Homo sapiens) CpG-island No: 15309
cgcgttagcgtcgtattaggtaatcggtttgggcgttagatgtcggatgcggcgtaatcgttttattcgatttacggggtggagtattttatagcggtgtaggtttgataagacgcgcgagcgtcgtattaggtaatcggttcggacgttggatgtcggatgcggcgtaatcgttttatttaatttacggggtggagtattttatagcggtgtaggtttgataagacgcgttagcgtcgtattaggtaattcggtttgggcgttagatgtcggatgcggcgtaatcgttttattcgatttacggggtggagtattttatagcggtgtaggtttgataagacgcgttagcgtcgtattaggtaatcggttcgggcgttggatgtcggatgcggcgtgatcgttttgtttgatttacggggtgtcgtattttatagcggtgtaggtttgtataagacgttgttagcgtcgtatttaggtaatcggttcgggcgttggatgtcggattgcggcgtgatcgttttgtttgatttattggggtgtcgtattttacggtatgtttagcgaattatcgcgttgtcgattttttttttcgttttt

SEQ ID NO: 15310 - DNA, 597 bp, Artificial Sequence
  chemically treated genomic DNA (Homo sapiens) CpG-island No: 15310
aaaaacgaaaaaaaaaatcgacaacgcgataattcgctaaacataccgtaaaatacgacaccccaataaatcaaacaaaacgatcacgccgcaatccgacatccaacgcccgaaccgattacctaaatacgacgctaacaacgtcttatacaaacctacaccgctataaaatacgacaccccgtaaatcaaacaaaacgatcacgccgcatccgacatccaacgcccgaaccgattacctaatacgacgctaacgcgtcttatcaaacctacaccgctataaaatactccaccccgtaaatcgaataaaacgattacgccgcatccgacatctaacgcccaaaccgaattacctaatacgacgctaacgcgtcttatcaaacctacaccgctataaaatactccaccccgtaaattaaataaaacgattacgccgcatccgacatccaacgtccgaaccgattacctaatacgacgctcgcgcgtcttatcaaacctacaccgctataaaatactccaccccgtaaatcgaataaaacgattacgccgcatccgacatctaacgcccaaaccgattacctaatacgacgctaacgcg

SEQ ID NO: 15311 - DNA, 597 bp, Artificial Sequence
  chemically treated genomic DNA (Homo sapiens) CpG-island No: 15311
gaaggcggaagagaaaatcgataacgcggtagttcgttaaatatgtcgtgaagtgcggtattttagtaggttagataaggcggttacgtcgtagttcgatatttaacgttcgagtcggttgtttagatgcgacgttggtagcgttttatataggtttatatcgttgtgaagtgcggtatttcgtaggttagataaggcggttacgtcgtattcgatatttaacgttcgagtcggttgtttgatgcgacgttggcgcgttttattaggtttatatcgttgtgaagtgttttatttcgtaggtcggataaggcggttacgtcgtattcgatatttaacgtttaagtcggattgtttgatgcgacgttggcgcgttttattaggtttatatcgttgtgaagtgttttatttcgtaggttggataaggcggttacgtcgtattcgatatttaacgttcgagtcggttgtttgatgcgacgttcgcgcgttttattaggtttatatcgttgtgaagtgttttatttcgtaggtcggataaggcggttacgtcgtattcgatatttaacgtttaagtcggttgtttgatgcgacgttggcgcg

SEQ ID NO: 15312 - DNA, 597 bp, Artificial Sequence
  chemically treated genomic DNA (Homo sapiens) CpG-island No: 15312
cgcgccaacgtcgcatcaaacaaccgacttaaacgttaaatatcgaatacgacgtaaccgccttatccgacctacgaaataaaacacttcacaacgatataaacctaataaaacgcgcgaacgtcgcatcaaacaaccgactcgaacgttaaatatcgaatacgacgtaaccgccttatccaacctacgaaataaaacacttcacaacgatataaacctaataaaacgcgccaacgtcgcatcaaacaatccgacttaaacgttaaatatcgaatacgacgtaaccgccttatccgacctacgaaataaaacacttcacaacgatataaacctaataaaacgcgccaacgtcgcatcaaacaaccgactcgaacgttaaatatcgaatacgacgtaaccgccttatctaacctacgaaataccgcacttcacaacgatataaacctatataaaacgctaccaacgtcgcatctaaacaaccgactcgaacgttaaatatcgaactacgacgtaaccgccttatctaacctactaaaataccgcacttcacgacatatttaacgaactaccgcgttatcgattttctcttccgccttc

SEQ ID NO: 15313 - DNA, 833 bp, Artificial Sequence
  chemically treated genomic DNA (Homo sapiens) CpG-island No: 15313
atggtatagtttggcgtaatacgtttggtggatttgattggtcgtatcgatttgttgaaagagttggacggttttatcgttaaatagtagaagttggcgttgtcgaagttgttggagattgtcgaatcgtatttaggtaaggtattttattgtatcgaaaataattcgtcgtttgataacggtttgttgaacgcgtagttgttgtaataggcgaaatcgtattgtcgatgagcgttagagtaaaattttttggttcgatattcgtaatatcgatcgttttgtcggcgcgtcgtttttaggttatatcgtttagacgtacggcgattaggggttggtagtcgattttattaaagcgtattttaacggtatcgtaggttagagtttcggcgtgtggaacgcgggcggcgtggaattgtatttgatcggtgatgttaacgattatgtcggtaaaggtatggcgggcggtttaatcgttattcgtttttcggttggtttcgtttttcgtagttatgaagtaagtattatcggtaatatttgtttgtatggcgcgatcggtggtcgtttgtatgtcgtaggtcgcgcgggtgaacgtttcggcgtgcgtaatttcggtgttattatcgtggtagaaggtattggcgataacggttgtgaatatatgacgggtggtatcgtttgtattttgggtaaaatcggcgttaatttcggtgcgggtatgatcggcggtttcgtttacgttttcgatgaaagcggcgattttcgtaaacgcgttaattcggaattggtcgaggttttaagcgttgacgttttggcgatttatgaagagtatttgt

SEQ ID NO: 15314 - DNA, 833 bp, Artificial Sequence
  chemically treated genomic DNA (Homo sapiens) CpG-island No: 15314
acaaatactcttcataaatcgccaaaacgtcaacgcttaaaacctcgaccaattccgaattaacgcgtttacgaaaatcgccgctttcatcgaaaacgtaaacgaaaccgccgatcatacccgcaccgaaattaacgccgattttacccaaaatacaaacgataccacccgtcatatattcacaaccgttatcgccaataccttctaccacgataataacaccgaaattacgcacgccgaaacgttcacccgcgcgacctacgacatacaaacgaccaccgatcgcgccatacaaacaaatattaccgataatacttacttcataactacgaaaaacgaaaccaaccgaaaaacgaataacgattaaaccgcccgccatacctttaccgacataatcgttaacatcaccgatcaaatacaattccacgccgcccgcgttccacacgccgaaactctaacctacgataccgttaaaatacgctttaataaaatcgactaccaacccctaatcgccgtacgtctaaacgatataacctaaaaacgacgcgccgacaaaacgatcgatattacgaatatcgaaccaaaaaattttactctaacgctcatcgacaatacgatttcgcctattacaacaactacgcgttcaacaaaccgttatcaaacgacgaattattttcgatacaataaaataccttacctaaatacgattcgacaatctccaacaacttcgacaacgccaacttctactatttaacgataaaaccgtccaactctttcaacaaatcgatacgaccaatcaaatccaccaaacgtattacgccaaactataccat

SEQ ID NO: 15315 - DNA, 833 bp, Artificial Sequence
  chemically treated genomic DNA (Homo sapiens) CpG-island No: 15315
gtagatgttttttatggatcgttagagcgttaacgtttaagatttcgattagtttcgggttaacgcgtttgcggaaatcgtcgtttttatcgagaacgtaagcgaaatcgtcggttatgttcgtatcgaagttaacgtcggttttatttagaatgtagacgatattattcgttatatatttataatcgttgtcgttaatgttttttattacggtgatagtatcggagttacgtacgtcgaaacgtttattcgcgcggtttgcggtatatagacgattatcggtcgcgttatataggtaggtgttgtcgataatgtttgttttatggttgcggaaggcggaattaatcggaggacgaatggcgattaagtcgttcgttatgtttttatcgatatagtcgttggtattatcggttaggtatagttttacgtcgttcgcgttttatacgtcgaagttttggtttgcggtgtcgttgaagtacgttttgataggatcggttgttagtttttgatcgtcgtgcgtttgggcgatatagtttgaaagcgacgcgtcgatagaacggtcggtgttgcgaatatcgaattagaaggttttgttttggcgtttatcgataatacggtttcgtttgttgtagtaattgcgcgtttagtaggtcgttattaaacggcgggttgttttcggtgtagtagagtgttttatttggatgcggttcggtagtttttagtagtttcgatagcgttagtttttgttgtttggcggtgaaatcgtttagtttttttagtaggtcggtgcgattaattagatttattagacgtgttacgttaagttgtgttat

SEQ ID NO: 15316 - DNA, 833 bp, Artificial Sequence
  chemically treated genomic DNA (Homo sapiens) CpG-island No: 15316
ataacacaacttaacgtaacacgtctaataaatctaattaatcgcaccgacctactaaaaaaactaaacgatttcaccgccaaacaacaaaaactaacgctatcgaaactactaaaaactaccgaaccgcatccaaataaaacactctactacaccgaaaacaacccgccgtttaataacgacctactaaacgcgcaattactacaacaaacgaaaccgtattatcgataaacgccaaaacaaaaccttctaattcgatattcgcaacaccgaccgttctatcgacgcgtcgctttcaaactatatcgcccaaacgcacgacgatcaaaaactaacaaccgatcctatcaaaacgtacttcaacgacaccgcaaaccaaaacttcgacgtataaaacgcgaacgacgtaaaactatacctaaccgataataccaacgactatatcgataaaaacataacgaacgacttaatcgccattcgtcctccgattaattccgccttccgcaaccataaaacaaacattatcgacaacacctacctatataacgcgaccgataatcgtctatataccgcaaaccgcgcgaataaacgtttcgacgtacgtaactccgatactatcaccgtaataaaaaacattaacgacaacgattataaatatataacgaataatatcgtctacattctaaataaaaccgacgttaacttcgatacgaacataaccgacgatttcgcttacgttctcgataaaaacgacgatttccgcaaacgcgttaacccgaaactaatcgaaatcttaaacgttaacgctctaacgatccataaaaaacatctac

SEQ ID NO: 15317 - DNA, 763 bp, Artificial Sequence
  chemically treated genomic DNA (Homo sapiens) CpG-island No: 15317
tacgtcggtgtggttttttattttattaaataacgatatcgttaattagagtttgcgtttttatattaacgcgtcgttggttagttagtcggaataggcgattttcgcggtgacggatgaggcgatttttagcgaatagtttaacgttttttttatcggtatcgtcgttgcgtcggaagcgggtgcgacgttgattttataggtcgttagtttgagcggcggacgtatgttgcgttttattggtgcgggtattgtcgaagaacgaatgatcgtttcgtagttgtcggagtgtattttgtacgaatttatcgagcgttcgtattcgttttcgttcggtatcgatttgattttgatttgtggcgagcgtttgttggttatttcgcgaattatttatgtggaggtgtgttgatgtaacgttgtcgtgaaagggggcgagaaggcgatcgacgtcgattacgattttgtaaagagagcgacgtcgaggcgatatcgatttgttcgaattgagcgtcgtttagattgaatagtagtttaatttcgcggtagatcgcgtgatgatcgaaggcggtattgtcgatcgcgaattggcggcgttggcgttgaaataggttagcggtagataacgatagaagcgatttatttatgttgcgcgttatatcgtattatagtaggtagatagttggtagataagcgtagttagatacgaaatatatcggagaatgtagttatacgaatagttagagagttattatagagtagaata

SEQ ID NO: 15318 - DNA, 763 bp, Artificial Sequence
  chemically treated genomic DNA (Homo sapiens) CpG-island No: 15318
tattctactctataataactctctaactattcgtataactacattctccgatatatttcgtatctaactacgcttatctaccaactatctacctactataatacgatataacgcgcaacataaataaatcgcttctatcgttatctaccgctaacctatttcaacgccaacgccgccaattcgcgatcgacaataccgccttcgatcatcacgcgatctaccgcgaaattaaactactattcaatctaaacgacgctcaattcgaacaaatcgatatcgcctcgacgtcgctctctttacaaaatcgtaatcgacgtcgatcgccttctcgccccctttcacgacaacgttacatcaacacacctccacataaataattcgcgaaataaccaacaaacgctcgccacaaatcaaaatcaaatcgataccgaacgaaaacgaatacgaacgctcgataaattcgtacaaaatacactccgacaactacgaaacgatcattcgttcttcgacaatacccgcaccaataaaacgcaacatacgtccgccgctcaaactaacgacctataaaatcaacgtcgcacccgcttccgacgcaacgacgataccgataaaaaaaacgttaaactattcgctaaaaatcgcctcatccgtcaccgcgaaaatcgcctattccgactaactaaccaacgacgcgttaatataaaaacgcaaactctaattaacgatatcgttatttaataaaataaaaaaccacaccgacgta

SEQ ID NO: 15319 - DNA, 763 bp, Artificial Sequence
  chemically treated genomic DNA (Homo sapiens) CpG-island No: 15319
tattttgttttgtgatgattttttggttgttcgtatgattgtatttttcggtgtgtttcgtatttggttgcgtttatttgttagttgtttgtttattgtggtgcggtatggcgcgtagtatggataaatcgtttttatcgttatttgtcgttggtttgttttagcgttagcgtcgttagttcgcggtcggtaatgtcgttttcggttattacgcgatttatcgcgaggttaagttgttgtttaatttgggcgacgtttagttcgggtaaatcggtatcgtttcggcgtcgttttttttgtagggtcgtggtcggcgtcgatcgttttttcgtttttttttacggtaacgttatattagtatatttttatatgagtggttcgcggaatagttagtaggcgttcgttataggttaggattaggtcgatgtcgagcgggaacggatgcgggcgttcggtgagttcgtgtagaatgtatttcggtagttgcggagcgattattcgtttttcggtaatattcgtattagtaaggcgtaatatgcgttcgtcgtttaggttggcgatttgtaaaattagcgtcgtattcgttttcggcgtaacggcggtgtcggtggaaagggcgttgagttgttcgttggaaatcgttttattcgttatcgcgaaggtcgtttgtttcggttggttgattagcggcgcgttggtatgaaaacgtaggttttggttgacgatatcgttatttaatggggtagaaagttatatcggcgtg

SEQ ID NO: 15320 - DNA, 763 bp, Artificial Sequence
  chemically treated genomic DNA (Homo sapiens) CpG-island No: 15320
cacgccgatataactttctaccccattaaataacgatatcgtcaaccaaaacctacgttttcataccaacgcgccgctaatcaaccaaccgaaacaaacgaccttcgcgataacgaataaaacgatttccaacgaacaactcaacgccctttccaccgacaccgccgttacgccgaaaacgaatacgacgctaattttacaaatcgccaacctaaacgacgaacgcatattacgccttactaatacgaatattaccgaaaaacgaataatcgctccgcaactaccgaaatacattctacacgaactcaccgaacgcccgcatccgttcccgctcgacatcgacctaatcctaacctataacgaacgcctactaactattccgcgaaccactcatataaaaatatactaatataacgttaccgtaaaaaaaaacgaaaaaacgatcgacgccgaccacgaccctacaaaaaaaacgacgccgaaacgataccgatttacccgaactaaacgtcgcccaaattaaacaacaacttaacctcgcgataaatcgcgtaataaccgaaaacgacattaccgaccgcgaactaacgacgctaacgctaaaacaaaccaacgacaaataacgataaaaacgatttatccatactacgcgccataccgcaccacaataaacaaacaactaacaaataaacgcaaccaaatacgaaacacaccgaaaaatacaatcatacgaacaaccaaaaaatcatcacaaaacaaaata

SEQ ID NO: 15321 - DNA, 930 bp, Artificial Sequence
  chemically treated genomic DNA (Homo sapiens) CpG-island No: 15321
gattagggtttttacgtttaatcgcgtagaagaaaacgcgacgttttgcgcgtggttattcgtagaagtagtgattacgtcgtgcgttttttgttttttcgttaggttcgttattatggcgtatgcgtcgcgtagtttaaagttgtgtattggttggcgattttcgcgttttattagaatgacgttattaagacgcgacgatagtttttttattttttgtagcggcgtaatttgcgtcgtttcgtaaatcggcgcgcgtagtattgtttttaaatattcggtatttttcggagtatcggataggggttgcgagttagttattattaattttttagtttcgatttattacgtatcgcgtttttgtcggcgttggttgttaggttggtataagtacgtagggtaaaggagatttgacgtttacgatttttcggcgtttaggttttgttatttcgagcgttttgcgttttacgacgcgtcgttagttcggtatcgtttatttgtaattgaatgttacggttcgggatgtcgatagcgattaggttattatttttaattaggttaatgttgtcgtcgtttgtcgttttcggtgagacgtggtcgatggaaagattagaggtgttattagagaaacgatcgtcggtgattagcgtataggtttagtcgagatttattgattttaggaagttggttgggtagagtattttttgtattttcggatcgtttttcgggtttttatagcgaattattattatattttcggcgataattttatcgtcgagaatcgtttttatcgtatcgttttggttttcgtatattttcgtcgggtcggtgaatttgaggatgttgttatcgacgtttgtcgtttttacgatgtagtcgtttttcgtaaagttatcgtagagtatcgttaggtcgtcgtttttgttgtag

SEQ ID NO: 15322 - DNA, 930 bp, Artificial Sequence
  chemically treated genomic DNA (Homo sapiens) CpG-island No: 15322
ctacaacaaaaacgacgacctaacgatactctacgataactttacgaaaaacgactacatcgtaaaaacgacaaacgtcgataacaacatcctcaaattcaccgacccgacgaaaatatacgaaaaccaaaacgatacgataaaaacgattctcgacgataaaattatcgccgaaaatataataataattcgctataaaaacccgaaaaacgatccgaaaatacaaaaaatactctacccaaccaacttcctaaaatcaataaatctcgactaaacctatacgctaatcaccgacgatcgtttctctaataacacctctaatctttccatcgaccacgtctcaccgaaaacgacaaacgacgacaacattaacctaattaaaaataataacctaatcgctatcgacatcccgaaccgtaacattcaattacaaataaacgataccgaactaacgacgcgtcgtaaaacgcaaaacgctcgaaataacaaaacctaaacgccgaaaaatcgtaaacgtcaaatctcctttaccctacgtacttataccaacctaacaaccaacgccgacaaaaacgcgatacgtaataaatcgaaactaaaaaattaataataactaactcgcaacccctatccgatactccgaaaaataccgaatatttaaaaacaatactacgcgcgccgatttacgaaacgacgcaaattacgccgctacaaaaaataaaaaaactatcgtcgcgtcttaataacgtcattctaataaaacgcgaaaatcgccaaccaatacacaactttaaactacgcgacgcatacgccataataacgaacctaacgaaaaaacaaaaaacgcacgacgtaatcactacttctacgaataaccacgcgcaaaacgtcgcgttttcttctacgcgattaaacgtaaaaaccctaatc

SEQ ID NO: 15323 - DNA, 930 bp, Artificial Sequence
  chemically treated genomic DNA (Homo sapiens) CpG-island No: 15323
ttatagtaaagacggcggtttggcggtgttttacggtaattttgcggaaaacggttgtatcgtgaaaacggtaggcgtcgatgatagtatttttaaatttatcggttcggcgaaagtgtacgaaagttaggacgatgcggtagaagcgattttcggcggtaaagttgtcgtcggagatgtggtagtaattcgttatgaaggttcgaaaggcggttcggggatgtaggaaatgttttatttaattagttttttgaaattaatgggtttcggttaagtttgtgcgttgattatcgacggtcgtttttttggtggtatttttggtttttttatcggttacgttttatcggaagcggtaagcggcggtagtattggtttgattgaagatggtgatttgatcgttatcgatatttcgaatcgtggtatttagttataggtaagcgatgtcgaattggcggcgcgtcgtgaagcgtaggacgttcgaggtgataaagtttggacgtcgaaaaatcgtgaacgttaggttttttttgttttgcgtgtttatgttagtttggtaattagcgtcgataaaggcgcggtgcgtgataaatcgaaattggggggttaataatggttgattcgtaatttttgttcggtgtttcggaaggtgtcgaatatttaagagtagtgttgcgcgcgtcggtttacgaggcggcgtaggttacgtcgttataaaaaatggaaaaattgtcgtcgcgttttgataacgttattttggtgaagcgcgaagatcgttagttagtgtatagttttaagttgcgcggcgtatacgttatgatggcgggtttgacggaagaatagaaagcgtacggcgtgattattgtttttgcgggtaattacgcgtagggcgtcgcgtttttttttgcgcggttaggcgtgaaggttttgatt

SEQ ID NO: 15324 - DNA, 930 bp, Artificial Sequence
  chemically treated genomic DNA (Homo sapiens) CpG-island No: 15324
aatcaaaaccttcacgcctaaccgcgcaaaaaaaaacgcgacgccctacgcgtaattacccgcaaaaacaataatcacgccgtacgctttctattcttccgtcaaacccgccatcataacgtatacgccgcgcaacttaaaactatacactaactaacgatcttcgcgcttcaccaaaataacgttatcaaaacgcgacgacaatttttccattttttataacgacgtaacctacgccgcctcgtaaaccgacgcgcgcaacactactcttaaatattcgacaccttccgaaacaccgaacaaaaattacgaatcaaccattattaaccccccaatttcgatttatcacgcaccgcgcctttatcgacgctaattaccaaactaacataaacacgcaaaacaaaaaaaacctaacgttcacgatttttcgacgtccaaactttatcacctcgaacgtcctacgcttcacgacgcgccgccaattcgacatcgcttacctataactaaataccacgattcgaaatatcgataacgatcaaatcaccatcttcaatcaaaccaatactaccgccgcttaccgcttccgataaaacgtaaccgataaaaaaaccaaaaataccaccaaaaaaacgaccgtcgataatcaacgcacaaacttaaccgaaacccattaatttcaaaaaactaattaaataaaacatttcctacatccccgaaccgcctttcgaaccttcataacgaattactaccacatctccgacgacaactttaccgccgaaaatcgcttctaccgcatcgtcctaactttcgtacactttcgccgaaccgataaatttaaaaatactatcatcgacgcctaccgttttcacgatacaaccgttttccgcaaaattaccgtaaaacaccgccaaaccgccgtctttactataa

SEQ ID NO: 15325 - DNA, 553 bp, Artificial Sequence
  chemically treated genomic DNA (Homo sapiens) CpG-island No: 15325
tcggagttatcgttcggtttggttcggttacgtcgacgagcgcgtgttggttcgttttttatttgtggtcgaagtcgaaattcggtttagcgttttgcgttcgatatttttgttcggtttgtttttcggtttggtcgtcgttttcgcgatcgtagcggggggattgtttcggatgtttttaggacgtagttagaatcgtagtttagttacgtcgcgtttttttttacgtagttttcgtcgttcgttacgtagaatgcgagcggttcgttagcgtttgcgcgtagtttgcggggcgggacgtaatttcggggaaagcgcgagatttttttttttttcgttcggttgaggcgaggtggggtttttgggaaaattatataattttcgtttttgggtcggaattgttttcgtttattttaatttttttatttaggatttcgttaagttgacgttatacggaatcggtgtttcggaagttaaaggtggttatgttgtgtgggattacgtggttagaggtaagagtgtcgttttagtagtatatgtaatagtttaaatt

SEQ ID NO: 15326 - DNA, 553 bp, Artificial Sequence
  chemically treated genomic DNA (Homo sapiens) CpG-island No: 15326
aatttaaactattacatatactactaaaacgacactcttacctctaaccacgtaatcccacacaacataaccacctttaacttccgaaacaccgattccgtataacgtcaacttaacgaaatcctaaataaaaaaattaaaataaacgaaaacaattccgacccaaaaacgaaaattatataattttcccaaaaaccccacctcgcctcaaccgaacgaaaaaaaaaaaaatctcgcgctttccccgaaattacgtcccgccccgcaaactacgcgcaaacgctaacgaaccgctcgcattctacgtaacgaacgacgaaaactacgtaaaaaaaaacgcgacgtaactaaactacgattctaactacgtcctaaaaacatccgaaacaatccccccgctacgatcgcgaaaacgacgaccaaaccgaaaaacaaaccgaacaaaaatatcgaacgcaaaacgctaaaccgaatttcgacttcgaccacaaataaaaaacgaaccaacacgcgctcgtcgacgtaaccgaaccaaaccgaacgataactccga

SEQ ID NO: 15327 - DNA, 553 bp, Artificial Sequence
  chemically treated genomic DNA (Homo sapiens) CpG-island No: 15327
agtttaaattgttgtatatattattagagcgatatttttgtttttggttacgtggttttatatagtatggttatttttagttttcggagtatcggtttcgtgtgacgttaatttgacggaattttaggtaggaggattgggataggcgagggtagtttcggtttaggggcggggattatgtaatttttttaaaagttttatttcgttttagtcgggcgggagagagggaggtttcgcgtttttttcggggttgcgtttcgtttcgtaggttgcgcgtaggcgttgacgagtcgttcgtattttacgtaacggacggcggaggttacgtgaagagaggcgcggcgtgattgagttacggttttggttgcgttttagaggtattcggggtagttttttcgttgcgatcgcggaggcggcggttaggtcgagaggtaggtcgggtaggggtgtcggacgtagggcgttgggtcgggtttcggtttcggttataggtaaggagcgggttagtacgcgttcgtcggcgtggtcgggttaggtcgagcggtgatttcga

SEQ ID NO: 15328 - DNA, 553 bp, Artificial Sequence
  chemically treated genomic DNA (Homo sapiens) CpG-island No: 15328
tcgaaatcaccgctcgacctaacccgaccacgccgacgaacgcgtactaacccgctccttacctataaccgaaaccgaaacccgacccaacgccctacgtccgacacccctacccgacctacctctcgacctaaccgccgcctccgcgatcgcaacgaaaaaactaccccgaatacctctaaaacgcaaccaaaaccgtaactcaatcacgccgcgcctctcttcacgtaacctccgccgtccgttacgtaaaatacgaacgactcgtcaacgcctacgcgcaacctacgaaacgaaacgcaaccccgaaaaaaacgcgaaacctccctctctcccgcccgactaaaacgaaataaaacttttaaaaaaattacataatccccgcccctaaaccgaaactaccctcgcctatcccaatcctcctacctaaaattccgtcaaattaacgtcacacgaaaccgatactccgaaaactaaaaataaccatactatataaaaccacgtaaccaaaaacaaaaatatcgctctaataatatatacaacaatttaaact

SEQ ID NO: 15329 - DNA, 582 bp, Artificial Sequence
  chemically treated genomic DNA (Homo sapiens) CpG-island No: 15329
gtattgcgtgaagtgttttataagttcgaggtgttagtattgacgaaggagttagcggaacggagttaaaggattggcgtttcgttttttgcgattcgtgggtcggttattttcgcgtttatcgttttttttatttatttcgtttttatcgcgttttttttttttagttttgttttgatttatcgagggcggcgttgatatagtagattcggtcgtaggtagcgtttagtatggattggtttaggtattttcgatttattcgacgtttttgtttcggttcgttttttatttagattacgttcgtttcgtatttagtttcgtaatttgtcgggtcgttattgtattcgttatatttgttttggttcgttaagcgttattttttttttttagtagagatcgtcggtattcgagtcgttttggcgcgtaagcgcggaagcggaggattgggatttgaagattaggtagagaagaatttcgggttaatgggcggggtgtgcggcgagattatattaagggaattatgatgggaggggcggttattcgagtttaggggttttggaaggggatgaggaaggagtagaa

SEQ ID NO: 15330 - DNA, 582 bp, Artificial Sequence
  chemically treated genomic DNA (Homo sapiens) CpG-island No: 15330
ttctactccttcctcatccccttccaaaacccctaaactcgaataaccgcccctcccatcataattcccttaatataatctcgccgcacaccccgcccattaacccgaaattcttctctacctaatcttcaaatcccaatcctccgcttccgcgcttacgcgccaaaacgactcgaataccgacgatctctactaaaaaaaaaaaataacgcttaacgaaccaaaacaaatataacgaatacaataacgacccgacaaattacgaaactaaatacgaaacgaacgtaatctaaataaaaaacgaaccgaaacaaaaacgtcgaataaatcgaaaatacctaaaccaatccatactaaacgctacctacgaccgaatctactatatcaacgccgccctcgataaatcaaaacaaaactaaaaaaaaaaaacgcgataaaaacgaaataaataaaaaaaacgataaacgcgaaaataaccgacccacgaatcgcaaaaaacgaaacgccaatcctttaactccgttccgctaactccttcgtcaatactaacacctcgaacttataaaacacttcacgcaatac

SEQ ID NO: 15331 - DNA, 582 bp, Artificial Sequence
  chemically treated genomic DNA (Homo sapiens) CpG-island No: 15331
ttttattttttttttatttttttttagagtttttgaattcgagtagtcgttttttttattatggtttttttagtgtggtttcgtcgtatatttcgtttattgattcggaatttttttttgtttggtttttaggttttaatttttcgttttcgcgtttgcgcgttaagacggttcggatgtcggcggtttttgttgaagagagaagatggcgtttgacggattagagtaggtatggcgggtgtagtggcggttcggtaggttacggggttgggtgcggagcgagcgtgatttgagtggagagcgggtcggggtaggagcgtcgggtgggtcggaggtgtttggattagtttatgttggacgttgtttgcgatcggatttgttgtgttagcgtcgttttcggtgagttagggtaaggttgggagaggaagacgcggtagaagcggagtgagtgagggaagcgatgggcgcgggaatggtcggtttacgggtcgtaggagacgggacgttagttttttggtttcgtttcgttggttttttcgttagtattgatatttcgggtttgtagagtattttacgtagtgt

SEQ ID NO: 15332 - DNA, 582 bp, Artificial Sequence
  chemically treated genomic DNA (Homo sapiens) CpG-island No: 15332
acactacgtaaaatactctacaaacccgaaatatcaatactaacgaaaaaaccaacgaaacgaaaccaaaaaactaacgtcccgtctcctacgacccgtaaaccgaccattcccgcgcccatcgcttccctcactcactccgcttctaccgcgtcttcctctcccaaccttaccctaactcaccgaaaacgacgctaacacaacaaatccgatcgcaaacaacgtccaacataaactaatccaaacacctccgacccacccgacgctcctaccccgacccgctctccactcaaatcacgctcgctccgcacccaaccccgtaacctaccgaaccgccactacacccgccatacctactctaatccgtcaaacgccatcttctctcttcaacaaaaaccgccgacatccgaaccgtcttaacgcgcaaacgcgaaaacgaaaaattaaaacctaaaaaccaaacaaaaaaaaattccgaatcaataaacgaaatatacgacgaaaccacactaaaaaaaccataataaaaaaaacgactactcgaattcaaaaactctaaaaaaaaataaaaaaaaaataaaa

SEQ ID NO: 15333 - DNA, 519 bp, Artificial Sequence
  chemically treated genomic DNA (Homo sapiens) CpG-island No: 15333
ttttcggaggtcggggacggaaggcgggttcgtagtagattttggattcggaatttttcgggtaggagcggaatttgtttcgaatcgggtttgtgaggaattcgcgaatttggattaggaaatttcggagttcggatcgataaatttcggaattcggaattaagatcgttaagtttcggatcgcggggtatagcgtacggagtgggattcgacgcggagttcggtagttcggatcgcggtattttcggggacgggacggagcgatgtcggttcgaggcgcggggcggggttttcgttgttttttcgttgagagtatttgagcgattggacgttagagattgacggtttttgggagcgtcgttttttttcgcggggattcggtatgtttgttcggagcggcgtttcggggaatcggttatcggatacgatgggcgttgtggggtgtttcgtgggcgatcgaatattaggggttggtgcggttttatttttttttttcgtttttatttgtgtttattttgt

SEQ ID NO: 15334 - DNA, 519 bp, Artificial Sequence
  chemically treated genomic DNA (Homo sapiens) CpG-island No: 15334
acaaaataaacacaaataaaaacgaaaaaaaaaaataaaaccgcaccaacccctaatattcgatcgcccacgaaacaccccacaacgcccatcgtatccgataaccgattccccgaaacgccgctccgaacaaacataccgaatccccgcgaaaaaaaacgacgctcccaaaaaccgtcaatctctaacgtccaatcgctcaaatactctcaacgaaaaaacaacgaaaaccccgccccgcgcctcgaaccgacatcgctccgtcccgtccccgaaaataccgcgatccgaactaccgaactccgcgtcgaatcccactccgtacgctataccccgcgatccgaaacttaacgatcttaattccgaattccgaaatttatcgatccgaactccgaaatttcctaatccaaattcgcgaattcctcacaaacccgattcgaaacaaattccgctcctacccgaaaaattccgaatccaaaatctactacgaacccgccttccgtccccgacctccgaaaa

SEQ ID NO: 15335 - DNA, 519 bp, Artificial Sequence
  chemically treated genomic DNA (Homo sapiens) CpG-island No: 15335
ataggatgggtataaatgggagcgggggaggggagtggggtcgtattagtttttaatgttcggtcgtttacggggtattttataacgtttatcgtgttcggtaatcggtttttcggagcgtcgtttcgggtaggtatgtcgggttttcgcggggggaggcggcgtttttaggagtcgttagtttttagcgtttagtcgtttaggtgtttttagcgggggggtagcgggaatttcgtttcgcgtttcgggtcgatatcgtttcgtttcgttttcgggggtgtcgcgattcggattgtcgggtttcgcgtcgagttttatttcgtgcgttgtgtttcgcgattcgggatttggcgattttaatttcgggtttcgggatttgtcgattcgggtttcgggattttttaatttaagttcgcgagttttttatagattcggttcgggatagatttcgtttttgttcgggagatttcggatttaggatttgttgcgggttcgtttttcgttttcggttttcggagg

SEQ ID NO: 15336 - DNA, 519 bp, Artificial Sequence
  chemically treated genomic DNA (Homo sapiens) CpG-island No: 15336
cctccgaaaaccgaaaacgaaaaacgaacccgcaacaaatcctaaatccgaaatctcccgaacaaaaacgaaatctatcccgaaccgaatctataaaaaactcgcgaacttaaattaaaaaatcccgaaacccgaatcgacaaatcccgaaacccgaaattaaaatcgccaaatcccgaatcgcgaaacacaacgcacgaaataaaactcgacgcgaaacccgacaatccgaatcgcgacacccccgaaaacgaaacgaaacgatatcgacccgaaacgcgaaacgaaattcccgctacccccccgctaaaaacacctaaacgactaaacgctaaaaactaacgactcctaaaaacgccgcctccccccgcgaaaacccgacatacctacccgaaacgacgctccgaaaaaccgattaccgaacacgataaacgttataaaataccccgtaaacgaccgaacattaaaaactaatacgaccccactcccctcccccgctcccatttatacccatcctat

SEQ ID NO: 15337 - DNA, 753 bp, Artificial Sequence
  chemically treated genomic DNA (Homo sapiens) CpG-island No: 15337
acggcggaattcgggtgttttaattaaatatgggtattaaggtaagtcggcgcgattacgtgatatgtatcgcgcgttcgcgttcgcgtttttttttacgtttcgtgttttcgaggtttttattgcgttcgcgttttttttttaggcgagttttagttatttatttcgcggcgtggttgtagtttgttacgttttttttgatttttttttacggaaggaaataaacgcgtttcggcgatttgattcgttgggttatcgtcgagttatagattttgtttatttgaatttatcgtacgttgtggcggttatcgtcgaaagtttaagttttaaattttaattcgtcgtttttgtttatttcgtatttcgtttgttcgttgattttttcgttttttaacgttttacgaacgttgttagtcgacgtgatgtcgtggatatagcggatgaacgtcgcggtcgtcgaagcgtcgttttcgttggcgaatttattagcgttcgggtagatttagtcgttttattttataatttttttgtatttcggggttgcgcgcgttagtcggaagcgtcgttcggggaattcggcggttttcgcgcggttgcggattttagttttcgggtttttggggttgtagttgatcgttttatcgttggatttttttcgggtatcggtttttttaaaaattcgtgaaaattgtatgttattcgtggtagtatttcgggttcgatttcgggttaagaatgtggggaaataatacg

SEQ ID NO: 15338 - DNA, 753 bp, Artificial Sequence
  chemically treated genomic DNA (Homo sapiens) CpG-island No: 15338
cgtattatttccccacattcttaacccgaaatcgaacccgaaatactaccacgaataacatacaattttcacgaatttttaaaaaaaccgatacccgaaaaaaatccaacgataaaacgatcaactacaaccccaaaaacccgaaaactaaaatccgcaaccgcgcgaaaaccgccgaattccccgaacgacgcttccgactaacgcgcgcaaccccgaaatacaaaaaaattataaaataaaacgactaaatctacccgaacgctaataaattcgccaacgaaaacgacgcttcgacgaccgcgacgttcatccgctatatccacgacatcacgtcgactaacaacgttcgtaaaacgttaaaaaacgaaaaaatcaacgaacaaacgaaatacgaaataaacaaaaacgacgaattaaaatttaaaacttaaactttcgacgataaccgccacaacgtacgataaattcaaataaacaaaatctataactcgacgataacccaacgaatcaaatcgccgaaacgcgtttatttccttccgtaaaaaaaaatcaaaaaaaacgtaacaaactacaaccacgccgcgaaataaataactaaaactcgcctaaaaaaaaaacgcgaacgcaataaaaacctcgaaaacacgaaacgtaaaaaaaaacgcgaacgcgaacgcgcgatacatatcacgtaatcgcgccgacttaccttaatacccatatttaattaaaacacccgaattccgccgt

SEQ ID NO: 15339 - DNA, 753 bp, Artificial Sequence
  chemically treated genomic DNA (Homo sapiens) CpG-island No: 15339
cgtgttgtttttttatatttttgattcgggatcggattcggggtattattacgggtgatatatagtttttacgaatttttgggggaatcggtattcgaaaaaaatttagcggtgaaacgattagttatagttttagggattcgggagttggagttcgtagtcgcgcgagaatcgtcgggtttttcgggcgacgttttcggttggcgcgcgtagtttcgggatgtaggggagttgtgaaatggggcggttagatttgttcggacgttgatgaattcgttagcgggagcgacgtttcgacggtcgcgacgtttattcgttgtatttacggtattacgtcgattgatagcgttcgtagaacgttggggagcgggaaggttaacggatagacgggatacgggatgaatagaggcggcggattgggatttgggatttaggttttcggcgatgatcgttataacgtacggtgagtttaggtgagtagaatttgtagttcggcggtgatttagcgagttagatcgtcggaacgcgtttattttttttcgtaggagaaaattagaggaggcgtagtaggttataattacgtcgcggagtaagtgattggagttcgtttgggggaggggcgcgggcgtaatagagatttcgggagtacgaggcgtggaggagagcgcggacgcgggcgcgcggtgtatgttacgtgatcgcgtcggtttattttggtgtttatatttgattagggtattcgggtttcgtcgt

SEQ ID NO: 15340 - DNA, 753 bp, Artificial Sequence
  chemically treated genomic DNA (Homo sapiens) CpG-island No: 15340
acgacgaaacccgaataccctaatcaaatataaacaccaaaataaaccgacgcgatcacgtaacatacaccgcgcgcccgcgtccgcgctctcctccacgcctcgtactcccgaaatctctattacgcccgcgcccctcccccaaacgaactccaatcacttactccgcgacgtaattataacctactacgcctcctctaattttctcctacgaaaaaaaataaacgcgttccgacgatctaactcgctaaatcaccgccgaactacaaattctactcacctaaactcaccgtacgttataacgatcatcgccgaaaacctaaatcccaaatcccaatccgccgcctctattcatcccgtatcccgtctatccgttaaccttcccgctccccaacgttctacgaacgctatcaatcgacgtaataccgtaaatacaacgaataaacgtcgcgaccgtcgaaacgtcgctcccgctaacgaattcatcaacgtccgaacaaatctaaccgccccatttcacaactcccctacatcccgaaactacgcgcgccaaccgaaaacgtcgcccgaaaaacccgacgattctcgcgcgactacgaactccaactcccgaatccctaaaactataactaatcgtttcaccgctaaatttttttcgaataccgattcccccaaaaattcgtaaaaactatatatcacccgtaataataccccgaatccgatcccgaatcaaaaatataaaaaaacaacacg

SEQ ID NO: 15341 - DNA, 609 bp, Artificial Sequence
  chemically treated genomic DNA (Homo sapiens) CpG-island No: 15341
gttatgtttatgtttagtttagcgtgttatcgaggttagacggatcggcgttattacggcgtgttatttggttgtttttcggcgtttagttatcggcgaaaatttagtagttataggaggttgtatcgttatcgcgtaattgggcgaacgaattaagttgttggttttttttgacgataatcgtatcggttgtcggatcggtaatatcggttagcgttttatcgttgttttttatcgttattttttttgaagatggtttatgcggaatggcgtagttttatgttatgtttagtatttggttcgggttcgcgttattttgttcggtatatattttgcgtaagcgtaggaagatatcggagaggatttcgtcgttagttagcgtaattttcggggcgttcgtatttttttagtgttattgtaattagcgatttgagttaacgatagaatcgttttttttcgcgaagtaggtcgatggtagacggaatatttcggtttggattttcgacgagttaatttcgtttagtttatcgtggttttgttagaagttagaggttttagtgtttagtgggtcgatggtgacgaggaattttagtttcgatagataatcga

SEQ ID NO: 15342 - DNA, 609 bp, Artificial Sequence
  chemically treated genomic DNA (Homo sapiens) CpG-island No: 15342
tcgattatctatcgaaactaaaattcctcgtcaccatcgacccactaaacactaaaacctctaacttctaacaaaaccacgataaactaaacgaaattaactcgtcgaaaatccaaaccgaaatattccgtctaccatcgacctacttcgcgaaaaaaaacgattctatcgttaactcaaatcgctaattacaataacactaaaaaaatacgaacgccccgaaaattacgctaactaacgacgaaatcctctccgatatcttcctacgcttacgcaaaatatataccgaacaaaataacgcgaacccgaaccaaatactaaacataacataaaactacgccattccgcataaaccatcttcaaaaaaaataacgataaaaaacaacgataaaacgctaaccgatattaccgatccgacaaccgatacgattatcgtcaaaaaaaaccaacaacttaattcgttcgcccaattacgcgataacgatacaacctcctataactactaaattttcgccgataactaaacgccgaaaaacaaccaaataacacgccgtaataacgccgatccgtctaacctcgataacacgctaaactaaacataaacataac

SEQ ID NO: 15343 - DNA, 609 bp, Artificial Sequence
  chemically treated genomic DNA (Homo sapiens) CpG-island No: 15343
tcggttgtttgtcgaaattgaagtttttcgttattatcgatttattgaatattgaaatttttaatttttggtagaattacggtgagttgaacgaagttgattcgtcgaagatttagatcgaagtgtttcgtttgttatcgatttgtttcgcggaagagaacggttttatcgttaatttaggtcgttggttatagtggtattggaaaggtgcggacgtttcggggattgcgttgattgacggcgagatttttttcggtatttttttgcgtttgcgtaagatgtatgtcgaatagggtggcgcgaattcggattaggtgttgaatatgatatggaattacgttatttcgtatgagttatttttagaagaagtggcgatggagagtaacggtaaggcgttggtcgatattatcgattcggtaatcggtgcggttatcgttaagaaaggttaataatttagttcgttcgtttaattgcgcgatgacggtataattttttgtggttgttggattttcgtcggtagttggacgtcggaaggtaattagatggtacgtcgtgataacgtcgattcgtttggtttcggtaatacgttgggttgggtatgggtatggt

SEQ ID NO: 15344 - DNA, 609 bp, Artificial Sequence
  chemically treated genomic DNA (Homo sapiens) CpG-island No: 15344
accatacccatacccaacccaacgtattaccgaaaccaaacgaatcgacgttatcacgacgtaccatctaattaccttccgacgtccaactaccgacgaaaatccaacaaccacaaaaaattataccgtcatcgcgcaattaaacgaacgaactaaattattaacctttcttaacgataaccgcaccgattaccgaatcgataatatcgaccaacgccttaccgttactctccatcgccacttcttctaaaaataactcatacgaaataacgtaattccatatcatattcaacacctaatccgaattcgcgccaccctattcgacatacatcttacgcaaacgcaaaaaaataccgaaaaaaatctcgccgtcaatcaacgcaatccccgaaacgtccgcacctttccaataccactataaccaacgacctaaattaacgataaaaccgttctcttccgcgaaacaaatcgataacaaacgaaacacttcgatctaaatcttcgacgaatcaacttcgttcaactcaccgtaattctaccaaaaattaaaaatttcaatattcaataaatcgataataacgaaaaacttcaatttcgacaaacaaccga

SEQ ID NO: 15345 - DNA, 872 bp, Artificial Sequence
  chemically treated genomic DNA (Homo sapiens) CpG-island No: 15345
ttaacggtaacgtagcggatacgttgatgttgtgtgttttttgggtcgtttagacggatttttcggagttttttaagaaatggaattcgggcgcgaatgtttattagttgtcgggggcgagcgagatgagtttcgagggcggtgtgagttagtcggtttataatacgttcgcgttattcgatttgtcgaaatcggaatagggatcggaaattattaattaggttatcgagtataagatgtttgtcgagtaagttcgtaggtcggataaggcgtttacgtcgtattcggtagtgttattcgcggcgatttaaaattttttttttataagttcgtacgttttttagttattcgttatttgttggcgtatcgtgacgttggtaatatattttttagatcgtttgttacggtaacgatttttgtttttttagtagtgttagacgcgtagtgtaatcgttcgtcgtttttagtttgcgtagtttagcggtaggttttagtaacgtacgtagtagggttttttttatattgcgtgtattaatgatttacgcggtaatgcggttgatagaggtatcgaagaagttaaggtcgatatgtattcggttaaatagatcgtgacgtataattttattggtaattgtttgggttttattatttagtagtattacgtgatcgttgttttagcgaatcggacggttgacgtgtagtagtaattgcggtatatatagtatggcggcggaaattttgtcggaaattattttagtcgggtggaagtgttcggcgtttaggtatagcgtagtttggcggttggtggtatattttatgtaaaatttattggagttaatcgtgtagttttttgcgttaatgttaaataattt

SEQ ID NO: 15346 - DNA, 872 bp, Artificial Sequence
  chemically treated genomic DNA (Homo sapiens) CpG-island No: 15346
aaattatttaacattaacgcaaaaaactacacgattaactccaataaattttacataaaatataccaccaaccgccaaactacgctatacctaaacgccgaacacttccacccgactaaaataatttccgacaaaatttccgccgccatactatatataccgcaattactactacacgtcaaccgtccgattcgctaaaacaacgatcacgtaatactactaaataataaaacccaaacaattaccaataaaattatacgtcacgatctatttaaccgaatacatatcgaccttaacttcttcgatacctctatcaaccgcattaccgcgtaaatcattaatacacgcaatataaaaaaaaccctactacgtacgttactaaaacctaccgctaaactacgcaaactaaaaacgacgaacgattacactacgcgtctaacactactaaaaaaacaaaaatcgttaccgtaacaaacgatctaaaaaatatattaccaacgtcacgatacgccaacaaataacgaataactaaaaaacgtacgaacttataaaaaaaaaattttaaatcgccgcgaataacactaccgaatacgacgtaaacgccttatccgacctacgaacttactcgacaaacatcttatactcgataacctaattaataatttccgatccctattccgatttcgacaaatcgaataacgcgaacgtattataaaccgactaactcacaccgccctcgaaactcatctcgctcgcccccgacaactaataaacattcgcgcccgaattccatttcttaaaaaactccgaaaaatccgtctaaacgacccaaaaaacacacaacatcaacgtatccgctacgttaccgttaa

SEQ ID NO: 15347 - DNA, 872 bp, Artificial Sequence
  chemically treated genomic DNA (Homo sapiens) CpG-island No: 15347
aaattgtttggtattggcgtagagagttatacggttggttttaatgagttttatatggggtatgttattagtcgttagattgcgttgtgtttggacgtcgggtatttttattcgattgaagtgattttcgataagattttcgtcgttatgttgtatgtgtcgtagttgttgttgtacgttagtcgttcggttcgttgggatagcgattacgtagtgttgttggatgatgaaatttaggtaattgttagtgagattgtgcgttacgatttgtttgatcgggtgtatatcggttttgattttttcgatgtttttattaatcgtattgtcgcgtgggttattggtatacgtaatatgaaaaaagttttgttgcgtgcgttgttggaatttatcgttgagttgcgtaagttggaagcggcgggcgattatattgcgcgtttggtattgttggaagagtagaaatcgttgtcgtggtaggcggtttgggaaatgtattgttaacgttacgatacgttagtaggtagcgaatggttggagagcgtgcgggtttatgagaaagaaattttgagtcgtcgcgggtaatattgtcggatgcggcgtaaacgttttattcggtttacgggtttattcggtagatattttatgttcggtaatttgattaatggttttcggtttttgtttcggtttcggtagatcgagtgacgcgagcgtgttgtaagtcgattggtttatatcgttttcgaagtttatttcgttcgttttcggtagttggtaagtattcgcgttcggattttattttttaaagaatttcgaaagattcgtttgggcgatttaggaggtatatagtattagcgtgttcgttgcgttatcgttgg

SEQ ID NO: 15348 - DNA, 872 bp, Artificial Sequence
  chemically treated genomic DNA (Homo sapiens) CpG-island No: 15348
ccaacgataacgcaacgaacacgctaatactatatacctcctaaatcgcccaaacgaatctttcgaaattctttaaaaaataaaatccgaacgcgaatacttaccaactaccgaaaacgaacgaaataaacttcgaaaacgatataaaccaatcgacttacaacacgctcgcgtcactcgatctaccgaaaccgaaacaaaaaccgaaaaccattaatcaaattaccgaacataaaatatctaccgaataaacccgtaaaccgaataaaacgtttacgccgcatccgacaatattacccgcgacgactcaaaatttctttctcataaacccgcacgctctccaaccattcgctacctactaacgtatcgtaacgttaacaatacatttcccaaaccgcctaccacgacaacgatttctactcttccaacaataccaaacgcgcaatataatcgcccgccgcttccaacttacgcaactcaacgataaattccaacaacgcacgcaacaaaacttttttcatattacgtataccaataacccacgcgacaatacgattaataaaaacatcgaaaaaatcaaaaccgatatacacccgatcaaacaaatcgtaacgcacaatctcactaacaattacctaaatttcatcatccaacaacactacgtaatcgctatcccaacgaaccgaacgactaacgtacaacaacaactacgacacatacaacataacgacgaaaatcttatcgaaaatcacttcaatcgaataaaaatacccgacgtccaaacacaacgcaatctaacgactaataacataccccatataaaactcattaaaaccaaccgtataactctctacgccaataccaaacaattt

SEQ ID NO: 15349 - DNA, 729 bp, Artificial Sequence
  chemically treated genomic DNA (Homo sapiens) CpG-island No: 15349
gatcgcgcgtttcgatggtaatttttgcgtttttaggttgatacggtgggattattatcgtttgatgcgtttggcgttgcgtttgcggtaatagatttataaatgttttttttagcgtagcgttttgcgtttgttgtcgtagtttttcggcgttgttagttgttagtattttttcggtatttatcgttattagttagtcgaagcgttcggttttttttatataggcggtggcgattagtacgtttatattgttttgtcgttggcgaatattgtcgattagattttagaattgggagcgggagagcgggttaattttcgttgttggtttattaaggattaatagtttcgggtcgtggattaacgcgtagtatagtttaagtttttgttttatttcgtcggagagtttttttgtcggacgatcgcgaaacggtgttaattcggtgttggttagtagtttattgattcgtatttttcgtttcgttttgtcgtgatcgaataggcgagcgaaaaaatcgacgtttttatatatcgataaggtgtggtagaggtttttgtttagtttttgcggtatttaggcgatgcgcgggtagacgtcgcggcgatgtttcgggtcgcgtatatcgtcgtttagtattattatattgttttgtttaatgacgcgggtatcggaaattaacgataataagttcgatttttcgacgtcgttcgggttaattagttcgattatat

SEQ ID NO: 15350 - DNA, 729 bp, Artificial Sequence
  chemically treated genomic DNA (Homo sapiens) CpG-island No: 15350
atataatcgaactaattaacccgaacgacgtcgaaaaatcgaacttattatcgttaatttccgatacccgcgtcattaaacaaaacaatataataatactaaacgacgatatacgcgacccgaaacatcgccgcgacgtctacccgcgcatcgcctaaataccgcaaaaactaaacaaaaacctctaccacaccttatcgatatataaaaacgtcgattttttcgctcgcctattcgatcacgacaaaacgaaacgaaaaatacgaatcaataaactactaaccaacaccgaattaacaccgtttcgcgatcgtccgacaaaaaaactctccgacgaaataaaacaaaaacttaaactatactacgcgttaatccacgacccgaaactattaatccttaataaaccaacaacgaaaattaacccgctctcccgctcccaattctaaaatctaatcgacaatattcgccaacgacaaaacaatataaacgtactaatcgccaccgcctatataaaaaaaaccgaacgcttcgactaactaataacgataaataccgaaaaaatactaacaactaacaacgccgaaaaactacgacaacaaacgcaaaacgctacgctaaaaaaaacatttataaatctattaccgcaaacgcaacgccaaacgcatcaaacgataataatcccaccgtatcaacctaaaaacgcaaaaattaccatcgaaacgcgcgatc

SEQ ID NO: 15351 - DNA, 729 bp, Artificial Sequence
  chemically treated genomic DNA (Homo sapiens) CpG-island No: 15351
gtatggtcgggttgattggttcggacggcgtcgggaagtcgagtttgttgtcgttgattttcggtgttcgcgttattgaatagggtaatgtgatggtgttgggcggcgatatgcgcgattcgaagtatcgtcgcgacgtttgttcgcgtatcgtttggatgtcgtaggggttgggtaaaaatttttattatattttgtcggtgtatgaaaacgtcgattttttcgttcgtttgttcggttacgataaagcggagcgggaagtgcgaattaatgagttgttgattagtatcgggttagtatcgtttcgcgatcgttcggtagggaaatttttcggcgggatgaagtaaaaatttgggttgtgttgcgcgttaatttacgattcggaattgttgatttttgatgagttaataacgggggttgattcgttttttcgtttttagttttgggatttgatcgatagtattcgttagcggtagagtaatatgagcgtgttggtcgttatcgtttatatggaagaggtcgaacgtttcgattggttggtagcgatgaatgtcggagaagtgttggtaattggtagcgtcgaagagttacggtagtaaacgtaaagcgttacgttggaagaagtatttataaatttgttatcgtaagcgtaacgttaggcgtattaggcggtagtgattttatcgtattaatttgaaaacgtagagattgttatcgaagcgcgcgatt

SEQ ID NO: 15352 - DNA, 729 bp, Artificial Sequence
  chemically treated genomic DNA (Homo sapiens) CpG-island No: 15352
aatcgcgcgcttcgataacaatctctacgttttcaaattaatacgataaaatcactaccgcctaatacgcctaacgttacgcttacgataacaaatttataaatacttcttccaacgtaacgctttacgtttactaccgtaactcttcgacgctaccaattaccaacacttctccgacattcatcgctaccaaccaatcgaaacgttcgacctcttccatataaacgataacgaccaacacgctcatattactctaccgctaacgaatactatcgatcaaatcccaaaactaaaaacgaaaaaacgaatcaacccccgttattaactcatcaaaaatcaacaattccgaatcgtaaattaacgcgcaacacaacccaaatttttacttcatcccgccgaaaaatttccctaccgaacgatcgcgaaacgatactaacccgatactaatcaacaactcattaattcgcacttcccgctccgctttatcgtaaccgaacaaacgaacgaaaaaatcgacgttttcatacaccgacaaaatataataaaaatttttacccaacccctacgacatccaaacgatacgcgaacaaacgtcgcgacgatacttcgaatcgcgcatatcgccgcccaacaccatcacattaccctattcaataacgcgaacaccgaaaatcaacgacaacaaactcgacttcccgacgccgtccgaaccaatcaacccgaccatac

SEQ ID NO: 15353 - DNA, 817 bp, Artificial Sequence
  chemically treated genomic DNA (Homo sapiens) CpG-island No: 15353
tcgtttggtagcgtggcgtaggtgcgtgaaacggcggtttatttgatacgtttcgttaaaacgcgcggtgtggcgattgttatggtggggtacgtaattaaagatggttcgttggttggttcgaaagtgttggaatattgtatcgattgttcggtgtttttggatggcgatgtcgattttcgttttcgtattttgcgtagttataaaaatcgtttcggcgcggtgaatgagttgggcgttttcgcgatgatcgaataggggttgcgtgaagttagtaatttttcggtaatttttttaagtcgcggcgatgaagtgattttcggtagtttagtgatggtggtatgggaaggaacgcgtttattgttggtggagatttaggcgttggtcgattattcgatgatggcgaatttacgtcgcgtggtagtggggttggaataaaatcgtttggtaattttgttggttgtgttgtatcgttacggtggtttgtaaatggtcgattaggatgtgtttgtgaacgtggtcggcggcgtgaaggtaatcgaaattagtgtcgatttagcgttattgttggcgatggtttttagtttgcgcgatagatcgttgtcgtaggatttggtggtgtttggtgaagtcgggttggtaggggagattcgttcggtgtttagcggttaggaacgaatttttgaagcggcgaaatacggttttcgtcgggcgattgtttcggcggttaacgtgtcgaaaaaagcgtcggaagggatgtagatttttggcgttaaaaaatttttcgacgcgtttagcgtgttcgacgatttataat

SEQ ID NO: 15354 - DNA, 817 bp, Artificial Sequence
  chemically treated genomic DNA (Homo sapiens) CpG-island No: 15354
attataaatcgtcgaacacgctaaacgcgtcgaaaaattttttaacgccaaaaatctacatcccttccgacgcttttttcgacacgttaaccgccgaaacaatcgcccgacgaaaaccgtatttcgccgcttcaaaaattcgttcctaaccgctaaacaccgaacgaatctcccctaccaacccgacttcaccaaacaccaccaaatcctacgacaacgatctatcgcgcaaactaaaaaccatcgccaacaataacgctaaatcgacactaatttcgattaccttcacgccgccgaccacgttcacaaacacatcctaatcgaccatttacaaaccaccgtaacgatacaacacaaccaacaaaattaccaaacgattttattccaaccccactaccacgcgacgtaaattcgccatcatcgaataatcgaccaacgcctaaatctccaccaacaataaacgcgttccttcccataccaccatcactaaactaccgaaaatcacttcatcgccgcgacttaaaaaaattaccgaaaaattactaacttcacgcaacccctattcgatcatcgcgaaaacgcccaactcattcaccgcgccgaaacgatttttataactacgcaaaatacgaaaacgaaaatcgacatcgccatccaaaaacaccgaacaatcgatacaatattccaacactttcgaaccaaccaacgaaccatctttaattacgtaccccaccataacaatcgccacaccgcgcgttttaacgaaacgtatcaaataaaccgccgtttcacgcacctacgccacgctaccaaacga

SEQ ID NO: 15355 - DNA, 817 bp, Artificial Sequence
  chemically treated genomic DNA (Homo sapiens) CpG-island No: 15355
attataagtcgtcgaatacgttaagcgcgtcggagagttttttaacgttaaaaatttgtatttttttcggcgtttttttcggtacgttagtcgtcggaataatcgttcggcgaaaatcgtgtttcgtcgttttagagattcgtttttgatcgttgggtatcgggcggattttttttgttagttcgattttattaaatattattagattttgcggtagcggtttgtcgcgtaggttggaaattatcgttagtagtaacgttaagtcggtattggtttcggttatttttacgtcgtcgattacgtttataaatatattttgatcggttatttgtagattatcgtgacggtgtaatatagttagtaggattgttagacggttttgttttagttttattgttacgcggcgtgggttcgttattatcgagtgatcgattagcgtttgaatttttattagtagtggacgcgtttttttttatattattattattgagttatcggaggttattttatcgtcgcgatttaagaaaattgtcgaagggttgttgattttacgtagtttttgttcggttatcgcgaagacgtttagtttatttatcgcgtcgaagcggtttttatggttgcgtaaggtgcgaaaacgggagtcggtatcgttatttaaaagtatcgaatagtcgatatagtgttttagtattttcgggttagttagcgaattatttttggttacgtgttttattatgataatcgttatatcgcgcgttttggcgaagcgtgttaaataagtcgtcgttttacgtatttgcgttacgttattaggcga

SEQ ID NO: 15356 - DNA, 817 bp, Artificial Sequence
  chemically treated genomic DNA (Homo sapiens) CpG-island No: 15356
tcgcctaataacgtaacgcaaatacgtaaaacgacgacttatttaacacgcttcgccaaaacgcgcgatataacgattatcataataaaacacgtaaccaaaaataattcgctaactaacccgaaaatactaaaacactatatcgactattcgatacttttaaataacgataccgactcccgttttcgcaccttacgcaaccataaaaaccgcttcgacgcgataaataaactaaacgtcttcgcgataaccgaacaaaaactacgtaaaatcaacaacccttcgacaattttcttaaatcgcgacgataaaataacctccgataactcaataataataatataaaaaaaaacgcgtccactactaataaaaattcaaacgctaatcgatcactcgataataacgaacccacgccgcgtaacaataaaactaaaacaaaaccgtctaacaatcctactaactatattacaccgtcacgataatctacaaataaccgatcaaaatatatttataaacgtaatcgacgacgtaaaaataaccgaaaccaataccgacttaacgttactactaacgataatttccaacctacgcgacaaaccgctaccgcaaaatctaataatatttaataaaatcgaactaacaaaaaaaatccgcccgatacccaacgatcaaaaacgaatctctaaaacgacgaaacacgattttcgccgaacgattattccgacgactaacgtaccgaaaaaaacgccgaaaaaaatacaaatttttaacgttaaaaaactctccgacgcgcttaacgtattcgacgacttataat

SEQ ID NO: 15357 - DNA, 522 bp, Artificial Sequence
  chemically treated genomic DNA (Homo sapiens) CpG-island No: 15357
cgatgtcgttggttagtttttttagtatcgtcgttagcgttacgttcgttagggttaaacgtatcggatttaattgttcgtcgttttgattgtcggtaaaggtaataattaatgaggttattagcgtttcggcgaaggttatcgttagttgtttttgcgcggaagagtaattaaatagcgtcgtatttagtataatggtaaagttggtttcggcgtttacgttaagtaagtcggggtcggtaagtgggtttcgggtgagggtttgtattaacgtttcggtaaggttaagcgcgtcgtttgttagtaaatcggtaagggtacgcggtagtcgcgcgtcgagtacgatggtgtagtcggcgttttggtaggtgtcggagaaggtttttagtattacggaagcggggagtgattttgttttaatgagtaggtttaatgtcgtcgcgataattagtaataatagtaattcgggtacggtaatggcgcgtgttacggtaatagaattagatatacgaatttttatga

SEQ ID NO: 15358 - DNA, 522 bp, Artificial Sequence
  chemically treated genomic DNA (Homo sapiens) CpG-island No: 15358
tcataaaaattcgtatatctaattctattaccgtaacacgcgccattaccgtacccgaattactattattactaattatcgcgacgacattaaacctactcattaaaacaaaatcactccccgcttccgtaatactaaaaaccttctccgacacctaccaaaacgccgactacaccatcgtactcgacgcgcgactaccgcgtacccttaccgatttactaacaaacgacgcgcttaaccttaccgaaacgttaatacaaaccctcacccgaaacccacttaccgaccccgacttacttaacgtaaacgccgaaaccaactttaccattatactaaatacgacgctatttaattactcttccgcgcaaaaacaactaacgataaccttcgccgaaacgctaataacctcattaattattacctttaccgacaatcaaaacgacgaacaattaaatccgatacgtttaaccctaacgaacgtaacgctaacgacgatactaaaaaaactaaccaacgacatcg

SEQ ID NO: 15359 - DNA, 522 bp, Artificial Sequence
  chemically treated genomic DNA (Homo sapiens) CpG-island No: 15359
ttatggaagttcgtatgtttggttttgttgtcgtgatacgcgttattgtcgtgttcggattgttgttattattgattatcgcgacggtattaagtttgtttattggggtaaaattatttttcgttttcgtagtgttggaggtttttttcggtatttgttagagcgtcgattgtattatcgtgttcgacgcgcggttgtcgcgtatttttgtcggtttattggtaggcggcgcgtttggttttgtcggggcgttaatgtaaatttttattcgaaatttatttgtcgatttcggtttgtttggcgtgaacgtcggagttagttttgttattgtgttgggtgcggcgttgtttggttattttttcgcgtaggaataattggcgatggttttcgtcggggcgttggtggttttattgattgttgtttttatcggtagttagggcggcgggtagttaagttcggtgcgtttaattttggcgggcgtggcgttggcggcggtgttggaaggattgattagcggtatcg

SEQ ID NO: 15360 - DNA, 522 bp, Artificial Sequence
  chemically treated genomic DNA (Homo sapiens) CpG-island No: 15360
cgataccgctaatcaatccttccaacaccgccgccaacgccacgcccgccaaaattaaacgcaccgaacttaactacccgccgccctaactaccgataaaaacaacaatcaataaaaccaccaacgccccgacgaaaaccatcgccaattattcctacgcgaaaaaataaccaaacaacgccgcacccaacacaataacaaaactaactccgacgttcacgccaaacaaaccgaaatcgacaaataaatttcgaataaaaatttacattaacgccccgacaaaaccaaacgcgccgcctaccaataaaccgacaaaaatacgcgacaaccgcgcgtcgaacacgataatacaatcgacgctctaacaaataccgaaaaaaacctccaacactacgaaaacgaaaaataattttaccccaataaacaaacttaataccgtcgcgataatcaataataacaacaatccgaacacgacaataacgcgtatcacgacaacaaaaccaaacatacgaacttccataa

SEQ ID NO: 15361 - DNA, 538 bp, Artificial Sequence
  chemically treated genomic DNA (Homo sapiens) CpG-island No: 15361
  unsure (408, 413, 416, 425, 490..491, 500, 525, 535)
ggttgaggattttattgttacgttattatttgttgatgaagtggtttatttttagtttttcggtggtattatcggtatatcgaaattgatttcgcgtatttataacgattattattatagcgtgcgtcgtagcgtcgagatttgttagtttatataatagatacgttatttggtgcgcgatttcggcggtttataattacgttatgagttcgtttaggatcgttgggcgttttttttgtcggaggaatcggttgtttttggcggttcgatttttagcgtttacgttttggtttttttattgattgaaaaatattaggtaacgttatcgcgttggtgttattcgtagttagtttgtggttgtaggcgttgatcgaaggcgaaagtcgggcgtagttgtttcgttgaaanttttnggntttattaanggttgggggcggcgggtttttttaaaaaaaaaacgtttttttgttatttttgcggcggcgtaaannttttttttntcgttgagattgggttttttttgtntagttgtagntat

SEQ ID NO: 15362 - DNA, 538 bp, Artificial Sequence
  chemically treated genomic DNA (Homo sapiens) CpG-island No: 15362
  unsure (4, 14, 39, 48..49, 114, 123, 126, 131)
atanctacaactanacaaaaaaaacccaatctcaacganaaaaaaaanntttacgccgccgcaaaaataacaaaaaaacgttttttttttaaaaaaacccgccgcccccaaccnttaataaanccnaaaantttcaacgaaacaactacgcccgactttcgccttcgatcaacgcctacaaccacaaactaactacgaataacaccaacgcgataacgttacctaatatttttcaatcaataaaaaaaccaaaacgtaaacgctaaaaatcgaaccgccaaaaacaaccgattcctccgacaaaaaaaacgcccaacgatcctaaacgaactcataacgtaattataaaccgccgaaatcgcgcaccaaataacgtatctattatataaactaacaaatctcgacgctacgacgcacgctataataataatcgttataaatacgcgaaatcaatttcgatataccgataataccaccgaaaaactaaaaataaaccacttcatcaacaaataataacgtaacaataaaatcctcaacc

SEQ ID NO: 15363 - DNA, 538 bp, Artificial Sequence
  chemically treated genomic DNA (Homo sapiens) CpG-island No: 15363
  unsure (4, 14, 39, 48..49, 114, 123, 126, 131)
gtgnttgtaattgnataaaaggggtttaattttagcggngaaaaaaanntttacgtcgtcgtaagggtggtagaaagacgttttttttttgggggggttcgtcgtttttaattnttggtaaanttnagggnttttagcgaggtagttgcgttcggttttcgttttcgattagcgtttgtaattataggttgattgcgggtggtattagcgcggtaacgttatttgatgttttttaattaatggggaaattagagcgtgggcgttggggatcgggtcgttaggaataatcggttttttcggtaagaaagacgtttagcgattttgggcgaatttatggcgtagttatgagtcgtcgggatcgcgtattaggtagcgtgtttgttgtgtgaattgataaatttcgacgttacgacgtacgttgtagtagtagtcgttatgagtgcgcgggattagtttcggtgtgtcggtggtgttatcggaaagttggaaataggttattttattagtaggtgatggcgtggtagtaaaatttttagtt

SEQ ID NO: 15364 - DNA, 538 bp, Artificial Sequence
  chemically treated genomic DNA (Homo sapiens) CpG-island No: 15364
  unsure (408, 413, 416, 425, 490..491, 500, 525, 535)
aactaaaaattttactaccacgccatcacctactaataaaataacctatttccaactttccgataacaccaccgacacaccgaaactaatcccgcgcactcataacgactactactacaacgtacgtcgtaacgtcgaaatttatcaattcacacaacaaacacgctacctaatacgcgatcccgacgactcataactacgccataaattcgcccaaaatcgctaaacgtctttcttaccgaaaaaaccgattattcctaacgacccgatccccaacgcccacgctctaatttccccattaattaaaaaacatcaaataacgttaccgcgctaataccacccgcaatcaacctataattacaaacgctaatcgaaaacgaaaaccgaacgcaactacctcgctaaaanccctnaantttaccaanaattaaaaacgacgaacccccccaaaaaaaaaacgtctttctaccacccttacgacgacgtaaanntttttttcnccgctaaaattaaaccccttttatncaattacaancac

SEQ ID NO: 15365 - DNA, 838 bp, Artificial Sequence
  chemically treated genomic DNA (Homo sapiens) CpG-island No: 15365
gtagagtgggaatatgtcgttttcgtttggtagttcggttattagcgttagtgttggtaggacggtggacgtaaaaattgcgttaaagattcggtttatcgtaagatggaaagcgatatgtataatttgtagtcgttagtcggtgaggtgaatggcgatcgcggtaattttatgtatagttagtggaatggcggtgaaggttagtacggttaatgcgttatgaaggtcgattttaaagaaaaagttgtcgaattattagcgcgtgtacgcggtgttattgcgcgtatttatttttatatgcgcgattaatataatttgatattttttcgttagtaaacgtagttgtttaacgtatggaataagatgtattcggttatcgattggaagtgcgagcgcgatgaacgtatcgcgaaggtgtaggataattataattcgtatgtgtaacgcgttggttaggcgcgaaagagttaatttatattagcgggatttttttgtgttaatttttattttacgcgtataatcgcgtggggagacgacgcggatttttaattatgcgtatttttcggtatttattattttgaattattgattagttatttttatatcgcgttttgcgaagatgtcgttaattatatcgggcgcgtattgcgtatggggtcggggtaggcgttgtaattgtttgacggtagtaattaggtttttgacgtcgaaattattagcgttagtaaaaaaagcgtggaagtgaaggtgttggaaggttagatcgacgatcgcgaattttcgttgtatatttatttcggttaggtgatgtcgcgtggtgaaaaaatggaatttatta

SEQ ID NO: 15366 - DNA, 838 bp, Artificial Sequence
  chemically treated genomic DNA (Homo sapiens) CpG-island No: 15366
taataaattccattttttcaccacgcgacatcacctaaccgaaataaatatacaacgaaaattcgcgatcgtcgatctaaccttccaacaccttcacttccacgctttttttactaacgctaataatttcgacgtcaaaaacctaattactaccgtcaaacaattacaacgcctaccccgaccccatacgcaatacgcgcccgatataattaacgacatcttcgcaaaacgcgatataaaaataactaatcaataattcaaaataataaataccgaaaaatacgcataattaaaaatccgcgtcgtctccccacgcgattatacgcgtaaaataaaaattaacacaaaaaaatcccgctaatataaattaactctttcgcgcctaaccaacgcgttacacatacgaattataattatcctacaccttcgcgatacgttcatcgcgctcgcacttccaatcgataaccgaatacatcttattccatacgttaaacaactacgtttactaacgaaaaaatatcaaattatattaatcgcgcatataaaaataaatacgcgcaataacaccgcgtacacgcgctaataattcgacaactttttctttaaaatcgaccttcataacgcattaaccgtactaaccttcaccgccattccactaactatacataaaattaccgcgatcgccattcacctcaccgactaacgactacaaattatacatatcgctttccatcttacgataaaccgaatctttaacgcaatttttacgtccaccgtcctaccaacactaacgctaataaccgaactaccaaacgaaaacgacatattcccactctac

SEQ ID NO: 15367 - DNA, 838 bp, Artificial Sequence
  chemically treated genomic DNA (Homo sapiens) CpG-island No: 15367
tagtaaattttatttttttattacgcgatattatttgatcgaggtgaatatgtagcggagattcgcgatcgtcgatttggttttttagtatttttatttttacgttttttttgttggcgttggtaatttcggcgttaaagatttggttgttatcgttaaataattgtaacgtttgtttcggttttatgcgtagtacgcgttcgatatggttggcggtattttcgtaaagcgcgatgtgagaatggttggttagtggtttaggatgataaatgtcgggggatacgtatagttaaaaattcgcgtcgtttttttacgcggttgtacgcgtggggtaggggttaatataaaagaatttcgttagtgtaggttagttttttcgcgtttggttagcgcgttgtatatacgggttatgattgttttgtattttcgcgatgcgtttatcgcgttcgtatttttagtcggtaatcggatatattttgttttatgcgttgaatagttgcgtttgttggcgagagagtgttaggttgtattggtcgcgtatatagaagtaggtgcgcgtaatggtatcgcgtgtacgcgttggtggttcggtagttttttttttgaaatcgatttttatggcgtattgatcgtattggtttttatcgttattttattggttgtatataaagttgtcgcgatcgttatttattttatcgattgacggttgtaggttatgtatatcgttttttattttgcgatagatcggatttttagcgtagtttttacgtttatcgttttgttagtattggcgttggtgatcgaattgttaggcgggaacgatatgtttttattttat

SEQ ID NO: 15368 - DNA, 838 bp, Artificial Sequence
  chemically treated genomic DNA (Homo sapiens) CpG-island No: 15368
ataaaataaaaacatatcgttcccgcctaacaattcgatcaccaacgccaatactaacaaaacgataaacgtaaaaactacgctaaaaatccgatctatcgcaaaataaaaaacgatatacataacctacaaccgtcaatcgataaaataaataacgatcgcgacaactttatatacaaccaataaaataacgataaaaaccaatacgatcaatacgccataaaaatcgatttcaaaaaaaaaactaccgaaccaccaacgcgtacacgcgataccattacgcgcacctacttctatatacgcgaccaatacaacctaacactctctcgccaacaaacgcaactattcaacgcataaaacaaaatatatccgattaccgactaaaaatacgaacgcgataaacgcatcgcgaaaatacaaaacaatcataacccgtatatacaacgcgctaaccaaacgcgaaaaaactaacctacactaacgaaattcttttatattaacccctaccccacgcgtacaaccgcgtaaaaaaacgacgcgaatttttaactatacgtatcccccgacatttatcatcctaaaccactaaccaaccattctcacatcgcgctttacgaaaataccgccaaccatatcgaacgcgtactacgcataaaaccgaaacaaacgttacaattatttaacgataacaaccaaatctttaacgccgaaattaccaacgccaacaaaaaaaacgtaaaaataaaaatactaaaaaaccaaatcgacgatcgcgaatctccgctacatattcacctcgatcaaataatatcgcgtaataaaaaaataaaatttacta

SEQ ID NO: 15369 - DNA, 1080 bp, Artificial Sequence
  chemically treated genomic DNA (Homo sapiens) CpG-island No: 15369
  unsure (933..934, 951..)
tttttgcgtcgagaatcgtcgttttgattattcgatattcgtttttaggtcgttatcgatttgtaaacggattttgtgacgtaagtcgttagtaattagcgtttgttgggttttaataagttttagtttttacggtatagtttgcgtattttatcgattaaagcggatttgtcgtcggtgtcgttcgttatagtttgcgatggtgattaatgttcgtataagttttttgttacgttagttcgcgatggtgtttattttcggttcggaaattagtttttatcggtagaattatttcgtttttcggcgttaatttggttttgatggtttgataattatgtaagttggcgattataggtttttttcgattacgtagttcgatatcgtggtgcggcgtgcgtgggagattagcgttaatttcgggtattcgaatagcgtagtttggcgatgtaaggcgtgatttattattcggtaattgatcgttttcgtttggtttcgcgttttgggcgattttaatttgaatgacgtcggtattgattagatacgtcggagtaattttaaagcgatcggaagttatttgtttgatgcgcgatattttgttggtgtcgtagcgcgtcgggttttcgtcgtttttatcggagttcgaattatcgtcgatgttgtttatcgttttcgttagcgtttcgtgggttttcgggtttaacgcgtcgatagatatcgcggcggtattaaagcgtttaaatagttcgtttgtcggtttaatattagtaatgttgatcgcgtttttattcggcgtaattgttagtagatcgcgtagcgtggttgtcggacgtttattaattagtttcgcgtatttttgatagtcgttgtattcgtcgttttgtatcgtttgttgtagcgtgcgtattacgttcgggttgtaggcgtggtattcgnntcgtcgtgggacgttannttttagtaagatcgttttggttgatgggtttacgcgttagttaggtacgtttcgatagatttagtagattttgttggaagtttttaaagtttgttttattaatgcggttgatcgttttttggaagtat

SEQ ID NO: 15370 - DNA, 1080 bp, Artificial Sequence
  chemically treated genomic DNA (Homo sapiens) CpG-island No: 15370
  unsure (129..130, 147..)
atacttccaaaaaacgatcaaccgcattaataaaacaaactttaaaaacttccaacaaaatctactaaatctatcgaaacgtacctaactaacgcgtaaacccatcaaccaaaacgatcttactaaaanntaacgtcccacgacganncgaataccacgcctacaacccgaacgtaatacgcacgctacaacaaacgatacaaaacgacgaatacaacgactatcaaaaatacgcgaaactaattaataaacgtccgacaaccacgctacgcgatctactaacaattacgccgaataaaaacgcgatcaacattactaatattaaaccgacaaacgaactatttaaacgctttaataccgccgcgatatctatcgacgcgttaaacccgaaaacccacgaaacgctaacgaaaacgataaacaacatcgacgataattcgaactccgataaaaacgacgaaaacccgacgcgctacgacaccaacaaaatatcgcgcatcaaacaaataacttccgatcgctttaaaattactccgacgtatctaatcaataccgacgtcattcaaattaaaatcgcccaaaacgcgaaaccaaacgaaaacgatcaattaccgaataataaatcacgccttacatcgccaaactacgctattcgaatacccgaaattaacgctaatctcccacgcacgccgcaccacgatatcgaactacgtaatcgaaaaaaacctataatcgccaacttacataattatcaaaccatcaaaaccaaattaacgccgaaaaacgaaataattctaccgataaaaactaatttccgaaccgaaaataaacaccatcgcgaactaacgtaacaaaaaacttatacgaacattaatcaccatcgcaaactataacgaacgacaccgacgacaaatccgctttaatcgataaaatacgcaaactataccgtaaaaactaaaacttattaaaacccaacaaacgctaattactaacgacttacgtcacaaaatccgtttacaaatcgataacgacctaaaaacgaatatcgaataatcaaaacgacgattctcgacgcaaaaa

SEQ ID NO: 15371 - DNA, 1080 bp, Artificial Sequence
  chemically treated genomic DNA (Homo sapiens) CpG-island No: 15371
  unsure (129..130, 147..)
gtgtttttagggggcggttagtcgtattggtggagtaagttttgaagatttttagtaggatttgttgaatttgtcgaaacgtgtttggttggcgcgtaagtttattagttagggcggttttgttgaaanntagcgttttacggcggnncgaatattacgtttataattcggacgtggtgcgtacgttgtaataagcggtataaagcggcgagtatagcgattattaggaatacgcgaagttggttaatgagcgttcggtaattacgttgcgcgatttgttggtaattacgtcgggtgaaaacgcggttaatattgttgatgttgaatcggtaagcgaattgtttaaacgttttgatatcgtcgcgatgtttatcggcgcgttaagttcggaagtttacgaggcgttggcggaagcgatgaatagtatcggcggtaattcgaatttcggtgaaggcggcgaagattcggcgcgttacggtattaataaagtgtcgcgtattaagtaggtggttttcggtcgttttggggttatttcggcgtatttggttaatgtcgacgttatttagattaaagtcgtttagggcgcgaagttaggcgaaggcggttagttgtcgggtgataagttacgttttatatcgttaaattgcgttattcgggtgttcggagttgacgttgattttttacgtacgtcgtattacgatatcggattacgtaatcggagggaatttgtagtcgttagtttgtatgattgttagattattaagattaggttaacgtcgaaagacggagtgattttatcgatgaagattggttttcgaatcgggagtaggtattatcgcgaattggcgtggtaaaagatttatgcggatattgattattatcgtaggttatgacggacggtatcggcgataagttcgttttaatcggtgaaatacgtaggttgtatcgtgggagttggggtttgttgaaatttagtaggcgttggttgttaacggtttgcgttataagattcgtttgtaggtcgatggcggtttgaaaacgggtgtcgaatagttaaggcggcgattttcggcgtagaaa

SEQ ID NO: 15372 - DNA, 1080 bp, Artificial Sequence
  chemically treated genomic DNA (Homo sapiens) CpG-island No: 15372
  unsure (933..934, 951..)
tttctacgccgaaaatcgccgccttaactattcgacacccgttttcaaaccgccatcgacctacaaacgaatcttataacgcaaaccgttaacaaccaacgcctactaaatttcaacaaaccccaactcccacgatacaacctacgtatttcaccgattaaaacgaacttatcgccgataccgtccgtcataacctacgataataatcaatatccgcataaatcttttaccacgccaattcgcgataatacctactcccgattcgaaaaccaatcttcatcgataaaatcactccgtctttcgacgttaacctaatcttaataatctaacaatcatacaaactaacgactacaaattccctccgattacgtaatccgatatcgtaatacgacgtacgtaaaaaatcaacgtcaactccgaacacccgaataacgcaatttaacgatataaaacgtaacttatcacccgacaactaaccgccttcgcctaacttcgcgccctaaacgactttaatctaaataacgtcgacattaaccaaatacgccgaaataaccccaaaacgaccgaaaaccacctacttaatacgcgacactttattaataccgtaacgcgccgaatcttcgccgccttcaccgaaattcgaattaccgccgatactattcatcgcttccgccaacgcctcgtaaacttccgaacttaacgcgccgataaacatcgcgacgatatcaaaacgtttaaacaattcgcttaccgattcaacatcaacaatattaaccgcgttttcacccgacgtaattaccaacaaatcgcgcaacgtaattaccgaacgctcattaaccaacttcgcgtattcctaataatcgctatactcgccgctttataccgcttattacaacgtacgcaccacgtccgaattataaacgtaatattcgnnccgccgtaaaacgctanntttcaacaaaaccgccctaactaataaacttacgcgccaaccaaacacgtttcgacaaattcaacaaatcctactaaaaatcttcaaaacttactccaccaatacgactaaccgccccctaaaaacac

SEQ ID NO: 15373 - DNA, 1391 bp, Artificial Sequence
  chemically treated genomic DNA (Homo sapiens) CpG-island No: 15373
aggttcgttaagtagtagaatggggtagtcgacgataaagtcgcgggcgatgtgacgcgttgttgttcgttatcggaaaatgtcgatggtgttaggtgttataggcgtttcggtacgtttaggcgggtgagaagacgcgcggtttagcggcgtaggttttacgcggaacgtcggtatcgagtagcggttgtattattatttttagtgttgagatacgcgggatgacgcgtagaaattggtttatttagtcgacggtggttttgcggatttttattattttgcgcgttggcgcggtgattaggtttatttattcgttatcgtgtttgatttggatttgattttcgtcgggtagatagttggcgtatagcgagcgtagtagagttgatttgtcgttgtcggaatggtcgtggagtattacgtattcgttcgcgttgacggtgagcgaggcgcgattgaggacgggtaggcgtacgtcgttttgttggtgtaggatgaaggttttattgacgttttgtacgttaattatttttcgtttcgtggttcgggtgtcggatgcgacgttgacgcgttttattcgatttacggggagcgtatttgtaggtcggataaggcgtttacgtcgtattcggtatcggtttaattttgtaaaatcgatgatattagtagttgtgtatacggatgatgcgggtcgtcgagtacgcggtcggttaatttattttttattatttgtttttgttttattattagtaaacggttcgttagtaggcgggcgacgtttaaattatgggtgataattattatcgcgaggtttagttttattattaggtcgcgtagtaggtcgagtaggcgggtttgtatcgatatatttagttcgtcggtcggtttatttataaatattagtttcggatgcgttattaggttgcgggtaatttgtaaacgttgttgtatatcgtcggaaaaggtggtcggtaggtcgtcgattcggttggcgggaatttttattttttttagttatttttgcgcggtggtacgaatatcgtcgtaatgacgtgtttcggtcgttattagtcgttcgtcgatattgtcgtttgtcgatatttggcggcgtaggtcgtcgagtggatgttgatgtattacgttttattcggtacgtagtaggcgacggcggtcggtttcgtttattgtatatagcgaacggttttcgtagtgaatttttttttgttgcggcgttaggcgcgcggagatcgattttagtagcgtggttttttcggagtcggatttttcgataatgtttagtatttttttcggttataaattaaaagagatatcgttaaagtttttgttcggcgcgtaaaggtgggttaggttattgatcgaaagtaacggttgat

SEQ ID NO: 15374 - DNA, 1391 bp, Artificial Sequence
  chemically treated genomic DNA (Homo sapiens) CpG-island No: 15374
atcaaccgttactttcgatcaataacctaacccacctttacgcgccgaacaaaaactttaacgatatctcttttaatttataaccgaaaaaaatactaaacattatcgaaaaatccgactccgaaaaaaccacgctactaaaatcgatctccgcgcgcctaacgccgcaacaaaaaaaaattcactacgaaaaccgttcgctatatacaataaacgaaaccgaccgccgtcgcctactacgtaccgaataaaacgtaatacatcaacatccactcgacgacctacgccgccaaatatcgacaaacgacaatatcgacgaacgactaataacgaccgaaacacgtcattacgacgatattcgtaccaccgcgcaaaaataactaaaaaaaataaaaattcccgccaaccgaatcgacgacctaccgaccaccttttccgacgatatacaacaacgtttacaaattacccgcaacctaataacgcatccgaaactaatatttataaataaaccgaccgacgaactaaatatatcgatacaaacccgcctactcgacctactacgcgacctaataataaaactaaacctcgcgataataattatcacccataatttaaacgtcgcccgcctactaacgaaccgtttactaataataaaacaaaaacaaataataaaaaataaattaaccgaccgcgtactcgacgacccgcatcatccgtatacacaactactaatatcatcgattttacaaaattaaaccgataccgaatacgacgtaaacgccttatccgacctacaaatacgctccccgtaaatcgaataaaacgcgtcaacgtcgcatccgacacccgaaccacgaaacgaaaaataattaacgtacaaaacgtcaataaaaccttcatcctacaccaacaaaacgacgtacgcctacccgtcctcaatcgcgcctcgctcaccgtcaacgcgaacgaatacgtaatactccacgaccattccgacaacgacaaatcaactctactacgctcgctatacgccaactatctacccgacgaaaatcaaatccaaatcaaacacgataacgaataaataaacctaatcaccgcgccaacgcgcaaaataataaaaatccgcaaaaccaccgtcgactaaataaaccaatttctacgcgtcatcccgcgtatctcaacactaaaaataataatacaaccgctactcgataccgacgttccgcgtaaaacctacgccgctaaaccgcgcgtcttctcacccgcctaaacgtaccgaaacgcctataacacctaacaccatcgacattttccgataacgaacaacaacgcgtcacatcgcccgcgactttatcgtcgactaccccattctactacttaacgaacct

SEQ ID NO: 15375 - DNA, 1391 bp, Artificial Sequence
  chemically treated genomic DNA (Homo sapiens) CpG-island No: 15375
attaatcgttattttcggttaataatttgatttatttttacgcgtcgggtaaaggttttagcgatgttttttttgatttatggtcgggggaagtgttgggtattgtcggggaattcggtttcgggaagattacgttgttgaagtcgattttcgcgcgtttgacgtcgtagtagggggaaatttattacgagaatcgttcgttgtatgtaatgagcgaggtcgatcgtcgtcgtttgttgcgtatcgaatggggcgtggtgtattagtatttattcgacggtttgcgtcgttaggtgtcggtaggcggtaatatcggcgagcggttgatggcgatcggggtacgttattacggcgatattcgtgttatcgcgtagaagtggttggaagaggtggagattttcgttaatcggatcgacgatttgtcgattatttttttcggcggtatgtagtagcgtttgtagattgttcgtaatttggtgacgtattcgaagttggtgtttatggatgaatcgatcggcgggttggatgtgtcggtgtaggttcgtttgttcgatttgttgcgcggtttggtggtggagttgaatttcgcggtggtgattgttatttatgatttaggcgtcgttcgtttgttggcggatcgtttgttggtgatgaagtaggggtaagtggtggagagtgggttaatcgatcgcgtgttcgacgattcgtattattcgtatatatagttgttggtgttatcggttttgtagaattgagtcggtgtcggatgcggcgtaaacgttttattcggtttataaatgcgtttttcgtaggtcggataagacgcgttagcgtcgtattcgatattcgaattacgaggcgaaaaatgattaacgtataaaacgttagtaaaatttttattttgtattagtaaaacggcgtgcgtttgttcgtttttaatcgcgtttcgtttatcgttaacgcgggcgaatgcgtggtgttttacggttatttcggtagcggtaaattaattttgttacgttcgttgtacgttaattatttgttcgacgaaggttaaatttagattaaatacggtgacgagtgggtagatttggttatcgcgttagcgcgtaaagtggtggaaattcgtaaaattatcgtcggttgggtgagttagtttttgcgcgttatttcgcgtattttagtattggaagtggtgatgtagtcgttgttcgatatcggcgtttcgcgtgaagtttgcgtcgttaagtcgcgcgtttttttattcgtttgaacgtgtcggaacgtttgtggtatttggtattatcgatatttttcggtggcgaatagtagcgcgttatatcgttcgcggttttatcgtcgattattttattttgttgtttgacgaattt

SEQ ID NO: 15376 - DNA, 1391 bp, Artificial Sequence
  chemically treated genomic DNA (Homo sapiens) CpG-island No: 15376
aaattcgtcaaacaacaaaataaaataatcgacgataaaaccgcgaacgatataacgcgctactattcgccaccgaaaaatatcgataataccaaataccacaaacgttccgacacgttcaaacgaataaaaaaacgcgcgacttaacgacgcaaacttcacgcgaaacgccgatatcgaacaacgactacatcaccacttccaatactaaaatacgcgaaataacgcgcaaaaactaactcacccaaccgacgataattttacgaatttccaccactttacgcgctaacgcgataaccaaatctacccactcgtcaccgtatttaatctaaatttaaccttcgtcgaacaaataattaacgtacaacgaacgtaacaaaattaatttaccgctaccgaaataaccgtaaaacaccacgcattcgcccgcgttaacgataaacgaaacgcgattaaaaacgaacaaacgcacgccgttttactaatacaaaataaaaattttactaacgttttatacgttaatcatttttcgcctcgtaattcgaatatcgaatacgacgctaacgcgtcttatccgacctacgaaaaacgcatttataaaccgaataaaacgtttacgccgcatccgacaccgactcaattctacaaaaccgataacaccaacaactatatatacgaataatacgaatcgtcgaacacgcgatcgattaacccactctccaccacttacccctacttcatcaccaacaaacgatccgccaacaaacgaacgacgcctaaatcataaataacaatcaccaccgcgaaattcaactccaccaccaaaccgcgcaacaaatcgaacaaacgaacctacaccgacacatccaacccgccgatcgattcatccataaacaccaacttcgaatacgtcaccaaattacgaacaatctacaaacgctactacataccgccgaaaaaaataatcgacaaatcgtcgatccgattaacgaaaatctccacctcttccaaccacttctacgcgataacacgaatatcgccgtaataacgtaccccgatcgccatcaaccgctcgccgatattaccgcctaccgacacctaacgacgcaaaccgtcgaataaatactaatacaccacgccccattcgatacgcaacaaacgacgacgatcgacctcgctcattacatacaacgaacgattctcgtaataaatttccccctactacgacgtcaaacgcgcgaaaatcgacttcaacaacgtaatcttcccgaaaccgaattccccgacaatacccaacacttcccccgaccataaatcaaaaaaaacatcgctaaaacctttacccgacgcgtaaaaataaatcaaattattaaccgaaaataacgattaat

SEQ ID NO: 15377 - DNA, 705 bp, Artificial Sequence
  chemically treated genomic DNA (Homo sapiens) CpG-island No: 15377
  unsure (472)
gaggttataagaatattttaaattatggtgttaagacgttttgattttaggaagcgattaattaggtacgtcggtatgtcgttcgttagcgtattggtaggtaattatttggtaacggagttgttagagcgtaaggaatagtcggttcggttgcgattgtggtatcgattataatggtattattggtagttttttttttttgtcgggtaaatagtttgggcgtaatgaacgtcgtaagattcgtcgcgacgggcggtattagcgcgataacgtcgacgatggcgtattagttataaatgtgtttttttagtagtgagaagtagaagaattaggcggttttattgatggggtcgtttatatcgaacgttagtatcgtatcgattagaaacgttgtcgtaaattttattgatggaggaatggtatttaggaagtggagtagttcgtttatgaggtcggatattatcggttcgantacgtagtaagtgagtacgtcgaaaattagtagagtaacgaacgggattagtattgaatcgagtagcggttgtaatgttttgttaaggcgtattttgcggaattagaagacgaaatagttaatcgttagttttagtattatcgcgtcgaggaatttcgtattcgattgggtgtcgagtagcgttttgtcgttcgttagatagtaaattagaaacgtcggagcgaaagtcggtt

SEQ ID NO: 15378 - DNA, 705 bp, Artificial Sequence
  chemically treated genomic DNA (Homo sapiens) CpG-island No: 15378
  unsure (234)
aaccgactttcgctccgacgtttctaatttactatctaacgaacgacaaaacgctactcgacacccaatcgaatacgaaattcctcgacgcgataatactaaaactaacgattaactatttcgtcttctaattccgcaaaatacgccttaacaaaacattacaaccgctactcgattcaatactaatcccgttcgttactctactaattttcgacgtactcacttactacgtantcgaaccgataatatccgacctcataaacgaactactccacttcctaaataccattcctccatcaataaaatttacgacaacgtttctaatcgatacgatactaacgttcgatataaacgaccccatcaataaaaccgcctaattcttctacttctcactactaaaaaaacacatttataactaatacgccatcgtcgacgttatcgcgctaataccgcccgtcgcgacgaatcttacgacgttcattacgcccaaactatttacccgacaaaaaaaaaaaactaccaataataccattataatcgataccacaatcgcaaccgaaccgactattccttacgctctaacaactccgttaccaaataattacctaccaatacgctaacgaacgacataccgacgtacctaattaatcgcttcctaaaatcaaaacgtcttaacaccataatttaaaatattcttataacctc

SEQ ID NO: 15379 - DNA, 705 bp, Artificial Sequence
  chemically treated genomic DNA (Homo sapiens) CpG-island No: 15379
  unsure (234)
aatcggttttcgtttcggcgtttttggtttgttatttggcgaacgataaagcgttgttcggtatttagtcgggtgcgggatttttcggcgcggtggtgttggggttggcgattggttatttcgttttttggtttcgtaaagtgcgttttggtaaagtattataatcgttgttcggtttaatgttgatttcgttcgttattttgttggttttcggcgtgtttatttattacgtantcgggtcggtgatgttcgattttatgggcgggttgttttattttttgaatattatttttttattaatgaagtttgcggtagcgtttttggtcggtgcgatgttggcgttcgatatgggcggttttattaataaaatcgtttggtttttttgttttttattgttggaaaaatatatttatgattggtacgttatcgtcggcgttgtcgcgttgatgtcgttcgtcgcggcgggttttgcgacgtttattgcgtttaaattgtttattcgataggaaaaagaggttgttagtagtgttattgtggtcggtgttatagtcgtaatcgaatcggttattttttacgttttggtagtttcgttgttagatgattatttgttaatacgttggcgggcggtatatcggcgtgtttggttgatcgttttttggaattaaagcgttttggtattatggtttagggtatttttgtgatttt

SEQ ID NO: 15380 - DNA, 705 bp, Artificial Sequence
  chemically treated genomic DNA (Homo sapiens) CpG-island No: 15380
  unsure (472)
aaaatcacaaaaataccctaaaccataataccaaaacgctttaattccaaaaaacgatcaaccaaacacgccgatataccgcccgccaacgtattaacaaataatcatctaacaacgaaactaccaaaacgtaaaaaataaccgattcgattacgactataacaccgaccacaataacactactaacaacctctttttcctatcgaataaacaatttaaacgcaataaacgtcgcaaaacccgccgcgacgaacgacatcaacgcgacaacgccgacgataacgtaccaatcataaatatatttttccaacaataaaaaacaaaaaaaccaaacgattttattaataaaaccgcccatatcgaacgccaacatcgcaccgaccaaaaacgctaccgcaaacttcattaataaaaaaataatattcaaaaaataaaacaacccgcccataaaatcgaacatcaccgacccgantacgtaataaataaacacgccgaaaaccaacaaaataacgaacgaaatcaacattaaaccgaacaacgattataatactttaccaaaacgcactttacgaaaccaaaaaacgaaataaccaatcgccaaccccaacaccaccgcgccgaaaaatcccgcacccgactaaataccgaacaacgctttatcgttcgccaaataacaaaccaaaaacgccgaaacgaaaaccgatt

SEQ ID NO: 15381 - DNA, 607 bp, Artificial Sequence
  chemically treated genomic DNA (Homo sapiens) CpG-island No: 15381
ttgatatattttttgttaggtttgttttatcggattatcgtagttttgaatatgatgcggacgtaggtttttatttttttggttgttgatgtattatattgtttgtcgcggcggttattgtttttcgtcgaggtttatggttttgattagacgtttaagtaggcgtagttggtttttattgtcgaggatttggaaattttgcggtagattggcgtttatatggtgcgtacgtagtaaacggtgcgttagttcgtggaaggtgtcgatttatatatcgttttggttcgtgtttattagttgttcgatacgatgacgtattttcgtcgtcgttttgttggtaaacgttatcgttataatcgagtatggcgagtagttttttacgtttattaattaggcgatacgatgtattagtacgcgcgttttattattgttcgcgttcgttagtattagaaggttgttgcgtggcgcggttatcgtttcgcgttgtttgttattaaggttgtcgagtaggtagaaacgtttattggtatcgtcgcgtaaaaataggttgggcggagaagcgtaacgtttttcgttaaaaagttgggtatatatatagatttgttga

SEQ ID NO: 15382 - DNA, 607 bp, Artificial Sequence
  chemically treated genomic DNA (Homo sapiens) CpG-island No: 15382
tcaacaaatctatatatatacccaactttttaacgaaaaacgttacgcttctccgcccaacctatttttacgcgacgataccaataaacgtttctacctactcgacaaccttaataacaaacaacgcgaaacgataaccgcgccacgcaacaaccttctaatactaacgaacgcgaacaataataaaacgcgcgtactaatacatcgtatcgcctaattaataaacgtaaaaaactactcgccatactcgattataacgataacgtttaccaacaaaacgacgacgaaaatacgtcatcgtatcgaacaactaataaacacgaaccaaaacgatatataaatcgacaccttccacgaactaacgcaccgtttactacgtacgcaccatataaacgccaatctaccgcaaaatttccaaatcctcgacaataaaaaccaactacgcctacttaaacgtctaatcaaaaccataaacctcgacgaaaaacaataaccgccgcgacaaacaatataatacatcaacaaccaaaaaaataaaaacctacgtccgcatcatattcaaaactacgataatccgataaaacaaacctaacaaaaaatatatcaa

SEQ ID NO: 15383 - DNA, 607 bp, Artificial Sequence
  chemically treated genomic DNA (Homo sapiens) CpG-island No: 15383
ttagtaaatttgtatatatatttagttttttggcggagggcgttgcgttttttcgtttaatttatttttacgcggcggtgttaatggacgtttttatttgttcgatagttttaatgataaatagcgcgaagcggtggtcgcgttacgtagtaattttttggtgttggcgggcgcgggtagtggtaagacgcgcgtattggtgtatcgtatcgtttggttgatgagcgtggaaaattgttcgttatattcgattatggcggtgacgtttattaataaagcggcggcggagatgcgttatcgtatcgggtaattgatgggtacgagttagggcggtatgtgggtcggtattttttacgggttggcgtatcgtttgttgcgtgcgtattatatggacgttaatttgtcgtaggatttttagattttcgatagtgaagattagttacgtttgtttaagcgtttgattaaagttatgaatttcgacgagaagtagtggtcgtcgcggtaggtaatgtggtatattaatagttagaaagatgaaggtttgcgttcgtattatatttaaagttacggtaattcggtggagtagatttggtagaaggtgtattag

SEQ ID NO: 15384 - DNA, 607 bp, Artificial Sequence
  chemically treated genomic DNA (Homo sapiens) CpG-island No: 15384
ctaatacaccttctaccaaatctactccaccgaattaccgtaactttaaatataatacgaacgcaaaccttcatctttctaactattaatataccacattacctaccgcgacgaccactacttctcgtcgaaattcataactttaatcaaacgcttaaacaaacgtaactaatcttcactatcgaaaatctaaaaatcctacgacaaattaacgtccatataatacgcacgcaacaaacgatacgccaacccgtaaaaaataccgacccacataccgccctaactcgtacccatcaattacccgatacgataacgcatctccgccgccgctttattaataaacgtcaccgccataatcgaatataacgaacaattttccacgctcatcaaccaaacgatacgatacaccaatacgcgcgtcttaccactacccgcgcccgccaacaccaaaaaattactacgtaacgcgaccaccgcttcgcgctatttatcattaaaactatcgaacaaataaaaacgtccattaacaccgccgcgtaaaaataaattaaacgaaaaaacgcaacgccctccgccaaaaaactaaatatatatacaaatttactaa

SEQ ID NO: 15385 - DNA, 559 bp, Artificial Sequence
  chemically treated genomic DNA (Homo sapiens) CpG-island No: 15385
ttcggtttgatttaataagtttgtatttcgttgcgaattgttttatttacgttagtggtgagatcgtttttaatatgtaagatttcgtcgatcggtacgttgagttttttcgtagttaaaaagtatatatcgttgaacggttttgagcgttcgtgcgggttagcgcgtagtataaatttaaaataattttttaaattaaatagtttcggttgggcgttatcgttggtgatcgttattagcggttattttttcgttagttgttttaaggtgtcgtgagtttgttgcgggacgtcgattcggttgcgttatttggtaaagttgattattgttgcgtgtgcgtttgtattggttttttcggtatttagttcggcgtcgagtatcgtttgtttaatcgaacgaaaacgttagcgcgttacgtcgtgataaatttcgggtttcgtttttcgtatcgtttggcgtaagcgttgtagatttttattttggaagttgcgtagcgtcgatgattatttttgtttaagggtaagcgttttttcgttcggggcgtaaaattatcggacgg

SEQ ID NO: 15386 - DNA, 559 bp, Artificial Sequence
  chemically treated genomic DNA (Homo sapiens) CpG-island No: 15386
ccgtccgataattttacgccccgaacgaaaaaacgcttacccttaaacaaaaataatcatcgacgctacgcaacttccaaaataaaaatctacaacgcttacgccaaacgatacgaaaaacgaaacccgaaatttatcacgacgtaacgcgctaacgttttcgttcgattaaacaaacgatactcgacgccgaactaaataccgaaaaaaccaatacaaacgcacacgcaacaataatcaactttaccaaataacgcaaccgaatcgacgtcccgcaacaaactcacgacaccttaaaacaactaacgaaaaaataaccgctaataacgatcaccaacgataacgcccaaccgaaactatttaatttaaaaaattattttaaatttatactacgcgctaacccgcacgaacgctcaaaaccgttcaacgatatatactttttaactacgaaaaaactcaacgtaccgatcgacgaaatcttacatattaaaaacgatctcaccactaacgtaaataaaacaattcgcaacgaaatacaaacttattaaatcaaaccgaa

SEQ ID NO: 15387 - DNA, 559 bp, Artificial Sequence
  chemically treated genomic DNA (Homo sapiens) CpG-island No: 15387
tcgttcggtgattttgcgtttcgaacgaaaaggcgtttatttttgggtaaaaataattatcggcgttgcgtagtttttagaatgaagatttgtaacgtttgcgttaggcggtacgggaagcggaattcgagatttattacgacgtgacgcgttggcgttttcgttcgattgaataagcgatgttcgacgtcgggttgagtgtcgaagaagttagtgtaggcgtatacgtagtaatgattaattttgttaaatggcgtagtcgaatcgacgtttcgtagtaaatttacgatattttaaaatagttggcgaagaaatggtcgttggtggcgattattaacggtaacgtttagtcggagttgtttggtttgggggattattttgagtttgtgttgcgcgttggttcgtacgggcgtttaaaatcgtttagcgatatgtattttttggttgcggaaaaatttaacgtgtcgatcggcgagattttatatgttggggacgattttattattgacgtgggtggggtaattcgtagcggaatgtaggtttgttggattagatcgga

SEQ ID NO: 15388 - DNA, 559 bp, Artificial Sequence
  chemically treated genomic DNA (Homo sapiens) CpG-island No: 15388
tccgatctaatccaacaaacctacattccgctacgaattaccccacccacgtcaataataaaatcgtccccaacatataaaatctcgccgatcgacacgttaaatttttccgcaaccaaaaaatacatatcgctaaacgattttaaacgcccgtacgaaccaacgcgcaacacaaactcaaaataatcccccaaaccaaacaactccgactaaacgttaccgttaataatcgccaccaacgaccatttcttcgccaactattttaaaatatcgtaaatttactacgaaacgtcgattcgactacgccatttaacaaaattaatcattactacgtatacgcctacactaacttcttcgacactcaacccgacgtcgaacatcgcttattcaatcgaacgaaaacgccaacgcgtcacgtcgtaataaatctcgaattccgcttcccgtaccgcctaacgcaaacgttacaaatcttcattctaaaaactacgcaacgccgataattatttttacccaaaaataaacgccttttcgttcgaaacgcaaaatcaccgaacga

SEQ ID NO: 15389 - DNA, 1052 bp, Artificial Sequence
  chemically treated genomic DNA (Homo sapiens) CpG-island No: 15389
ggagtaatcggtatcgtaaattcgatattcgttttttttagtagtaggtggatagttagtacgtcggacggcgttttcgttatcgagattacgtaggcggtaatggagttttgcggtgtttcggtaattatttggtaggtatcgagtatttcgcgcgtttcggcgtttggttgttagttgcgcggtagaagcggacgtttggagtttagttcgcggattaggaacgtttgtttgtcggtttttgattagttttcgtagtcgtcgatatcgaggtagcgggttagttcgtttagcgtttcggtatgacgcgtgtttttttgacggatattaatacggattagcggtacgtcgaaatattttacgcggcgtaggtgtcgagtagatcgtcgttggcgataatatttatgttatacgtttgaagtgattggtagtaagcgtagagcggtttttatagtttttcgttttgtgttagtaggttttttggttttggtagtttttcgttttttaggcgcgtttttagttatgtttgtgtcgttattaggcgagaacgtaggttttttattagatagcgatacggttttgcggtatttttttcgttaattagcgttagtagtttaggggtcgttttaattatcgatagtttagaaattagtatttgaatattttttaggaataaatcggtggttttttagcggttgagtagtaggacgtggcgggtgatatcggtagtgacgttcgggttgtcgtcgcggtcgtcgtttatttacgaagtaaaacggatcggaataaattcgacgggtagtttgtagtcgaggtttttttttagttgttcgtttagttcgcgtaggtatttggtacgttttgttataggttgttttttattacggtaaagttttatttggttttatttatcgggtttggacgtagtttacggattttatcggtatgttatgattgggcgattaattggcgtaggcgacgtattagttggttgtgttcgtagttagcgatatttttgttatcgagttgttttaaataggcgtttattttta

SEQ ID NO: 15390 - DNA, 1052 bp, Artificial Sequence
  chemically treated genomic DNA (Homo sapiens) CpG-island No: 15390
taaaaataaacgcctatttaaaacaactcgataacaaaaatatcgctaactacgaacacaaccaactaatacgtcgcctacgccaattaatcgcccaatcataacataccgataaaatccgtaaactacgtccaaacccgataaataaaaccaaataaaactttaccgtaataaaaaacaacctataacaaaacgtaccaaatacctacgcgaactaaacgaacaactaaaaaaaaacctcgactacaaactacccgtcgaatttattccgatccgttttacttcgtaaataaacgacgaccgcgacgacaacccgaacgtcactaccgatatcacccgccacgtcctactactcaaccgctaaaaaaccaccgatttattcctaaaaaatattcaaatactaatttctaaactatcgataattaaaacgacccctaaactactaacgctaattaacgaaaaaaataccgcaaaaccgtatcgctatctaataaaaaacctacgttctcgcctaataacgacacaaacataactaaaaacgcgcctaaaaaacgaaaaactaccaaaaccaaaaaacctactaacacaaaacgaaaaactataaaaaccgctctacgcttactaccaatcacttcaaacgtataacataaatattatcgccaacgacgatctactcgacacctacgccgcgtaaaatatttcgacgtaccgctaatccgtattaatatccgtcaaaaaaacacgcgtcataccgaaacgctaaacgaactaacccgctacctcgatatcgacgactacgaaaactaatcaaaaaccgacaaacaaacgttcctaatccgcgaactaaactccaaacgtccgcttctaccgcgcaactaacaaccaaacgccgaaacgcgcgaaatactcgatacctaccaaataattaccgaaacaccgcaaaactccattaccgcctacgtaatctcgataacgaaaacgccgtccgacgtactaactatccacctactactaaaaaaaacgaatatcgaatttacgataccgattactcc

SEQ ID NO: 15391 - DNA, 1052 bp, Artificial Sequence
  chemically treated genomic DNA (Homo sapiens) CpG-island No: 15391
tggaagtgaacgtttgtttaaaatagttcgataataaagatatcgttgattacgaatataattagttgatgcgtcgtttgcgttagttgatcgtttagttatggtatatcgatgaaattcgtaagttgcgtttaagttcggtagatgaagttaaatggggttttgtcgtagtggaaaatagtttgtggtaaggcgtattaaatatttgcgcgaattgaacgaataattggaagagaatttcggttataaattgttcgtcgaatttgtttcggttcgttttatttcgtggatgggcggcgatcgcgacggtaattcgaacgttattgtcgatattattcgttacgttttgttatttagtcgttggaaagttatcgatttgtttttgaaagatatttaggtgttggtttttgaattgtcgatggttgaagcgatttttgaattgttggcgttggttggcgaagaaggtgtcgtagaatcgtatcgttatttgatgaaaaatttgcgttttcgtttgatggcgatataggtatggttggaagcgcgtttgaaaggcgaagaattgttaaaattagaaggtttgttgatataaaacgaagaattgtgggaatcgttttacgtttgttattagttattttaggcgtgtggtatgggtattatcgttaacggcgatttgttcgatatttgcgtcgcgtgaaatgtttcggcgtatcgttggttcgtattgatattcgttaggagagtacgcgttatatcgaagcgttgggcgagttgattcgttatttcggtatcggcgattacgaaagttggttagaggtcgataaataggcgtttttgattcgcgaattgaattttaaacgttcgtttttgtcgcgtaattggtaattaagcgtcgaaacgcgcgaagtgttcgatatttgttaggtgattgtcgaagtatcgtaaggttttattgtcgtttacgtgatttcgatggcgaaaacgtcgttcgacgtattggttgtttatttgttgttgaaagaagcgggtatcgggtttgcgatgtcggttgtttt

SEQ ID NO: 15392 - DNA, 1052 bp, Artificial Sequence
  chemically treated genomic DNA (Homo sapiens) CpG-island No: 15392
aaaacaaccgacatcgcaaacccgatacccgcttctttcaacaacaaataaacaaccaatacgtcgaacgacgttttcgccatcgaaatcacgtaaacgacaataaaaccttacgatacttcgacaatcacctaacaaatatcgaacacttcgcgcgtttcgacgcttaattaccaattacgcgacaaaaacgaacgtttaaaattcaattcgcgaatcaaaaacgcctatttatcgacctctaaccaactttcgtaatcgccgataccgaaataacgaatcaactcgcccaacgcttcgatataacgcgtactctcctaacgaatatcaatacgaaccaacgatacgccgaaacatttcacgcgacgcaaatatcgaacaaatcgccgttaacgataatacccataccacacgcctaaaataactaataacaaacgtaaaacgattcccacaattcttcgttttatatcaacaaaccttctaattttaacaattcttcgcctttcaaacgcgcttccaaccatacctatatcgccatcaaacgaaaacgcaaatttttcatcaaataacgatacgattctacgacaccttcttcgccaaccaacgccaacaattcaaaaatcgcttcaaccatcgacaattcaaaaaccaacacctaaatatctttcaaaaacaaatcgataactttccaacgactaaataacaaaacgtaacgaataatatcgacaataacgttcgaattaccgtcgcgatcgccgcccatccacgaaataaaacgaaccgaaacaaattcgacgaacaatttataaccgaaattctcttccaattattcgttcaattcgcgcaaatatttaatacgccttaccacaaactattttccactacgacaaaaccccatttaacttcatctaccgaacttaaacgcaacttacgaatttcatcgatataccataactaaacgatcaactaacgcaaacgacgcatcaactaattatattcgtaatcaacgatatctttattatcgaactattttaaacaaacgttcacttcca

SEQ ID NO: 15393 - DNA, 718 bp, Artificial Sequence
  chemically treated genomic DNA (Homo sapiens) CpG-island No: 15393
ttcggttcgataatttttagcgggttatggcggaatttttcgtttttaattacgtagtcgtgcgtttaggtaaattttattagcgttataatgttttttttgtaatttagcggacgtagcggattcgtagtaacggtataaattatcggttattggttggttagtttattaagttggcggtttttttttttttaggtgcgtattagatgatcgagcgtattcggtaattgtttgagatcgtttttgattttgtcgattttcgcgttcggcgcgaggcgggtgattatttttagtattacgttgtagtagagtagtaggtgaattttttagatatagtcggtcgtgataattaatgttaaatttcgtcgtcgaggtaatcgggttattcgcgcgtttggtgaacgtcgtagtgagtgcgtcgtaggttcggtttagttttagcgttttgattattttttcggttttatcgtagttagaaacgttaattattgcgtaacgatcgtcgaggcgatacggggtgttatcgtagaatttttagtcggaaatggcgtagatttgaagatcggaaaagcgattcgttagatgtttcgtcgtttgcgtcgcgttgagtggcgattcgtaggtaacgaaataaatacgattaagtgtcgcgttttattattttttttacgatggcgtgtattagcggaacgttatggttgagaattttttttatttt

SEQ ID NO: 15394 - DNA, 718 bp, Artificial Sequence
  chemically treated genomic DNA (Homo sapiens) CpG-island No: 15394
aaaataaaaaaaattctcaaccataacgttccgctaatacacgccatcgtaaaaaaaataataaaacgcgacacttaatcgtatttatttcgttacctacgaatcgccactcaacgcgacgcaaacgacgaaacatctaacgaatcgcttttccgatcttcaaatctacgccatttccgactaaaaattctacgataacaccccgtatcgcctcgacgatcgttacgcaataattaacgtttctaactacgataaaaccgaaaaaataatcaaaacgctaaaactaaaccgaacctacgacgcactcactacgacgttcaccaaacgcgcgaataacccgattacctcgacgacgaaatttaacattaattatcacgaccgactatatctaaaaaattcacctactactctactacaacgtaatactaaaaataatcacccgcctcgcgccgaacgcgaaaatcgacaaaatcaaaaacgatctcaaacaattaccgaatacgctcgatcatctaatacgcacctaaaaaaaaaaaaaccgccaacttaataaactaaccaaccaataaccgataatttataccgttactacgaatccgctacgtccgctaaattacaaaaaaaacattataacgctaataaaatttacctaaacgcacgactacgtaattaaaaacgaaaaattccgccataacccgctaaaaattatcgaaccgaa

SEQ ID NO: 15395 - DNA, 718 bp, Artificial Sequence
  chemically treated genomic DNA (Homo sapiens) CpG-island No: 15395
gaagtggaaaaagtttttagttatgacgtttcgttggtgtacgttatcgtggaagagatggtgaagcgcgatatttgatcgtatttatttcgttgtttgcggatcgttatttaacgcggcgtaaacggcgaaatatttggcggatcgttttttcgatttttaggtttacgttattttcggttgggagttttgcgataatatttcgtatcgtttcgacgatcgttgcgtagtaattggcgtttttgattacggtaaaatcgaagaggtaattaaagcgttggagttgggtcgggtttgcggcgtatttattgcggcgtttattaaacgcgcggatagttcgattatttcggcggcggaatttagtattgattattacggtcgattgtatttgggaaatttatttgttgttttgttatagcgtggtgttggagatgattattcgtttcgcgtcgaacgcggaaatcggtaagattaaaaacgattttaagtagttgtcgaatgcgttcggttatttggtacgtatttgggaagaaaaaggtcgttagtttggtgaattggttagttagtggtcgatgatttatatcgttgttgcgggttcgttgcgttcgttgggttataaagaaggtattgtaacgttgatggaatttatttggacgtacggttgcgtgattgagagcggagagtttcgttatggttcgttggagattgtcgaatcggg

SEQ ID NO: 15396 - DNA, 718 bp, Artificial Sequence
  chemically treated genomic DNA (Homo sapiens) CpG-island No: 15396
cccgattcgacaatctccaacgaaccataacgaaactctccgctctcaatcacgcaaccgtacgtccaaataaattccatcaacgttacaataccttctttataacccaacgaacgcaacgaacccgcaacaacgatataaatcatcgaccactaactaaccaattcaccaaactaacgacctttttcttcccaaatacgtaccaaataaccgaacgcattcgacaactacttaaaatcgtttttaatcttaccgatttccgcgttcgacgcgaaacgaataatcatctccaacaccacgctataacaaaacaacaaataaatttcccaaatacaatcgaccgtaataatcaatactaaattccgccgccgaaataatcgaactatccgcgcgtttaataaacgccgcaataaatacgccgcaaacccgacccaactccaacgctttaattacctcttcgattttaccgtaatcaaaaacgccaattactacgcaacgatcgtcgaaacgatacgaaatattatcgcaaaactcccaaccgaaaataacgtaaacctaaaaatcgaaaaaacgatccgccaaatatttcgccgtttacgccgcgttaaataacgatccgcaaacaacgaaataaatacgatcaaatatcgcgcttcaccatctcttccacgataacgtacaccaacgaaacgtcataactaaaaactttttccacttc

SEQ ID NO: 15397 - DNA, 1045 bp, Artificial Sequence
  chemically treated genomic DNA (Homo sapiens) CpG-island No: 15397
  unsure (46, 155, 323)
acgggtttattacgtagcgtttatttatttttatcggataggcgtnagtgtggcgatatgatcgaagcgggcgatatttttatatagttttatttgtattacgtcgtatttttttagcgcgtgtatgtgcgggttttcgtttcgcgcggttcgantaagcgtagcggttcggggattggtatttggaagataattatttgattttcggttagcggcgtttcggggatgcggtgacgcgtttggatatcgtcgtatcgttcgtacgtttcgtggtgtttatttcggttacgcgtttgaagaagttgcgaatcgatacggcgttngtggtgttattcgcgttttggttaattatttttagtacgtcgttttcgttaattacgttgcggtagttgaatgtcgtcgttttttagtcgtacggtatcggtatttcgcgttcgttaaacggtatttgataatcggggatcgttatcgtttttaagatggcgcggcggattatgcgtttggtttgttcgtcgaggtaggtaaagttgtagtcgtttagattagttatggttttgtttttgttgtagacgtttgagtagttttagttcggtttggaaatcgacgtagtgggggagtttgaggtgtgagattaaagtttgcggtttcgacgttgtcggtatgtgttagtacgaattttttattttgcgtcgggtttgtcgcgtgttcgtcgtatttcggggtttgtagagcgcggtcgattagcgttatcgttatcgttttgcgttcgtttatgtcgaatattagttcgtagtcgcgcgtgaagtgcggcggtttattcggcgggtcgataaaatcgttaattattttatatttagttattagtagttcgtcgacgtttatcgtaaattttagttttttcggtataatcgatacgtcgatatagtcgttgcggatttcgtttgcgaacgggtgattgcgttcgtaatcgcgttgggtggagtaggttagcgttagtaaatagttttcgtcgtcgcgtattaattgttgtaaacgggaggagcgt

SEQ ID NO: 15398 - DNA, 1045 bp, Artificial Sequence
  chemically treated genomic DNA (Homo sapiens) CpG-island No: 15398
  unsure (723, 891, 1000)
acgctcctcccgtttacaacaattaatacgcgacgacgaaaactatttactaacgctaacctactccacccaacgcgattacgaacgcaatcacccgttcgcaaacgaaatccgcaacgactatatcgacgtatcgattataccgaaaaaactaaaatttacgataaacgtcgacgaactactaataactaaatataaaataattaacgattttatcgacccgccgaataaaccgccgcacttcacgcgcgactacgaactaatattcgacataaacgaacgcaaaacgataacgataacgctaatcgaccgcgctctacaaaccccgaaatacgacgaacacgcgacaaacccgacgcaaaataaaaaattcgtactaacacataccgacaacgtcgaaaccgcaaactttaatctcacacctcaaactcccccactacgtcgatttccaaaccgaactaaaactactcaaacgtctacaacaaaaacaaaaccataactaatctaaacgactacaactttacctacctcgacgaacaaaccaaacgcataatccgccgcgccatcttaaaaacgataacgatccccgattatcaaataccgtttaacgaacgcgaaataccgataccgtacgactaaaaaacgacgacattcaactaccgcaacgtaattaacgaaaacgacgtactaaaaataattaaccaaaacgcgaataacaccacnaacgccgtatcgattcgcaacttcttcaaacgcgtaaccgaaataaacaccacgaaacgtacgaacgatacgacgatatccaaacgcgtcaccgcatccccgaaacgccgctaaccgaaaatcaaataattatcttccaaataccaatccccgaaccgctacgcttantcgaaccgcgcgaaacgaaaacccgcacatacacgcgctaaaaaaatacgacgtaatacaaataaaactatataaaaatatcgcccgcttcgatcatatcgccacactnacgcctatccgataaaaataaataaacgctacgtaataaacccgt

SEQ ID NO: 15399 - DNA, 1045 bp, Artificial Sequence
  chemically treated genomic DNA (Homo sapiens) CpG-island No: 15399
  unsure (723, 891, 1000)
acgtttttttcgtttgtagtagttgatgcgcggcgacgaaggttatttgttggcgttggtttattttatttaacgcggttacgggcgtaattattcgttcgtaggcgagattcgtagcggttatatcgacgtgtcgattgtgtcggaagagttgggatttgcggtgaacgtcggcgaattgttgatgattgagtgtgaaatggttaacggttttatcgattcgtcgggtgagtcgtcgtattttacgcgcggttacgggttggtgttcggtatgagcgagcgtaaagcgatggcgatggcgttggtcgatcgcgttttgtaagtttcggagtacggcgagtacgcgataggttcggcgtaggatgaagagttcgtgttggtatatgtcgataacgtcgaagtcgtaggttttggttttatattttaaatttttttattacgtcgatttttaggtcgaattggagttatttaaacgtttgtaataggagtagaattatggttaatttgagcggttataattttgtttatttcgacgagtagattaaacgtatgattcgtcgcgttattttaaaagcggtggcgattttcggttattaggtgtcgtttggcgggcgcgagatgtcgatgtcgtacggttggggaacggcggtatttagttatcgtagcgtgattggcgaaagcgacgtgttgaaggtgattgattagggcgcggatgatattatnaacgtcgtgtcgattcgtaatttttttaagcgcgtgatcggggtaaatattacggaacgtacggacgatgcgacggtatttagacgcgttatcgtattttcgaaacgtcgttgatcgaagattagataattattttttaggtgttaattttcgagtcgttgcgtttantcgagtcgcgcgaaacggaaattcgtatatgtacgcgttggaagagtacggcgtgatgtaggtgaaattgtatgaagatatcgttcgtttcggttatatcgttatattnacgtttattcggtgaaggtaaatgggcgttacgtgatggattcgt

SEQ ID NO: 15400 - DNA, 1045 bp, Artificial Sequence
  chemically treated genomic DNA (Homo sapiens) CpG-island No: 15400
  unsure (46, 155, 323)
acgaatccatcacgtaacgcccatttaccttcaccgaataaacgtnaatataacgatataaccgaaacgaacgatatcttcatacaatttcacctacatcacgccgtactcttccaacgcgtacatatacgaatttccgtttcgcgcgactcgantaaacgcaacgactcgaaaattaacacctaaaaaataattatctaatcttcgatcaacgacgtttcgaaaatacgataacgcgtctaaataccgtcgcatcgtccgtacgttccgtaatatttaccccgatcacgcgcttaaaaaaattacgaatcgacacgacgttnataatatcatccgcgccctaatcaatcaccttcaacacgtcgctttcgccaatcacgctacgataactaaataccgccgttccccaaccgtacgacatcgacatctcgcgcccgccaaacgacacctaataaccgaaaatcgccaccgcttttaaaataacgcgacgaatcatacgtttaatctactcgtcgaaataaacaaaattataaccgctcaaattaaccataattctactcctattacaaacgtttaaataactccaattcgacctaaaaatcgacgtaataaaaaaatttaaaatataaaaccaaaacctacgacttcgacgttatcgacatataccaacacgaactcttcatcctacgccgaacctatcgcgtactcgccgtactccgaaacttacaaaacgcgatcgaccaacgccatcgccatcgctttacgctcgctcataccgaacaccaacccgtaaccgcgcgtaaaatacgacgactcacccgacgaatcgataaaaccgttaaccatttcacactcaatcatcaacaattcgccgacgttcaccgcaaatcccaactcttccgacacaatcgacacgtcgatataaccgctacgaatctcgcctacgaacgaataattacgcccgtaaccgcgttaaataaaataaaccaacgccaacaaataaccttcgtcgccgcgcatcaactactacaaacgaaaaaaacgt

SEQ ID NO: 15401 - DNA, 568 bp, Artificial Sequence
  chemically treated genomic DNA (Homo sapiens) CpG-island No: 15401
ggtttttcgaacgcgcggtaaagtagcgggcggagtagttagcggtagatgatcgtagtttaggatttttattttaaattggttacgaatgtttagtttatcgtattgattaagtagatttattagttagtcgcgggaaagttttattggtatatattagcgtattatgttttgtttgagtaatatttttagtgttatcgcgttgtagtagtttagcgcgtgttcggcgacgaacggtagtttgcgtttagcgtatatatttattacgtcgagatcgttggttttaattagaaatttatcgtttttaatatagcgttttagttcgtttagtttagatgatgtttgtattagcgttagcgtggagagtataatttgtttattattttcggcgagcgattttgttatttttagttagtcgttaattttggttgttcgacgtttgttgtatatcgttttattaagataaattacgtcggcgttgttggtggcggtttgttgataaaatttttttagcgttttttttggttagtattatagtattggttttaaggaatattttattgttttt

SEQ ID NO: 15402 - DNA, 568 bp, Artificial Sequence
  chemically treated genomic DNA (Homo sapiens) CpG-island No: 15402
aaaaacaataaaatattccttaaaaccaatactataatactaaccaaaaaaaacgctaaaaaaattttatcaacaaaccgccaccaacaacgccgacgtaatttatcttaataaaacgatatacaacaaacgtcgaacaaccaaaattaacgactaactaaaaataacaaaatcgctcgccgaaaataataaacaaattatactctccacgctaacgctaatacaaacatcatctaaactaaacgaactaaaacgctatattaaaaacgataaatttctaattaaaaccaacgatctcgacgtaataaatatatacgctaaacgcaaactaccgttcgtcgccgaacacgcgctaaactactacaacgcgataacactaaaaatattactcaaacaaaacataatacgctaatatataccaataaaactttcccgcgactaactaataaatctacttaatcaatacgataaactaaacattcgtaaccaatttaaaataaaaatcctaaactacgatcatctaccgctaactactccgcccgctactttaccgcgcgttcgaaaaacc

SEQ ID NO: 15403 - DNA, 568 bp, Artificial Sequence
  chemically treated genomic DNA (Homo sapiens) CpG-island No: 15403
aaaagtaatgaaatattttttagggttagtgttgtggtattggttaaaagagacgttggaagaattttattagtaggtcgttattagtagcgtcgacgtgatttattttggtgaagcggtatgtagtaagcgtcgggtaattaaagttggcgattggttggagatggtaaaatcgttcgtcgggagtggtaagtagattgtgttttttacgttggcgttggtgtaggtattatttgaattgggcgaattgaaacgttatgttgagaacggtgagtttttgattgaagttagcgatttcggcgtggtgaatatgtgcgttgaacgtaaattgtcgttcgtcgtcgggtacgcgttgaattgttataacgcggtgatattgaaaatattgtttaaatagggtatgatgcgttggtgtatgttagtggagttttttcgcgattggttggtgaatttgtttaattagtgcgatgagttgggtattcgtaattagtttgaagtggaagttttgagttacggttatttgtcgttggttatttcgttcgttgttttatcgcgcgttcggaagatt

SEQ ID NO: 15404 - DNA, 568 bp, Artificial Sequence
  chemically treated genomic DNA (Homo sapiens) CpG-island No: 15404
aatcttccgaacgcgcgataaaacaacgaacgaaataaccaacgacaaataaccgtaactcaaaacttccacttcaaactaattacgaatacccaactcatcgcactaattaaacaaattcaccaaccaatcgcgaaaaaactccactaacatacaccaacgcatcataccctatttaaacaatattttcaatatcaccgcgttataacaattcaacgcgtacccgacgacgaacgacaatttacgttcaacgcacatattcaccacgccgaaatcgctaacttcaatcaaaaactcaccgttctcaacataacgtttcaattcgcccaattcaaataatacctacaccaacgccaacgtaaaaaacacaatctacttaccactcccgacgaacgattttaccatctccaaccaatcgccaactttaattacccgacgcttactacataccgcttcaccaaaataaatcacgtcgacgctactaataacgacctactaataaaattcttccaacgtctcttttaaccaataccacaacactaaccctaaaaaatatttcattactttt

SEQ ID NO: 15405 - DNA, 589 bp, Artificial Sequence
  chemically treated genomic DNA (Homo sapiens) CpG-island No: 15405
gtttttgaggaattaggtttttaggcgcgggcgttgggggtcgatgtcgtcgtcggtattgatatcgattacgaaacggtcgggtaaaacggtagtatgttgatggttagcgttagcggtacggcggtgaaaacgcgtcgatgagaagatttttttggttggtcgttgtcgttttgttattggtaggggtgtgtaggcgaaaaaggtattgtcgagaaagagggatattagtttgatattcgacgttaggcgtaggcggcgtattcgcgtattaaagtgttggtgatttattatatcgtagatgattttgatagttcgttggcgatattgatcgataagtaggttagttcgtattatttggtttttgcggtattatcgcgatataacggtaaatcgcgtatttggtaattggtgtcggaataagaattggtttggtatgcggggattagcgtttggcgcggggtaacgcgttttaacgatatttttattggtattgagttggaaaatcgtggtttggtaaaaatcggcggagtgatatatttgtttcgtttgaatcgggatagatttagcggtttattttattggggaa

SEQ ID NO: 15406 - DNA, 589 bp, Artificial Sequence
  chemically treated genomic DNA (Homo sapiens) CpG-island No: 15406
ttccccaataaaataaaccgctaaatctatcccgattcaaacgaaacaaatatatcactccgccgatttttaccaaaccacgattttccaactcaataccaataaaaatatcgttaaaacgcgttaccccgcgccaaacgctaatccccgcataccaaaccaattcttattccgacaccaattaccaaatacgcgatttaccgttatatcgcgataataccgcaaaaaccaaataatacgaactaacctacttatcgatcaatatcgccaacgaactatcaaaatcatctacgatataataaatcaccaacactttaatacgcgaatacgccgcctacgcctaacgtcgaatatcaaactaatatccctctttctcgacaatacctttttcgcctacacacccctaccaataacaaaacgacaacgaccaaccaaaaaaatcttctcatcgacgcgttttcaccgccgtaccgctaacgctaaccatcaacatactaccgttttacccgaccgtttcgtaatcgatatcaataccgacgacgacatcgacccccaacgcccgcgcctaaaaacctaattcctcaaaaac

SEQ ID NO: 15407 - DNA, 589 bp, Artificial Sequence
  chemically treated genomic DNA (Homo sapiens) CpG-island No: 15407
ttttttagtgaaataagtcgttgaatttgtttcggtttaaacggggtaaatatgttatttcgtcgatttttgttaagttacggttttttagtttaatgttaatagaggtgtcgttaaggcgcgttgtttcgcgttaggcgttaattttcgtatgttaggttagtttttgtttcggtattagttgttagatgcgcggtttatcgttgtatcgcggtggtatcgtagggattagataatgcgagttgatttgtttatcggttagtgtcgttagcgagttattaaaattatttgcggtgtagtggattattagtattttaatgcgcggatacgtcgtttgcgtttggcgtcgggtattaagttgatatttttttttttcgataatgtttttttcgtttgtatatttttgttaataatagagcggtagcgattagttagaagaatttttttatcgacgcgtttttatcgtcgtatcgttgacgttaattattagtatattgtcgttttgttcgatcgtttcgtagtcgatattaatatcgacgacggtatcggtttttagcgttcgcgtttgggagtttaattttttaaaggt

SEQ ID NO: 15408 - DNA, 589 bp, Artificial Sequence
  chemically treated genomic DNA (Homo sapiens) CpG-island No: 15408
acctttaaaaaattaaactcccaaacgcgaacgctaaaaaccgataccgtcgtcgatattaatatcgactacgaaacgatcgaacaaaacgacaatatactaataattaacgtcaacgatacgacgataaaaacgcgtcgataaaaaaattcttctaactaatcgctaccgctctattattaacaaaaatatacaaacgaaaaaaacattatcgaaaaaaaaaaatatcaacttaatacccgacgccaaacgcaaacgacgtatccgcgcattaaaatactaataatccactacaccgcaaataattttaataactcgctaacgacactaaccgataaacaaatcaactcgcattatctaatccctacgataccaccgcgatacaacgataaaccgcgcatctaacaactaataccgaaacaaaaactaacctaacatacgaaaattaacgcctaacgcgaaacaacgcgccttaacgacacctctattaacattaaactaaaaaaccgtaacttaacaaaaatcgacgaaataacatatttaccccgtttaaaccgaaacaaattcaacgacttatttcactaaaaaa

SEQ ID NO: 15409 - DNA, 1011 bp, Artificial Sequence
  chemically treated genomic DNA (Homo sapiens) CpG-island No: 15409
  unsure (815, 971)
ggcggtggtgtagcgttttttatggcgtttggttagtttgatgtcgatttcgattttgttttcgtatagcgcgataattcggagatggagcgtcgttgttaggaagtgatcgatcgttgttggtagtttggtgatgttaatttaattttgtttatttacgacgttggcgttggcggtttttttaacgttatgtcggaattggtgagcgacggcgggcgcggcggtaaatttgaattgcgcgagattttaagcgacgaatcgggtatgagttcgttggaaatttggtgtaacgaattttaggaacgttacgtgttggcggttgttgtcgattaattatcgttgtttgacgaattgtgtaagcgtgagcgcgtattttacgcggtgattggtgaagcgatcgaagaattgtatttttttttgtacgatcgttattttgataattagtcgatcgatttgtcgttggacgttttgtttggtaaaacgtcgaagatgattcgcgatgtataaacgttgaaagcgaaaggcgacgcgttggttcgtgaagggattattattgtagacgcggtgaaacgtgtgttgtatttgtcgattgtggcggaaaaaatttttttggtgattattggcgatcgtagcgtaatcggtatggtagcgcgcgattagatgtggggtcgtggtaggtgtcggtcgttaattgcgcggttattatcgttagtttcgatagttattacggtgaagcgatggcgattggcgagcgtgcgtcggttgcgttgttggatttcgtcgtttttgttcgtttggcggtcggtgaagcgttnattaatatcgtcgtaatataaattggcgatattaaacgtattaaatttttcgttaattggatgcggcggtaggttattttggtgaagatgcgggtttgtattaagtcgttaagtcgtgggcgaagagttttgttcggcgttggtttgacgattttngtgggttaagatttttgtcgataaattcgttgtagaaggt

SEQ ID NO: 15410 - DNA, 1011 bp, Artificial Sequence
  chemically treated genomic DNA (Homo sapiens) CpG-island No: 15410
  unsure (41, 197)
accttctacaacgaatttatcgacaaaaatcttaacccacnaaaatcgtcaaaccaacgccgaacaaaactcttcgcccacgacttaacgacttaatacaaacccgcatcttcaccaaaataacctaccgccgcatccaattaacgaaaaatttaatacgtttaatatcgccaatttatattacgacgatattaatnaacgcttcaccgaccgccaaacgaacaaaaacgacgaaatccaacaacgcaaccgacgcacgctcgccaatcgccatcgcttcaccgtaataactatcgaaactaacgataataaccgcgcaattaacgaccgacacctaccacgaccccacatctaatcgcgcgctaccataccgattacgctacgatcgccaataatcaccaaaaaaattttttccgccacaatcgacaaatacaacacacgtttcaccgcgtctacaataataatcccttcacgaaccaacgcgtcgcctttcgctttcaacgtttatacatcgcgaatcatcttcgacgttttaccaaacaaaacgtccaacgacaaatcgatcgactaattatcaaaataacgatcgtacaaaaaaaaatacaattcttcgatcgcttcaccaatcaccgcgtaaaatacgcgctcacgcttacacaattcgtcaaacaacgataattaatcgacaacaaccgccaacacgtaacgttcctaaaattcgttacaccaaatttccaacgaactcatacccgattcgtcgcttaaaatctcgcgcaattcaaatttaccgccgcgcccgccgtcgctcaccaattccgacataacgttaaaaaaaccgccaacgccaacgtcgtaaataaacaaaattaaattaacatcaccaaactaccaacaacgatcgatcacttcctaacaacgacgctccatctccgaattatcgcgctatacgaaaacaaaatcgaaatcgacatcaaactaaccaaacgccataaaaaacgctacaccaccgcc

SEQ ID NO: 15411 - DNA, 1011 bp, Artificial Sequence
  chemically treated genomic DNA (Homo sapiens) CpG-island No: 15411
  unsure (41, 197)
attttttgtagcgggtttatcgataggagttttaatttatngggatcgttaggttagcgtcggataaagtttttcgtttacggtttaacggtttaatataggttcgtatttttattagggtggtttgtcgtcgtatttagttggcggaaagtttgatgcgtttgatatcgttaatttgtgttgcggcgatgttggtnaacgttttatcgatcgttagacgggtagaggcggcgaaatttagtagcgtaatcggcgtacgttcgttaatcgttatcgttttatcgtagtagttgtcgaggttggcggtagtgatcgcgtagttagcgatcggtatttgttacggttttatatttgatcgcgcgttattatgtcggttacgttgcggtcgttaatggttattaggaaggtttttttcgttatagtcggtagatgtagtatacgttttatcgcgtttgtaatggtgatttttttacgggttagcgcgtcgtttttcgtttttagcgtttgtatatcgcgggttattttcggcgttttattaagtaggacgtttagcggtagatcgatcggttgattattaaaatgacgatcgtgtagagaaagatgtagtttttcggtcgttttattaattatcgcgtagggtgcgcgtttacgtttatatagttcgttaaatagcggtaattgatcggtagtaatcgttagtacgtagcgtttttgggattcgttatattagatttttagcgggtttatgttcggttcgtcgtttagaatttcgcgtagtttaaatttatcgtcgcgttcgtcgtcgtttattagtttcggtatggcgttagaaagatcgttagcgttaacgtcgtggataaataggattgggttggtattattaagttgttagtaacggtcgattattttttggtagcgacgttttattttcgggttgtcgcgttgtacggaagtaaagtcgaggtcggtattagattgattagacgttatagaagacgttgtattatcgtt

SEQ ID NO: 15412 - DNA, 1011 bp, Artificial Sequence
  chemically treated genomic DNA (Homo sapiens) CpG-island No: 15412
  unsure (815, 971)
aacgataatacaacgtcttctataacgtctaatcaatctaataccgacctcgactttacttccgtacaacgcgacaacccgaaaataaaacgtcgctaccaaaaaataatcgaccgttactaacaacttaataataccaacccaatcctatttatccacgacgttaacgctaacgatctttctaacgccataccgaaactaataaacgacgacgaacgcgacgataaatttaaactacgcgaaattctaaacgacgaaccgaacataaacccgctaaaaatctaatataacgaatcccaaaaacgctacgtactaacgattactaccgatcaattaccgctatttaacgaactatataaacgtaaacgcgcaccctacgcgataattaataaaacgaccgaaaaactacatctttctctacacgatcgtcattttaataatcaaccgatcgatctaccgctaaacgtcctacttaataaaacgccgaaaataacccgcgatatacaaacgctaaaaacgaaaaacgacgcgctaacccgtaaaaaaatcaccattacaaacgcgataaaacgtatactacatctaccgactataacgaaaaaaaccttcctaataaccattaacgaccgcaacgtaaccgacataataacgcgcgatcaaatataaaaccgtaacaaataccgatcgctaactacgcgatcactaccgccaacctcgacaactactacgataaaacgataacgattaacgaacgtacgccgattacgctactaaatttcgccgcctctacccgtctaacgatcgataaaacgttnaccaacatcgccgcaacacaaattaacgatatcaaacgcatcaaactttccgccaactaaatacgacgacaaaccaccctaataaaaatacgaacctatattaaaccgttaaaccgtaaacgaaaaactttatccgacgctaacctaacgatcccnataaattaaaactcctatcgataaacccgctacaaaaaat

SEQ ID NO: 15413 - DNA, 628 bp, Artificial Sequence
  chemically treated genomic DNA (Homo sapiens) CpG-island No: 15413
tagtacgttcgttagaaacgcgtttatcgttatcgataagtcgattttttttagtagtaaattaaagttaaatacgaggaataacgttacggtattaaatatttttcgtaagttagagcgggttataaaacgtagcgtcggacgcgtgatatagcgttttagtaatattattagtattagcgtattcgttatttttaacgtcgagagagtaaatgcgtttatcgtcgtcgaggtattgttcgttgttagtagcggaattatcgttattagcgggatcgtcgcgatgattttggaatagtagtatcgtaaaggtattgcgatttatttgcgttattattagattgcgttttatttatcgtttgtatggtaatcgtcgtagaggagagcgttagcgttatgtcgattaatttcgcgatttgttagcgtagtttaagtaatatgtagaatagttttagtaggtcgtcgtaaattattatttgtaatgcgttatagtcgaatattgtcgtacgtagtttttatagtttttgtggatcgagttcgaggtcgataataaatagtattagtattattttatttcggtaagtgtagaatagattcggtatcggttattagtcgtagtttttacggg

SEQ ID NO: 15414 - DNA, 628 bp, Artificial Sequence
  chemically treated genomic DNA (Homo sapiens) CpG-island No: 15414
cccgtaaaaactacgactaataaccgataccgaatctattctacacttaccgaaataaaataatactaatactatttattatcgacctcgaactcgatccacaaaaactataaaaactacgtacgacaatattcgactataacgcattacaaataataatttacgacgacctactaaaactattctacatattacttaaactacgctaacaaatcgcgaaattaatcgacataacgctaacgctctcctctacgacgattaccatacaaacgataaataaaacgcaatctaataataacgcaaataaatcgcaatacctttacgatactactattccaaaatcatcgcgacgatcccgctaataacgataattccgctactaacaacgaacaatacctcgacgacgataaacgcatttactctctcgacgttaaaaataacgaatacgctaatactaataatattactaaaacgctatatcacgcgtccgacgctacgttttataacccgctctaacttacgaaaaatatttaataccgtaacgttattcctcgtatttaactttaatttactactaaaaaaaatcgacttatcgataacgataaacgcgtttctaacgaacgtacta

SEQ ID NO: 15415 - DNA, 628 bp, Artificial Sequence
  chemically treated genomic DNA (Homo sapiens) CpG-island No: 15415
ttcgtgggggttgcgattggtgatcgatgtcgaatttattttgtatttgtcgagatggggtggtgttgatgttgtttattatcggtttcgaattcgatttataaaggttgtggaagttgcgtgcggtagtgttcggttgtggcgtattgtagatggtgatttgcggcggtttgttggggttgttttgtatgttatttgggttgcgttggtaggtcgcggaattgatcggtatgacgttggcgtttttttttacggcgattgttatgtaggcgatgaatgaaacgtaatttgatggtgacgtaaatgggtcgtagtgtttttgcggtgttgttgttttaggattatcgcggcgatttcgttggtggcgatgatttcgttattggtaacgagtagtgtttcgacgacgatgggcgtatttgttttttcggcgttaaaagtggcgggtgcgttggtgttggtggtattgttggggcgttatgttacgcgttcggcgttgcgttttgtagttcgttttggtttgcgggaagtgtttagtgtcgtggcgttatttttcgtgtttggttttggtttgttgttggaagaggtcggtttgtcgatggcgatgggcgcgtttttggcgggcgtattg

SEQ ID NO: 15416 - DNA, 628 bp, Artificial Sequence
  chemically treated genomic DNA (Homo sapiens) CpG-island No: 15416
caatacgcccgccaaaaacgcgcccatcgccatcgacaaaccgacctcttccaacaacaaaccaaaaccaaacacgaaaaataacgccacgacactaaacacttcccgcaaaccaaaacgaactacaaaacgcaacgccgaacgcgtaacataacgccccaacaataccaccaacaccaacgcacccgccacttttaacgccgaaaaaacaaatacgcccatcgtcgtcgaaacactactcgttaccaataacgaaatcatcgccaccaacgaaatcgccgcgataatcctaaaacaacaacaccgcaaaaacactacgacccatttacgtcaccatcaaattacgtttcattcatcgcctacataacaatcgccgtaaaaaaaaacgccaacgtcataccgatcaattccgcgacctaccaacgcaacccaaataacatacaaaacaaccccaacaaaccgccgcaaatcaccatctacaatacgccacaaccgaacactaccgcacgcaacttccacaacctttataaatcgaattcgaaaccgataataaacaacatcaacaccaccccatctcgacaaatacaaaataaattcgacatcgatcaccaatcgcaacccccacgaa

SEQ ID NO: 15417 - DNA, 604 bp, Artificial Sequence
  chemically treated genomic DNA (Homo sapiens) CpG-island No: 15417
tatcggtttttttgaatcgttacggtttagaatgttgtcgaggaacgattgttcggttttacggttgaaaatgtttttttttttaaagcgcgagaaagtatttgtcgttagtacgttagtttataggtagttgtagtaatttgcggtataattatcggcgaaaatatggttgaaagcgtgcgggaaacggttttaggacggagatggtattacggtaattagttttttgatttttgttagagtttcgaggatttttgttttttgattcgggcggaattcggtatgaaggcggaaattaaataggtcgaattttagttgacgtagaataaatagcgtcgtttggtagtttttcgtcgttagtattttatttagtaattttttcggtagcggttcgtcggttttatagtgattagagataaacgttagcgttttcggtttttagtattagttttttataaattgattcggtagttcgatcgtattttacggatatcgttatatcggaaatattagcggtttcgatgcgggttagtatatggtgtaggtcgtgatcgaattcgtggaagagggtgattatttcgtcgtgagtgaatagcgttagttt

SEQ ID NO: 15418 - DNA, 604 bp, Artificial Sequence
  chemically treated genomic DNA (Homo sapiens) CpG-island No: 15418
aaactaacgctattcactcacgacgaaataatcaccctcttccacgaattcgatcacgacctacaccatatactaacccgcatcgaaaccgctaatatttccgatataacgatatccgtaaaatacgatcgaactaccgaatcaatttataaaaaactaatactaaaaaccgaaaacgctaacgtttatctctaatcactataaaaccgacgaaccgctaccgaaaaaattactaaataaaatactaacgacgaaaaactaccaaacgacgctatttattctacgtcaactaaaattcgacctatttaatttccgccttcataccgaattccgcccgaatcaaaaaacaaaaatcctcgaaactctaacaaaaatcaaaaaactaattaccgtaataccatctccgtcctaaaaccgtttcccgcacgctttcaaccatattttcgccgataattataccgcaaattactacaactacctataaactaacgtactaacgacaaatactttctcgcgctttaaaaaaaaaaacattttcaaccgtaaaaccgaacaatcgttcctcgacaacattctaaaccgtaacgattcaaaaaaaccgata

SEQ ID NO: 15419 - DNA, 604 bp, Artificial Sequence
  chemically treated genomic DNA (Homo sapiens) CpG-island No: 15419
aaattggcgttgtttatttacgacgaagtgattatttttttttacgagttcggttacggtttgtattatatgttgattcgtatcgaaatcgttggtgttttcggtatagcggtgttcgtgggatgcggtcgaattgtcgagttagtttatggaaaattggtgttgggagtcggaggcgttggcgtttatttttggttattatgaaatcggcgaatcgttgtcgaaagagttgttggataaaatgttggcggcgaagaattattaggcggcgttgtttattttgcgttagttggagttcggtttgtttgattttcgtttttatgtcgagtttcgttcggattagggggtaaaaattttcgaaattttggtagaaattaagaaattggttgtcgtggtgttattttcgttttggggtcgtttttcgtacgtttttagttatattttcgtcggtggttatgtcgtaggttattatagttatttgtgggttgacgtattggcggtagatgttttttcgcgttttgaggaagagggtatttttaatcgtgaaatcgggtagtcgtttttcgataatattttgagtcgtggcggtttagaagagtcgatg

SEQ ID NO: 15420 - DNA, 604 bp, Artificial Sequence
  chemically treated genomic DNA (Homo sapiens) CpG-island No: 15420
catcgactcttctaaaccgccacgactcaaaatattatcgaaaaacgactacccgatttcacgattaaaaataccctcttcctcaaaacgcgaaaaaacatctaccgccaatacgtcaacccacaaataactataataacctacgacataaccaccgacgaaaatataactaaaaacgtacgaaaaacgaccccaaaacgaaaataacaccacgacaaccaatttcttaatttctaccaaaatttcgaaaatttttaccccctaatccgaacgaaactcgacataaaaacgaaaatcaaacaaaccgaactccaactaacgcaaaataaacaacgccgcctaataattcttcgccgccaacattttatccaacaactctttcgacaacgattcgccgatttcataataaccaaaaataaacgccaacgcctccgactcccaacaccaattttccataaactaactcgacaattcgaccgcatcccacgaacaccgctataccgaaaacaccaacgatttcgatacgaatcaacatataatacaaaccgtaaccgaactcgtaaaaaaaaataatcacttcgtcgtaaataaacaacgccaattt

SEQ ID NO: 15421 - DNA, 768 bp, Artificial Sequence
  chemically treated genomic DNA (Homo sapiens) CpG-island No: 15421
tgtagtcgcgatcgcgagtcgattattttttgtcgtttgggcggtattggtagtagtaagtagatttttattgtttatgtcgtgaagattgattttttgttaggtcgtcgtgcggtggcgtatttttaatttgatacgtttgataggttatcgtacgatgttgttaggcgttcggttgtcgttgttcggtttgaagttatgtatataacgttatatcgggtagcgtgtttcgatatattttgttagacggttttaggcggcggtatcgtaggaaggcgatatatcgtttagtaagcgaattattgtcgggtaattatttgtaatattcggtaattgattttgttattgacgttgtttcgttagcggtaagggtttcgataaaatcgttattttcgtcggcgttgttaggtaaggatgattttttagtagagacgttagtcgcgttattaaagtttggttgatacgcgtatcgttttggaaaggatagcgttgtagtaataaatcggtagtttcgcgtgattgttcgttttgtattagttgttaggttagttgatttaggcgggtaagatttgtcggtttttgttgatatagtaatcgtgttagacgtagagttttagttttgttacgggtcgttacgttgatagtataacgttttttaagtattttattggcggggagggtggcgagtagtttttgcgttgcgtcgtattgatttttttttaatagtatcggtagcgtcgcgttataatatattggcggtgtcggtaa

SEQ ID NO: 15422 - DNA, 768 bp, Artificial Sequence
  chemically treated genomic DNA (Homo sapiens) CpG-island No: 15422
ttaccgacaccgccaatatattataacgcgacgctaccgatactattaaaaaaaaatcaatacgacgcaacgcaaaaactactcgccaccctccccgccaataaaatacttaaaaaacgttatactatcaacgtaacgacccgtaacaaaactaaaactctacgtctaacacgattactatatcaacaaaaaccgacaaatcttacccgcctaaatcaactaacctaacaactaatacaaaacgaacaatcacgcgaaactaccgatttattactacaacgctatcctttccaaaacgatacgcgtatcaaccaaactttaataacgcgactaacgtctctactaaaaaatcatccttacctaacaacgccgacgaaaataacgattttatcgaaacccttaccgctaacgaaacaacgtcaataacaaaatcaattaccgaatattacaaataattacccgacaataattcgcttactaaacgatatatcgccttcctacgataccgccgcctaaaaccgtctaacaaaatatatcgaaacacgctacccgatataacgttatatacataacttcaaaccgaacaacgacaaccgaacgcctaacaacatcgtacgataacctatcaaacgtatcaaattaaaaatacgccaccgcacgacgacctaacaaaaaatcaatcttcacgacataaacaataaaaatctacttactactaccaataccgcccaaacgacaaaaaataatcgactcgcgatcgcgactaca

SEQ ID NO: 15423 - DNA, 768 bp, Artificial Sequence
  chemically treated genomic DNA (Homo sapiens) CpG-island No: 15423
ttgtcgatatcgttagtatgttgtggcgcgacgttatcggtgttgttaaaagaaggttagtacgacgtagcgtaaaaattgttcgttatttttttcgttaatgaaatgtttgaggagcgttatgttgttagcgtggcgattcgtaataaggttgaagttttgcgtttggtacgattgttgtattagtaagaatcggtaaattttattcgtttggattaattaatttggtaattgatgtagaacgagtagttacgcgaagttgtcgatttattgttgtaacgttattttttttagggcgatgcgcgtgttagttagattttaatggcgcgattggcgtttttgttggaaagttatttttatttggtaacgtcggcgaaggtggcgattttatcgaaatttttatcgttggcggagtaacgttagtggtaaagttagttgtcgggtattgtagataattgttcggtaatagttcgtttgttgggcgatatgtcgtttttttacgatgtcgtcgtttggaatcgtttggtaaagtgtatcgggatacgttattcggtgtggcgttgtatgtatggttttaggtcgaataacgataatcgagcgtttggtaatatcgtgcggtagtttattaggcgtattaggttgaggatacgttatcgtacggcggtttggtagaaaattagtttttacgatatgagtaatgaggatttgtttgttgttgttaatatcgtttaggcggtaggaaatggtcggttcgcgatcgcggttata

SEQ ID NO: 15424 - DNA, 768 bp, Artificial Sequence
  chemically treated genomic DNA (Homo sapiens) CpG-island No: 15424
tataaccgcgatcgcgaaccgaccatttcctaccgcctaaacgatattaacaacaacaaacaaatcctcattactcatatcgtaaaaactaattttctaccaaaccgccgtacgataacgtatcctcaacctaatacgcctaataaactaccgcacgatattaccaaacgctcgattatcgttattcgacctaaaaccatacatacaacgccacaccgaataacgtatcccgatacactttaccaaacgattccaaacgacgacatcgtaaaaaaacgacatatcgcccaacaaacgaactattaccgaacaattatctacaatacccgacaactaactttaccactaacgttactccgccaacgataaaaatttcgataaaatcgccaccttcgccgacgttaccaaataaaaataactttccaacaaaaacgccaatcgcgccattaaaatctaactaacacgcgcatcgccctaaaaaaaataacgttacaacaataaatcgacaacttcgcgtaactactcgttctacatcaattaccaaattaattaatccaaacgaataaaatttaccgattcttactaatacaacaatcgtaccaaacgcaaaacttcaaccttattacgaatcgccacgctaacaacataacgctcctcaaacatttcattaacgaaaaaaataacgaacaatttttacgctacgtcgtactaaccttcttttaacaacaccgataacgtcgcgccacaacatactaacgatatcgacaa

SEQ ID NO: 15425 - DNA, 798 bp, Artificial Sequence
  chemically treated genomic DNA (Homo sapiens) CpG-island No: 15425
ttggacgtcgggtatttttattcgattgaagtgattttcgataagattttcgtcgttatgttgtatgtgtcgtagttgttgttgtacgttagtcgttcggttcgttgggatagcgattacgtagtgttgttggatgatgaaatttaggtaattgttagtgagattgtgcgttacgatttgtttgatcgggtgtatatcggttttgattttttcgatgtttttattaatcgtattgtcgcgtgggttattggtatacgtaatatgaaaaaagttttgttgcgtgcgttgttggaatttatcgttgagttgcgtaagttggaagcggcgggcgattatattgcgcgtttggtattgttggaagagtagaaatcgttgtcgtggtaggcggtttgggaaatgtattgttaacgttacgatacgttagtaggtagcgaatggttggagagcgtgcgggtttatgagaaagaaattttgagtcgtcgcgggtaaatattgtcggatgcggcgcgagcgttttattcggtttacgggtcggtaatagttgtaggtttgataagacgcgatagcgtcgtattaggtattgattgtcggatgcggtataagtgttttattcggtttataggtcggtaatagttgtaggtttgataagacgcgatagcgtcgtattaggtattgattgtcggatgcggtataagtgttttattcggtttataggtcggtaatagttgtaggtttgataagacgcgatagcgtcgtattaggtattgattgcggatgcggtataagtgtttattaagg

SEQ ID NO: 15426 - DNA, 798 bp, Artificial Sequence
  chemically treated genomic DNA (Homo sapiens) CpG-island No: 15426
ccttaataaacacttataccgcatccgcaatcaatacctaatacgacgctatcgcgtcttatcaaacctacaactattaccgacctataaaccgaataaaacacttataccgcatccgacaatcaatacctaatacgacgctatcgcgtcttatcaaacctacaactattaccgacctataaaccgaataaaacacttataccgcatccgacaatcaatacctaatacgacgctatcgcgtcttatcaaacctacaactattaccgacccgtaaaccgaataaaacgctcgcgccgcatccgacaatatttacccgcgacgactcaaaatttctttctcataaacccgcacgctctccaaccattcgctacctactaacgtatcgtaacgttaacaatacatttcccaaaccgcctaccacgacaacgatttctactcttccaacaataccaaacgcgcaatataatcgcccgccgcttccaacttacgcaactcaacgataaattccaacaacgcacgcaacaaaacttttttcatattacgtataccaataacccacgcgacaatacgattaataaaaacatcgaaaaaatcaaaaccgatatacacccgatcaaacaaatcgtaacgcacaatctcactaacaattacctaaatttcatcatccaacaacactacgtaatcgctatcccaacgaaccgaacgactaacgtacaacaacaactacgacacatacaacataacgacgaaaatcttatcgaaaatcacttcaatcgaataaaaatacccgacgtccaa

SEQ ID NO: 15427 - DNA, 798 bp, Artificial Sequence
  chemically treated genomic DNA (Homo sapiens) CpG-island No: 15427
ttttgataagtatttgtgtcgtattcgtaattaatgtttgatgcgacgttgtcgcgttttattaggtttataattgttgtcgatttgtaggtcggataaggtatttgtgtcgtattcggtaattaatgtttgatgcgacgttgtcgcgttttattaggtttataattattgtcgatttgtaggtcggataaggtatttgtgtcgtattcggtaattaatgtttgatgcgacgttgtcgcgttttattaggtttataattgttgtcgattcgtaggtcggataaggcgttcgcgtcgtattcggtagtgtttattcgcggcgatttaaaattttttttttataagttcgtacgttttttagttattcgttatttgttggcgtatcgtgacgttggtaatatattttttagatcgtttgttacggtaacgatttttgtttttttagtagtgttagacgcgtagtgtaatcgttcgtcgtttttagtttgcgtagtttagcggtaggttttagtaacgtacgtagtagggttttttttatattgcgtgtattaatgatttacgcggtaatgcggttgatagaggtatcgaagaagttaaggtcgatatgtattcggttaaatagatcgtgacgtataattttattggtaattgtttgggttttattatttagtagtattacgtgatcgttgttttagcgaatcggacggttgacgtgtagtagtaattgcggtatatatagtatggcggcggaaattttgtcggaaattattttagtcgggtggaagtgttcggcgtttag

SEQ ID NO: 15428 - DNA, 798 bp, Artificial Sequence
  chemically treated genomic DNA (Homo sapiens) CpG-island No: 15428
ctaaacgccgaacacttccacccgactaaaataatttccgacaaaatttccgccgccatactatatataccgcaattactactacacgtcaaccgtccgattcgctaaaacaacgatcacgtaatactactaaataataaaacccaaacaattaccaataaaattatacgtcacgatctatttaaccgaatacatatcgaccttaacttcttcgatacctctatcaaccgcattaccgcgtaaatcattaatacacgcaatataaaaaaaaccctactacgtacgttactaaaacctaccgctaaactacgcaaactaaaaacgacgaacgattacactacgcgtctaacactactaaaaaaacaaaaatcgttaccgtaacaaacgatctaaaaaatatattaccaacgtcacgatacgccaacaaataacgaataactaaaaaacgtacgaacttataaaaaaaaaattttaaatcgccgcgaataaacactaccgaatacgacgcgaacgccttatccgacctacgaatcgacaacaattataaacctaataaaacgcgacaacgtcgcatcaaacattaattaccgaatacgacacaaataccttatccgacctacaaatcgacaataattataaacctaataaaacgcgacaacgtcgcatcaaacattaattaccgaatacgacacaaataccttatccgacctacaaatcgacaacaattataaacctaataaaacgcgacaacgtcgcatcaaacattaattacgaatacgacacaaatacttatcaaaa

SEQ ID NO: 15429 - DNA, 528 bp, Artificial Sequence
  chemically treated genomic DNA (Homo sapiens) CpG-island No: 15429
gcgcgtgtcgttatcgtgatggggtttaaaagcgattgggttattatgtagttcgtcgtcgaaattttcgaaattttgaatgtttcgtattacgttgaagtggtttttgtttatcgtattttcgataaattgtttagtttcgtcgaaagcgtcgaagagaacggttattaggtgattattgcgggcgtaggcggcgtagtcgtatttgttaggtatgattgtcgttaaaacgttggtgtcggtgttgggcgtgttagtatagagcgtcgtattgagcggtgtcgatagtttttattttatcgtataaatgtcgcgcggtatttcggtgggtacgttggcgattggtaaagttggcgcggtaaacgcggcgttattggtagtataaatttttgcgatttatgataagaattgtattagcgtttgaatgattggcgtaaagtttagatcgacgaagtgttggaaaattcggattcgcgaggtgcggtatgaaataggtttgcgttttcggtaacgggtagttaggtcgta

SEQ ID NO: 15430 - DNA, 528 bp, Artificial Sequence
  chemically treated genomic DNA (Homo sapiens) CpG-island No: 15430
tacgacctaactacccgttaccgaaaacgcaaacctatttcataccgcacctcgcgaatccgaattttccaacacttcgtcgatctaaactttacgccaatcattcaaacgctaatacaattcttatcataaatcgcaaaaatttatactaccaataacgccgcgtttaccgcgccaactttaccaatcgccaacgtacccaccgaaataccgcgcgacatttatacgataaaataaaaactatcgacaccgctcaatacgacgctctatactaacacgcccaacaccgacaccaacgttttaacgacaatcatacctaacaaatacgactacgccgcctacgcccgcaataatcacctaataaccgttctcttcgacgctttcgacgaaactaaacaatttatcgaaaatacgataaacaaaaaccacttcaacgtaatacgaaacattcaaaatttcgaaaatttcgacgacgaactacataataacccaatcgcttttaaaccccatcacgataacgacacgcgc

SEQ ID NO: 15431 - DNA, 528 bp, Artificial Sequence
  chemically treated genomic DNA (Homo sapiens) CpG-island No: 15431
tacggtttaattgttcgttatcgaggacgtaaatttgttttatgtcgtatttcgcgggttcgggttttttagtatttcgtcggtttgggttttgcgttagttatttagacgttggtgtagtttttattatgagtcgtaagaatttgtgttgttagtaacgtcgcgtttgtcgcgttagttttattaatcgttagcgtatttatcggaatgtcgcgcggtatttgtacgatggagtagaggttatcgatatcgtttagtgcggcgttttgtattggtacgtttagtatcggtattagcgttttggcggtaattatgtttggtagatgcgattgcgtcgtttgcgttcgtaataattatttgataatcgtttttttcggcgttttcggcgaagttgaatagtttatcgggggtgcggtgagtagaaattattttaacgtggtgcgggatatttaggatttcgaagatttcggcggcgaattgtatggtagtttagtcgtttttggattttattacgatggcgatacgcgt

SEQ ID NO: 15432 - DNA, 528 bp, Artificial Sequence
  chemically treated genomic DNA (Homo sapiens) CpG-island No: 15432
acgcgtatcgccatcgtaataaaatccaaaaacgactaaactaccatacaattcgccgccgaaatcttcgaaatcctaaatatcccgcaccacgttaaaataatttctactcaccgcacccccgataaactattcaacttcgccgaaaacgccgaaaaaaacgattatcaaataattattacgaacgcaaacgacgcaatcgcatctaccaaacataattaccgccaaaacgctaataccgatactaaacgtaccaatacaaaacgccgcactaaacgatatcgataacctctactccatcgtacaaataccgcgcgacattccgataaatacgctaacgattaataaaactaacgcgacaaacgcgacgttactaacaacacaaattcttacgactcataataaaaactacaccaacgtctaaataactaacgcaaaacccaaaccgacgaaatactaaaaaacccgaacccgcgaaatacgacataaaacaaatttacgtcctcgataacgaacaattaaaccgta

SEQ ID NO: 15433 - DNA, 662 bp, Artificial Sequence
  chemically treated genomic DNA (Homo sapiens) CpG-island No: 15433
  unsure (635)
tggcgtattcgcggtagaatggaagttgcgtcgtttgatacgtcggacgtcgaagagttattgcgggagtggttggatgacgattagcgggtaatattgttggagaatggttagttggattttgtcgtgtcgttggcggaaaattagcgattgcgtggtagcgtattcgcgtaacggtatggtatttcgttggcgttacggttgttattttcgtattgttcgtagttcgaatagtttggcgtattaacggtattgtcggaattatttaagagcgagaatggtttgattttggtgacgggggcgacggggagtggtaaatttattacgttggcggcgatggtggttattttaattaaatgtcgatgcgtatttttgacgttgaagattttgtgatattttttgttagttacgagtttgtttttcggggaaatggttgtttgtttgttcgttcggatgcggttattggggagattgaggatagtcgaatttgtacggaaaatcgtggttacgggtaacggattgtgggattatatcgtttcgcggatatcgggaaacggagaattcgtagggagaagcggttcggatagggaggttttaaacggtcggtttttttggttcgtttttttttttatatnggataaagaggtgaaaaaagtttttta

SEQ ID NO: 15434 - DNA, 662 bp, Artificial Sequence
  chemically treated genomic DNA (Homo sapiens) CpG-island No: 15434
  unsure (28)
taaaaaacttttttcacctctttatccnatataaaaaaaaaaacgaaccaaaaaaaccgaccgtttaaaacctccctatccgaaccgcttctccctacgaattctccgtttcccgatatccgcgaaacgatataatcccacaatccgttacccgtaaccacgattttccgtacaaattcgactatcctcaatctccccaataaccgcatccgaacgaacaaacaaacaaccatttccccgaaaaacaaactcgtaactaacaaaaaatatcacaaaatcttcaacgtcaaaaatacgcatcgacatttaattaaaataaccaccatcgccgccaacgtaataaatttaccactccccgtcgcccccgtcaccaaaatcaaaccattctcgctcttaaataattccgacaataccgttaatacgccaaactattcgaactacgaacaatacgaaaataacaaccgtaacgccaacgaaataccataccgttacgcgaatacgctaccacgcaatcgctaattttccgccaacgacacgacaaaatccaactaaccattctccaacaatattacccgctaatcgtcatccaaccactcccgcaataactcttcgacgtccgacgtatcaaacgacgcaacttccattctaccgcgaatacgcca

SEQ ID NO: 15435 - DNA, 662 bp, Artificial Sequence
  chemically treated genomic DNA (Homo sapiens) CpG-island No: 15435
  unsure (28)
tgggaggttttttttatttttttgtttnatataagaagagaagcgaattaaaagggtcgatcgtttaaagtttttttattcggatcgtttttttttacgggtttttcgtttttcggtattcgcggaacggtgtagttttatagttcgttgttcgtagttacggtttttcgtataggttcggttatttttagtttttttaatggtcgtattcgagcgagtaaataggtaattattttttcgggggataaattcgtggttggtaagagatattataggatttttagcgttagaaatgcgtatcggtatttgattgagatagttattatcgtcgttagcgtggtagatttgttatttttcgtcgttttcgttattagaattaggttattttcgtttttgagtaatttcggtaatatcgttggtgcgttaagttgttcgagttgcgggtagtgcgaaggtaatagtcgtaacgttagcgaaatgttatgtcgttgcgcgaatgcgttgttacgtaatcgttggtttttcgttagcgatacggtaaaatttagttgattattttttagtaatattgttcgttgatcgttatttagttattttcgtagtagtttttcgacgttcggcgtattaaacggcgtagtttttattttgtcgcgaatgcgtta

SEQ ID NO: 15436 - DNA, 662 bp, Artificial Sequence
  chemically treated genomic DNA (Homo sapiens) CpG-island No: 15436
  unsure (635)
taacgcattcgcgacaaaataaaaactacgccgtttaatacgccgaacgtcgaaaaactactacgaaaataactaaataacgatcaacgaacaatattactaaaaaataatcaactaaattttaccgtatcgctaacgaaaaaccaacgattacgtaacaacgcattcgcgcaacgacataacatttcgctaacgttacgactattaccttcgcactacccgcaactcgaacaacttaacgcaccaacgatattaccgaaattactcaaaaacgaaaataacctaattctaataacgaaaacgacgaaaaataacaaatctaccacgctaacgacgataataactatctcaatcaaataccgatacgcatttctaacgctaaaaatcctataatatctcttaccaaccacgaatttatcccccgaaaaaataattacctatttactcgctcgaatacgaccattaaaaaaactaaaaataaccgaacctatacgaaaaaccgtaactacgaacaacgaactataaaactacaccgttccgcgaataccgaaaaacgaaaaacccgtaaaaaaaaacgatccgaataaaaaaactttaaacgatcgacccttttaattcgcttctcttcttatatnaaacaaaaaaataaaaaaaacctccca

SEQ ID NO: 15437 - DNA, 856 bp, Artificial Sequence
  chemically treated genomic DNA (Homo sapiens) CpG-island No: 15437
ttttttatcgtttcgtttttattttatttttagtaatttttttaagatttttaggttcgttttcgttttttcgatttttgtcgtcgcgttttttattagtttttagtttcgttttttttttgcgtagtttttaaaggtaggtttcgagttcgagtcgttaattcgaggttgtttggtatttatttggtttcggtcgtcgcgcgtcgtcggtttcgggtcgggttttcggtcggacgatcgtttgttagttcgtcgttgttcgagtcgtttcgtttcgtcgcgttcgtcgttttttcgcgcgttttcgttttcgggtttcggagaggcggggacgggggcgtgacgttagcgtttttaggggcggggtatcgcgaaaagtttcgtttttattgttcgatagattaggttttatttatcgtttttatttattatcgtcgatggtgggcgagattaagtgcgaggggaggataggcgaagcgcgcgtttggggtcgcgttttttatatttagtcggcgttgttttacgtttcgtagttattttttttgcgtttttataaatggttcgattcgtaagtaagggggcgggttcggttttgaaaagtcggcgggtcgggttttgaggtggaaggcgggaaaatggcggatttttcggggcgaggcgttgggtgagttggggttttcgtaggtttggatttgtagacgttatagggttggagaggatgggtagcggaggtggggagttaggattttcggggtgagttcgggttcgatttcgttaggaattgcgcgggtttttgaagatttcgatggcgtgttgtttttgcgtatgtttcggagcgttgatattcgatcggttt

SEQ ID NO: 15438 - DNA, 856 bp, Artificial Sequence
  chemically treated genomic DNA (Homo sapiens) CpG-island No: 15438
aaaccgatcgaatatcaacgctccgaaacatacgcaaaaacaacacgccatcgaaatcttcaaaaacccgcgcaattcctaacgaaatcgaacccgaactcaccccgaaaatcctaactccccacctccgctacccatcctctccaaccctataacgtctacaaatccaaacctacgaaaaccccaactcacccaacgcctcgccccgaaaaatccgccattttcccgccttccacctcaaaacccgacccgccgacttttcaaaaccgaacccgcccccttacttacgaatcgaaccatttataaaaacgcaaaaaaaataactacgaaacgtaaaacaacgccgactaaatataaaaaacgcgaccccaaacgcgcgcttcgcctatcctcccctcgcacttaatctcgcccaccatcgacgataataaataaaaacgataaataaaacctaatctatcgaacaataaaaacgaaacttttcgcgataccccgcccctaaaaacgctaacgtcacgcccccgtccccgcctctccgaaacccgaaaacgaaaacgcgcgaaaaaacgacgaacgcgacgaaacgaaacgactcgaacaacgacgaactaacaaacgatcgtccgaccgaaaacccgacccgaaaccgacgacgcgcgacgaccgaaaccaaataaataccaaacaacctcgaattaacgactcgaactcgaaacctacctttaaaaactacgcaaaaaaaaaacgaaactaaaaactaataaaaaacgcgacgacaaaaatcgaaaaaacgaaaacgaacctaaaaatcttaaaaaaattactaaaaataaaataaaaacgaaacgataaaaaa

SEQ ID NO: 15439 - DNA, 856 bp, Artificial Sequence
  chemically treated genomic DNA (Homo sapiens) CpG-island No: 15439
gggtcggtcgggtgttagcgtttcggagtatgcgtagaggtagtacgttatcggggtttttaggggttcgcgtagtttttggcggggtcgaattcgaatttatttcgagggttttaattttttattttcgttgtttattttttttagttttatggcgtttataaatttagatttgcggaagttttaatttatttagcgtttcgtttcgaggaattcgttattttttcgttttttattttaaggttcgattcgtcggttttttaaagtcggattcgtttttttgtttgcgggtcggattatttgtggagacgtaggaggggtggttgcgaggcgtgaggtagcgtcggttaagtgtggagagcgcggttttagacgcgcgtttcgtttgtttttttttcgtatttggtttcgtttattatcggcggtagtgggtaggggcggtgggtgggatttgatttgtcggatagtaggggcggggtttttcgcgatgtttcgtttttaggagcgttggcgttacgttttcgttttcgttttttcggaattcggaagcgggagcgcgcgggggagcggcgggcgcggcggggcggagcggttcgagtagcggcgggttggtaggcggtcgttcggtcggggattcggttcgggatcggcggcgcgcggcggtcgaggttaggtgagtattaggtagtttcgggttggcgattcgagttcgaagtttgtttttgggggttgcgtagaagagggacggagttgagggttgatgggggacgcgacggtaggggtcgagggggcgggaacgagtttgggggttttggagagattgttggggatgaggtggaagcgagacggtgaagga

SEQ ID NO: 15440 - DNA, 856 bp, Artificial Sequence
  chemically treated genomic DNA (Homo sapiens) CpG-island No: 15440
tccttcaccgtctcgcttccacctcatccccaacaatctctccaaaacccccaaactcgttcccgccccctcgacccctaccgtcgcgtcccccatcaaccctcaactccgtccctcttctacgcaacccccaaaaacaaacttcgaactcgaatcgccaacccgaaactacctaatactcacctaacctcgaccgccgcgcgccgccgatcccgaaccgaatccccgaccgaacgaccgcctaccaacccgccgctactcgaaccgctccgccccgccgcgcccgccgctcccccgcgcgctcccgcttccgaattccgaaaaaacgaaaacgaaaacgtaacgccaacgctcctaaaaacgaaacatcgcgaaaaaccccgcccctactatccgacaaatcaaatcccacccaccgcccctacccactaccgccgataataaacgaaaccaaatacgaaaaaaaaacaaacgaaacgcgcgtctaaaaccgcgctctccacacttaaccgacgctacctcacgcctcgcaaccacccctcctacgtctccacaaataatccgacccgcaaacaaaaaaacgaatccgactttaaaaaaccgacgaatcgaaccttaaaataaaaaacgaaaaaataacgaattcctcgaaacgaaacgctaaataaattaaaacttccgcaaatctaaatttataaacgccataaaactaaaaaaaataaacaacgaaaataaaaaattaaaaccctcgaaataaattcgaattcgaccccgccaaaaactacgcgaacccctaaaaaccccgataacgtactacctctacgcatactccgaaacgctaacacccgaccgaccc

SEQ ID NO: 15441 - DNA, 678 bp, Artificial Sequence
  chemically treated genomic DNA (Homo sapiens) CpG-island No: 15441
atcgagcgtaacgttttcgacgattttaagtcgttggaggagtttaatttgttttataataatttgatgtcgttgttttacgatttttttacgtttttgtatcgtttcgagcgcgtgtattttaattataatttttggtattgtaattgcgacgtgttttggttgagttggtggtttaaggagacggtgtttagtaatacgacgtgttgcgttcgttgttatgcgttcgtcggttttaaggggcgttatattggggagttggattagtcgtattttatttgttatgcgttcgttatcgtggagtcgtttacggattttaacgttatcgagggtatggttgtcgagtttaaatgtcgtacgggtatttttatgattttcgttaattggttgacgtttaacggtatttttatgatttacggtttttatcgcgtgcgtattttcgttttgtatgacggtacgtttaattttattaacgttatcgtgtaggatacgggttagtatacgtgtatggtgacgaatttagtcggtaatattatcgtttcggttacgtttaacgtttcggtcgtggatttcgtggcggtcgggggtatcggtagcggcgggggcggttttgggggtagtggtggtgttggagggggtagtggcggttatatttattttattacggtgatcgtggag

SEQ ID NO: 15442 - DNA, 678 bp, Artificial Sequence
  chemically treated genomic DNA (Homo sapiens) CpG-island No: 15442
ctccacgatcaccgtaataaaataaatataaccgccactaccccctccaacaccaccactacccccaaaaccgcccccgccgctaccgatacccccgaccgccacgaaatccacgaccgaaacgttaaacgtaaccgaaacgataatattaccgactaaattcgtcaccatacacgtatactaacccgtatcctacacgataacgttaataaaattaaacgtaccgtcatacaaaacgaaaatacgcacgcgataaaaaccgtaaatcataaaaataccgttaaacgtcaaccaattaacgaaaatcataaaaatacccgtacgacatttaaactcgacaaccataccctcgataacgttaaaatccgtaaacgactccacgataacgaacgcataacaaataaaatacgactaatccaactccccaatataacgccccttaaaaccgacgaacgcataacaacgaacgcaacacgtcgtattactaaacaccgtctccttaaaccaccaactcaaccaaaacacgtcgcaattacaataccaaaaattataattaaaatacacgcgctcgaaacgatacaaaaacgtaaaaaaatcgtaaaacaacgacatcaaattattataaaacaaattaaactcctccaacgacttaaaatcgtcgaaaacgttacgctcgat

SEQ ID NO: 15443 - DNA, 678 bp, Artificial Sequence
  chemically treated genomic DNA (Homo sapiens) CpG-island No: 15443
ttttacggttatcgtggtgaagtaggtgtagtcgttattgttttttttaatattattattgtttttagggtcgttttcgtcgttgtcggtgttttcggtcgttacggggtttacggtcgagacgttgagcgtggtcgaggcggtggtgttgtcggttgagttcgttattatgtacgtgtattggttcgtgttttgtacggtgacgttggtgaagttaagcgtgtcgttatgtaggacggagatgcgtacgcggtaggagtcgtgggttatgagggtgtcgttgggcgttagttagttgacggaggttatggaggtgttcgtgcggtatttgagttcggtagttatgttttcggtgacgttgaggttcgtgggcggttttacgatgacgggcgtatagtaggtgaaatgcgattggtttagttttttaatgtagcgttttttgaggtcggcgggcgtatgatagcgggcgtagtacgtcgtgttgttgggtatcgtttttttgagttattagtttagttagagtacgtcgtagttgtaatgttaggggttgtggttgaggtgtacgcgttcgaggcggtgtaggggcgtgaagaggtcgtggggtagcgatattaggttgttgtgggataggttgagtttttttagcgatttgaggtcgtcgaaggcgttgcgttcgat

SEQ ID NO: 15444 - DNA, 678 bp, Artificial Sequence
  chemically treated genomic DNA (Homo sapiens) CpG-island No: 15444
atcgaacgcaacgccttcgacgacctcaaatcgctaaaaaaactcaacctatcccacaacaacctaatatcgctaccccacgacctcttcacgcccctacaccgcctcgaacgcgtacacctcaaccacaacccctaacattacaactacgacgtactctaactaaactaataactcaaaaaaacgatacccaacaacacgacgtactacgcccgctatcatacgcccgccgacctcaaaaaacgctacattaaaaaactaaaccaatcgcatttcacctactatacgcccgtcatcgtaaaaccgcccacgaacctcaacgtcaccgaaaacataactaccgaactcaaataccgcacgaacacctccataacctccgtcaactaactaacgcccaacgacaccctcataacccacgactcctaccgcgtacgcatctccgtcctacataacgacacgcttaacttcaccaacgtcaccgtacaaaacacgaaccaatacacgtacataataacgaactcaaccgacaacaccaccgcctcgaccacgctcaacgtctcgaccgtaaaccccgtaacgaccgaaaacaccgacaacgacgaaaacgaccctaaaaacaataataatattaaaaaaaacaataacgactacacctacttcaccacgataaccgtaaaa

SEQ ID NO: 15445 - DNA, 674 bp, Artificial Sequence
  chemically treated genomic DNA (Homo sapiens) CpG-island No: 15445
tttatttcgtttttataatagtgttaagaggtcggcgtcgttattatttcgcgtttatacggtttaataggaaggttaggaaatgtttaaggtttcggtcgtggttaaatcgcgcgcggatttaggggttttagtttcgtcgtcgtcgcgatttatatttgtcggagtttttagtagggttttatcgtttcgtaggcgtttcgagttcgcgttttcgcggatttgacgcgtcgcgtagttggtgagcgggtaacggcggtcgattttcgggaacgatattgttttaaatcgttttttagtttggaagtcgtcgttaggtttgaagttatcgcgggattgatttagtgtatcgtttacggcgaattatattttttagaattttttttttgcggtataaatgtttcggaagtcgcgaatcgtcggtattcgaagattatattttttaagggtttttgcggttgcgcggatttggtgcgtcgcgggtaaatcggttacggttttgtaagtagtttaatcgtttggggtcgtcgatttagagtcggttagttaggattatgcgtaaattgttttggggtatatagtcgttttttggtgaacgatataattcgaaattaagggatattttttatttataagggttatggcgttcggattaagaaattatattttttaga

SEQ ID NO: 15446 - DNA, 674 bp, Artificial Sequence
  chemically treated genomic DNA (Homo sapiens) CpG-island No: 15446
tctaaaaaatataatttcttaatccgaacgccataacccttataaataaaaaatatcccttaatttcgaattatatcgttcaccaaaaaacgactatataccccaaaacaatttacgcataatcctaactaaccgactctaaatcgacgaccccaaacgattaaactacttacaaaaccgtaaccgatttacccgcgacgcaccaaatccgcgcaaccgcaaaaacccttaaaaaatataatcttcgaataccgacgattcgcgacttccgaaacatttataccgcaaaaaaaaaattctaaaaaatataattcgccgtaaacgatacactaaatcaatcccgcgataacttcaaacctaacgacgacttccaaactaaaaaacgatttaaaacaatatcgttcccgaaaatcgaccgccgttacccgctcaccaactacgcgacgcgtcaaatccgcgaaaacgcgaactcgaaacgcctacgaaacgataaaaccctactaaaaactccgacaaatataaatcgcgacgacgacgaaactaaaacccctaaatccgcgcgcgatttaaccacgaccgaaaccttaaacatttcctaaccttcctattaaaccgtataaacgcgaaataataacgacgccgacctcttaacactattataaaaacgaaataaa

SEQ ID NO: 15447 - DNA, 674 bp, Artificial Sequence
  chemically treated genomic DNA (Homo sapiens) CpG-island No: 15447
tttgggaaatgtaattttttggttcgggcgttatggtttttataagtagagggtgttttttggtttcgagttgtatcgtttattagaggacgattgtgtgttttaggataatttgcgtatggttttagttggtcggttttaggtcgacggttttaggcggttaagttatttataaagtcgtgatcggtttgttcgcggcgtattaggttcgcgtagtcgtagagatttttgggaagtgtggttttcgggtgtcggcggttcgcggttttcgggatatttgtatcgtagggggaggattttgggaaatgtggttcgtcgtgggcggtgtattgggttagtttcgcgatagttttaggtttggcggcggtttttaagttaaggaacggtttggggtagtgtcgttttcggaggtcggtcgtcgttattcgtttattagttacgcggcgcgttaggttcgcggaggcgcgggttcggggcgtttgcgggacggtgaggttttgttgaggatttcggtaagtgtgggtcgcggcgacggcggggttaaggtttttgggttcgcgcgcggtttgattacggtcggggttttgggtattttttggtttttttgttgagtcgtgtaaacgcggggtgatgacggcgtcgattttttggtattgttgtgagagcgaagtggg

SEQ ID NO: 15448 - DNA, 674 bp, Artificial Sequence
  chemically treated genomic DNA (Homo sapiens) CpG-island No: 15448
cccacttcgctctcacaacaataccaaaaaatcgacgccgtcatcaccccgcgtttacacgactcaacaaaaaaaccaaaaaatacccaaaaccccgaccgtaatcaaaccgcgcgcgaacccaaaaaccttaaccccgccgtcgccgcgacccacacttaccgaaatcctcaacaaaacctcaccgtcccgcaaacgccccgaacccgcgcctccgcgaacctaacgcgccgcgtaactaataaacgaataacgacgaccgacctccgaaaacgacactaccccaaaccgttccttaacttaaaaaccgccgccaaacctaaaactatcgcgaaactaacccaatacaccgcccacgacgaaccacatttcccaaaatcctccccctacgatacaaatatcccgaaaaccgcgaaccgccgacacccgaaaaccacacttcccaaaaatctctacgactacgcgaacctaatacgccgcgaacaaaccgatcacgactttataaataacttaaccgcctaaaaccgtcgacctaaaaccgaccaactaaaaccatacgcaaattatcctaaaacacacaatcgtcctctaataaacgatacaactcgaaaccaaaaaacaccctctacttataaaaaccataacgcccgaaccaaaaaattacatttcccaaa

SEQ ID NO: 15449 - DNA, 739 bp, Artificial Sequence
  chemically treated genomic DNA (Homo sapiens) CpG-island No: 15449
ttggcggtcggtaggttatatattaacgcgtagtcgatagttttcgtagagaaagagaagttcgcgtggatatttagtagcgttgttataaataggttgatatcggttagtagtgcgtgtaggaggtatagtagcggagtaaggaatatgaataggaattttagcggtttagttatatcggttaggaacgtagtaatagtaatagaaagtagtatatcgttaattatcggacgacgttttttcggtgttgcgaaagtatatcgttagcgtcgtattcggtagattcgaatattaatgatcgggaagaagtcggatatgaatattttcgcggtgtcgttatcggtatagaagcggttaatgttatcgtggaaaatcgtattcgtcgcgttggtgaatttattaatttggaattaggcgatggtgtttagtatttgatgtagatcggttgggattagtagacggttgatgaaattaaagatatcggaatttagcgcgttcgtagaaacgatttattcgtcgtttgtatggatagcgtgttgtatcggcggttagacgtaattaaaaatggtcgttagtattaggtagaagaattcggtggtaatcggtataaagcgtttgtcgtcgaagaagtttaggaagttcggtagtttaatatcggattaacggttataggttgcgttattaattagatcggtaatgatattcgttagtatatttatgttaatttttgggttgatgg

SEQ ID NO: 15450 - DNA, 739 bp, Artificial Sequence
  chemically treated genomic DNA (Homo sapiens) CpG-island No: 15450
ccatcaacccaaaaattaacataaatatactaacgaatatcattaccgatctaattaataacgcaacctataaccgttaatccgatattaaactaccgaacttcctaaacttcttcgacgacaaacgctttataccgattaccaccgaattcttctacctaatactaacgaccatttttaattacgtctaaccgccgatacaacacgctatccatacaaacgacgaataaatcgtttctacgaacgcgctaaattccgatatctttaatttcatcaaccgtctactaatcccaaccgatctacatcaaatactaaacaccatcgcctaattccaaattaataaattcaccaacgcgacgaatacgattttccacgataacattaaccgcttctataccgataacgacaccgcgaaaatattcatatccgacttcttcccgatcattaatattcgaatctaccgaatacgacgctaacgatatactttcgcaacaccgaaaaaacgtcgtccgataattaacgatatactactttctattactattactacgttcctaaccgatataactaaaccgctaaaattcctattcatattccttactccgctactatacctcctacacgcactactaaccgatatcaacctatttataacaacgctactaaatatccacgcgaacttctctttctctacgaaaactatcgactacgcgttaatatataacctaccgaccgccaa

SEQ ID NO: 15451 - DNA, 739 bp, Artificial Sequence
  chemically treated genomic DNA (Homo sapiens) CpG-island No: 15451
ttattaatttagaaattaatatgggtgtattggcgggtattattatcggtttggttggtggcgtagtttataatcgttggttcgatattaaattgtcggattttttgagttttttcggcggtaaacgttttgtgtcgattgttatcggatttttttgtttggtgttggcggttatttttggttacgtttggtcgtcggtatagtacgttatttatgtaggcggcgagtggatcgtttttgcgggcgcgttgggtttcggtatttttggttttattaatcgtttgttgattttaatcggtttgtattaggtattgaatattatcgtttggttttagattggtgaatttattaacgcggcgggtacggttttttacggtgatattaatcgtttttatgtcggtgacggtatcgcggggatgtttatgttcggttttttttcgattattgatgttcgggtttgtcgggtgcggcgttggcgatgtattttcgtagtatcgaaagagcgtcgttcgatggttggcggtatgttgttttttgttgttgttattgcgtttttgatcggtgtgattgagtcgttggaatttttgtttatgttttttgtttcgttgttgtattttttgtacgtattgttgatcggtattagtttgtttgtggtaacgttgttgggtatttacgcgggtttttttttttttgcgggggttatcgattacgcgttgatgtataatttgtcggtcgttag

SEQ ID NO: 15452 - DNA, 739 bp, Artificial Sequence
  chemically treated genomic DNA (Homo sapiens) CpG-island No: 15452
ctaacgaccgacaaattatacatcaacgcgtaatcgataacccccgcaaaaaaaaaaaaacccgcgtaaatacccaacaacgttaccacaaacaaactaataccgatcaacaatacgtacaaaaaatacaacaacgaaacaaaaaacataaacaaaaattccaacgactcaatcacaccgatcaaaaacgcaataacaacaacaaaaaacaacataccgccaaccatcgaacgacgctctttcgatactacgaaaatacatcgccaacgccgcacccgacaaacccgaacatcaataatcgaaaaaaaaccgaacataaacatccccgcgataccgtcaccgacataaaaacgattaatatcaccgtaaaaaaccgtacccgccgcgttaataaattcaccaatctaaaaccaaacgataatattcaatacctaatacaaaccgattaaaatcaacaaacgattaataaaaccaaaaataccgaaacccaacgcgcccgcaaaaacgatccactcgccgcctacataaataacgtactataccgacgaccaaacgtaaccaaaaataaccgccaacaccaaacaaaaaaatccgataacaatcgacacaaaacgtttaccgccgaaaaaactcaaaaaatccgacaatttaatatcgaaccaacgattataaactacgccaccaaccaaaccgataataatacccgccaatacacccatattaatttctaaattaataa

SEQ ID NO: 15453 - DNA, 608 bp, Artificial Sequence
  chemically treated genomic DNA (Homo sapiens) CpG-island No: 15453
  unsure (544)
atgggttatgtgtcgatgagttacggcgtcgatttttatttcggtttgagtcgtaatgtcgttaaagcggcgggtatgatgggtttaacggtagaaatgttggcgcgtatgtacggtattagtcgtgaaatgtaggatgtttttgtcgcgcggttatacgttcgcgtttgggtcgttacgtagtcggtcgtatttaaaaatgaaattatttcgatcggtggttacgatgtcgacggcgttttgaagtagtttaattacgacgaagtgattcgttcggaaattatcgtggaagttttcgttacgttgcgttcggcgtttgatttagtaaacggtatggtaacggcgggtatattttttgtatttttcgatggcgtagttgttatgttggtgatgagtgaaagtcgcgtttatgaattaggttttaagtcgcgcgttcgtgtgcgttcgatggcggtcgttggttgtgatttatcgattatgggttacggttcggtttcggtttcgaaattggcgttgaaaaaagcggggttttttgttagcgaantcggcgtgtttgaaatgaacgaagtttttgtcgcgtagattttgttatgtattaaagatttggg

SEQ ID NO: 15454 - DNA, 608 bp, Artificial Sequence
  chemically treated genomic DNA (Homo sapiens) CpG-island No: 15454
  unsure (65)
cccaaatctttaatacataacaaaatctacgcgacaaaaacttcgttcatttcaaacacgccganttcgctaacaaaaaaccccgcttttttcaacgccaatttcgaaaccgaaaccgaaccgtaacccataatcgataaatcacaaccaacgaccgccatcgaacgcacacgaacgcgcgacttaaaacctaattcataaacgcgactttcactcatcaccaacataacaactacgccatcgaaaaatacaaaaaatatacccgccgttaccataccgtttactaaatcaaacgccgaacgcaacgtaacgaaaacttccacgataatttccgaacgaatcacttcgtcgtaattaaactacttcaaaacgccgtcgacatcgtaaccaccgatcgaaataatttcatttttaaatacgaccgactacgtaacgacccaaacgcgaacgtataaccgcgcgacaaaaacatcctacatttcacgactaataccgtacatacgcgccaacatttctaccgttaaacccatcatacccgccgctttaacgacattacgactcaaaccgaaataaaaatcgacgccgtaactcatcgacacataacccat

SEQ ID NO: 15455 - DNA, 608 bp, Artificial Sequence
  chemically treated genomic DNA (Homo sapiens) CpG-island No: 15455
  unsure (65)
tttagatttttaatatatggtaggatttgcgcggtaaaggtttcgtttattttaaatacgtcganttcgttggtagaaagtttcgttttttttagcgttagtttcgaggtcggaatcgggtcgtaatttataatcgatgggttataattaacgatcgttatcgaacgtatacgagcgcgcggtttaagatttaatttatgggcgcggtttttatttattattagtatggtagttgcgttatcggaaagtgtagaagatgtgttcgtcgttattatatcgtttattggattaaacgtcggacgtagcgtggcgagggtttttacggtggttttcgggcgaattatttcgtcgtaattaaattgttttaggacgtcgtcggtatcgtgattatcggtcgggatgattttatttttaaatgcggtcgattgcgtggcggtttaggcgcgggcgtgtgatcgcgcggtaaaggtattttgtattttacggttgatatcgtgtatacgcgttagtatttttgtcgttaagtttattatgttcgtcgttttggcgatattgcggtttaggtcggggtgaaaatcgacgtcgtgatttatcggtatatggtttat

SEQ ID NO: 15456 - DNA, 608 bp, Artificial Sequence
  chemically treated genomic DNA (Homo sapiens) CpG-island No: 15456
  unsure (544)
ataaaccatataccgataaatcacgacgtcgattttcaccccgacctaaaccgcaatatcgccaaaacgacgaacataataaacttaacgacaaaaatactaacgcgtatacacgatatcaaccgtaaaatacaaaatacctttaccgcgcgatcacacgcccgcgcctaaaccgccacgcaatcgaccgcatttaaaaataaaatcatcccgaccgataatcacgataccgacgacgtcctaaaacaatttaattacgacgaaataattcgcccgaaaaccaccgtaaaaaccctcgccacgctacgtccgacgtttaatccaataaacgatataataacgacgaacacatcttctacactttccgataacgcaactaccatactaataataaataaaaaccgcgcccataaattaaatcttaaaccgcgcgctcgtatacgttcgataacgatcgttaattataacccatcgattataaattacgacccgattccgacctcgaaactaacgctaaaaaaaacgaaactttctaccaacgaantcgacgtatttaaaataaacgaaacctttaccgcgcaaatcctaccatatattaaaaatctaaa

SEQ ID NO: 15457 - DNA, 561 bp, Artificial Sequence
  chemically treated genomic DNA (Homo sapiens) CpG-island No: 15457
cgatttacggtgttttcgttgttggtgtttcgtttggtttgttgatttatagttattacggttttgtcgtattggcgattattataatggtattattcgtattggcgtgggtttgtaacggtatagtgcgtaaagtatcggttttggcgggagaacgtttatcgttgtggagcgttgtcgggtttatttggaaattagggttaggtttggtattataaggcgttggttttgttgttatcgggattttcgtttcgttttattttgttagtaaaggatgggcgatggcgggttttatttttatcgcgtttggcggcgtatttgtcgtgatgcgcgttatgtttggttggatgtcggatcgttttggcggcgtgaaagtggcgaatgtttttttgtttgtagaaacggggggtttgttgttgttttggtaagtttagtgtatgggttcgattaagagggtcggttatcggacggagtttttttttatcgatagggtgaagggttatacgtttttttatattgggattatagtagggtattatttagattttcgattaggtagag

SEQ ID NO: 15458 - DNA, 561 bp, Artificial Sequence
  chemically treated genomic DNA (Homo sapiens) CpG-island No: 15458
ctctacctaatcgaaaatctaaataataccctactataatcccaatataaaaaaacgtataacccttcaccctatcgataaaaaaaaactccgtccgataaccgaccctcttaatcgaacccatacactaaacttaccaaaacaacaacaaaccccccgtttctacaaacaaaaaaacattcgccactttcacgccgccaaaacgatccgacatccaaccaaacataacgcgcatcacgacaaatacgccgccaaacgcgataaaaataaaacccgccatcgcccatcctttactaacaaaataaaacgaaacgaaaatcccgataacaacaaaaccaacgccttataataccaaacctaaccctaatttccaaataaacccgacaacgctccacaacgataaacgttctcccgccaaaaccgatactttacgcactataccgttacaaacccacgccaatacgaataataccattataataatcgccaatacgacaaaaccgtaataactataaatcaacaaaccaaacgaaacaccaacaacgaaaacaccgtaaatcg

SEQ ID NO: 15459 - DNA, 561 bp, Artificial Sequence
  chemically treated genomic DNA (Homo sapiens) CpG-island No: 15459
ttttgtttgatcgggaatttaaatggtattttattgtggttttaatgtgagggggcgtgtaattttttattttgtcggtaaaaaggaatttcgttcggtaatcggtttttttaatcggatttatgtattgggtttgttagggtagtaataagtttttcgtttttataagtagagagatattcgttatttttacgtcgttaaaacggttcggtatttagttaaatatgacgcgtattacgataaatgcgtcgttaaacgcggtaagagtaaagttcgttatcgtttattttttgttggtaaagtagagcgaaacgaaagtttcgataatagtaaaattaacgttttgtagtgttagatttaattttggtttttagataagttcgataacgttttatagcgatggacgttttttcgttagggtcggtattttgcgtattgtgtcgttataggtttacgttagtacgggtaatattattgtggtgatcgttagtgcggtaaaatcgtaatggttatgaattaataggttaagcggagtattaatagcgagggtatcgtaaatcg

SEQ ID NO: 15460 - DNA, 561 bp, Artificial Sequence
  chemically treated genomic DNA (Homo sapiens) CpG-island No: 15460
cgatttacgataccctcgctattaatactccgcttaacctattaattcataaccattacgattttaccgcactaacgatcaccacaataatattacccgtactaacgtaaacctataacgacacaatacgcaaaataccgaccctaacgaaaaaacgtccatcgctataaaacgttatcgaacttatctaaaaaccaaaattaaatctaacactacaaaacgttaattttactattatcgaaactttcgtttcgctctactttaccaacaaaaaataaacgataacgaactttactcttaccgcgtttaacgacgcatttatcgtaatacgcgtcatatttaactaaataccgaaccgttttaacgacgtaaaaataacgaatatctctctacttataaaaacgaaaaacttattactaccctaacaaacccaatacataaatccgattaaaaaaaccgattaccgaacgaaattcctttttaccgacaaaataaaaaattacacgccccctcacattaaaaccacaataaaataccatttaaattcccgatcaaacaaaa

SEQ ID NO: 15461 - DNA, 537 bp, Artificial Sequence
  chemically treated genomic DNA (Homo sapiens) CpG-island No: 15461
ttagacggttatcgaggtatgcggttttatcgttatatggttttggttcggggtcgtgtaggtagtattaatttttatcgtagcggaggtgaaagtttcgttaaagttatcgacgttttaatagtatagggcgtgtttttcggcggttgattgacggtttgtttttcgttcgttagggagtaagtttttttattacggcgatagtgtgtttgtattagcgaggttagtcgttcgcgtttgttcgtataggtttcggttattattagcgtaatggtttgatgatagtgtttaatagtgggggcggttaatagtttggcggagataatgttagtttggcgaatgttcggagattatgtaggaatgaagtagtacgtcgaggtatttgttcgttcgaatacggcgcgaaagtttggaagggcgattaaaatatattggagtggggtaattagttatgagttatttatgcgtattaggcgaaacgcgggaacgaattaagagaggttcgagtttatgaagattatataaaggagtttttaa

SEQ ID NO: 15462 - DNA, 537 bp, Artificial Sequence
  chemically treated genomic DNA (Homo sapiens) CpG-island No: 15462
ttaaaaactcctttatataatcttcataaactcgaacctctcttaattcgttcccgcgtttcgcctaatacgcataaataactcataactaattaccccactccaatatattttaatcgcccttccaaactttcgcgccgtattcgaacgaacaaatacctcgacgtactacttcattcctacataatctccgaacattcgccaaactaacattatctccgccaaactattaaccgcccccactattaaacactatcatcaaaccattacgctaataataaccgaaacctatacgaacaaacgcgaacgactaacctcgctaatacaaacacactatcgccgtaataaaaaaacttactccctaacgaacgaaaaacaaaccgtcaatcaaccgccgaaaaacacgccctatactattaaaacgtcgataactttaacgaaactttcacctccgctacgataaaaattaatactacctacacgaccccgaaccaaaaccatataacgataaaaccgcatacctcgataaccgtctaa

SEQ ID NO: 15463 - DNA, 537 bp, Artificial Sequence
  chemically treated genomic DNA (Homo sapiens) CpG-island No: 15463
ttggagatttttttgtatggtttttatgaattcggattttttttagttcgttttcgcgtttcgtttgatacgtataagtggtttatggttgattgttttattttagtgtattttggtcgtttttttaggttttcgcgtcgtattcgagcgggtaaatgtttcggcgtattgttttatttttgtataattttcgggtattcgttaagttgatattattttcgttaggttgttagtcgtttttattattgagtattattattaggttattgcgttggtagtggtcgagatttgtgcgaataggcgcgagcggttggtttcgttggtgtaggtatattatcgtcgtaataaaggagtttattttttggcggacgaaaaataggtcgttaattagtcgtcggaagatacgttttgtattgttaaaacgtcggtgattttgacggggtttttattttcgttgcggtgaagattgatgttatttatacgatttcggattagagttatatggcgatggagtcgtatgtttcgatggtcgtttgg

SEQ ID NO: 15464 - DNA, 537 bp, Artificial Sequence
  chemically treated genomic DNA (Homo sapiens) CpG-island No: 15464
ccaaacgaccatcgaaacatacgactccatcgccatataactctaatccgaaatcgtataaataacatcaatcttcaccgcaacgaaaataaaaaccccgtcaaaatcaccgacgttttaacaatacaaaacgtatcttccgacgactaattaacgacctatttttcgtccgccaaaaaataaactcctttattacgacgataatatacctacaccaacgaaaccaaccgctcgcgcctattcgcacaaatctcgaccactaccaacgcaataacctaataataatactcaataataaaaacgactaacaacctaacgaaaataatatcaacttaacgaatacccgaaaattatacaaaaataaaacaatacgccgaaacatttacccgctcgaatacgacgcgaaaacctaaaaaaacgaccaaaatacactaaaataaaacaatcaaccataaaccacttatacgtatcaaacgaaacgcgaaaacgaactaaaaaaaatccgaattcataaaaaccatacaaaaaaatctccaa

SEQ ID NO: 15465 - DNA, 1304 bp, Artificial Sequence
  chemically treated genomic DNA (Homo sapiens) CpG-island No: 15465
aggcgcgagtttagttcggtgatttcgttattttcgcggtttttattttggggttagggaagagggcgtggtcgattttagtttttttatcgaaatcgcgtttgtttttttttttatcgcggtttcgtacggcggcggaggggtcgaggggtggcggtatcgggatttcgtcgttatttcggcgcgtacggaggtagggttgggggaaatacgatttttggggagattggaggaggcgatgtcgtcgaggttgcgggggagttttttcggagaattcgggggtcgggtgggaatgcgatttttagggtagttatcgttgttttttcgtaattgtcgtagggattttttcggggtgggggtggggacgcggggttttcgtttttttcgggtcgcggaggtgtaggttcgaggggttcgtgtagttagacgtgtagtgtgcgcggttcgtgatttagtcgggtggcgacgcgaggtcggggaggtagggggaaggggcgggcgggtcgggcgcgtaatcgggatttcgcggtttcgggagaagcgaggtgcgcgcgtttaggagtggggggcggggcggcgggcgcgcgcgtagcggaggcgtcgggcggcggcgagggtcgggtcgtatgtcgttttttcggcgtcgcgtttttagagttcgcgtcgtttttcggggcgtcgcgcgggtggcgtaggtagaggtcgggcgggggtggtagttatttcggggtttaggttttagtcgttaggtttggtttttagcgggcgttgttagagggcgggttcgcgggagcggggcggcggcggcggcggtagaggagcgtagggcgggcggagatcgtcggggttatttttttagtttttcgcggtggtcgagttattcgtagttgcgttcgaggcgtcgaggcggggtggtcgagcgagattcgggtcgggcgcggttcgggtcgtatagtcgcggcggcggttgtagatttgtaaattttaatgatagtaattttgttcgtttgcgtttttgatttacgtggtgatttagtttttagttattcggcggtcgtttttcggttttagtttttttcgtcgtcgaataatgaagttattgtgtcgtcgtttatttttgagcgtcgttttatacgcggagcgtcgtcgtttttttggggaagggatcgaggcgttcggtttttaattattttcggtgggcgggcgtggggaggtcgcgttttgttggataattgaattttgggattattttttcgttagtttaagttttttattttaagtcgtttttttttttttatcgtatt

SEQ ID NO: 15466 - DNA, 1304 bp, Artificial Sequence
  chemically treated genomic DNA (Homo sapiens) CpG-island No: 15466
aatacgataaaaaaaaaaaaacgacttaaaataaaaaacttaaactaacgaaaaaataatcccaaaattcaattatccaacaaaacgcgacctccccacgcccgcccaccgaaaataattaaaaaccgaacgcctcgatcccttccccaaaaaaacgacgacgctccgcgtataaaacgacgctcaaaaataaacgacgacacaataacttcattattcgacgacgaaaaaaactaaaaccgaaaaacgaccgccgaataactaaaaactaaatcaccacgtaaatcaaaaacgcaaacgaacaaaattactatcattaaaatttacaaatctacaaccgccgccgcgactatacgacccgaaccgcgcccgacccgaatctcgctcgaccaccccgcctcgacgcctcgaacgcaactacgaataactcgaccaccgcgaaaaactaaaaaaataaccccgacgatctccgcccgccctacgctcctctaccgccgccgccgccgccccgctcccgcgaacccgccctctaacaacgcccgctaaaaaccaaacctaacgactaaaacctaaaccccgaaataactaccacccccgcccgacctctacctacgccacccgcgcgacgccccgaaaaacgacgcgaactctaaaaacgcgacgccgaaaaaacgacatacgacccgaccctcgccgccgcccgacgcctccgctacgcgcgcgcccgccgccccgccccccactcctaaacgcgcgcacctcgcttctcccgaaaccgcgaaatcccgattacgcgcccgacccgcccgccccttccccctacctccccgacctcgcgtcgccacccgactaaatcacgaaccgcgcacactacacgtctaactacacgaacccctcgaacctacacctccgcgacccgaaaaaaacgaaaaccccgcgtccccacccccaccccgaaaaaatccctacgacaattacgaaaaaacaacgataactaccctaaaaatcgcattcccacccgacccccgaattctccgaaaaaactcccccgcaacctcgacgacatcgcctcctccaatctccccaaaaatcgtatttcccccaaccctacctccgtacgcgccgaaataacgacgaaatcccgataccgccacccctcgacccctccgccgccgtacgaaaccgcgataaaaaaaaaaacaaacgcgatttcgataaaaaaactaaaatcgaccacgccctcttccctaaccccaaaataaaaaccgcgaaaataacgaaatcaccgaactaaactcgcgcct

SEQ ID NO: 15467 - DNA, 1304 bp, Artificial Sequence
  chemically treated genomic DNA (Homo sapiens) CpG-island No: 15467
aatacgatgaagaggaaaggacggtttaagataaagagtttgggttgacgagggaatagttttagggtttaattatttagtagagcgcggtttttttacgttcgtttatcggggataattaaaagtcggacgtttcggttttttttttagggaggcggcggcgtttcgcgtgtgaaacggcgtttagaaatgaacggcgatatagtggttttattgttcggcggcgggggaaattgaggtcggagggcggtcgtcgggtgattggaggttgggttattacgtgagttagaggcgtagacgggtaagattgttgttattaaggtttataggtttgtagtcgtcgtcgcggttgtgcggttcgagtcgcgttcggttcgggtttcgttcggttatttcgtttcggcgtttcgagcgtaattgcgggtggttcggttatcgcggggggttggagaggtgatttcgacggttttcgttcgttttgcgtttttttgtcgtcgtcgtcgtcgtttcgttttcgcgggttcgttttttgatagcgttcgttgagggttaagtttggcggttggaatttgagtttcggggtggttgttattttcgttcggtttttatttgcgttattcgcgcggcgtttcgggaggcggcgcgagttttgggagcgcggcgtcgggaagacggtatacggttcggttttcgtcgtcgttcggcgttttcgttgcgcgcgcgttcgtcgtttcgttttttatttttgggcgcgcgtatttcgtttttttcgaggtcgcggggtttcggttgcgcgttcggttcgttcgttttttttttttgttttttcggtttcgcgtcgttattcggttgagttacgggtcgcgtatattgtacgtttgattgtacgggtttttcgggtttgtattttcgcggttcggaagggacggaagtttcgcgtttttatttttatttcgggagggtttttgcggtagttacgggggagtagcgatagttgttttggaggtcgtatttttattcggttttcgagtttttcgggagaattttttcgtagtttcggcggtatcgttttttttaatttttttaggaatcgtgttttttttaattttgttttcgtgcgcgtcggggtggcggcgggatttcggtgtcgttatttttcggttttttcgtcgtcgtgcgggatcgcgatgggggaggggataggcgcggtttcggtgagggggttggggtcggttacgtttttttttttggttttagggtgggggtcgcgaggatggcggggttatcgggttgaattcgcgttt

SEQ ID NO: 15468 - DNA, 1304 bp, Artificial Sequence
  chemically treated genomic DNA (Homo sapiens) CpG-island No: 15468
aaacgcgaattcaacccgataaccccgccatcctcgcgacccccaccctaaaaccaaaaaaaaaaacgtaaccgaccccaaccccctcaccgaaaccgcgcctatcccctcccccatcgcgatcccgcacgacgacgaaaaaaccgaaaaataacgacaccgaaatcccgccgccaccccgacgcgcacgaaaacaaaattaaaaaaaacacgattcctaaaaaaattaaaaaaaacgataccgccgaaactacgaaaaaattctcccgaaaaactcgaaaaccgaataaaaatacgacctccaaaacaactatcgctactcccccgtaactaccgcaaaaaccctcccgaaataaaaataaaaacgcgaaacttccgtcccttccgaaccgcgaaaatacaaacccgaaaaacccgtacaatcaaacgtacaatatacgcgacccgtaactcaaccgaataacgacgcgaaaccgaaaaaacaaaaaaaaaaaacgaacgaaccgaacgcgcaaccgaaaccccgcgacctcgaaaaaaacgaaatacgcgcgcccaaaaataaaaaacgaaacgacgaacgcgcgcgcaacgaaaacgccgaacgacgacgaaaaccgaaccgtataccgtcttcccgacgccgcgctcccaaaactcgcgccgcctcccgaaacgccgcgcgaataacgcaaataaaaaccgaacgaaaataacaaccaccccgaaactcaaattccaaccgccaaacttaaccctcaacgaacgctatcaaaaaacgaacccgcgaaaacgaaacgacgacgacgacgacaaaaaaacgcaaaacgaacgaaaaccgtcgaaatcacctctccaaccccccgcgataaccgaaccacccgcaattacgctcgaaacgccgaaacgaaataaccgaacgaaacccgaaccgaacgcgactcgaaccgcacaaccgcgacgacgactacaaacctataaaccttaataacaacaatcttacccgtctacgcctctaactcacgtaataacccaacctccaatcacccgacgaccgccctccgacctcaatttcccccgccgccgaacaataaaaccactatatcgccgttcatttctaaacgccgtttcacacgcgaaacgccgccgcctccctaaaaaaaaaaccgaaacgtccgacttttaattatccccgataaacgaacgtaaaaaaaccgcgctctactaaataattaaaccctaaaactattccctcgtcaacccaaactctttatcttaaaccgtcctttcctcttcatcgtatt

SEQ ID NO: 15469 - DNA, 561 bp, Artificial Sequence
  chemically treated genomic DNA (Homo sapiens) CpG-island No: 15469
ttttataggcgttagtttcgttttggacgtcgatcgtcgtttttatagtttcggtttcggttgttggatgagaattagcgtggttcgtttaagggggaggggataggcgttgtaaggagtagagtcgcgggaagtaattttttaagttataatgttagtcgcgaatataggaaaaagtttatttcgtcgtcgcggggttttatgttttcgtcggtaatgattatgtttgtgggagtaacggttatcggcgcgcggttttttgggagttgtttgttgcgcggagcgcgggtacgttcgtcggttatcggaagtatcgttattggtcggtgcgtgtaggtgagtttggcggttttaaggttggttcggaggttttattgttagtcgggtgcggtcggagcgtaggattaggttagagtcgttttaagtgatttgggcgtgtcggagaaacgagtagggtttgcgggggttttttatgcggcgaggtcgagtaagggtaggggtttgatgggatcgggattttttcggttttagggacggggaaggtcggtttagttaggtttt

SEQ ID NO: 15470 - DNA, 561 bp, Artificial Sequence
  chemically treated genomic DNA (Homo sapiens) CpG-island No: 15470
aaaacctaactaaaccgaccttccccgtccctaaaaccgaaaaaatcccgatcccatcaaacccctacccttactcgacctcgccgcataaaaaacccccgcaaaccctactcgtttctccgacacgcccaaatcacttaaaacgactctaacctaatcctacgctccgaccgcacccgactaacaataaaacctccgaaccaaccttaaaaccgccaaactcacctacacgcaccgaccaataacgatacttccgataaccgacgaacgtacccgcgctccgcgcaacaaacaactcccaaaaaaccgcgcgccgataaccgttactcccacaaacataatcattaccgacgaaaacataaaaccccgcgacgacgaaataaactttttcctatattcgcgactaacattataacttaaaaaattacttcccgcgactctactccttacaacgcctatcccctcccccttaaacgaaccacgctaattctcatccaacaaccgaaaccgaaactataaaaacgacgatcgacgtccaaaacgaaactaacgcctataaaa

SEQ ID NO: 15471 - DNA, 561 bp, Artificial Sequence
  chemically treated genomic DNA (Homo sapiens) CpG-island No: 15471
gaaatttgattggatcggtttttttcgtttttgaggtcggagagatttcgattttattaggtttttgtttttgttcggtttcgtcgtatgagggattttcgtaggttttgttcgttttttcggtacgtttagattatttggggcggttttggtttggttttgcgtttcggtcgtattcggttaatagtgaaattttcgagttaattttgaggtcgttagatttatttgtacgtatcggttaatggcggtgttttcggtggtcggcggacgtgttcgcgtttcgcgtaataaataatttttagaaggtcgcgcgtcggtagtcgttgtttttataggtatagttattgtcggcgggagtatggggtttcgcggcggcgggatgagtttttttttgtgttcgcgattagtattgtggtttagggagttgtttttcgcggttttgttttttgtagcgtttgtttttttttttttaaacgggttacgttggtttttatttagtaatcgaagtcgagattgtggaggcggcggtcggcgtttagggcgggattagcgtttatgggg

SEQ ID NO: 15472 - DNA, 561 bp, Artificial Sequence
  chemically treated genomic DNA (Homo sapiens) CpG-island No: 15472
ccccataaacgctaatcccgccctaaacgccgaccgccgcctccacaatctcgacttcgattactaaataaaaaccaacgtaacccgtttaaaaaaaaaaaaacaaacgctacaaaaaacaaaaccgcgaaaaacaactccctaaaccacaatactaatcgcgaacacaaaaaaaaactcatcccgccgccgcgaaaccccatactcccgccgacaataactatacctataaaaacaacgactaccgacgcgcgaccttctaaaaattatttattacgcgaaacgcgaacacgtccgccgaccaccgaaaacaccgccattaaccgatacgtacaaataaatctaacgacctcaaaattaactcgaaaatttcactattaaccgaatacgaccgaaacgcaaaaccaaaccaaaaccgccccaaataatctaaacgtaccgaaaaaacgaacaaaacctacgaaaatccctcatacgacgaaaccgaacaaaaacaaaaacctaataaaatcgaaatctctccgacctcaaaaacgaaaaaaaccgatccaatcaaatttc

SEQ ID NO: 15473 - DNA, 1107 bp, Artificial Sequence
  chemically treated genomic DNA (Homo sapiens) CpG-island No: 15473
tttaacgacgtatagcgtatgaaatgtttacgtttattaggtaattgtcgttgatattacgtagtacgttagaaaattacggggtaagttcggcgatgataaaatcgattttttgtataaacgttattagtttgttagtaatagtcggttgtatagagtgatcgagcgttagtagtaaatagagcggaaacgcgtcgtttagatttaatttatatattatcgtttataatatcggtaattgtatcggtagttagataaagtcgtagaattttattagttgtaatattagcgttagtattaatagtttgcgtcgattttgatggcgagttatagtaggtattagtaaagtttttgcggtttgtttaagcgttattaatgttagtaaggaatcgttgtattgcgcgttggtattaattttaatatagaaagcgggtaattaggtattaggttggcgtaatcgtcgttaattagatcgaagtaaatatttagcgtttacgcgcggggagtgaatattacgcgaatcggagtggtgttgttttgtgggaagaggcgatttcgcgggcgttgtgttattattaggtaaagagcgtaataacggtaggtagcgtttattaggcgagtgtttgatattaggtttcgttatgttgaattaattagggcgttatggcggtattaagtttatcgtcgtttattagagtcgcggattatagttttattattagtggcgtgcgttgttgaaatcgtcgtttaattatcgaaggtattatcgtttgaatgatgtcgatttttattttattaagtagtgcgttgttaagtagtagcgtattttgcgggtaaagtttacgtattaatgtatcgacggtaattagtaatagattgatggcgatattgcgacgttcgttgatatgttgatgaagttagttttcggttagcgttagttcgtttatggtaattatcggtagagcggttaatagggtagttacgttaaagtttatttcgttcgtttggcgtaattgcggtagtagtggttcgacggaggtgagtagtggtcgtatattaagattaattagtattagtattagtagtatcgtgaacgttttttgatgg

SEQ ID NO: 15474 - DNA, 1107 bp, Artificial Sequence
  chemically treated genomic DNA (Homo sapiens) CpG-island No: 15474
ccatcaaaaaacgttcacgatactactaatactaatactaattaatcttaatatacgaccactactcacctccgtcgaaccactactaccgcaattacgccaaacgaacgaaataaactttaacgtaactaccctattaaccgctctaccgataattaccataaacgaactaacgctaaccgaaaactaacttcatcaacatatcaacgaacgtcgcaatatcgccatcaatctattactaattaccgtcgatacattaatacgtaaactttacccgcaaaatacgctactacttaacaacgcactacttaataaaataaaaatcgacatcattcaaacgataataccttcgataattaaacgacgatttcaacaacgcacgccactaataataaaactataatccgcgactctaataaacgacgataaacttaataccgccataacgccctaattaattcaacataacgaaacctaatatcaaacactcgcctaataaacgctacctaccgttattacgctctttacctaataataacacaacgcccgcgaaatcgcctcttcccacaaaacaacaccactccgattcgcgtaatattcactccccgcgcgtaaacgctaaatatttacttcgatctaattaacgacgattacgccaacctaatacctaattacccgctttctatattaaaattaataccaacgcgcaatacaacgattccttactaacattaataacgcttaaacaaaccgcaaaaactttactaatacctactataactcgccatcaaaatcgacgcaaactattaatactaacgctaatattacaactaataaaattctacgactttatctaactaccgatacaattaccgatattataaacgataatatataaattaaatctaaacgacgcgtttccgctctatttactactaacgctcgatcactctatacaaccgactattactaacaaactaataacgtttatacaaaaaatcgattttatcatcgccgaacttaccccgtaattttctaacgtactacgtaatatcaacgacaattacctaataaacgtaaacatttcatacgctatacgtcgttaaa

SEQ ID NO: 15475 - DNA, 1107 bp, Artificial Sequence
  chemically treated genomic DNA (Homo sapiens) CpG-island No: 15475
ttattaaaagacgtttacgatgttgttggtattggtgttgattggttttaatatgcgattattgtttattttcgtcgggttattgttatcgtaattgcgttaggcgagcggaatgagttttagcgtggttgttttgttgatcgttttgtcggtggttattatgggcgggttggcgttggtcggaagttggttttattagtatgttagcgaacgtcgtagtgtcgttattagtttgttgttgattgtcgtcggtgtattgatgcgtgagttttattcgtaaagtgcgttgttgtttagtagcgtattgtttggtggggtggggatcggtattatttaggcggtgatgttttcggtgattaaacggcggttttagtagcgtacgttattggtgatggggttgtggttcgcggttttgatgggcggcggtgggtttggtgtcgttataacgttttggttagtttaatatagcgaaatttggtattaaatattcgtttggtgggcgttgtttgtcgttgttgcgttttttgtttggtggtggtatagcgttcgcgaggtcgtttttttttataagataatattatttcggttcgcgtggtatttatttttcgcgcgtggacgttgggtgtttatttcggtttgattaacggcggttacgttagtttgatgtttggttattcgttttttatattgagattggtgttagcgcgtagtatagcggttttttattggtattgatgacgtttgggtaagtcgtaggagttttgttgatgtttgttatggttcgttattaggatcggcgtaaattgttaatgttggcgttggtgttataattggtggggttttgcggttttatttggttgtcgatgtaattgtcggtattgtgggcgatggtgtgtgggttaggtttgggcggcgcgttttcgttttgtttgttgttggcgttcgattattttgtgtaatcggttattgttggtaagttggtggcgtttatgtagggaatcggttttattatcgtcgggtttgtttcgtggttttttggcgtgttgcgtagtattagcggtaattatttgatggacgtgggtattttatgcgttgtgcgtcgttggg

SEQ ID NO: 15476 - DNA, 1107 bp, Artificial Sequence
  chemically treated genomic DNA (Homo sapiens) CpG-island No: 15476
cccaacgacgcacaacgcataaaatacccacgtccatcaaataattaccgctaatactacgcaacacgccaaaaaaccacgaaacaaacccgacgataataaaaccgattccctacataaacgccaccaacttaccaacaataaccgattacacaaaataatcgaacgccaacaacaaacaaaacgaaaacgcgccgcccaaacctaacccacacaccatcgcccacaataccgacaattacatcgacaaccaaataaaaccgcaaaaccccaccaattataacaccaacgccaacattaacaatttacgccgatcctaataacgaaccataacaaacatcaacaaaactcctacgacttacccaaacgtcatcaataccaataaaaaaccgctatactacgcgctaacaccaatctcaatataaaaaacgaataaccaaacatcaaactaacgtaaccgccgttaatcaaaccgaaataaacacccaacgtccacgcgcgaaaaataaataccacgcgaaccgaaataatattatcttataaaaaaaaacgacctcgcgaacgctataccaccaccaaacaaaaaacgcaacaacgacaaacaacgcccaccaaacgaatatttaataccaaatttcgctatattaaactaaccaaaacgttataacgacaccaaacccaccgccgcccatcaaaaccgcgaaccacaaccccatcaccaataacgtacgctactaaaaccgccgtttaatcaccgaaaacatcaccgcctaaataataccgatccccaccccaccaaacaatacgctactaaacaacaacgcactttacgaataaaactcacgcatcaatacaccgacgacaatcaacaacaaactaataacgacactacgacgttcgctaacatactaataaaaccaacttccgaccaacgccaacccgcccataataaccaccgacaaaacgatcaacaaaacaaccacgctaaaactcattccgctcgcctaacgcaattacgataacaataacccgacgaaaataaacaataatcgcatattaaaaccaatcaacaccaataccaacaacatcgtaaacgtcttttaataa

SEQ ID NO: 15477 - DNA, 522 bp, Artificial Sequence
  chemically treated genomic DNA (Homo sapiens) CpG-island No: 15477
tagttagcgtgtaatttgtttttcgttttgttttaattgtgtaaggtaattatcggtaatttgacgatcgtaacgatattcgttaggcgacgtgtttcgcgatttatttttacgcgtagcggttgtattatattattatgtaggattttcgtcggttgtttatttagtttattcggtttacgggcgtgaattttttgttttagtaggtcgagcgttattgtaaagtcgtatagcgtggcggtaggcgttggcgggtagttaggatattaatatttatagggattattttattcgtatcgttttatacgtagtaagatcgtggaagatttcgttattgttatcgtagtatcgtagagatataaattttcgggttcggcgcggattgttacgtacgtagcgtagggggatcgtattgtacgggtgatcgcgtcggtaatagtaaaatattcgtatgacgcggtgaaggaacgattttaatgttaagcgttttgtattaaatagcggcgaaagcgtggcgaaaat

SEQ ID NO: 15478 - DNA, 522 bp, Artificial Sequence
  chemically treated genomic DNA (Homo sapiens) CpG-island No: 15478
attttcgccacgctttcgccgctatttaatacaaaacgcttaacattaaaatcgttccttcaccgcgtcatacgaatattttactattaccgacgcgatcacccgtacaatacgatccccctacgctacgtacgtaacaatccgcgccgaacccgaaaatttatatctctacgatactacgataacaataacgaaatcttccacgatcttactacgtataaaacgatacgaataaaataatccctataaatattaatatcctaactacccgccaacgcctaccgccacgctatacgactttacaataacgctcgacctactaaaacaaaaaattcacgcccgtaaaccgaataaactaaataaacaaccgacgaaaatcctacataataatataatacaaccgctacgcgtaaaaataaatcgcgaaacacgtcgcctaacgaatatcgttacgatcgtcaaattaccgataattaccttacacaattaaaacaaaacgaaaaacaaattacacgctaacta

SEQ ID NO: 15479 - DNA, 522 bp, Artificial Sequence
  chemically treated genomic DNA (Homo sapiens) CpG-island No: 15479
attttcgttacgttttcgtcgttgtttgatgtagaacgtttggtattaaagtcgtttttttatcgcgttatgcggatattttattgttatcggcgcggttattcgtgtaatgcgatttttttgcgttgcgtgcgtggtagttcgcgtcggattcgaaaatttgtatttttacggtgttgcggtaatagtggcgggattttttacgattttattgcgtgtggggcggtacggataaaatggtttttgtggatgttaatattttggttgttcgttaacgtttgtcgttacgttgtacggttttgtaatggcgttcggtttgttggagtagaaaatttacgttcgtgggtcgggtgaattggatgaataatcggcggagattttgtatggtgatatggtgtagtcgttgcgcgtgaaagtggatcgcgaagtacgtcgtttggcgggtatcgttacggtcgttagattgtcgatgattattttatatagttagggtagggcgaagaataggttgtacgttggttg

SEQ ID NO: 15480 - DNA, 522 bp, Artificial Sequence
  chemically treated genomic DNA (Homo sapiens) CpG-island No: 15480
caaccaacgtacaacctattcttcgccctaccctaactatataaaataatcatcgacaatctaacgaccgtaacgatacccgccaaacgacgtacttcgcgatccactttcacgcgcaacgactacaccatatcaccatacaaaatctccgccgattattcatccaattcacccgacccacgaacgtaaattttctactccaacaaaccgaacgccattacaaaaccgtacaacgtaacgacaaacgttaacgaacaaccaaaatattaacatccacaaaaaccattttatccgtaccgccccacacgcaataaaatcgtaaaaaatcccgccactattaccgcaacaccgtaaaaatacaaattttcgaatccgacgcgaactaccacgcacgcaacgcaaaaaaatcgcattacacgaataaccgcgccgataacaataaaatatccgcataacgcgataaaaaaacgactttaataccaaacgttctacatcaaacaacgacgaaaacgtaacgaaaat

SEQ ID NO: 15481 - DNA, 559 bp, Artificial Sequence
  chemically treated genomic DNA (Homo sapiens) CpG-island No: 15481
ggtttttcgaacgcgcggtaaagtagcgggcggagtagttagcggtagatgatcgtagtttaggatttttattttaaattggttacgaatgtttagtttatcgtattgattaagtagatttattagttagtcgcgggaaagttttattggtatatattagcgtattatgttttgtttgagtaatatttttagtgttattcgcgttgtagtagtttagcgcgtgttcggcgacgaacggtagtttgcgtttagcgtatatatttattacgtcgagatcgttggttttaattagaaatttatcgtttttaatatagcgttttagttcgtttagtttagatgatgtttgtattagcgtcgcgtgggagagtataatttgcgttattattttcggcgagcgatttttgttatttttagttaggtcgtttatttttgggttgttcgacgtttgggtgtttttcgttttttaggattaattcgtttcgggtttttttgggtggcggttcgcgttgttaaattttttttcgggggttttttttgggtcgtttttcgttggttttta

SEQ ID NO: 15482 - DNA, 559 bp, Artificial Sequence
  chemically treated genomic DNA (Homo sapiens) CpG-island No: 15482
taaaaaccaacgaaaaacgacccaaaaaaaacccccgaaaaaaaatttaacaacgcgaaccgccacccaaaaaaacccgaaacgaattaatcctaaaaaacgaaaaacacccaaacgtcgaacaacccaaaaataaacgacctaactaaaaataacaaaaatcgctcgccgaaaataataacgcaaattatactctcccacgcgacgctaatacaaacatcatctaaactaaacgaactaaaacgctatattaaaaacgataaatttctaattaaaaccaacgatctcgacgtaataaatatatacgctaaacgcaaactaccgttcgtcgccgaacacgcgctaaactactacaacgcgaataacactaaaaatattactcaaacaaaacataatacgctaatatataccaataaaactttcccgcgactaactaataaatctacttaatcaatacgataaactaaacattcgtaaccaatttaaaataaaaatcctaaactacgatcatctaccgctaactactccgcccgctactttaccgcgcgttcgaaaaacc

SEQ ID NO: 15483 - DNA, 559 bp, Artificial Sequence
  chemically treated genomic DNA (Homo sapiens) CpG-island No: 15483
taggggttagcgggggacggtttaaaaggggttttcgggaaagaatttaataacgcgggtcgttatttaggaaggttcgaaacggattaattttggggaacgggaagtatttaagcgtcgggtaatttaaaagtaggcgatttggttggagatggtaaaaatcgttcgtcgggagtggtaacgtagattgtgtttttttacgcggcgttggtgtaggtattatttgaattgggcgaattgaaacgttatgttgagaacggtgagtttttgattgaagttagcgatttcggcgtggtgaatatgtgcgttgaacgtaaattgtcgttcgtcgtcgggtacgcgttgaattgttataacgcgggtgatattgaaaatattgtttaaatagggtatgatgcgttggtgtatgttagtggagttttttcgcgattggttggtgaatttgtttaattagtgcgatgagttgggtattcgtaattagtttgaagtggaagttttgagttacggttatttgtcgttggttatttcgttcgttgttttatcgcgcgttcggaagatt

SEQ ID NO: 15484 - DNA, 559 bp, Artificial Sequence
  chemically treated genomic DNA (Homo sapiens) CpG-island No: 15484
aatcttccgaacgcgcgataaaacaacgaacgaaataaccaacgacaaataaccgtaactcaaaacttccacttcaaactaattacgaatacccaactcatcgcactaattaaacaaattcaccaaccaatcgcgaaaaaactccactaacatacaccaacgcatcataccctatttaaacaatattttcaatatcacccgcgttataacaattcaacgcgtacccgacgacgaacgacaatttacgttcaacgcacatattcaccacgccgaaatcgctaacttcaatcaaaaactcaccgttctcaacataacgtttcaattcgcccaattcaaataatacctacaccaacgccgcgtaaaaaaacacaatctacgttaccactcccgacgaacgatttttaccatctccaaccaaatcgcctacttttaaattacccgacgcttaaatacttcccgttccccaaaattaatccgtttcgaaccttcctaaataacgacccgcgttattaaattctttcccgaaaaccccttttaaaccgtcccccgctaaccccta

SEQ ID NO: 15485 - DNA, 1045 bp, Artificial Sequence
  chemically treated genomic DNA (Homo sapiens) CpG-island No: 15485
  unsure (1013)
ggcgttacggtttttcgtgcggtttatgtggcgggtgtttgtcgattatttaggttaggcgacggtgattttttcgttgattggtgcgtggtaacgcgtggatatcggttaatatgatgttgtacgtcgcggggatgttttttttttggtttcggtgtgatcgcgtcgatcgtcgaatggggcgtgatgataaacgacgcgcgttagtaatatttggatttagtcgtatgtaaatgattttggatcggggacgtggcgtatgattatgtagtattgatggttttttaatttggtgggtgacgtatatgtcgcgattatcgtggattttatatttggtgaacggagatacgtatatataatgtcgtaatagattgaatttacgtaatatcgcgtttattaggtacgcgtagtcgttggttacggtgtatcgattaattttgtaacgcgggcgcgtgttggcgttagtcggcggtagcggtagcgggaaattattaatttgcgtcgtaacgttgggtattttgttcgttggcgttcgttagacggcgggggaaattttagtcgatggtaaatcggtttcgttttgcgttttgcgcggtattaaaattgttattattatgtagaattcgcgtagcgtttttaatttattgtatattatgtatatttacgcgcgggaaatttgtttggcgttagggaaattcgtcgatgacgttacgtttatcgttgttatagaagcggtggggttggaaaacgtcgcgcgcgtgttgaagttgtattcgttcgagatgagcggcggtatgttgtagcgtatgatgattgcgatggcggtgttgtgtgaattatcgtttattatcgtcgatgaatcgattatcgattttgacgtggtagtataggcgcgtattttcgatttgttggaaagtattatgtaaaaataagcgtcgggaatgttgttggtgatttatgatatgggcgttgtggcgcgtttggcggatgacgtggcggtgatgtttgacggntagattgttcgaatagggcgatgtagaaaacg

SEQ ID NO: 15486 - DNA, 1045 bp, Artificial Sequence
  chemically treated genomic DNA (Homo sapiens) CpG-island No: 15486
  unsure (33)
cgttttctacatcgccctattcgaacaatctanccgtcaaacatcaccgccacgtcatccgccaaacgcgccacaacgcccatatcataaatcaccaacaacattcccgacgcttatttttacataatactttccaacaaatcgaaaatacgcgcctatactaccacgtcaaaatcgataatcgattcatcgacgataataaacgataattcacacaacaccgccatcgcaatcatcatacgctacaacataccgccgctcatctcgaacgaatacaacttcaacacgcgcgcgacgttttccaaccccaccgcttctataacaacgataaacgtaacgtcatcgacgaatttccctaacgccaaacaaatttcccgcgcgtaaatatacataatatacaataaattaaaaacgctacgcgaattctacataataataacaattttaataccgcgcaaaacgcaaaacgaaaccgatttaccatcgactaaaatttcccccgccgtctaacgaacgccaacgaacaaaatacccaacgttacgacgcaaattaataatttcccgctaccgctaccgccgactaacgccaacacgcgcccgcgttacaaaattaatcgatacaccgtaaccaacgactacgcgtacctaataaacgcgatattacgtaaattcaatctattacgacattatatatacgtatctccgttcaccaaatataaaatccacgataatcgcgacatatacgtcacccaccaaattaaaaaaccatcaatactacataatcatacgccacgtccccgatccaaaatcatttacatacgactaaatccaaatattactaacgcgcgtcgtttatcatcacgccccattcgacgatcgacgcgatcacaccgaaaccaaaaaaaaaacatccccgcgacgtacaacatcatattaaccgatatccacgcgttaccacgcaccaatcaacgaaaaaatcaccgtcgcctaacctaaataatcgacaaacacccgccacataaaccgcacgaaaaaccgtaacgcc

SEQ ID NO: 15487 - DNA, 1045 bp, Artificial Sequence
  chemically treated genomic DNA (Homo sapiens) CpG-island No: 15487
  unsure (33)
cgttttttatatcgttttgttcggataatttantcgttagatattatcgttacgttattcgttagacgcgttataacgtttatattatgggttattagtagtattttcggcgtttgtttttgtataatgttttttagtagatcgaggatgcgcgtttgtgttattacgttaaggtcggtggtcggtttatcggcgatgataaacggtgatttatatagtatcgttatcgtaattattatgcgttgtaatatgtcgtcgtttatttcgaacgggtatagttttagtacgcgcgcggcgttttttagttttatcgtttttatggtagcggtaagcgtagcgttatcggcgggtttttttaacgttaggtaggtttttcgcgcgtgggtgtgtatggtgtgtagtggattaaaggcgttgcgcgggttttgtatgatggtggtaattttgatgtcgcgtagggcgtaaggcgaaatcggtttgttatcggttaaaatttttttcgtcgtttggcgaacgttagcgggtaaaatgtttagcgttgcggcgtaggttaatgatttttcgttgtcgttatcgtcgattaacgttagtacgcgttcgcgttgtagggttaatcgatatatcgtgattagcggttgcgcgtgtttggtagacgcgatattacgtaggtttaatttgttgcggtattatgtgtgcgtgttttcgtttattagatgtagggtttacgatgatcgcgatatgtgcgttatttattaggttaaagggttattaatgttgtataattatgcgttacgttttcggtttagaattatttgtatgcggttgggtttagatattattggcgcgcgtcgtttattattacgttttattcggcggtcggcgcggttatatcgaggttaaggaaaagatattttcgcgacgtgtagtattatattggtcgatatttacgcgttgttacgtattagttagcgaagggattatcgtcgtttggtttagatgatcgataaatattcgttatatggatcgtacggaaagtcgtgacgtt

SEQ ID NO: 15488 - DNA, 1045 bp, Artificial Sequence
  chemically treated genomic DNA (Homo sapiens) CpG-island No: 15488
  unsure (1013)
aacgtcacgactttccgtacgatccatataacgaatatttatcgatcatctaaaccaaacgacgataatcccttcgctaactaatacgtaacaacgcgtaaatatcgaccaatataatactacacgtcgcgaaaatatcttttccttaacctcgatataaccgcgccgaccgccgaataaaacgtaataataaacgacgcgcgccaataatatctaaacccaaccgcatacaaataattctaaaccgaaaacgtaacgcataattatacaacattaataaccctttaacctaataaataacgcacatatcgcgatcatcgtaaaccctacatctaataaacgaaaacacgcacacataataccgcaacaaattaaacctacgtaatatcgcgtctaccaaacacgcgcaaccgctaatcacgatatatcgattaaccctacaacgcgaacgcgtactaacgttaatcgacgataacgacaacgaaaaatcattaacctacgccgcaacgctaaacattttacccgctaacgttcgccaaacgacgaaaaaaattttaaccgataacaaaccgatttcgccttacgccctacgcgacatcaaaattaccaccatcatacaaaacccgcgcaacgcctttaatccactacacaccatacacacccacgcgcgaaaaacctacctaacgttaaaaaaacccgccgataacgctacgcttaccgctaccataaaaacgataaaactaaaaaacgccgcgcgcgtactaaaactatacccgttcgaaataaacgacgacatattacaacgcataataattacgataacgatactatataaatcaccgtttatcatcgccgataaaccgaccaccgaccttaacgtaataacacaaacgcgcatcctcgatctactaaaaaacattatacaaaaacaaacgccgaaaatactactaataacccataatataaacgttataacgcgtctaacgaataacgtaacgataatatctaacgantaaattatccgaacaaaacgatataaaaaacg

SEQ ID NO: 15489 - DNA, 763 bp, Artificial Sequence
  chemically treated genomic DNA (Homo sapiens) CpG-island No: 15489
  unsure (604)
attttggtcgtagcgcgcgggcgatgtacgttagtttatttacgtttttacggtagatttagcgtttggaagaagatttcggttagtcgttgtttgtgcgcgataatcgtacggtgacgttgattgaagcgggcgaagagttgcgcgttttcgtttagtaaacgttgttgtagtattagtagttgcgttatattatcgattagtaagggtcgtcgttttttggcgaattatatattttttgttcggtgatcgttgtttatagttatttgtcgtcgattttggatcgttttcgcgcggaatattcgtcggtggagattaaatttattattggtgatgcggtagatgcgatggaaaaggtggttattggtgaagcggatttggcgattgcgggtaaatcggaaattttgttcggcgtagtggcgttttcgatgttggagaatttggtagtagtgttgattgttttcgcgttgttttgttcggtgcgtaattaggtgtcggtagagaagtcggattggttaacggtgtcgtttattatggtcgattaggggtcggtacgtcgtcgtattgaattgtggtttcgacgtaataaaattagtaattcgantatttacgttacggttggcgggtatgaagcgatggtatcgatggtggtattcggttggtggcgtgtgtattgttgtcggaagtggtgttggaaaatagtttcgaatcggtgcgtaatcgcgtgatgattttagagcgtaggattaaaaacgtttttgag

SEQ ID NO: 15490 - DNA, 763 bp, Artificial Sequence
  chemically treated genomic DNA (Homo sapiens) CpG-island No: 15490
  unsure (160)
ctcaaaaacgtttttaatcctacgctctaaaatcatcacgcgattacgcaccgattcgaaactattttccaacaccacttccgacaacaatacacacgccaccaaccgaataccaccatcgataccatcgcttcatacccgccaaccgtaacgtaaatantcgaattactaattttattacgtcgaaaccacaattcaatacgacgacgtaccgacccctaatcgaccataataaacgacaccgttaaccaatccgacttctctaccgacacctaattacgcaccgaacaaaacaacgcgaaaacaatcaacactactaccaaattctccaacatcgaaaacgccactacgccgaacaaaatttccgatttacccgcaatcgccaaatccgcttcaccaataaccaccttttccatcgcatctaccgcatcaccaataataaatttaatctccaccgacgaatattccgcgcgaaaacgatccaaaatcgacgacaaataactataaacaacgatcaccgaacaaaaaatatataattcgccaaaaaacgacgacccttactaatcgataatataacgcaactactaatactacaacaacgtttactaaacgaaaacgcgcaactcttcgcccgcttcaatcaacgtcaccgtacgattatcgcgcacaaacaacgactaaccgaaatcttcttccaaacgctaaatctaccgtaaaaacgtaaataaactaacgtacatcgcccgcgcgctacgaccaaaat

SEQ ID NO: 15491 - DNA, 763 bp, Artificial Sequence
  chemically treated genomic DNA (Homo sapiens) CpG-island No: 15491
  unsure (160)
tttaaaggcgtttttaattttgcgttttaaaattattacgcggttacgtatcggttcggggttgttttttagtattattttcggtaataatgtatacgttattagtcgagtgttattatcgatattatcgttttatgttcgttaatcgtggcgtaaatantcgggttattgattttattgcgtcgaaattatagtttaatgcggcggcgtatcggtttttgatcggttataataaacggtatcgttgattagttcggtttttttatcgatatttgattacgtatcgggtagggtagcgcgggggtaattagtattattgttagattttttagtatcgaaaacgttattgcgtcgggtaaggttttcggtttattcgtaatcgttagattcgttttattagtgattattttttttatcgtatttgtcgtattattagtagtaagtttaatttttatcgacgggtgtttcgcgcggaagcgatttagaatcggcggtagatggttgtaggtagcggttatcgagtagaagatatgtaattcgttagagagcgacggtttttgttgatcgatggtgtggcgtaattgttgatattgtaatagcgtttgttgggcgaaaacgcgtagtttttcgttcgttttagttagcgttatcgtgcggttatcgcgtataaatagcggttgatcgagatttttttttaggcgttgaatttgtcgtgagagcgtggatgggttaacgtgtatcgttcgcgcgttgcggttaaaat

SEQ ID NO: 15492 - DNA, 763 bp, Artificial Sequence
  chemically treated genomic DNA (Homo sapiens) CpG-island No: 15492
  unsure (604)
attttaaccgcaacgcgcgaacgatacacgttaacccatccacgctctcacgacaaattcaacgcctaaaaaaaaatctcgatcaaccgctatttatacgcgataaccgcacgataacgctaactaaaacgaacgaaaaactacgcgttttcgcccaacaaacgctattacaatatcaacaattacgccacaccatcgatcaacaaaaaccgtcgctctctaacgaattacatatcttctactcgataaccgctacctacaaccatctaccgccgattctaaatcgcttccgcgcgaaacacccgtcgataaaaattaaacttactactaataatacgacaaatacgataaaaaaaataatcactaataaaacgaatctaacgattacgaataaaccgaaaaccttacccgacgcaataacgttttcgatactaaaaaatctaacaataatactaattacccccgcgctaccctacccgatacgtaatcaaatatcgataaaaaaaccgaactaatcaacgataccgtttattataaccgatcaaaaaccgatacgccgccgcattaaactataatttcgacgcaataaaatcaataacccgantatttacgccacgattaacgaacataaaacgataatatcgataataacactcgactaataacgtatacattattaccgaaaataatactaaaaaacaaccccgaaccgatacgtaaccgcgtaataattttaaaacgcaaaattaaaaacgcctttaaa

SEQ ID NO: 15493 - DNA, 654 bp, Artificial Sequence
  chemically treated genomic DNA (Homo sapiens) CpG-island No: 15493
cgaatattcgttttttttgtcgtcgtttcggtattttatttgtaacgcggttataagtggttttagcgttgggtttaggaaggtgtcgtcggtttttaggatcgttcgcgtatttcgtattatttttcgaatcgtttatttgacgatattacggttttgttgcgtatggtttatgatcgttatgaacgttggggagttcgtaagattaagcgttggttcgaggattaggggtatattatgttcgtttttagtatcgtttataatttgatggttcgttatggtttgttgtcgggcgttttatcgggtattttcgttacgggtcggttcgaatacgacgcgtcgaatcgtttttggtagatggattttaagggttattttttttttggcggtggacgttgttattcgtttattttgttggacgattattttcgtttttttttgtgtttggcgtattgtatcgatgaacggcgcgagatcgtgtagtagtagttggttagcgtgtttgagcgttacggtttgtcggatcggatgattaatgggattacggggtataacgtggaggcggaaatataatacggggaatttggaattggcggttagggaagttagtagagtttgattgtagtttagggtattttcgggttaggggtaatt

SEQ ID NO: 15494 - DNA, 654 bp, Artificial Sequence
  chemically treated genomic DNA (Homo sapiens) CpG-island No: 15494
aattacccctaacccgaaaataccctaaactacaatcaaactctactaacttccctaaccgccaattccaaattccccgtattatatttccgcctccacgttataccccgtaatcccattaatcatccgatccgacaaaccgtaacgctcaaacacgctaaccaactactactacacgatctcgcgccgttcatcgatacaatacgccaaacacaaaaaaaaacgaaaataatcgtccaacaaaataaacgaataacaacgtccaccgccaaaaaaaaaataacccttaaaatccatctaccaaaaacgattcgacgcgtcgtattcgaaccgacccgtaacgaaaatacccgataaaacgcccgacaacaaaccataacgaaccatcaaattataaacgatactaaaaacgaacataatatacccctaatcctcgaaccaacgcttaatcttacgaactccccaacgttcataacgatcataaaccatacgcaacaaaaccgtaatatcgtcaaataaacgattcgaaaaataatacgaaatacgcgaacgatcctaaaaaccgacgacaccttcctaaacccaacgctaaaaccacttataaccgcgttacaaataaaataccgaaacgacgacaaaaaaaacgaatattcg

SEQ ID NO: 15495 - DNA, 654 bp, Artificial Sequence
  chemically treated genomic DNA (Homo sapiens) CpG-island No: 15495
agttgtttttaattcgggaatattttaggttgtaattaagttttattagtttttttagtcgttagttttaagtttttcgtgttgtgttttcgtttttacgttgtatttcgtaattttattggttattcggttcggtaggtcgtaacgtttaaatacgttgattagttgttgttgtacggtttcgcgtcgtttatcggtatagtgcgttaggtatagggaaaaacgggagtggtcgtttagtagggtgagcggatggtagcgtttatcgttaaaaggaaagtggtttttaaaatttatttgttagaggcggttcggcgcgtcgtgttcgaatcggttcgtggcgggaatgttcggtgaagcgttcggtagtaggttatggcgggttattaggttatggacggtgttgaaggcgggtatggtgtgtttttggttttcgagttagcgtttaattttgcgggttttttagcgtttatgacggttatgggttatacgtagtagggtcgtgatgtcgttagatgagcggttcggggaatggtgcggaatgcgcgggcggttttgaagatcggcggtatttttttgagtttagcgttggagttatttgtagtcgcgttgtaggtgaaatgtcgaagcgacggtagagggaacggatgttcg

SEQ ID NO: 15496 - DNA, 654 bp, Artificial Sequence
  chemically treated genomic DNA (Homo sapiens) CpG-island No: 15496
cgaacatccgttccctctaccgtcgcttcgacatttcacctacaacgcgactacaaataactccaacgctaaactcaaaaaaataccgccgatcttcaaaaccgcccgcgcattccgcaccattccccgaaccgctcatctaacgacatcacgaccctactacgtataacccataaccgtcataaacgctaaaaaacccgcaaaattaaacgctaactcgaaaaccaaaaacacaccatacccgccttcaacaccgtccataacctaataacccgccataacctactaccgaacgcttcaccgaacattcccgccacgaaccgattcgaacacgacgcgccgaaccgcctctaacaaataaattttaaaaaccactttccttttaacgataaacgctaccatccgctcaccctactaaacgaccactcccgtttttccctatacctaacgcactataccgataaacgacgcgaaaccgtacaacaacaactaatcaacgtatttaaacgttacgacctaccgaaccgaataaccaataaaattacgaaatacaacgtaaaaacgaaaacacaacacgaaaaacttaaaactaacgactaaaaaaactaataaaacttaattacaacctaaaatattcccgaattaaaaacaact

SEQ ID NO: 15497 - DNA, 749 bp, Artificial Sequence
  chemically treated genomic DNA (Homo sapiens) CpG-island No: 15497
ggttttagtggtaggaggcgtttggaggaagcgcgggtttttaattttaacgttatttttaatattttttttacgcgtttcgagcgttatgtgtttttaagatcggtgcgggggcggggcgttttgggtagggttgtaggtgacgttatttcgggttttgggattcggagagcgtttggaggcggggtttggattttacgttcggcgcgttttttttttttaaggcgcgcggtcgggcggggtttttatgatttttttaaggcgcggttagagttttttcgtagaaaaacgatttaaaggagacgcgtggcgcgatggcggcggttttacgcgcgggtcggcggcgcgggtagtcgtttttggcgttgttgtttttgttgttggcgttattgtcgtcgggggtttcgtcgggcgtcgacgtttattttttcgaggagcgttggagttcggagtcgtttttgtaggcgtcgcgcgtgtttatcgcgttgttggcgcgaaacgcggtttacgcgttgtttattacgttgggcgtattcgagcggttgcggtattcgcgggagcgtacggcgttatggtgagtcgagttcgttgtttttattaggcgggttacgcgagtttttgtttgttgtttttataggggtgggtttacgcgagtttcgtgttcgcgtgtttttttttgggcgggttcgcgcgtgttttcgtgtcgttattttatcgggacggttttaagtatgtttttgttcgtggtt

SEQ ID NO: 15498 - DNA, 749 bp, Artificial Sequence
  chemically treated genomic DNA (Homo sapiens) CpG-island No: 15498
aaccacgaacaaaaacatacttaaaaccgtcccgataaaataacgacacgaaaacacgcgcgaacccgcccaaaaaaaaacacgcgaacacgaaactcgcgtaaacccacccctataaaaacaacaaacaaaaactcgcgtaacccgcctaataaaaacaacgaactcgactcaccataacgccgtacgctcccgcgaataccgcaaccgctcgaatacgcccaacgtaataaacaacgcgtaaaccgcgtttcgcgccaacaacgcgataaacacgcgcgacgcctacaaaaacgactccgaactccaacgctcctcgaaaaaataaacgtcgacgcccgacgaaacccccgacgacaataacgccaacaacaaaaacaacaacgccaaaaacgactacccgcgccgccgacccgcgcgtaaaaccgccgccatcgcgccacgcgtctcctttaaatcgtttttctacgaaaaaactctaaccgcgccttaaaaaaatcataaaaaccccgcccgaccgcgcgccttaaaaaaaaaaaacgcgccgaacgtaaaatccaaaccccgcctccaaacgctctccgaatcccaaaacccgaaataacgtcacctacaaccctacccaaaacgccccgcccccgcaccgatcttaaaaacacataacgctcgaaacgcgtaaaaaaaatattaaaaataacgttaaaattaaaaacccgcgcttcctccaaacgcctcctaccactaaaacc

SEQ ID NO: 15499 - DNA, 749 bp, Artificial Sequence
  chemically treated genomic DNA (Homo sapiens) CpG-island No: 15499
ggttacgggtaggggtatgtttagaatcgtttcgatggggtagcgatacggaagtacgcgcggattcgtttagaagaggatacgcgggtacggggttcgcgtggatttatttttatggggatagtaagtaggggttcgcgtgattcgtttgatggggatagcgggttcgatttattatagcgtcgtgcgttttcgcgggtgtcgtagtcgttcgagtgcgtttagcgtggtgggtaacgcgtgggtcgcgtttcgcgttaatagcgcgatgagtacgcgcggcgtttgtaggggcgatttcgggttttagcgtttttcggggaagtaggcgtcggcgttcggcggggttttcggcggtagtggcgttagtagtagaagtagtagcgttaggagcggttgttcgcgtcgtcggttcgcgcgtggggtcgtcgttatcgcgttacgcgttttttttaagtcgtttttttgcgggaggattttggtcgcgttttaaaggggttataggggtttcgttcggtcgcgcgttttaaaggggaggagcgcgtcgggcgtgaagtttaggtttcgtttttagacgtttttcgagttttaaggttcggagtgacgttatttgtagttttatttaggacgtttcgttttcgtatcgattttaaaggtatatagcgttcggagcgcgtggaagggatgttaggggtagcgttagggttaggaattcgcgttttttttaggcgttttttattattgagatt

SEQ ID NO: 15500 - DNA, 749 bp, Artificial Sequence
  chemically treated genomic DNA (Homo sapiens) CpG-island No: 15500
aatctcaataataaaaaacgcctaaaaaaaacgcgaattcctaaccctaacgctacccctaacatcccttccacgcgctccgaacgctatatacctttaaaatcgatacgaaaacgaaacgtcctaaataaaactacaaataacgtcactccgaaccttaaaactcgaaaaacgtctaaaaacgaaacctaaacttcacgcccgacgcgctcctcccctttaaaacgcgcgaccgaacgaaacccctataacccctttaaaacgcgaccaaaatcctcccgcaaaaaaacgacttaaaaaaaacgcgtaacgcgataacgacgaccccacgcgcgaaccgacgacgcgaacaaccgctcctaacgctactacttctactactaacgccactaccgccgaaaaccccgccgaacgccgacgcctacttccccgaaaaacgctaaaacccgaaatcgcccctacaaacgccgcgcgtactcatcgcgctattaacgcgaaacgcgacccacgcgttacccaccacgctaaacgcactcgaacgactacgacacccgcgaaaacgcacgacgctataataaatcgaacccgctatccccatcaaacgaatcacgcgaacccctacttactatccccataaaaataaatccacgcgaaccccgtacccgcgtatcctcttctaaacgaatccgcgcgtacttccgtatcgctaccccatcgaaacgattctaaacatacccctacccgtaacc

SEQ ID NO: 15501 - DNA, 661 bp, Artificial Sequence
  chemically treated genomic DNA (Homo sapiens) CpG-island No: 15501
ttgagtggttattgcggcggatttttcgtattggcgcgtatattcgtgggtggtttgtcggacgtaagcgtcgtcgtgtacgtaagtagatcgaataggcgttgttgaaattggcggaaggcgattattagtaagttgaaaagttgatggcgaaaaatgtcgattacgcggaataatcggtggtgaattatttattggttgtcgaagtcgcgtaataacgtggtgatgaagtacgcgttaattaatatttggaacgtagtagcggagttggtcggtaacgatattatatcggtagaaattattcgcgatacgtttagtaattggttcgtattgaaaattttgttgtacgttacggcgatggataagattgttggatacgttatagcgaaggttattatcgatagtataatcgtttaggatagcgaatacggcgtaatatttcgatattagcgtatggacgtacgttagcgcggtattttattttcgaataatcggatcgaaagattacgatcggtagatagtacgaatttttagacgttacgtttcggaattaatatcgtcgcggatatgggtacgaagagaatatacgagttagtcgtaaatagaagaaaaagttagtatattacgaggtataaatatatattaatacgcgtttgaataa

SEQ ID NO: 15502 - DNA, 661 bp, Artificial Sequence
  chemically treated genomic DNA (Homo sapiens) CpG-island No: 15502
ttattcaaacgcgtattaatatatatttatacctcgtaatatactaactttttcttctatttacgactaactcgtatattctcttcgtacccatatccgcgacgatattaattccgaaacgtaacgtctaaaaattcgtactatctaccgatcgtaatctttcgatccgattattcgaaaataaaataccgcgctaacgtacgtccatacgctaatatcgaaatattacgccgtattcgctatcctaaacgattatactatcgataataaccttcgctataacgtatccaacaatcttatccatcgccgtaacgtacaacaaaattttcaatacgaaccaattactaaacgtatcgcgaataatttctaccgatataatatcgttaccgaccaactccgctactacgttccaaatattaattaacgcgtacttcatcaccacgttattacgcgacttcgacaaccaataaataattcaccaccgattattccgcgtaatcgacatttttcgccatcaacttttcaacttactaataatcgccttccgccaatttcaacaacgcctattcgatctacttacgtacacgacgacgcttacgtccgacaaaccacccacgaatatacgcgccaatacgaaaaatccgccgcaataaccactcaa

SEQ ID NO: 15503 - DNA, 661 bp, Artificial Sequence
  chemically treated genomic DNA (Homo sapiens) CpG-island No: 15503
ttgtttaggcgcgtgttggtgtgtgtttgtgtttcgtgatgtgttgatttttttttttgtttgcggttggttcgtgtatttttttcgtgtttatgttcgcggcggtgttggtttcgaggcgtggcgtttgagggttcgtgttgtttgtcggtcgtggtttttcggttcggttgttcggggatgagatgtcgcgttggcgtgcgtttatgcgttggtgtcgggatattacgtcgtgttcgttgttttagacggttatattgtcggtgatggttttcgttgtgacgtgtttagtagttttatttatcgtcgtggcgtgtagtagggtttttagtacgggttagttgttagacgtatcgcgggtgatttttatcggtatggtgtcgttgtcggttagtttcgttgttgcgttttagatgttggttggcgcgtgttttattattacgttgttgcgcggtttcggtagttagtagatagtttattatcggttgtttcgcgtgatcggtatttttcgttattagttttttaatttgttgataatcgtttttcgttagttttagtagcgtttgttcggtttgtttacgtgtacggcgacgtttacgttcgataaattatttacgggtgtgcgcgttagtgcggaagattcgtcgtagtagttatttaa

SEQ ID NO: 15504 - DNA, 661 bp, Artificial Sequence
  chemically treated genomic DNA (Homo sapiens) CpG-island No: 15504
ttaaataactactacgacgaatcttccgcactaacgcgcacacccgtaaataatttatcgaacgtaaacgtcgccgtacacgtaaacaaaccgaacaaacgctactaaaactaacgaaaaacgattatcaacaaattaaaaaactaataacgaaaaataccgatcacgcgaaacaaccgataataaactatctactaactaccgaaaccgcgcaacaacgtaataataaaacacgcgccaaccaacatctaaaacgcaacaacgaaactaaccgacaacgacaccataccgataaaaatcacccgcgatacgtctaacaactaacccgtactaaaaaccctactacacgccacgacgataaataaaactactaaacacgtcacaacgaaaaccatcaccgacaatataaccgtctaaaacaacgaacacgacgtaatatcccgacaccaacgcataaacgcacgccaacgcgacatctcatccccgaacaaccgaaccgaaaaaccacgaccgacaaacaacacgaaccctcaaacgccacgcctcgaaaccaacaccgccgcgaacataaacacgaaaaaaatacacgaaccaaccgcaaacaaaaaaaaaaatcaacacatcacgaaacacaaacacacaccaacacgcgcctaaacaa

SEQ ID NO: 15505 - DNA, 598 bp, Artificial Sequence
  chemically treated genomic DNA (Homo sapiens) CpG-island No: 15505
tcgcgatgatcgttttcggtgcgcgggcgataaagttttcgttcgttagttgttttcgatacggttgattttatttttaattttcgttatttttttcgttagacgcgttagtttatttttttgttgatgaggttagttatcgggattagtagttttgtatcgtcgatgattttcgtaacggaaatcggatttttgttatcggtaggtagtacggtgatattttttagacgcgttagggtttgtaggaagttacggtttttatttacgcgacgttttgtattcgcgttgtaattacgtagtagtagttttagcggtttgttcggcgcgatgtttatttttgtacggatgttacgtatcgtaacgatcgtttgttttagttattcggtgtcggttagtgcggttttattaatttgagatgtatcgtattgcgggaacggttgtagtatgatggtgtcggtagtgatatcgtaaagtatttttatacgttgttagatggtttcggtgatgaacggaatgatcggatgcgcgaggcgtagtagattttttagtatagttattagcgtatggcgagtatcgcgtagttttgtttcggtgttat

SEQ ID NO: 15506 - DNA, 598 bp, Artificial Sequence
  chemically treated genomic DNA (Homo sapiens) CpG-island No: 15506
ataacaccgaaacaaaactacgcgatactcgccatacgctaataactatactaaaaaatctactacgcctcgcgcatccgatcattccgttcatcaccgaaaccatctaacaacgtataaaaatactttacgatatcactaccgacaccatcatactacaaccgttcccgcaatacgatacatctcaaattaataaaaccgcactaaccgacaccgaataactaaaacaaacgatcgttacgatacgtaacatccgtacaaaaataaacatcgcgccgaacaaaccgctaaaactactactacgtaattacaacgcgaatacaaaacgtcgcgtaaataaaaaccgtaacttcctacaaaccctaacgcgtctaaaaaatatcaccgtactacctaccgataacaaaaatccgatttccgttacgaaaatcatcgacgatacaaaactactaatcccgataactaacctcatcaacaaaaaaataaactaacgcgtctaacgaaaaaaataacgaaaattaaaaataaaatcaaccgtatcgaaaacaactaacgaacgaaaactttatcgcccgcgcaccgaaaacgatcatcgcga

SEQ ID NO: 15507 - DNA, 598 bp, Artificial Sequence
  chemically treated genomic DNA (Homo sapiens) CpG-island No: 15507
gtggtatcgaagtagaattgcgcggtattcgttatacgttggtgattgtattggaaggtttgttgcgtttcgcgtattcgattatttcgtttattatcgaaattatttggtagcgtgtgaaagtattttgcggtattattgtcgatattattatgttgtagtcgttttcgtagtacgatgtattttaggttgatgaagtcgtattggtcgatatcgaatggttgaaataggcgatcgttgcggtacgtaatattcgtgtagaaatgaatatcgcgtcgggtaaatcgttggagttgttgttgcgtggttgtagcgcggatgtagaacgtcgcgtaaatgaaaatcgtggttttttgtaaattttggcgcgtttggaaagtattatcgtgttgtttgtcgatgataaaggttcggttttcgttacgaagattatcgacggtgtagagttgttgatttcgatggttggttttattaataagaagatgagttggcgcgtttggcgaaagaagtggcgaagattgaaggtgaaattagtcgtatcgagaataattggcgaacgaaggttttgtcgttcgcgtatcggaagcggttatcgcga

SEQ ID NO: 15508 - DNA, 598 bp, Artificial Sequence
  chemically treated genomic DNA (Homo sapiens) CpG-island No: 15508
tcgcgataaccgcttccgatacgcgaacgacaaaaccttcgttcgccaattattctcgatacgactaatttcaccttcaatcttcgccacttctttcgccaaacgcgccaactcatcttcttattaataaaaccaaccatcgaaatcaacaactctacaccgtcgataatcttcgtaacgaaaaccgaacctttatcatcgacaaacaacacgataatactttccaaacgcgccaaaatttacaaaaaaccacgattttcatttacgcgacgttctacatccgcgctacaaccacgcaacaacaactccaacgatttacccgacgcgatattcatttctacacgaatattacgtaccgcaacgatcgcctatttcaaccattcgatatcgaccaatacgacttcatcaacctaaaatacatcgtactacgaaaacgactacaacataataatatcgacaataataccgcaaaatactttcacacgctaccaaataatttcgataataaacgaaataatcgaatacgcgaaacgcaacaaaccttccaatacaatcaccaacgtataacgaataccgcgcaattctacttcgataccac

SEQ ID NO: 15509 - DNA, 515 bp, Artificial Sequence
  chemically treated genomic DNA (Homo sapiens) CpG-island No: 15509
gatattacgtcgattatcgagaagtgaggattttataggtcgagagtttacgtgaagtcggagttcgtcggtgattgatagacgttttgaattttatagatgtcgtcgttttttatatttgcgcgcgttttgtttttttttcgcgtttcgcgaggtttcgtttcgcgtatgagcgacgtaaatatcgttttcgtagttcgcgatagttagtatcgttttagttaggcgtttgcgcgtttacgtattatttgtcgggagttgtagtttcggttcggtagattcggcgagtttagtggtcgcgtttcggtgcggcggcgttcgaggttcgaggcggaagtgggacggttaagtagggaagcgagggttcgggatcgacggtcgcggggcgtcgacgaggagtgtaggatttaggaagggcgagtgcgcggcgatagagttcggggaaggaggtagggtaaggtcgggtttgggggtaggtggttcgggtatttagttttgaagatgtataagaggaa

SEQ ID NO: 15510 - DNA, 515 bp, Artificial Sequence
  chemically treated genomic DNA (Homo sapiens) CpG-island No: 15510
ttcctcttatacatcttcaaaactaaatacccgaaccacctacccccaaacccgaccttaccctacctccttccccgaactctatcgccgcgcactcgcccttcctaaatcctacactcctcgtcgacgccccgcgaccgtcgatcccgaaccctcgcttccctacttaaccgtcccacttccgcctcgaacctcgaacgccgccgcaccgaaacgcgaccactaaactcgccgaatctaccgaaccgaaactacaactcccgacaaataatacgtaaacgcgcaaacgcctaactaaaacgatactaactatcgcgaactacgaaaacgatatttacgtcgctcatacgcgaaacgaaacctcgcgaaacgcgaaaaaaaaacaaaacgcgcgcaaatataaaaaacgacgacatctataaaattcaaaacgtctatcaatcaccgacgaactccgacttcacgtaaactctcgacctataaaatcctcacttctcgataatcgacgtaatatc

SEQ ID NO: 15511 - DNA, 515 bp, Artificial Sequence
  chemically treated genomic DNA (Homo sapiens) CpG-island No: 15511
ttttttttgtgtatttttaaggttggatgttcggattatttgtttttaagttcggttttgttttgttttttttttcgggttttgtcgtcgcgtattcgttttttttgagttttgtatttttcgtcggcgtttcgcggtcgtcgatttcgagttttcgtttttttgtttggtcgttttattttcgtttcgggtttcgggcgtcgtcgtatcggagcgcggttattgggttcgtcgggtttgtcgagtcgaaattataattttcggtaggtagtgcgtgggcgcgtaggcgtttggttggggcggtgttgattgtcgcgggttgcgagggcggtgtttgcgtcgtttatgcgcggggcgggatttcgcggggcgcgggaaagaggtagagcgcgcgtaggtgtgaggggcggcgatatttgtggggtttagagcgtttgttagttatcgacgggtttcggttttacgtgggttttcggtttgtggagtttttatttttcggtggtcggcgtagtgtt

SEQ ID NO: 15512 - DNA, 515 bp, Artificial Sequence
  chemically treated genomic DNA (Homo sapiens) CpG-island No: 15512
aacactacgccgaccaccgaaaaataaaaactccacaaaccgaaaacccacgtaaaaccgaaacccgtcgataactaacaaacgctctaaaccccacaaatatcgccgcccctcacacctacgcgcgctctacctctttcccgcgccccgcgaaatcccgccccgcgcataaacgacgcaaacaccgccctcgcaacccgcgacaatcaacaccgccccaaccaaacgcctacgcgcccacgcactacctaccgaaaattataatttcgactcgacaaacccgacgaacccaataaccgcgctccgatacgacgacgcccgaaacccgaaacgaaaataaaacgaccaaacaaaaaaacgaaaactcgaaatcgacgaccgcgaaacgccgacgaaaaatacaaaactcaaaaaaaacgaatacgcgacgacaaaacccgaaaaaaaaaacaaaacaaaaccgaacttaaaaacaaataatccgaacatccaaccttaaaaatacacaaaaaaaa

SEQ ID NO: 15513 - DNA, 833 bp, Artificial Sequence
  chemically treated genomic DNA (Homo sapiens) CpG-island No: 15513
tcggtcgggttatgttgattgttttttcgcggcgttcggaagcgatttttagtaaataaagtcgtgtgtgggcgtagttttagaagtttggggcgcgtagtttagtttaagagaggcgggggaggaatgttgtgaatgaatttcgggttcgtttcgaaatttcgtataaggtttgggtcgcgggggtttttttattttgattggtttttggcgtttcgtgattgatagcgtttttcgttgtgcgttttggttgggtaaataagaaaagattggtatcgtagttatcgagtgagtagcgaggtttggatacgggtttggcggcgtagttaatggcgggggagggtcgaggaggtcgagggggggttaatagggataggcggtgggggcgggacgacggcggagttaaagcggcggttgaagtagttttattgttgtgaagagttttaaaggggtcgtattattttgtcggttcggcgcgggtcgggggtgggtgcggtaggggttcggggcggtcgagcgtagaggacggacgggaaggagggtagggggcgcgggagtcggcgaagcggagcgggtatcggatcgagttttttaaagaggtttcgtttcggttttggtttcggtcgggtcggatggaatttttcgcggttaagcggagtcggggttgtttcgcgggattcgaggagcgcgatgtcggggtcggggtcgcgcgtggtcggggtcggttcgaggcgttgttggattttagcgttaagcgggtagtcgagagttgggttttcgagtaggtgatcgcgggggaagggggcgggggtagggacgtatttttagtattt

SEQ ID NO: 15514 - DNA, 833 bp, Artificial Sequence
  chemically treated genomic DNA (Homo sapiens) CpG-island No: 15514
aaatactaaaaatacgtccctacccccgcccccttcccccgcgatcacctactcgaaaacccaactctcgactacccgcttaacgctaaaatccaacaacgcctcgaaccgaccccgaccacgcgcgaccccgaccccgacatcgcgctcctcgaatcccgcgaaacaaccccgactccgcttaaccgcgaaaaattccatccgacccgaccgaaaccaaaaccgaaacgaaacctctttaaaaaactcgatccgatacccgctccgcttcgccgactcccgcgccccctaccctccttcccgtccgtcctctacgctcgaccgccccgaacccctaccgcacccacccccgacccgcgccgaaccgacaaaataatacgacccctttaaaactcttcacaacaataaaactacttcaaccgccgctttaactccgccgtcgtcccgcccccaccgcctatccctattaaccccccctcgacctcctcgaccctcccccgccattaactacgccgccaaacccgtatccaaacctcgctactcactcgataactacgataccaatcttttcttatttacccaaccaaaacgcacaacgaaaaacgctatcaatcacgaaacgccaaaaaccaatcaaaataaaaaaacccccgcgacccaaaccttatacgaaatttcgaaacgaacccgaaattcattcacaacattcctcccccgcctctcttaaactaaactacgcgccccaaacttctaaaactacgcccacacacgactttatttactaaaaatcgcttccgaacgccgcgaaaaaacaatcaacataacccgaccga

SEQ ID NO: 15515 - DNA, 833 bp, Artificial Sequence
  chemically treated genomic DNA (Homo sapiens) CpG-island No: 15515
aggtgttgggggtgcgtttttgttttcgtttttttttttcgcggttatttgttcgaaggtttagttttcggttattcgtttggcgttgaggtttagtagcgtttcgggtcggtttcggttacgcgcggtttcggtttcggtatcgcgtttttcgggtttcgcggggtagtttcggtttcgtttggtcgcggggggttttattcggttcggtcggggttagggtcggggcggggtttttttggggggttcggttcgatgttcgtttcgtttcgtcggttttcgcgttttttgttttttttttcgttcgttttttgcgttcggtcgtttcggatttttatcgtatttattttcgattcgcgtcgggtcggtagggtgatgcggtttttttaagattttttataataatgaagttgttttagtcgtcgttttagtttcgtcgtcgtttcgtttttatcgtttgtttttattggttttttttcggttttttcggttttttttcgttattggttgcgtcgttagattcgtgtttaagtttcgttgtttattcgatgattgcgatgttagtttttttttgtttatttaattagagcgtatagcgaggggcgttgttaattacggggcgttagaggttaattagagtgggaggattttcgcggtttaggttttatgcggagtttcggggcgggttcggggtttatttataatatttttttttcgttttttttgggttggattgcgcgttttaggtttttggggttgcgtttatatacggttttgtttattgagggtcgttttcgggcgtcgcgaggggataattaatatagttcggtcgg

SEQ ID NO: 15516 - DNA, 833 bp, Artificial Sequence
  chemically treated genomic DNA (Homo sapiens) CpG-island No: 15516
ccgaccgaactatattaattatcccctcgcgacgcccgaaaacgaccctcaataaacaaaaccgtatataaacgcaaccccaaaaacctaaaacgcgcaatccaacccaaaaaaaacgaaaaaaaaatattataaataaaccccgaacccgccccgaaactccgcataaaacctaaaccgcgaaaatcctcccactctaattaacctctaacgccccgtaattaacaacgcccctcgctatacgctctaattaaataaacaaaaaaaaactaacatcgcaatcatcgaataaacaacgaaacttaaacacgaatctaacgacgcaaccaataacgaaaaaaaaccgaaaaaaccgaaaaaaaaccaataaaaacaaacgataaaaacgaaacgacgacgaaactaaaacgacgactaaaacaacttcattattataaaaaatcttaaaaaaaccgcatcaccctaccgacccgacgcgaatcgaaaataaatacgataaaaatccgaaacgaccgaacgcaaaaaacgaacgaaaaaaaaaacaaaaaacgcgaaaaccgacgaaacgaaacgaacatcgaaccgaaccccccaaaaaaaccccgccccgaccctaaccccgaccgaaccgaataaaaccccccgcgaccaaacgaaaccgaaactaccccgcgaaacccgaaaaacgcgataccgaaaccgaaaccgcgcgtaaccgaaaccgacccgaaacgctactaaacctcaacgccaaacgaataaccgaaaactaaaccttcgaacaaataaccgcgaaaaaaaaaaacgaaaacaaaaacgcacccccaacacct

SEQ ID NO: 15517 - DNA, 606 bp, Artificial Sequence
  chemically treated genomic DNA (Homo sapiens) CpG-island No: 15517
cgtgacgtcgttgagatagatagagatatttatttattagattaaagttatttgggtagggcgaataaacgggattttcgagtggtacgtttttaaggcggggcgggaatacggtaacgggtcgcgggggttgttattgtcgttattaattaagagtcgagatggttttgatggataggtatagcgcgagtgcgggttttcgtttaatcggcgggtcgttgtttcgaaaaaggattaatgaggaggcggtaggggtggggcgaaggggtcggttgtttcggaagtggagggagggggtgaaaatggcgtttagttcgaaatcggagcggaatagcggggttgggagcggcggcggcggtttcgggggagtcggagggaagcgggtagtagggcggcggcgcggagtacgtttttaagtagttggagcgggttaaggtgaggtttggagtcggagtggggagcgcgtcggagggtggggagtagggacgagggaggcggagcggaggacgggcgtcgcggggtgaggggttgggggcggggttttagggagggggttcggatgtagggtttgggcggggttcgggggagatggtttggatggagggg

SEQ ID NO: 15518 - DNA, 606 bp, Artificial Sequence
  chemically treated genomic DNA (Homo sapiens) CpG-island No: 15518
cccctccatccaaaccatctcccccgaaccccgcccaaaccctacatccgaaccccctccctaaaaccccgcccccaacccctcaccccgcgacgcccgtcctccgctccgcctccctcgtccctactccccaccctccgacgcgctccccactccgactccaaacctcaccttaacccgctccaactacttaaaaacgtactccgcgccgccgccctactacccgcttccctccgactcccccgaaaccgccgccgccgctcccaaccccgctattccgctccgatttcgaactaaacgccattttcaccccctccctccacttccgaaacaaccgaccccttcgccccacccctaccgcctcctcattaatcctttttcgaaacaacgacccgccgattaaacgaaaacccgcactcgcgctatacctatccatcaaaaccatctcgactcttaattaataacgacaataacaacccccgcgacccgttaccgtattcccgccccgccttaaaaacgtaccactcgaaaatcccgtttattcgccctacccaaataactttaatctaataaataaatatctctatctatctcaacgacgtcacg

SEQ ID NO: 15519 - DNA, 606 bp, Artificial Sequence
  chemically treated genomic DNA (Homo sapiens) CpG-island No: 15519
tttttttatttaagttatttttttcgggtttcgtttaggttttgtattcgagttttttttttggggtttcgtttttaattttttatttcgcgacgttcgtttttcgtttcgtttttttcgtttttattttttatttttcggcgcgttttttatttcggttttaggttttattttgattcgttttagttgtttgaggacgtgtttcgcgtcgtcgttttgttgttcgttttttttcggttttttcggggtcgtcgtcgtcgtttttagtttcgttgtttcgtttcgatttcgagttgggcgttatttttattttttttttttattttcggagtaatcggttttttcgttttatttttgtcgtttttttattggttttttttcgggatagcggttcgtcggttgggcgaaagttcgtattcgcgttatgtttgtttattaaagttatttcgatttttgattggtagcgatagtaatagttttcgcggttcgttgtcgtattttcgtttcgttttaaggacgtattattcggaggtttcgtttgttcgttttgtttagataattttgatttgataggtgaatatttttgtttgttttaacggcgttacg

SEQ ID NO: 15520 - DNA, 606 bp, Artificial Sequence
  chemically treated genomic DNA (Homo sapiens) CpG-island No: 15520
cgtaacgccgttaaaacaaacaaaaatattcacctatcaaatcaaaattatctaaacaaaacgaacaaacgaaacctccgaataatacgtccttaaaacgaaacgaaaatacgacaacgaaccgcgaaaactattactatcgctaccaatcaaaaatcgaaataactttaataaacaaacataacgcgaatacgaactttcgcccaaccgacgaaccgctatcccgaaaaaaaaccaataaaaaaacgacaaaaataaaacgaaaaaaccgattactccgaaaataaaaaaaaaaaataaaaataacgcccaactcgaaatcgaaacgaaacaacgaaactaaaaacgacgacgacgaccccgaaaaaaccgaaaaaaaacgaacaacaaaacgacgacgcgaaacacgtcctcaaacaactaaaacgaatcaaaataaaacctaaaaccgaaataaaaaacgcgccgaaaaataaaaaataaaaacgaaaaaaacgaaacgaaaaacgaacgtcgcgaaataaaaaattaaaaacgaaaccccaaaaaaaaaactcgaatacaaaacctaaacgaaacccgaaaaaaataacttaaataaaaaaa

SEQ ID NO: 15521 - DNA, 1732 bp, Artificial Sequence
  chemically treated genomic DNA (Homo sapiens) CpG-island No: 15521
gcgcgcgttgggaattcgattttttttttcgcgttttttcgtttgcgtttttggttcgtgcgtgtcgtttatttgtgtgcgtgcgtagatgcgtttttagatgcgaatttttggtgtaggttttgtcgtagttcgcgtagttgtaggtgtgagtggcggtgcgtttgcggggttaagagcggcggtcgcgttttggtttggtttttagtagttttagcggggacgtaggcggcgtgaggagatcgcgggcggcggggggcgttaggtttagggttgtcgcggcggcggtcgcgtcgtcgaagagatcgaaggttgggggcgtaggcggcgcgtaatgtaggtcgggttcgggcgcgtcgaaattagggttatcgaaaggcggcgggaaggaggcgcgcggatcgggcgcgggtaggcgcgcggggtcgtcggggttgagcggcggtgtgtcgggcggcggcggggggcggttttcgggatttcgtatgtacgaagtcgtcgggttcggggcgttttcgcgtttgaggtcgcgcggtttacgggttagttcgggggcgtagtcgtagtcgtcgtcgtcgttcgttttagggggttcggttttgattaggcggtcgggcggcgttagtagaaagcggtcgtgtagtgcgggttttagcggcgtatttagttcgggtcgtagtagtttagatattaggttattcgcgggggcgttgtagggcgggggcgcgtcgggttcggggtaatagaacgtagcgcggcgggggcggcggcggcggtttcggggcggtttcggcgtttaggttatttagttttatggataggatgaagtttagtacgttgttgaggtcgtcgtcggtgtcgtcggattcgggttcggcgcgcggttagcgttgcgggcgatagggtaatgggcgtgagcgggcggcggggttcggggggcgttgtttgttttttattattttaagttcgcgattttcgtggttcgtattttttttttttgagtttgtagttttcgttttcgcgttttgttatttcgtagtttacgttttattatttcgagttcgtcgtttacggtttcggtcgtttcgtcgttttcgtcgtttttattttttgtaggtcgcgttcgcggtacgggttggcgaaagtggagaaggacggtaggatgggtttatttagcgttatggtcgggattcggggagaaaggacgcggacggggatatcggtgagtggttgttcgaggtcgggttggtcggggcgcgggcgggcggggacggttttgtgggtcgcggtcgggttcgtttaagttttataggcgcggcgcgcgcgggggtcgggttaaagcggcggcggcggaaacgcgtttcggatggggacgagtttcgggcgtagtttaaatttagtcgcggtatataagtcggcgggcggtagcggtcgtggttattgcggcggtttgggttttgcgttgatagttcggtttttcgcgcgtcgttagggtcgcgtttttttttttttcgggtttcgttttcgttcgttttttcggcgacgttgttaatacgcgttttataatagcggcgtgacgtttagggattttttcgggcgtttcgggttttcgtttgcgcgagtatttcggggatttggagcgggggcggtgtcggggttttttagagatttttaggggagtatcgggtttggcggttttttcggattttttgacggaaggggagattggttt

SEQ ID NO: 15522 - DNA, 1732 bp, Artificial Sequence
  chemically treated genomic DNA (Homo sapiens) CpG-island No: 15522
aaaccaatctccccttccgtcaaaaaatccgaaaaaaccgccaaacccgatactcccctaaaaatctctaaaaaaccccgacaccgcccccgctccaaatccccgaaatactcgcgcaaacgaaaacccgaaacgcccgaaaaaatccctaaacgtcacgccgctattataaaacgcgtattaacaacgtcgccgaaaaaacgaacgaaaacgaaacccgaaaaaaaaaaaaacgcgaccctaacgacgcgcgaaaaaccgaactatcaacgcaaaacccaaaccgccgcaataaccacgaccgctaccgcccgccgacttatataccgcgactaaatttaaactacgcccgaaactcgtccccatccgaaacgcgtttccgccgccgccgctttaacccgacccccgcgcgcgccgcgcctataaaacttaaacgaacccgaccgcgacccacaaaaccgtccccgcccgcccgcgccccgaccaacccgacctcgaacaaccactcaccgatatccccgtccgcgtcctttctccccgaatcccgaccataacgctaaataaacccatcctaccgtccttctccactttcgccaacccgtaccgcgaacgcgacctacaaaaaataaaaacgacgaaaacgacgaaacgaccgaaaccgtaaacgacgaactcgaaataataaaacgtaaactacgaaataacaaaacgcgaaaacgaaaactacaaactcaaaaaaaaaaaatacgaaccacgaaaatcgcgaacttaaaataataaaaaacaaacaacgccccccgaaccccgccgcccgctcacgcccattaccctatcgcccgcaacgctaaccgcgcgccgaacccgaatccgacgacaccgacgacgacctcaacaacgtactaaacttcatcctatccataaaactaaataacctaaacgccgaaaccgccccgaaaccgccgccgccgcccccgccgcgctacgttctattaccccgaacccgacgcgcccccgccctacaacgcccccgcgaataacctaatatctaaactactacgacccgaactaaatacgccgctaaaacccgcactacacgaccgctttctactaacgccgcccgaccgcctaatcaaaaccgaaccccctaaaacgaacgacgacgacgactacgactacgcccccgaactaacccgtaaaccgcgcgacctcaaacgcgaaaacgccccgaacccgacgacttcgtacatacgaaatcccgaaaaccgccccccgccgccgcccgacacaccgccgctcaaccccgacgaccccgcgcgcctacccgcgcccgatccgcgcgcctccttcccgccgcctttcgataaccctaatttcgacgcgcccgaacccgacctacattacgcgccgcctacgcccccaaccttcgatctcttcgacgacgcgaccgccgccgcgacaaccctaaacctaacgccccccgccgcccgcgatctcctcacgccgcctacgtccccgctaaaactactaaaaaccaaaccaaaacgcgaccgccgctcttaaccccgcaaacgcaccgccactcacacctacaactacgcgaactacgacaaaacctacaccaaaaattcgcatctaaaaacgcatctacgcacgcacacaaataaacgacacgcacgaaccaaaaacgcaaacgaaaaaacgcgaaaaaaaaaatcgaattcccaacgcgcgc

SEQ ID NO: 15523 - DNA, 1732 bp, Artificial Sequence
  chemically treated genomic DNA (Homo sapiens) CpG-island No: 15523
gagttaattttttttttcgttaagggattcggggagatcgttaagttcggtgtttttttgagagtttttgagaggtttcgatatcgttttcgttttaggttttcgggatgttcgcgtaggcgggagttcggggcgttcggggggatttttgagcgttacgtcgttgttgtggagcgcgtgttgataacgtcgtcggggagacgggcgggggcggggttcgggagagggggaggcgcggttttggcggcgcgcgaggggtcgggttgttagcgtaaggtttaggtcgtcgtagtggttacggtcgttgtcgttcgtcggtttatatatcgcggttaaatttaggttgcgttcggagttcgtttttattcgggacgcgttttcgtcgtcgtcgttttggttcggttttcgcgcgcgtcgcgtttataaggtttgggcgggttcggtcgcggtttatagagtcgttttcgttcgttcgcgtttcgattagttcggtttcgggtagttatttatcggtgttttcgttcgcgtttttttttttcgggtttcggttatggcgttgagtgaatttattttgtcgtttttttttattttcgttagttcgtgtcgcgagcgcggtttgtaggaggtgagggcggcggggacggcggggcggtcgggatcgtgggcggcgggttcggggtagtagaacgtgggttgcggggtgataggacgcgaaggcggggattgtagatttaggagaggaggatgcgggttacggggatcgcggatttagggtggtaaaaggtaagtagcgtttttcgagtttcgtcgttcgtttacgtttattgttttgtcgttcgtagcgttggtcgcgcgtcgaattcgagttcggcggtatcgacgacgattttaatagcgtgttggattttattttgtttatggggttggatggtttgggcgtcgaggtcgtttcggagtcgtcgtcgtcgttttcgtcgcgttgcgttttattatttcgaattcggcgcgttttcgttttatagcgttttcgcgggtggtttggtgtttgagttgttgcgattcgagttggatgcgtcgttggggttcgtattgtacggtcgttttttgttggcgtcgttcggtcgtttggttaaggtcgagttttttgaagcggacggcggcggcggttacggttgcgttttcgggttgattcgtggatcgcgcggttttaagcgcgagggcgtttcgggttcggcggtttcgtgtatgcgaggtttcgggggtcgtttttcgtcgtcgttcgatatatcgtcgtttagtttcgacggtttcgcgcgtttgttcgcgttcggttcgcgcgtttttttttcgtcgtttttcggtggttttggtttcggcgcgttcgggttcggtttgtattacgcgtcgtttgcgtttttagttttcggttttttcgacgacgcggtcgtcgtcgcggtagttttgggtttggcgtttttcgtcgttcgcggtttttttacgtcgtttgcgttttcgttggagttgttggaggttaagttaaagcgcggtcgtcgtttttggtttcgtaaacgtatcgttatttatatttgtagttacgcgggttgcggtaagatttatattaagagttcgtatttgaaggcgtatttgcgtacgtatataggtgggcggtacgtacgagttaggagcgtaggcggggggacgcgggaggagaggtcggatttttagcgcgcgt

SEQ ID NO: 15524 - DNA, 1732 bp, Artificial Sequence
  chemically treated genomic DNA (Homo sapiens) CpG-island No: 15524
acgcgcgctaaaaatccgacctctcctcccgcgtccccccgcctacgctcctaactcgtacgtaccgcccacctatatacgtacgcaaatacgccttcaaatacgaactcttaatataaatcttaccgcaacccgcgtaactacaaatataaataacgatacgtttacgaaaccaaaaacgacgaccgcgctttaacttaacctccaacaactccaacgaaaacgcaaacgacgtaaaaaaaccgcgaacgacgaaaaacgccaaacccaaaactaccgcgacgacgaccgcgtcgtcgaaaaaaccgaaaactaaaaacgcaaacgacgcgtaatacaaaccgaacccgaacgcgccgaaaccaaaaccaccgaaaaacgacgaaaaaaaaacgcgcgaaccgaacgcgaacaaacgcgcgaaaccgtcgaaactaaacgacgatatatcgaacgacgacgaaaaacgacccccgaaacctcgcatacacgaaaccgccgaacccgaaacgccctcgcgcttaaaaccgcgcgatccacgaatcaacccgaaaacgcaaccgtaaccgccgccgccgtccgcttcaaaaaactcgaccttaaccaaacgaccgaacgacgccaacaaaaaacgaccgtacaatacgaaccccaacgacgcatccaactcgaatcgcaacaactcaaacaccaaaccacccgcgaaaacgctataaaacgaaaacgcgccgaattcgaaataataaaacgcaacgcgacgaaaacgacgacgacgactccgaaacgacctcgacgcccaaaccatccaaccccataaacaaaataaaatccaacacgctattaaaatcgtcgtcgataccgccgaactcgaattcgacgcgcgaccaacgctacgaacgacaaaacaataaacgtaaacgaacgacgaaactcgaaaaacgctacttaccttttaccaccctaaatccgcgatccccgtaacccgcatcctcctctcctaaatctacaatccccgccttcgcgtcctatcaccccgcaacccacgttctactaccccgaacccgccgcccacgatcccgaccgccccgccgtccccgccgccctcacctcctacaaaccgcgctcgcgacacgaactaacgaaaataaaaaaaaacgacaaaataaattcactcaacgccataaccgaaacccgaaaaaaaaaaacgcgaacgaaaacaccgataaataactacccgaaaccgaactaatcgaaacgcgaacgaacgaaaacgactctataaaccgcgaccgaacccgcccaaaccttataaacgcgacgcgcgcgaaaaccgaaccaaaacgacgacgacgaaaacgcgtcccgaataaaaacgaactccgaacgcaacctaaatttaaccgcgatatataaaccgacgaacgacaacgaccgtaaccactacgacgacctaaaccttacgctaacaacccgacccctcgcgcgccgccaaaaccgcgcctccccctctcccgaaccccgcccccgcccgtctccccgacgacgttatcaacacgcgctccacaacaacgacgtaacgctcaaaaatccccccgaacgccccgaactcccgcctacgcgaacatcccgaaaacctaaaacgaaaacgatatcgaaacctctcaaaaactctcaaaaaaacaccgaacttaacgatctccccgaatcccttaacgaaaaaaaaaattaactc

SEQ ID NO: 15525 - DNA, 565 bp, Artificial Sequence
  chemically treated genomic DNA (Homo sapiens) CpG-island No: 15525
  unsure (114, 282)
tttcgttggcgattcggggttgtgtttcgtaggtttttgggtttttataaaacgtaatgggcgagttaatttaaggtacggttaggatttcggttatttggaggtatgtggttnacgtcgatgattggttaggtcggtggattattaagcgtagttattaatgatttggcggtgatagaggtatgagataaatgatttcggttatgtaatgtgtaggcgtagtttgcggcgtaagtttgttatgggttcgtaggttaatattgtgttacgtggtataggcgngtagattttagagtggtaggaatatatttattgcggcgttatttaattgttaagatttgggtttgaaatagcgggagtattcgtggttttgttatagtgtagtattatacgtttgggtttaatagtttacgcggttgtttattaagtgtatagaacgattgttaaaagcgacgcgattaagtcgttaacgtttcgtatgttttgatacggtcgattatgagaggattatattagtatatattatgttcgtggttatagggtttgtgttagagtaattgtatat

SEQ ID NO: 15526 - DNA, 565 bp, Artificial Sequence
  chemically treated genomic DNA (Homo sapiens) CpG-island No: 15526
  unsure (284, 452)
atatacaattactctaacacaaaccctataaccacgaacataatatatactaatataatcctctcataatcgaccgtatcaaaacatacgaaacgttaacgacttaatcgcgtcgcttttaacaatcgttctatacacttaataaacaaccgcgtaaactattaaacccaaacgtataatactacactataacaaaaccacgaatactcccgctatttcaaacccaaatcttaacaattaaataacgccgcaataaatatattcctaccactctaaaatctacncgcctataccacgtaacacaatattaacctacgaacccataacaaacttacgccgcaaactacgcctacacattacataaccgaaatcatttatctcatacctctatcaccgccaaatcattaataactacgcttaataatccaccgacctaaccaatcatcgacgtnaaccacatacctccaaataaccgaaatcctaaccgtaccttaaattaactcgcccattacgttttataaaaacccaaaaacctacgaaacacaaccccgaatcgccaacgaaa

SEQ ID NO: 15527 - DNA, 565 bp, Artificial Sequence
  chemically treated genomic DNA (Homo sapiens) CpG-island No: 15527
  unsure (284, 452)
gtgtgtagttattttggtataagttttgtggttacgagtatggtgtgtattggtgtgatttttttatagtcgatcgtgttaggatatgcgaagcgttggcgatttggtcgcgtcgtttttaataatcgttttgtgtatttggtgaataatcgcgtgggttgttgagtttagacgtgtaatattgtattatgataagattacgagtattttcgttattttaggtttaggttttggtagttagataacgtcgtaatggatgtgtttttgttattttggaatttgtncgtttatattacgtaatatagtattagtttgcgagtttatagtagatttgcgtcgtagattgcgtttgtatattgtatagtcggggttatttattttatatttttattatcgttaagttattggtgattgcgtttagtaatttatcgatttgattagttatcggcgtnggttatatatttttaggtaatcgaaattttagtcgtattttggattggttcgtttattacgttttataggggtttaagagtttgcggaatatagtttcgggtcgttaacgaag

SEQ ID NO: 15528 - DNA, 565 bp, Artificial Sequence
  chemically treated genomic DNA (Homo sapiens) CpG-island No: 15528
  unsure (114, 282)
cttcgttaacgacccgaaactatattccgcaaactcttaaacccctataaaacgtaataaacgaaccaatccaaaatacgactaaaatttcgattacctaaaaatatataaccnacgccgataactaatcaaatcgataaattactaaacgcaatcaccaataacttaacgataataaaaatataaaataaataaccccgactatacaatatacaaacgcaatctacgacgcaaatctactataaactcgcaaactaatactatattacgtaatataaacgnacaaattccaaaataacaaaaacacatccattacgacgttatctaactaccaaaacctaaacctaaaataacgaaaatactcgtaatcttatcataatacaatattacacgtctaaactcaacaacccacgcgattattcaccaaatacacaaaacgattattaaaaacgacgcgaccaaatcgccaacgcttcgcatatcctaacacgatcgactataaaaaaatcacaccaatacacaccatactcgtaaccacaaaacttataccaaaataactacacac

SEQ ID NO: 15529 - DNA, 596 bp, Artificial Sequence
  chemically treated genomic DNA (Homo sapiens) CpG-island No: 15529
gcgggagcgtggggcgtagattcgtattgttataggaatttttcggtttttcgaagagtttcgcgtcggggtttttgtttcgtacgtcggttggggcgggagttaggttttcgtagtttttttttatcgttttgcgttttttttgtttttttagaagtcgttattaaagtttagtttttgattaggtttcggtttcgttggtcggcgtagtttcggcgattattttaggcggtttggcgtacgcgaggattcgtcgcgttttagatgtaggtgttttttttttttagtcgtcgatcgatagtgtacgtcgcggtcgtcggaagtgatagcgtttgtcgttggggagttttcgtttttttcgtttcggcgtttcgtttaggtttcgtttttaggtgttttcgtttttttttttttcgtgtcgttcgttttttgttagtttttttttttttttttttttttttttttttttttcgttttttttttcgtatttgagcgtacgtatttgttcgggttcggttttttttttttttttttttttttttttttcgttcggtcgcgggagtttcgtggttgcgttatcgtcgtttttttagata

SEQ ID NO: 15530 - DNA, 596 bp, Artificial Sequence
  chemically treated genomic DNA (Homo sapiens) CpG-island No: 15530
tatctaaaaaaacgacgataacgcaaccacgaaactcccgcgaccgaacgaaaaaaaaaaaaaaaaaaaaaaaaaaaaaaccgaacccgaacaaatacgtacgctcaaatacgaaaaaaaaaacgaaaaaaaaaaaaaaaaaaaaaaaaaaaaaaaaaaactaacaaaaaacgaacgacacgaaaaaaaaaaaaacgaaaacacctaaaaacgaaacctaaacgaaacgccgaaacgaaaaaaacgaaaactccccaacgacaaacgctatcacttccgacgaccgcgacgtacactatcgatcgacgactaaaaaaaaaaaacacctacatctaaaacgcgacgaatcctcgcgtacgccaaaccgcctaaaataatcgccgaaactacgccgaccaacgaaaccgaaacctaatcaaaaactaaactttaataacgacttctaaaaaaacaaaaaaaacgcaaaacgataaaaaaaaactacgaaaacctaactcccgccccaaccgacgtacgaaacaaaaaccccgacgcgaaactcttcgaaaaaccgaaaaattcctataacaatacgaatctacgccccacgctcccgc

SEQ ID NO: 15531 - DNA, 596 bp, Artificial Sequence
  chemically treated genomic DNA (Homo sapiens) CpG-island No: 15531
tgtttgggggggcggcggtgacgtagttacgaggttttcgcggtcgggcggggaaagagggaggggagaggaggagggagtcgggttcgggtaggtgcgtacgtttaggtgcgagagaggaagcgagaggaaggagaggggagagggagagggagagaggttgatagaaagcgagcgatacgggagggggaggggcgggaatatttaggggcgaggtttgggcggggcgtcgaggcggaaggggcgggagttttttaacgataggcgttgttattttcggcggtcgcggcgtgtattgtcggtcggcggttaaggaggggaggtatttgtatttggggcgcggcgaattttcgcgtgcgttaggtcgtttggggtagtcgtcgagattgcgtcggttagcggggtcgaaatttaattaggagttgagttttgatggcggtttttggagggataaagaaggcgtagagcggtgggaggaggttgcgagaatttagttttcgttttagtcgacgtgcgagataaaggtttcggcgcggggtttttcggaaggtcgggaggtttttgtgataatgcgagtttgcgttttacgttttcgt

SEQ ID NO: 15532 - DNA, 596 bp, Artificial Sequence
  chemically treated genomic DNA (Homo sapiens) CpG-island No: 15532
acgaaaacgtaaaacgcaaactcgcattatcacaaaaacctcccgaccttccgaaaaaccccgcgccgaaacctttatctcgcacgtcgactaaaacgaaaactaaattctcgcaacctcctcccaccgctctacgccttctttatccctccaaaaaccgccatcaaaactcaactcctaattaaatttcgaccccgctaaccgacgcaatctcgacgactaccccaaacgacctaacgcacgcgaaaattcgccgcgccccaaatacaaatacctcccctccttaaccgccgaccgacaatacacgccgcgaccgccgaaaataacaacgcctatcgttaaaaaactcccgccccttccgcctcgacgccccgcccaaacctcgcccctaaatattcccgcccctccccctcccgtatcgctcgctttctatcaacctctctccctctccctctcccctctccttcctctcgcttcctctctcgcacctaaacgtacgcacctacccgaacccgactccctcctcctctcccctccctctttccccgcccgaccgcgaaaacctcgtaactacgtcaccgccgcccccccaaaca

SEQ ID NO: 15533 - DNA, 568 bp, Artificial Sequence
  chemically treated genomic DNA (Homo sapiens) CpG-island No: 15533
tgacggtaatgtgttatttggcggttggttatttgagagtatgaatcggagagtattacgtcgcgtttagcgagcggacgttttgttttgcgagtttggttatcgtttttttgcgtttattgtcgggttaggttaatcgttagattagaatcgttcgttattagtggggtatcgcgtaaggtttttttttgaatttttagatggtgttcggttagcgtattaagtatcgcgtagcggtagtttttttgttgtaagcgagttagtttttgacgaacggtatttatattttgttcgaaaatatgtgtcgaaacgacgtcgtagcgttttgtggattgcgttttaattagacggggaagatagttgtcggttatgggatttatcgggtgatggcgtatttcggattcggttagtagttgatttattacgaataaatatttttgataaatcgtacgttcgttgatcggtagggtcggagagaagatcgtaaacggcgtgtcgagagtatttattaaggtatcggtaatcgggttaatattatttttcgtcgtattgtcgaaagtagagtagt

SEQ ID NO: 15534 - DNA, 568 bp, Artificial Sequence
  chemically treated genomic DNA (Homo sapiens) CpG-island No: 15534
actactctactttcgacaatacgacgaaaaataatattaacccgattaccgataccttaataaatactctcgacacgccgtttacgatcttctctccgaccctaccgatcaacgaacgtacgatttatcaaaaatatttattcgtaataaatcaactactaaccgaatccgaaatacgccatcacccgataaatcccataaccgacaactatcttccccgtctaattaaaacgcaatccacaaaacgctacgacgtcgtttcgacacatattttcgaacaaaatataaataccgttcgtcaaaaactaactcgcttacaacaaaaaaactaccgctacgcgatacttaatacgctaaccgaacaccatctaaaaattcaaaaaaaaaccttacgcgataccccactaataacgaacgattctaatctaacgattaacctaacccgacaataaacgcaaaaaaacgataaccaaactcgcaaaacaaaacgtccgctcgctaaacgcgacgtaatactctccgattcatactctcaaataaccaaccgccaaataacacattaccgtca

SEQ ID NO: 15535 - DNA, 568 bp, Artificial Sequence
  chemically treated genomic DNA (Homo sapiens) CpG-island No: 15535
attgttttattttcgatagtacggcgaaaggtaatattggttcggttatcgatgttttaatggatgttttcgatacgtcgtttacggtttttttttcggttttgtcggttaacggacgtacggtttattaggggtatttgttcgtaatgaattaattgttggtcgaattcgggatgcgttattattcggtaaattttatgatcgatagttatttttttcgtttggttgaagcgtaatttatagggcgttgcggcgtcgtttcggtatatgttttcgaataaggtgtggatgtcgttcgttaagagttggttcgtttatagtaagagggttatcgttacgcggtgtttgatgcgttgatcgaatattatttggaaatttagggagaagttttgcgcgatgttttattggtaacgggcggttttggtttggcgattggtttggttcggtagtgggcgtaagaaaacggtaattaggttcgtaaagtagggcgttcgttcgttgggcgcggcgtagtgtttttcggtttatgtttttaaatgattaatcgttaggtagtatattatcgtta

SEQ ID NO: 15536 - DNA, 568 bp, Artificial Sequence
  chemically treated genomic DNA (Homo sapiens) CpG-island No: 15536
taacgataatatactacctaacgattaatcatttaaaaacataaaccgaaaaacactacgccgcgcccaacgaacgaacgccctactttacgaacctaattaccgttttcttacgcccactaccgaaccaaaccaatcgccaaaccaaaaccgcccgttaccaataaaacatcgcgcaaaacttctccctaaatttccaaataatattcgatcaacgcatcaaacaccgcgtaacgataaccctcttactataaacgaaccaactcttaacgaacgacatccacaccttattcgaaaacatataccgaaacgacgccgcaacgccctataaattacgcttcaaccaaacgaaaaaaataactatcgatcataaaatttaccgaataataacgcatcccgaattcgaccaacaattaattcattacgaacaaatacccctaataaaccgtacgtccgttaaccgacaaaaccgaaaaaaaaaccgtaaacgacgtatcgaaaacatccattaaaacatcgataaccgaaccaatattacctttcgccgtactatcgaaaataaaacaat

SEQ ID NO: 15537 - DNA, 806 bp, Artificial Sequence
  chemically treated genomic DNA (Homo sapiens) CpG-island No: 15537
cgatcgtagtaatgggggtcgtcgtcgggatggtatggttggtggatgggcgttatgaaattatttcgatggcgattagtagtatgatcggcgatgttagcggtatgatttgcgatggtgcgtcgaatagttgcgcgatgaaggtttcgattagtgtttcggttgcgtggaaagcggtgttaatggcgttggatgatatcgtcgtgatcggtaatgaagggattgtggcgtatgatgttgagtagtcgattgttaatttgtgtgcgttagtaagttattcgatgtagtaaacggatcggtagattatcgagattatggcgagtaaggttagataaacgttaggttttggggatcgtgtcggatgcgatgttggcgtattttgttcggtttacgggttgtttaattcgttaatgttgttggattttgtaggtcggatgtggcgttttcgtcgtattcggtaattggtgtatgatgtttgatgcgacgttggcgcgttttattaggtttatattggtgtcggatcggtagatcggataaggcgtttacgtcgtattcggtaagtggttaaattcgtttaaatatcgtcgtaatattttgatttagatcgatatatatcgtcgttagattaaattgaacgtttttgcgttttattagatttagtagcgtggtgttgatacgcgtatcggaataatttagcggatgatttagcgcgatcgcgttatcgttgaggttgattttttcgttaatttgtttaattagttttagatttttaatatatggtaggatttgcgcggtaaaggtttcgt

SEQ ID NO: 15538 - DNA, 806 bp, Artificial Sequence
  chemically treated genomic DNA (Homo sapiens) CpG-island No: 15538
acgaaacctttaccgcgcaaatcctaccatatattaaaaatctaaaactaattaaacaaattaacgaaaaaatcaacctcaacgataacgcgatcgcgctaaatcatccgctaaattattccgatacgcgtatcaacaccacgctactaaatctaataaaacgcaaaaacgttcaatttaatctaacgacgatatatatcgatctaaatcaaaatattacgacgatatttaaacgaatttaaccacttaccgaatacgacgtaaacgccttatccgatctaccgatccgacaccaatataaacctaataaaacgcgccaacgtcgcatcaaacatcatacaccaattaccgaatacgacgaaaacgccacatccgacctacaaaatccaacaacattaacgaattaaacaacccgtaaaccgaacaaaatacgccaacatcgcatccgacacgatccccaaaacctaacgtttatctaaccttactcgccataatctcgataatctaccgatccgtttactacatcgaataacttactaacgcacacaaattaacaatcgactactcaacatcatacgccacaatcccttcattaccgatcacgacgatatcatccaacgccattaacaccgctttccacgcaaccgaaacactaatcgaaaccttcatcgcgcaactattcgacgcaccatcgcaaatcataccgctaacatcgccgatcatactactaatcgccatcgaaataatttcataacgcccatccaccaaccataccatcccgacgacgacccccattactacgatcg

SEQ ID NO: 15539 - DNA, 806 bp, Artificial Sequence
  chemically treated genomic DNA (Homo sapiens) CpG-island No: 15539
acgaagtttttgtcgcgtagattttgttatgtattaaagatttgggattaattgagtagattgacgagaagattaattttaacggtggcgcgatcgcgttgggttattcgttgggttgtttcggtgcgcgtattagtattacgttgttgaatttgatggaacgtaaagacgtttagtttggtttggcgacgatgtgtatcggtttgggttagggtattgcgacggtgtttgagcgggtttaattatttgtcggatgcggcgtgaacgttttattcggtttatcgattcggtattaatgtaggtttgataagacgcgttagcgtcgtattaggtattatgtattaattgtcggatgcggcgaaaacgttatattcggtttataaaatttaataatattaacgaattaaataattcgtaggtcggataagatgcgttagtatcgtattcggtacgatttttaaaatttggcgtttatttggttttgttcgttataatttcgataatttgtcgattcgtttgttgtatcgaatggtttgttaacgtatataggttggtaatcgattgtttaatattatgcgttataatttttttattgtcggttacggcggtattatttagcgttattaatatcgttttttacgtagtcgaagtattggtcgaaatttttatcgcgtagttgttcgacgtattatcgtaaattatgtcgttgatatcgtcgattatattgttgatcgttatcgagatggttttataacgtttatttattagttatgttatttcggcggcggtttttattgttgcggtcg

SEQ ID NO: 15540 - DNA, 806 bp, Artificial Sequence
  chemically treated genomic DNA (Homo sapiens) CpG-island No: 15540
cgaccgcaacaataaaaaccgccgccgaaataacataactaataaataaacgttataaaaccatctcgataacgatcaacaatataatcgacgatatcaacgacataatttacgataatacgtcgaacaactacgcgataaaaatttcgaccaatacttcgactacgtaaaaaacgatattaataacgctaaataataccgccgtaaccgacaataaaaaaattataacgcataatattaaacaatcgattaccaacctatatacgttaacaaaccattcgatacaacaaacgaatcgacaaattatcgaaattataacgaacaaaaccaaataaacgccaaattttaaaaatcgtaccgaatacgatactaacgcatcttatccgacctacgaattatttaattcgttaatattattaaattttataaaccgaatataacgttttcgccgcatccgacaattaatacataatacctaatacgacgctaacgcgtcttatcaaacctacattaataccgaatcgataaaccgaataaaacgttcacgccgcatccgacaaataattaaacccgctcaaacaccgtcgcaataccctaacccaaaccgatacacatcgtcgccaaaccaaactaaacgtctttacgttccatcaaattcaacaacgtaatactaatacgcgcaccgaaacaacccaacgaataacccaacgcgatcgcgccaccgttaaaattaatcttctcgtcaatctactcaattaatcccaaatctttaatacataacaaaatctacgcgacaaaaacttcgt

SEQ ID NO: 15541 - DNA, 885 bp, Artificial Sequence
  chemically treated genomic DNA (Homo sapiens) CpG-island No: 15541
ttattagtgaagtcgtcgttcgttatgatcgcgttagtcgcgcgttatttgtatttggggtgaaggacgttgaatttagcgttagcgattcggttgtggataattgttttgtgtcgggaagtcgaagcgttgtagatattttgtagcgtagtcgacgtttatcgttcgtattgcgcgtattattattacgtttttcgattgatttagtttttgacgtaagcgaattggattagtatattgcggtggtgagtttttcggttgttagttagaatcggtatttgtattttagcgagaaattggtatatcgtttaatatatttgttagcgttagatttttatttatcgtcgcggtgtagaggaacggtttgatgttggaatttatttgacgtagtgtttgggtggcgcggttaaatttgttttgattgaaattaaagttatcgattagcgttataacggtatcgttttgcggattgatcgatattagcgtcgagtttattttcggtatttgtgttagttattatgtatcgttaatttgacgaatttagatttgttgattcgtttgtagaatatcggttattttacgcggcgtcggtttttgttgagtattcgaacggtaaggacgcgtttagcgaacgttttttatatttaatgcgacggtcgattcgttcgttagtatcgtcgtcgtttgttgaggattggcgttggtgattgcggtaggtagtagcggattataggttggtagcgtttttagcgtatcggtaattttgttgttattttacgtcgattcgtttattttttatagtatatttgtcgggtcgcgatagtcgtggcgtatgtcgtagtttagtacgttattacgtatcgtttgttgcgcggtttgttgtat

SEQ ID NO: 15542 - DNA, 885 bp, Artificial Sequence
  chemically treated genomic DNA (Homo sapiens) CpG-island No: 15542
atacaacaaaccgcgcaacaaacgatacgtaataacgtactaaactacgacatacgccacgactatcgcgacccgacaaatatactataaaaaataaacgaatcgacgtaaaataacaacaaaattaccgatacgctaaaaacgctaccaacctataatccgctactacctaccgcaatcaccaacgccaatcctcaacaaacgacgacgatactaacgaacgaatcgaccgtcgcattaaatataaaaaacgttcgctaaacgcgtccttaccgttcgaatactcaacaaaaaccgacgccgcgtaaaataaccgatattctacaaacgaatcaacaaatctaaattcgtcaaattaacgatacataataactaacacaaataccgaaaataaactcgacgctaatatcgatcaatccgcaaaacgataccgttataacgctaatcgataactttaatttcaatcaaaacaaatttaaccgcgccacccaaacactacgtcaaataaattccaacatcaaaccgttcctctacaccgcgacgataaataaaaatctaacgctaacaaatatattaaacgatataccaatttctcgctaaaatacaaataccgattctaactaacaaccgaaaaactcaccaccgcaatatactaatccaattcgcttacgtcaaaaactaaatcaatcgaaaaacgtaataataatacgcgcaatacgaacgataaacgtcgactacgctacaaaatatctacaacgcttcgacttcccgacacaaaacaattatccacaaccgaatcgctaacgctaaattcaacgtccttcaccccaaatacaaataacgcgcgactaacgcgatcataacgaacgacgacttcactaataa

SEQ ID NO: 15543 - DNA, 885 bp, Artificial Sequence
  chemically treated genomic DNA (Homo sapiens) CpG-island No: 15543
gtgtagtaggtcgcgtagtaggcggtacgtaataacgtgttggattacgatatgcgttacggttatcgcggttcggtaaatgtgttgtggaaagtgggcgagtcggcgtgggataataataagattatcgatacgttgaaggcgttgttaatttatggttcgttgttgtttgtcgtagttattagcgttaatttttagtaagcgacggcgatgttggcggacgggtcgatcgtcgtattgagtatggaaggcgttcgttgggcgcgtttttatcgttcggatatttagtaaggatcgacgtcgcgtaaagtgatcgatgttttgtaaacgggttagtaaatttgggttcgttaggttggcgatgtatggtggttggtataagtgtcggaagtgaattcggcgttggtgtcgattaattcgtaaaacggtgtcgttatggcgttggtcggtggttttgattttaattagagtaagtttaatcgcgttatttaggtattgcgttaggtgggttttaatattaaatcgtttttttatatcgcggcgatggataaaggtttgacgttggtaagtatgttgaacgatgtgttaatttttcgttgggatgtaagtgtcggttttgattggtagtcgaagaatttattatcgtagtatgttggtttaattcgtttacgttaggggttgggttagtcgaaaaacgtggtgatggtacgcgtaatgcgggcgatgggcgtcgattacgttgtagaatatttgtaacgtttcggtttttcggtataaaatagttgtttatagtcgaatcgttggcgttgggtttagcgttttttattttaagtgtaggtggcgcgcggttagcgcggttatggcgaacggcggttttattggtgg

SEQ ID NO: 15544 - DNA, 885 bp, Artificial Sequence
  chemically treated genomic DNA (Homo sapiens) CpG-island No: 15544
ccaccaataaaaccgccgttcgccataaccgcgctaaccgcgcgccacctacacttaaaataaaaaacgctaaacccaacgccaacgattcgactataaacaactattttataccgaaaaaccgaaacgttacaaatattctacaacgtaatcgacgcccatcgcccgcattacgcgtaccatcaccacgtttttcgactaacccaacccctaacgtaaacgaattaaaccaacatactacgataataaattcttcgactaccaatcaaaaccgacacttacatcccaacgaaaaattaacacatcgttcaacatacttaccaacgtcaaacctttatccatcgccgcgatataaaaaaacgatttaatattaaaacccacctaacgcaatacctaaataacgcgattaaacttactctaattaaaatcaaaaccaccgaccaacgccataacgacaccgttttacgaattaatcgacaccaacgccgaattcacttccgacacttataccaaccaccatacatcgccaacctaacgaacccaaatttactaacccgtttacaaaacatcgatcactttacgcgacgtcgatccttactaaatatccgaacgataaaaacgcgcccaacgaacgccttccatactcaatacgacgatcgacccgtccgccaacatcgccgtcgcttactaaaaattaacgctaataactacgacaaacaacaacgaaccataaattaacaacgccttcaacgtatcgataatcttattattatcccacgccgactcgcccactttccacaacacatttaccgaaccgcgataaccgtaacgcatatcgtaatccaacacgttattacgtaccgcctactacgcgacctactacac

SEQ ID NO: 15545 - DNA, 516 bp, Artificial Sequence
  chemically treated genomic DNA (Homo sapiens) CpG-island No: 15545
  unsure (137)
ttggttttggcgtgggcggttattgtattgttgttgattcgtggtttatcgtggtatagaatttttagtaggcgcggtttattcgtatcgcgcgcgaagtgaacgattataaatcgttttgggttatcgattaggtnaaagcggcggtggttgattgtttggcggttatcgataacgcgttagtgaattgaaaatcgtttgttttggtttggcgtttaaatcgaatattgatgatttgcgcgaaagttcggcgatggaaatcgttgaattgatttgtttagtggtatacggcgaaattttggttgttgagttttatatttattagattgtcggtgataaatttgagtcgtggtttttgttattttggtcgtacgttttgtatttaggcgttggtaatcggtagtacgtgttggtgatgttggtcgattattgtttgttttttggttattatgtggcgacgttgtttattattatgtatgtcggtcgatgtttaaggacgtttggcgtttgaatgag

SEQ ID NO: 15546 - DNA, 516 bp, Artificial Sequence
  chemically treated genomic DNA (Homo sapiens) CpG-island No: 15546
  unsure (380)
ctcattcaaacgccaaacgtccttaaacatcgaccgacatacataataataaacaacgtcgccacataataaccaaaaaacaaacaataatcgaccaacatcaccaacacgtactaccgattaccaacgcctaaatacaaaacgtacgaccaaaataacaaaaaccacgactcaaatttatcaccgacaatctaataaatataaaactcaacaaccaaaatttcgccgtataccactaaacaaatcaattcaacgatttccatcgccgaactttcgcgcaaatcatcaatattcgatttaaacgccaaaccaaaacaaacgattttcaattcactaacgcgttatcgataaccgccaaacaatcaaccaccgccgctttnacctaatcgataacccaaaacgatttataatcgttcacttcgcgcgcgatacgaataaaccgcgcctactaaaaattctataccacgataaaccacgaatcaacaacaatacaataaccgcccacgccaaaaccaa

SEQ ID NO: 15547 - DNA, 516 bp, Artificial Sequence
  chemically treated genomic DNA (Homo sapiens) CpG-island No: 15547
  unsure (380)
tttatttaggcgttagacgtttttaggtatcgatcgatatatatggtgatggataacgtcgttatatgataattaaggaatagataatgatcgattagtattattagtacgtattgtcggttgttagcgtttgagtataagacgtgcggttagagtaataaaagttacggtttaagtttattatcggtaatttggtggatgtaaggtttaataattagagtttcgtcgtatgttattgggtagattagtttagcgatttttatcgtcgggttttcgcgtaggttattaatattcggtttaaacgttagattaaagtaggcgatttttagtttattggcgcgttatcggtagtcgttaggtaattagttatcgtcgttttnatttgatcgataatttagaacggtttgtgatcgtttatttcgcgcgcggtacggataagtcgcgtttgttgggggttttgtgttacgataaattacggattaatagtaatgtagtgatcgtttacgttagggttag

SEQ ID NO: 15548 - DNA, 516 bp, Artificial Sequence
  chemically treated genomic DNA (Homo sapiens) CpG-island No: 15548
  unsure (137)
ctaaccctaacgtaaacgatcactacattactattaatccgtaatttatcgtaacacaaaacccccaacaaacgcgacttatccgtaccgcgcgcgaaataaacgatcacaaaccgttctaaattatcgatcaaatnaaaacgacgataactaattacctaacgactaccgataacgcgccaataaactaaaaatcgcctactttaatctaacgtttaaaccgaatattaataacctacgcgaaaacccgacgataaaaatcgctaaactaatctacccaataacatacgacgaaactctaattattaaaccttacatccaccaaattaccgataataaacttaaaccgtaacttttattactctaaccgcacgtcttatactcaaacgctaacaaccgacaatacgtactaataatactaatcgatcattatctattccttaattatcatataacgacgttatccatcaccatatatatcgatcgatacctaaaaacgtctaacgcctaaataaa

SEQ ID NO: 15549 - DNA, 651 bp, Artificial Sequence
  chemically treated genomic DNA (Homo sapiens) CpG-island No: 15549
ttttcgttggtttttattttcgtagtttttttagtagtcgtttttagtaggcgcgttttcgttttggcgttttcgcgagttttcggtaggtagatttcggtagagggtggagggatcggttgggggcgtttcggtttcggttatttcgtataggtggttggaggagttgttgtcgcgggcgcggttgtttcggtcgcgtgggtgtcgcgggcggatacgtttggaagtcggtttcgcggagcgcgcgtaggtttcggttttggcgtttcgggggggtggcgtaggttacgtcggagttggatacgcgcgcgcgttgtaattaggtttagagcggtcgcgcgcggtagtcgtacgtttaggggttagcgttgagtcgtaggaattcgagcgagggtaggtcggcgagcgttttttcgggtaaggaagtttaggtttttttttattaggtaaaagatggtgagggggtttaggtcgcggaagggtcgcgcggttgtacgttttgtagtcggttttcgtggtaatagtagtcggtttaggttggtttagttcgcgaaatacgtgttttgtgagtagtcgtaggcgggttttcgtggaggaagaggtggtttaggttggttaggttcgcgaataagttattttgggtggggtgga

SEQ ID NO: 15550 - DNA, 651 bp, Artificial Sequence
  chemically treated genomic DNA (Homo sapiens) CpG-island No: 15550
tccaccccacccaaaataacttattcgcgaacctaaccaacctaaaccacctcttcctccacgaaaacccgcctacgactactcacaaaacacgtatttcgcgaactaaaccaacctaaaccgactactattaccacgaaaaccgactacaaaacgtacaaccgcgcgacccttccgcgacctaaaccccctcaccatcttttacctaataaaaaaaaacctaaacttccttacccgaaaaaacgctcgccgacctaccctcgctcgaattcctacgactcaacgctaacccctaaacgtacgactaccgcgcgcgaccgctctaaacctaattacaacgcgcgcgcgtatccaactccgacgtaacctacgccacccccccgaaacgccaaaaccgaaacctacgcgcgctccgcgaaaccgacttccaaacgtatccgcccgcgacacccacgcgaccgaaacaaccgcgcccgcgacaacaactcctccaaccacctatacgaaataaccgaaaccgaaacgcccccaaccgatccctccaccctctaccgaaatctacctaccgaaaactcgcgaaaacgccaaaacgaaaacgcgcctactaaaaacgactactaaaaaaactacgaaaataaaaaccaacgaaaa

SEQ ID NO: 15551 - DNA, 651 bp, Artificial Sequence
  chemically treated genomic DNA (Homo sapiens) CpG-island No: 15551
tttattttatttaggatgatttgttcgcggatttggttaatttgagttatttttttttttacgggaattcgtttgcggttgtttatagagtacgtgtttcgcgggttgggttagtttggatcggttgttgttgttacgggaatcggttgtagggcgtgtaatcgcgcggttttttcgcggtttaaatttttttattattttttatttggtaaaaaaaagtttgggtttttttgttcgggagggcgttcgtcgatttgttttcgttcgagtttttgcggtttaacgttaatttttgggcgtgcgattgtcgcgcgcggtcgttttgggtttggttgtagcgcgcgcgcgtgtttagtttcgacgtgatttgcgttattttttcggagcgttagggtcgagatttgcgcgcgtttcgcgaggtcgatttttaggcgtgttcgttcgcggtatttacgcggtcggggtagtcgcgttcgcggtaatagtttttttaattatttgtacggggtggtcgaggtcggggcgtttttagtcgatttttttattttttatcgagatttgtttgtcgaagattcgcgggggcgttagggcggggacgcgtttattgaggacgattattgggggggttacgggggtgaggattagcgaggg

SEQ ID NO: 15552 - DNA, 651 bp, Artificial Sequence
  chemically treated genomic DNA (Homo sapiens) CpG-island No: 15552
ccctcgctaatcctcacccccgtaacccccccaataatcgtcctcaataaacgcgtccccgccctaacgcccccgcgaatcttcgacaaacaaatctcgataaaaaataaaaaaatcgactaaaaacgccccgacctcgaccaccccgtacaaataattaaaaaaactattaccgcgaacgcgactaccccgaccgcgtaaataccgcgaacgaacacgcctaaaaatcgacctcgcgaaacgcgcgcaaatctcgaccctaacgctccgaaaaaataacgcaaatcacgtcgaaactaaacacgcgcgcgcgctacaaccaaacccaaaacgaccgcgcgcgacaatcgcacgcccaaaaattaacgttaaaccgcaaaaactcgaacgaaaacaaatcgacgaacgccctcccgaacaaaaaaacccaaacttttttttaccaaataaaaaataataaaaaaatttaaaccgcgaaaaaaccgcgcgattacacgccctacaaccgattcccgtaacaacaacaaccgatccaaactaacccaacccgcgaaacacgtactctataaacaaccgcaaacgaattcccgtaaaaaaaaaaataactcaaattaaccaaatccgcgaacaaatcatcctaaataaaataaa

SEQ ID NO: 15553 - DNA, 713 bp, Artificial Sequence
  chemically treated genomic DNA (Homo sapiens) CpG-island No: 15553
taaacgcgtagttttaagtagaggaagtgtagcgagcggggattcgggaggaagagaagagtcggaggggttagagaaaagaaaagggaaggacgcgtttggcgagatgggatattgtgtcgcgggatcgcgggcgtaagtaacggtttttttttgggaagtttggtagtgtcggcgggagtcggtttcggtgttttttagtcgacgtatagtcggagattttacgcgcgtttttttttcgtttacgttgtttattttcggttatcggtaaatgagtagttagtagttgcggacgttttcgggagcgtaacgttttcgcggcgcgttcggagtttcgtgggtttagttttgagtcgcgtcggcgttggggttttttttgcgtgtaggattcggtcgttacggagttttagtttgatagttcggtggtttcgttttcgttgttttttcggaagaagcgggggaattgggaattcgtcgggcgttagaggtttgcgaagttgggtttggatgaagtggatttgcggagttgatagttgtatttatacgcgttcggagttgcgtttcgaggtgggggcgggggtttttttttttttttttttttttaggtcgagttttacgcgtacgtgattcgttcgttggtttcggatattttttttttggtatagttttagtatttatatttttattttggatttttatttttttttttaagt

SEQ ID NO: 15554 - DNA, 713 bp, Artificial Sequence
  chemically treated genomic DNA (Homo sapiens) CpG-island No: 15554
acttaaaaaaaaaaataaaaatccaaaataaaaatataaatactaaaactataccaaaaaaaaaatatccgaaaccaacgaacgaatcacgtacgcgtaaaactcgacctaaaaaaaaaaaaaaaaaaaaaaacccccgcccccacctcgaaacgcaactccgaacgcgtataaatacaactatcaactccgcaaatccacttcatccaaacccaacttcgcaaacctctaacgcccgacgaattcccaattcccccgcttcttccgaaaaaacaacgaaaacgaaaccaccgaactatcaaactaaaactccgtaacgaccgaatcctacacgcaaaaaaaaccccaacgccgacgcgactcaaaactaaacccacgaaactccgaacgcgccgcgaaaacgttacgctcccgaaaacgtccgcaactactaactactcatttaccgataaccgaaaataaacaacgtaaacgaaaaaaaaacgcgcgtaaaatctccgactatacgtcgactaaaaaacaccgaaaccgactcccgccgacactaccaaacttcccaaaaaaaaaccgttacttacgcccgcgatcccgcgacacaatatcccatctcgccaaacgcgtccttcccttttcttttctctaacccctccgactcttctcttcctcccgaatccccgctcgctacacttcctctacttaaaactacgcgttta

SEQ ID NO: 15555 - DNA, 713 bp, Artificial Sequence
  chemically treated genomic DNA (Homo sapiens) CpG-island No: 15555
gtttgggggagaagatgggggtttagggtggaaatgtaggtgttggggttgtgttagagggagagtgttcgggattagcgggcgagttacgtgcgcgtgaaattcgatttaaggggaggggaaaagaagggagttttcgtttttatttcggggcgtagtttcggacgcgtgtaaatataattattaatttcgtagatttattttatttaagtttagtttcgtagatttttggcgttcggcgggtttttagttttttcgtttttttcgaggagatagcggaggcgaggttatcgggttgttaggttgaagtttcgtggcggtcgggttttgtacgtagagaagattttagcgtcggcgcggtttagggttgggtttacgggatttcggacgcgtcgcgaaagcgttgcgttttcggaggcgttcgtagttgttggttgtttatttgtcggtgatcggaggtgagtagcgtgggcggggagggggcgcgcgtagggttttcggttatgcgtcggttgagagatatcgaggtcggttttcgtcgatattgttaggttttttaaggaaagatcgttatttgcgttcgcggtttcgcggtatagtgttttatttcgttaagcgcgtttttttttttttttttttttgattttttcgatttttttttttttttcgggttttcgttcgttgtattttttttgtttagagttgcgcgtttg

SEQ ID NO: 15556 - DNA, 713 bp, Artificial Sequence
  chemically treated genomic DNA (Homo sapiens) CpG-island No: 15556
caaacgcgcaactctaaacaaaaaaaatacaacgaacgaaaacccgaaaaaaaaaaaaaaatcgaaaaaatcaaaaaaaaaaaaaaaaaaaaacgcgcttaacgaaataaaacactataccgcgaaaccgcgaacgcaaataacgatctttccttaaaaaacctaacaatatcgacgaaaaccgacctcgatatctctcaaccgacgcataaccgaaaaccctacgcgcgccccctccccgcccacgctactcacctccgatcaccgacaaataaacaaccaacaactacgaacgcctccgaaaacgcaacgctttcgcgacgcgtccgaaatcccgtaaacccaaccctaaaccgcgccgacgctaaaatcttctctacgtacaaaacccgaccgccacgaaacttcaacctaacaacccgataacctcgcctccgctatctcctcgaaaaaaacgaaaaaactaaaaacccgccgaacgccaaaaatctacgaaactaaacttaaataaaataaatctacgaaattaataattatatttacacgcgtccgaaactacgccccgaaataaaaacgaaaactcccttcttttcccctccccttaaatcgaatttcacgcgcacgtaactcgcccgctaatcccgaacactctccctctaacacaaccccaacacctacatttccaccctaaacccccatcttctcccccaaac

SEQ ID NO: 15557 - DNA, 511 bp, Artificial Sequence
  chemically treated genomic DNA (Homo sapiens) CpG-island No: 15557
tcgacgcggaaagaatataatacgagaagaaagggtaaacggggacgttatacgacggcgataaaggaagcgtaacgtaggagaagaaaagaagagaagtagtaagaggtagaatataaatcgggtaagagacgatacgatatagtagtaaagagagatatatcggtacgagaacggtagagcggagagacggcgcggagtacggtacgttagtaggtcgagagggagagcgtaagttcgagagaaggagtcgtagaaataatacggttagagtagggaaggtaagaagagcgaggagaaggagcggagggacgagtcgagatacggtcggaggagatagacgagcgcgagatagagaagaaggagtaatagataacgaagaggagggcgcgtatataggttaggcgcgaacgatagagttagatttaagaagcgagagcggaaaatagtagaggtagcggggtaggagagatgatagataaaggtgagtcggaataaggaggatatgaga

SEQ ID NO: 15558 - DNA, 511 bp, Artificial Sequence
  chemically treated genomic DNA (Homo sapiens) CpG-island No: 15558
tctcatatcctccttattccgactcacctttatctatcatctctcctaccccgctacctctactattttccgctctcgcttcttaaatctaactctatcgttcgcgcctaacctatatacgcgccctcctcttcgttatctattactccttcttctctatctcgcgctcgtctatctcctccgaccgtatctcgactcgtccctccgctccttctcctcgctcttcttaccttccctactctaaccgtattatttctacgactccttctctcgaacttacgctctccctctcgacctactaacgtaccgtactccgcgccgtctctccgctctaccgttctcgtaccgatatatctctctttactactatatcgtatcgtctcttacccgatttatattctacctcttactacttctcttcttttcttctcctacgttacgcttcctttatcgccgtcgtataacgtccccgtttaccctttcttctcgtattatattctttccgcgtcga

SEQ ID NO: 15559 - DNA, 511 bp, Artificial Sequence
  chemically treated genomic DNA (Homo sapiens) CpG-island No: 15559
ttttatgttttttttgtttcgatttatttttgtttgttattttttttgtttcgttgtttttgttgtttttcgttttcgttttttgggtttggttttgtcgttcgcgtttggtttgtgtgcgcgttttttttttcgttgtttgttgtttttttttttttgtttcgcgttcgtttgtttttttcggtcgtgtttcggttcgttttttcgtttttttttttcgttttttttgttttttttgttttggtcgtgttgtttttgcggttttttttttcgggtttacgttttttttttcggtttgttgacgtgtcgtgtttcgcgtcgttttttcgttttgtcgttttcgtgtcggtgtgtttttttttgttgttgtgtcgtgtcgttttttgttcggtttgtgttttattttttgttgtttttttttttttttttttttgcgttacgttttttttgtcgtcgtcgtgtagcgttttcgtttgtttttttttttcgtgttgtgtttttttcgcgtcgg

SEQ ID NO: 15560 - DNA, 511 bp, Artificial Sequence
  chemically treated genomic DNA (Homo sapiens) CpG-island No: 15560
ccgacgcgaaaaaaacacaacacgaaaaaaaaaaacaaacgaaaacgctacacgacgacgacaaaaaaaacgtaacgcaaaaaaaaaaaaaaaaaaaaacaacaaaaaataaaacacaaaccgaacaaaaaacgacacgacacaacaacaaaaaaaaacacaccgacacgaaaacgacaaaacgaaaaaacgacgcgaaacacgacacgtcaacaaaccgaaaaaaaaaacgtaaacccgaaaaaaaaaaccgcaaaaacaacacgaccaaaacaaaaaaaacaaaaaaaacgaaaaaaaaaaacgaaaaaacgaaccgaaacacgaccgaaaaaaacaaacgaacgcgaaacaaaaaaaaaaaaacaacaaacaacgaaaaaaaaaacgcgcacacaaaccaaacgcgaacgacaaaaccaaacccaaaaaacgaaaacgaaaaacaacaaaaacaacgaaacaaaaaaaataacaaacaaaaataaatcgaaacaaaaaaaacataaaa

SEQ ID NO: 15561 - DNA, 792 bp, Artificial Sequence
  chemically treated genomic DNA (Homo sapiens) CpG-island No: 15561
aaattggtgcgtattcgggttttgatgtgttgtcgtagtcgttataggcgacggtaatttattgcgggttgaattggttgttatcgtttgttatgtattgtatttttatttgtgacgacgaaattttcgaagggtaggcgcgttattataagtaacgtttgttggaatggtaggaggtttattatggatagttatacgttgatttaggcgttgatttatttcggttcggtagcgttgattgtatttattgcggtacgttttggtttgggatcggtatttggttatttgatcgtcggttgtattattggttcgtgggggttgcgattggtgatcgatgtcgaatttattttgtattttgtcgagattggggtggtgttgatgttgtttattatcggtttcgaattcgatttataaaggttgtggaagttgcgtgcggtagtgttcggttgtggcgtattgtagatggtgatttgcggcggtttgttggggttgttttgtatgttatttgggttgcgttggtaggtcgcggaattgatcggtatgacgttggcgtttttttttacggcgattgttatgtaggcgatgaatgaacgtaatttgatggtgacgttaaatgggtcgtagtggttttgcggggttgttgtttttcgatattgcggggaaacggcggtggggaggattcgttatggggagagaatgttgtttaataatggcgtttgtcgttcgcgggaaaagaggggggtaggcggggaatattggggtatatattaacgcgggttgtaataatttttg

SEQ ID NO: 15562 - DNA, 792 bp, Artificial Sequence
  chemically treated genomic DNA (Homo sapiens) CpG-island No: 15562
caaaaattattacaacccgcgttaatatataccccaatattccccgcctacccccctcttttcccgcgaacgacaaacgccattattaaacaacattctctccccataacgaatcctccccaccgccgtttccccgcaatatcgaaaaacaacaaccccgcaaaaccactacgacccatttaacgtcaccatcaaattacgttcattcatcgcctacataacaatcgccgtaaaaaaaaacgccaacgtcataccgatcaattccgcgacctaccaacgcaacccaaataacatacaaaacaaccccaacaaaccgccgcaaatcaccatctacaatacgccacaaccgaacactaccgcacgcaacttccacaacctttataaatcgaattcgaaaccgataataaacaacatcaacaccaccccaatctcgacaaaatacaaaataaattcgacatcgatcaccaatcgcaacccccacgaaccaataatacaaccgacgatcaaataaccaaataccgatcccaaaccaaaacgtaccgcaataaatacaatcaacgctaccgaaccgaaataaatcaacgcctaaatcaacgtataactatccataataaacctcctaccattccaacaaacgttacttataataacgcgcctacccttcgaaaatttcgtcgtcacaaataaaaatacaatacataacaaacgataacaaccaattcaacccgcaataaattaccgtcgcctataacgactacgacaacacatcaaaacccgaatacgcaccaattt

SEQ ID NO: 15563 - DNA, 792 bp, Artificial Sequence
  chemically treated genomic DNA (Homo sapiens) CpG-island No: 15563
tagaggttgttataattcgcgttgatgtatgttttaatatttttcgtttgttttttttttttttcgcgggcgataagcgttattgttagatagtattttttttttatagcgaattttttttatcgtcgttttttcgtaatatcggggaatagtagtttcgtaaggttattgcgatttatttggcgttattattagattgcgtttatttatcgtttgtatggtaatcgtcgtagaggagagcgttagcgttatgtcgattaatttcgcgatttgttagcgtagtttaagtaatatgtagaatagttttagtaggtcgtcgtaaattattatttgtaatgcgttatagtcgaatattgtcgtacgtagtttttatagtttttgtggatcgagttcgaggtcgataataaatagtattagtattattttaatttcggtaaagtgtagaatagattcggtatcggttattagtcgtagtttttacgggttaataatgtagtcggcgattaggtagttaagtatcgattttagattaagacgtatcgtaatgggtataattagcgttgtcgaatcgagataaattagcgtttgaattagcgtatggttatttatgatgggttttttgttattttagtagacgttgtttatagtgacgcgtttgtttttcgagggtttcgtcgttataaataaaggtgtagtgtatggtaaacggtggtagttagtttagttcgtagtagattgtcgtcgtttgtagcggttgcgatagtatattaaagttcggatgcgtattaattt

SEQ ID NO: 15564 - DNA, 792 bp, Artificial Sequence
  chemically treated genomic DNA (Homo sapiens) CpG-island No: 15564
aaattaatacgcatccgaactttaatatactatcgcaaccgctacaaacgacgacaatctactacgaactaaactaactaccaccgtttaccatacactacacctttatttataacgacgaaaccctcgaaaaacaaacgcgtcactataaacaacgtctactaaaataacaaaaaacccatcataaataaccatacgctaattcaaacgctaatttatctcgattcgacaacgctaattatacccattacgatacgtcttaatctaaaatcgatacttaactacctaatcgccgactacattattaacccgtaaaaactacgactaataaccgataccgaatctattctacactttaccgaaattaaaataatactaatactatttattatcgacctcgaactcgatccacaaaaactataaaaactacgtacgacaatattcgactataacgcattacaaataataatttacgacgacctactaaaactattctacatattacttaaactacgctaacaaatcgcgaaattaatcgacataacgctaacgctctcctctacgacgattaccatacaaacgataaataaacgcaatctaataataacgccaaataaatcgcaataaccttacgaaactactattccccgatattacgaaaaaacgacgataaaaaaaattcgctataaaaaaaaaatactatctaacaataacgcttatcgcccgcgaaaaaaaaaaaaaacaaacgaaaaatattaaaacatacatcaacgcgaattataacaacctcta

SEQ ID NO: 15565 - DNA, 654 bp, Artificial Sequence
  chemically treated genomic DNA (Homo sapiens) CpG-island No: 15565
cgttcggcgttggttgaaaaattgatcgttattgtttttaaagttattggcgaaattaatatcgatgattttttttcggtatcggatgcgtggttacgtttcggatattttattgtacgcgttggcgatgttgaaaaacgttcgtgaaggtattgagttagattagtttggtgttgttggttcgattaagtaaatcgaagttttgtaatagaaaggtttttcgttggcgtacgtcggtgacgttgtgggtacgggtttttcgcgtaaattcgttattaatttcgttttgtggtttatgggcgatgatattttatatgtgtcgaataaacgcggcggtggtttgtgtttcggcggtaaattgtatttattttttttaatacgatggaagacgcgggtgtattgttaatcgaagtcgacgtttttatttgaatatgggcgacgtgattgacgtttattcgtataaaggttaagtgcgtaattacgaaatcggcgaattgttggcgattttcgaattgaaaatcgacgtgttgattgatgaagtgcgtgttggtggtcgtatttcgttattatcgggcgtgtgtttgagtattaaagcgcgttaagtatttggtttggtcgtatagtggatgttgttcgttaggcggaagatgtttt

SEQ ID NO: 15566 - DNA, 654 bp, Artificial Sequence
  chemically treated genomic DNA (Homo sapiens) CpG-island No: 15566
aaaacatcttccgcctaacgaacaacatccactatacgaccaaaccaaatacttaacgcgctttaatactcaaacacacgcccgataataacgaaatacgaccaccaacacgcacttcatcaatcaacacgtcgattttcaattcgaaaatcgccaacaattcgccgatttcgtaattacgcacttaacctttatacgaataaacgtcaatcacgtcgcccatattcaaataaaaacgtcgacttcgattaacaatacacccgcgtcttccatcgtattaaaaaaaataaatacaatttaccgccgaaacacaaaccaccgccgcgtttattcgacacatataaaatatcatcgcccataaaccacaaaacgaaattaataacgaatttacgcgaaaaacccgtacccacaacgtcaccgacgtacgccaacgaaaaacctttctattacaaaacttcgatttacttaatcgaaccaacaacaccaaactaatctaactcaataccttcacgaacgtttttcaacatcgccaacgcgtacaataaaatatccgaaacgtaaccacgcatccgataccgaaaaaaaatcatcgatattaatttcgccaataactttaaaaacaataacgatcaatttttcaaccaacgccgaacg

SEQ ID NO: 15567 - DNA, 654 bp, Artificial Sequence
  chemically treated genomic DNA (Homo sapiens) CpG-island No: 15567
ggaatatttttcgtttgacggataatatttattgtgcggttagattaagtgtttaacgcgttttggtgtttaggtatacgttcgataatagcggaatacggttattagtacgtattttattaattagtacgtcggtttttagttcgaaggtcgttagtagttcgtcggtttcgtggttacgtatttaatttttgtacgggtaaacgttaattacgtcgtttatgtttaggtagagacgtcgatttcgattggtagtgtattcgcgttttttatcgtgttaaagaagatgggtgtaatttatcgtcgaggtataaattatcgtcgcgtttgttcggtatatgtggaatattatcgtttataaattatagaacggagttagtggcggatttacgcgaagaattcgtatttataacgttatcgacgtacgttagcgggaaatttttttgttgtagagtttcgatttgtttgatcggattaataatattaggttggtttggtttaatatttttacgggcgttttttagtatcgttagcgcgtgtagtgggatattcggggcgtgattacgtattcggtgtcggagaaaggttatcggtgttagtttcgttagtgattttgaagatagtaacggttagttttttagttagcgtcgggcg

SEQ ID NO: 15568 - DNA, 654 bp, Artificial Sequence
  chemically treated genomic DNA (Homo sapiens) CpG-island No: 15568
cgcccgacgctaactaaaaaactaaccgttactatcttcaaaatcactaacgaaactaacaccgataacctttctccgacaccgaatacgtaatcacgccccgaatatcccactacacgcgctaacgatactaaaaaacgcccgtaaaaatattaaaccaaaccaacctaatattattaatccgatcaaacaaatcgaaactctacaacaaaaaaatttcccgctaacgtacgtcgataacgttataaatacgaattcttcgcgtaaatccgccactaactccgttctataatttataaacgataatattccacatataccgaacaaacgcgacgataatttatacctcgacgataaattacacccatcttctttaacacgataaaaaacgcgaatacactaccaatcgaaatcgacgtctctacctaaacataaacgacgtaattaacgtttacccgtacaaaaattaaatacgtaaccacgaaaccgacgaactactaacgaccttcgaactaaaaaccgacgtactaattaataaaatacgtactaataaccgtattccgctattatcgaacgtatacctaaacaccaaaacgcgttaaacacttaatctaaccgcacaataaatattatccgtcaaacgaaaaatattcc

SEQ ID NO: 15569 - DNA, 500 bp, Artificial Sequence
  chemically treated genomic DNA (Homo sapiens) CpG-island No: 15569
gttattttataaagtgtttgtagcgtcgggattcgtttagtcgtcgttaggttaggattttagaaattacgaataattatacgttcgatatattattaagcgttttcggttggttttcgggcgtaataggacggtttgcgtcgatttagatgtttggtttttttacgtaattcgagtggtagtagttttcgtttgtattattaatagttcggggtattatatgtgacgtttagttggttagtttgtaaggtttaggtcgacgaaaattttcgacgagttagggtttttttaggcgaatttttttaattacgttaagttgttttatttttaaacgtttgtaggcgattatgcgttgtggttcgtttcgtacgtttaatttttttgaagcgttgttagttaggcgttaggcgttagtagcggataaaatattaatcgttatagagcggataaatttttcgttataggagtttatattgattttatagtatagtagtcgttat

SEQ ID NO: 15570 - DNA, 500 bp, Artificial Sequence
  chemically treated genomic DNA (Homo sapiens) CpG-island No: 15570
ataacgactactatactataaaatcaatataaactcctataacgaaaaatttatccgctctataacgattaatattttatccgctactaacgcctaacgcctaactaacaacgcttcaaaaaaattaaacgtacgaaacgaaccacaacgcataatcgcctacaaacgtttaaaaataaaacaacttaacgtaattaaaaaaattcgcctaaaaaaaccctaactcgtcgaaaattttcgtcgacctaaaccttacaaactaaccaactaaacgtcacatataataccccgaactattaataatacaaacgaaaactactaccactcgaattacgtaaaaaaaccaaacatctaaatcgacgcaaaccgtcctattacgcccgaaaaccaaccgaaaacgcttaataatatatcgaacgtataattattcgtaatttctaaaatcctaacctaacgacgactaaacgaatcccgacgctacaaacactttataaaataac

SEQ ID NO: 15571 - DNA, 500 bp, Artificial Sequence
  chemically treated genomic DNA (Homo sapiens) CpG-island No: 15571
atagcggttattgtgttgtaagattagtgtgagtttttatagcggagagtttattcgttttgtagcgattggtgttttattcgttattggcgtttaacgtttaattggtagcgttttagaagggttgggcgtacggagcgggttataacgtataatcgtttgtaggcgtttgggggtagagtagtttggcgtaattgaagggattcgtttgggaaaattttgattcgtcgaagattttcgtcggtttgagttttgtaagttagttagttggacgttatatgtggtatttcgagttgttggtagtgtaaacgaaaattgttattattcgagttgcgtaggaaagttaagtatttgggtcgacgtaagtcgttttattgcgttcggagattagtcggagacgtttggtggtgtgtcgagcgtatagttattcgtggtttttaaaattttggtttagcggcgattgggcgaatttcggcgttgtaaatattttataagatgat

SEQ ID NO: 15572 - DNA, 500 bp, Artificial Sequence
  chemically treated genomic DNA (Homo sapiens) CpG-island No: 15572
atcatcttataaaatatttacaacgccgaaattcgcccaatcgccgctaaaccaaaattttaaaaaccacgaataactatacgctcgacacaccaccaaacgtctccgactaatctccgaacgcaataaaacgacttacgtcgacccaaatacttaactttcctacgcaactcgaataataacaattttcgtttacactaccaacaactcgaaataccacatataacgtccaactaactaacttacaaaactcaaaccgacgaaaatcttcgacgaatcaaaattttcccaaacgaatcccttcaattacgccaaactactctacccccaaacgcctacaaacgattatacgttataacccgctccgtacgcccaacccttctaaaacgctaccaattaaacgttaaacgccaataacgaataaaacaccaatcgctacaaaacgaataaactctccgctataaaaactcacactaatcttacaacacaataaccgctat

SEQ ID NO: 15573 - DNA, 604 bp, Artificial Sequence
  chemically treated genomic DNA (Homo sapiens) CpG-island No: 15573
gagcggcggttagagtggcgtattcgcgttcgattgttgttgtcggtttcgtcgggtttatttagtggattcgggcgttttcgtgaggtcgcgggtgggcggcgtatttagttagtgcgttttgggtttcggcggtaaattttcgcggtttggtatttatttgcgcgttatttggattgtcgtttttttttttcgagtttcgttagcgttcggcggatcggttgtttgttaggtcgtcggggtttttagggtcgagtcggcggtggtcggttaagtagagttaacgagatttttgggagggtagttgcggtagtcgggttatggtaatttgtcgcgttgtcgtcgtcgtcgcggtcgtcgtagtgtaggttcggtagtgtttttaggtttcgtattagttcgcgatttgtttcgtcgtcgttttttttttagtttttgtttcgttgttagcggaggtttttacgagttttatattgagcgttttttcgtattgtttcgcggcgaagtcgtcgtagaggaagatcgggttgggggtaaaggggcgttagttttgtttatttttagtgttattttcgaacgcgtttttttcggtttttttaaaaat

SEQ ID NO: 15574 - DNA, 604 bp, Artificial Sequence
  chemically treated genomic DNA (Homo sapiens) CpG-island No: 15574
atttttaaaaaaaccgaaaaaaacgcgttcgaaaataacactaaaaataaacaaaactaacgcccctttacccccaacccgatcttcctctacgacgacttcgccgcgaaacaatacgaaaaaacgctcaatataaaactcgtaaaaacctccgctaacaacgaaacaaaaactaaaaaaaaaacgacgacgaaacaaatcgcgaactaatacgaaacctaaaaacactaccgaacctacactacgacgaccgcgacgacgacgacaacgcgacaaattaccataacccgactaccgcaactaccctcccaaaaatctcgttaactctacttaaccgaccaccgccgactcgaccctaaaaaccccgacgacctaacaaacaaccgatccgccgaacgctaacgaaactcgaaaaaaaaaaacgacaatccaaataacgcgcaaataaataccaaaccgcgaaaatttaccgccgaaacccaaaacgcactaactaaatacgccgcccacccgcgacctcacgaaaacgcccgaatccactaaataaacccgacgaaaccgacaacaacaatcgaacgcgaatacgccactctaaccgccgctc

SEQ ID NO: 15575 - DNA, 604 bp, Artificial Sequence
  chemically treated genomic DNA (Homo sapiens) CpG-island No: 15575
gtttttggaggggtcggggagggcgcgttcggggatggtattgggagtgggtagggttgacgtttttttgtttttagttcggtttttttttacggcgatttcgtcgcggggtagtgcggggaggcgtttagtgtagagttcgtgggggttttcgttgatagcggggtagggattgggagaagggcggcggcggagtaggtcgcgggttggtgcggggtttgggggtattgtcgagtttatattgcggcggtcgcggcggcggcggtagcgcgataagttgttatggttcggttgtcgtagttgtttttttaagggtttcgttagttttgtttggtcggttatcgtcgattcggttttagggatttcggcgatttagtaaatagtcgattcgtcgggcgttgacgaggttcgggggaagagggcggtagtttagatggcgcgtaagtgagtgttaggtcgcgaggatttgtcgtcgggatttagggcgtattagttaggtgcgtcgtttattcgcggttttacgggggcgttcgagtttattgaatgagttcggcggggtcgatagtagtagtcgagcgcgggtgcgttattttgatcgtcgttt

SEQ ID NO: 15576 - DNA, 604 bp, Artificial Sequence
  chemically treated genomic DNA (Homo sapiens) CpG-island No: 15576
aaacgacgatcaaaataacgcacccgcgctcgactactactatcgaccccgccgaactcattcaataaactcgaacgcccccgtaaaaccgcgaataaacgacgcacctaactaatacgccctaaatcccgacgacaaatcctcgcgacctaacactcacttacgcgccatctaaactaccgccctcttcccccgaacctcgtcaacgcccgacgaatcgactatttactaaatcgccgaaatccctaaaaccgaatcgacgataaccgaccaaacaaaactaacgaaacccttaaaaaaacaactacgacaaccgaaccataacaacttatcgcgctaccgccgccgccgcgaccgccgcaatataaactcgacaatacccccaaaccccgcaccaacccgcgacctactccgccgccgcccttctcccaatccctaccccgctatcaacgaaaacccccacgaactctacactaaacgcctccccgcactaccccgcgacgaaatcgccgtaaaaaaaaaccgaactaaaaacaaaaaaacgtcaaccctacccactcccaataccatccccgaacgcgccctccccgacccctccaaaaac

SEQ ID NO: 15577 - DNA, 591 bp, Artificial Sequence
  chemically treated genomic DNA (Homo sapiens) CpG-island No: 15577
agaagggatattatcgattgaagtacgattagttcgagcgtcgaagcgaatatagtatattaataataaaagcgatagtaggatatacgtaattcgagtcgatagaagagaagtaattagttcgttatattatttagtatcgcgtatagttaaattatattatattcgagtcgtttaatataataatagtagttagaacgacgaacgtagatagtcgagtattatatatagcgaagtaatagaagaacgaaatataacgaggttagatagcgtaggaagagacgcgaaattatagcgaagacggaaattagaggagagaggtacgatagaatagagagcgtcgagttatatatattcgtatgtagaaagaagtagattatatacgatattacgagaagaagcgtaaattaacgaatataagttaacgagcgatcgtcgagatatagagattaggaagtaggagtcgagcgtaagtagttacgaagagatagtataatataggtacgagcgagcgaagcgataggcggagtagaggacgtagacgtacgtacgttatagtagtcgtattagatagatcgtcgatacgaagta

SEQ ID NO: 15578 - DNA, 591 bp, Artificial Sequence
  chemically treated genomic DNA (Homo sapiens) CpG-island No: 15578
tacttcgtatcgacgatctatctaatacgactactataacgtacgtacgtctacgtcctctactccgcctatcgcttcgctcgctcgtacctatattatactatctcttcgtaactacttacgctcgactcctacttcctaatctctatatctcgacgatcgctcgttaacttatattcgttaatttacgcttcttctcgtaatatcgtatataatctacttctttctacatacgaatatatataactcgacgctctctattctatcgtacctctctcctctaatttccgtcttcgctataatttcgcgtctcttcctacgctatctaacctcgttatatttcgttcttctattacttcgctatatataatactcgactatctacgttcgtcgttctaactactattattatattaaacgactcgaatataatataatttaactatacgcgatactaaataatataacgaactaattacttctcttctatcgactcgaattacgtatatcctactatcgcttttattattaatatactatattcgcttcgacgctcgaactaatcgtacttcaatcgataatatcccttct

SEQ ID NO: 15579 - DNA, 591 bp, Artificial Sequence
  chemically treated genomic DNA (Homo sapiens) CpG-island No: 15579
tgtttcgtgtcggcggtttgtttggtgcggttgttgtggcgtgcgtgcgtttgcgttttttgtttcgtttatcgtttcgttcgttcgtgtttgtgttgtgttgttttttcgtggttgtttacgttcggtttttgttttttggtttttgtgtttcgacggtcgttcgttggtttgtgttcgttggtttgcgttttttttcgtggtgtcgtgtgtggtttgtttttttttgtatgcgggtgtgtgtagttcggcgttttttgttttgtcgtattttttttttttggttttcgttttcgttgtggtttcgcgtttttttttgcgttgtttagtttcgttgtgtttcgtttttttgttgtttcgttgtgtgtggtgttcggttgtttgcgttcgtcgttttgattgttgttgttgtgttgggcggttcgagtgtggtgtggtttggttgtgcgcggtgttgagtggtgtggcgggttggttgttttttttttgtcggttcgggttgcgtgtgttttgttgtcgtttttgttgttggtgtgttgtgttcgtttcggcgttcgggttggtcgtgttttagtcggtggtgtttttttt

SEQ ID NO: 15580 - DNA, 591 bp, Artificial Sequence
  chemically treated genomic DNA (Homo sapiens) CpG-island No: 15580
aaaaaaaacaccaccgactaaaacacgaccaacccgaacgccgaaacgaacacaacacaccaacaacaaaaacgacaacaaaacacacgcaacccgaaccgacaaaaaaaaaacaaccaacccgccacaccactcaacaccgcgcacaaccaaaccacaccacactcgaaccgcccaacacaacaacaacaatcaaaacgacgaacgcaaacaaccgaacaccacacacaacgaaacaacaaaaaaacgaaacacaacgaaactaaacaacgcaaaaaaaaacgcgaaaccacaacgaaaacgaaaaccaaaaaaaaaaaatacgacaaaacaaaaaacgccgaactacacacacccgcatacaaaaaaaaacaaaccacacacgacaccacgaaaaaaaacgcaaaccaacgaacacaaaccaacgaacgaccgtcgaaacacaaaaaccaaaaaacaaaaaccgaacgtaaacaaccacgaaaaaacaacacaacacaaacacgaacgaacgaaacgataaacgaaacaaaaaacgcaaacgcacgcacgccacaacaaccgcaccaaacaaaccgccgacacgaaaca

SEQ ID NO: 15581 - DNA, 664 bp, Artificial Sequence
  chemically treated genomic DNA (Homo sapiens) CpG-island No: 15581
tgaattcgcggtaatttgtttcgtttttttcgttttacggtagttaatcgttttcgttagagaaagaaaggcgtcgaaatgaaattcgttttcgttcgttttcggaattgtcgttattttcgtttttagatttggaggggcggggatgaggagggcggggaggacgacgagggcgaagagggtgggtgagagtttcggagttcgagtcgaagggcgagtcgtaaacgttaagtcgttggttattggtggatatggcgtaggcgcgtttgtttcgacgggtcgaatgttttggggtagtgttttgagcgcggagatcgcgtgatattggatgcgtatgggtatatcgtgttttgcggttgtttggcgttgtttttttttttagaagtgggcgttgggtagttacgtagggtttgaatcggaagcgggagtaggtagttgcgtggttaacggagaaaagaagtcgtggtcgcgggaggaggcgagaggagtcgggatttgcgttgtagttatcgtcgcggttgatattattttgatttttcgagtgtagtggtaggggcgcggaggtaacgtagcggtttttgcgttgggaaatttagtcgtgtgcgatttagtttgttttttttttagatcgttaattttatgtatttttttagagtggtttttg

SEQ ID NO: 15582 - DNA, 664 bp, Artificial Sequence
  chemically treated genomic DNA (Homo sapiens) CpG-island No: 15582
caaaaaccactctaaaaaaatacataaaattaacgatctaaaaaaaaaacaaactaaatcgcacacgactaaatttcccaacgcaaaaaccgctacgttacctccgcgcccctaccactacactcgaaaaatcaaaataatatcaaccgcgacgataactacaacgcaaatcccgactcctctcgcctcctcccgcgaccacgacttcttttctccgttaaccacgcaactacctactcccgcttccgattcaaaccctacgtaactacccaacgcccacttctaaaaaaaaaaacaacgccaaacaaccgcaaaacacgatatacccatacgcatccaatatcacgcgatctccgcgctcaaaacactaccccaaaacattcgacccgtcgaaacaaacgcgcctacgccatatccaccaataaccaacgacttaacgtttacgactcgcccttcgactcgaactccgaaactctcacccaccctcttcgccctcgtcgtcctccccgccctcctcatccccgcccctccaaatctaaaaacgaaaataacgacaattccgaaaacgaacgaaaacgaatttcatttcgacgcctttctttctctaacgaaaacgattaactaccgtaaaacgaaaaaaacgaaacaaattaccgcgaattca

SEQ ID NO: 15583 - DNA, 664 bp, Artificial Sequence
  chemically treated genomic DNA (Homo sapiens) CpG-island No: 15583
taagggttattttggaggggtgtatgagattggcggtttggggagaggatagattgggtcgtatacgattgaattttttagcgtagaagtcgttgcgttgttttcgcgtttttattattgtattcggaaggttaaagtagtattaatcgcggcggtggttgtagcgtagatttcgatttttttcgttttttttcgcggttacggtttttttttttcgttagttacgtagttatttattttcgttttcggtttaaattttgcgtgattgtttagcgtttatttttggaggaagaagtaacgttaagtagtcgtagagtacggtatgtttatgcgtatttagtattacgcggttttcgcgtttaaaatattgttttaaaatattcggttcgtcggagtaaacgcgtttgcgttatgtttattaatggttagcgatttagcgtttgcggttcgtttttcggttcgggtttcggggtttttatttatttttttcgttttcgtcgtttttttcgttttttttattttcgtttttttaagtttgaggacggaagtgacgatagtttcgaaggcgaacggaggcgggttttatttcggcgtttttttttttttggcggaagcgattggttgtcgtgaagcgaaagaggcgggataaattgtcgcgagttta

SEQ ID NO: 15584 - DNA, 664 bp, Artificial Sequence
  chemically treated genomic DNA (Homo sapiens) CpG-island No: 15584
taaactcgcgacaatttatcccgcctctttcgcttcacgacaaccaatcgcttccgccaaaaaaaaaaaaacgccgaaataaaacccgcctccgttcgccttcgaaactatcgtcacttccgtcctcaaacttaaaaaaacgaaaataaaaaaaacgaaaaaaacgacgaaaacgaaaaaaataaataaaaaccccgaaacccgaaccgaaaaacgaaccgcaaacgctaaatcgctaaccattaataaacataacgcaaacgcgtttactccgacgaaccgaatattttaaaacaatattttaaacgcgaaaaccgcgtaatactaaatacgcataaacataccgtactctacgactacttaacgttacttcttcctccaaaaataaacgctaaacaatcacgcaaaatttaaaccgaaaacgaaaataaataactacgtaactaacgaaaaaaaaaaaccgtaaccgcgaaaaaaaacgaaaaaaatcgaaatctacgctacaaccaccgccgcgattaatactactttaaccttccgaatacaataataaaaacgcgaaaacaacgcaacgacttctacgctaaaaaattcaatcgtatacgacccaatctatcctctccccaaaccgccaatctcatacacccctccaaaataaccctta

SEQ ID NO: 15585 - DNA, 501 bp, Artificial Sequence
  chemically treated genomic DNA (Homo sapiens) CpG-island No: 15585
ggcgcgttattgagtataaaggagataatagcgaggcggtagcgggcgttgattttcgttcgttagttattcgtaattgcggttatagatttgtagtttttttttttttagtcggttcgttcgtttttttgtttttttttttttttcgtattggacggtttcggtttattttcgggtttcggatatttggtatcgattggggtcggggacgcggagtaggtggtcgcggcggggtagttgggtcgttagtttggtgtttcggggatcgtttttcgttgttttggttattagtttttgttcgttcgattcgtttcgtttttcggtttgcgagttttgtcggtcggattttgcgtcgcgttcggcgttgttgttgcgttcggggtttcgttcggcgtcggcggtgatcgggaagttcgcgttaaaggggtaatcgggattttggttcggtatggttgaagttagtatcgattagtttaagttgtttggagttaaggaaggtaa

SEQ ID NO: 15586 - DNA, 501 bp, Artificial Sequence
  chemically treated genomic DNA (Homo sapiens) CpG-island No: 15586
ttaccttccttaactccaaacaacttaaactaatcgatactaacttcaaccataccgaaccaaaatcccgattacccctttaacgcgaacttcccgatcaccgccgacgccgaacgaaaccccgaacgcaacaacaacgccgaacgcgacgcaaaatccgaccgacaaaactcgcaaaccgaaaaacgaaacgaatcgaacgaacaaaaactaataaccaaaacaacgaaaaacgatccccgaaacaccaaactaacgacccaactaccccgccgcgaccacctactccgcgtccccgaccccaatcgataccaaatatccgaaacccgaaaataaaccgaaaccgtccaatacgaaaaaaaaaaaaaaacaaaaaaacgaacgaaccgactaaaaaaaaaaaaactacaaatctataaccgcaattacgaataactaacgaacgaaaatcaacgcccgctaccgcctcgctattatctcctttatactcaataacgcgcc

SEQ ID NO: 15587 - DNA, 501 bp, Artificial Sequence
  chemically treated genomic DNA (Homo sapiens) CpG-island No: 15587
ttattttttttgattttaggtagtttggattggtcgatgttgattttagttatatcgggttagggtttcggttgtttttttaacgcgggtttttcggttatcgtcggcgtcgagcggggtttcgagcgtagtagtagcgtcggacgcggcgtaaagttcggtcggtagggttcgtaggtcggagaacggagcgggtcgggcgggtaggggttggtgattaaagtagcgggagacggttttcgaggtattaagttggcggtttagttgtttcgtcgcggttatttgtttcgcgttttcggttttaatcgatattaaatattcggagttcggaaatggatcggggtcgtttagtacggagggagagaggagatagaaaggcgggcgggtcggttgggggagggggagttgtaggtttgtaatcgtaattgcgagtggttggcgagcgaagattagcgttcgttgtcgtttcgttgttgttttttttgtgtttagtgacgcgtt

SEQ ID NO: 15588 - DNA, 501 bp, Artificial Sequence
  chemically treated genomic DNA (Homo sapiens) CpG-island No: 15588
aacgcgtcactaaacacaaaaaaaacaacaacgaaacgacaacgaacgctaatcttcgctcgccaaccactcgcaattacgattacaaacctacaactccccctcccccaaccgacccgcccgcctttctatctcctctctccctccgtactaaacgaccccgatccatttccgaactccgaatatttaatatcgattaaaaccgaaaacgcgaaacaaataaccgcgacgaaacaactaaaccgccaacttaatacctcgaaaaccgtctcccgctactttaatcaccaacccctacccgcccgacccgctccgttctccgacctacgaaccctaccgaccgaactttacgccgcgtccgacgctactactacgctcgaaaccccgctcgacgccgacgataaccgaaaaacccgcgttaaaaaaacaaccgaaaccctaacccgatataactaaaatcaacatcgaccaatccaaactacctaaaatcaaaaaaaataa

SEQ ID NO: 15589 - DNA, 583 bp, Artificial Sequence
  chemically treated genomic DNA (Homo sapiens) CpG-island No: 15589
gggttacgggcgagtggagttgtaggggttcgggcggagagtcgttgttatttagggaagttttcgggatttcgggtttttcgcgaagtttcggacgggcgttatcgaagtcgagagtttcggtcgagttttttcgtacggtgggcgtcgcgtttaggcgagcgcgcgaggtcgggcggggtcgggggtcgttcggggagggggcggggtcgggattttcgcggtcgcgcgtaggggttgggaagttgttttttcggtcgcgtcgggcgaggggttgcgtcggttcgcgaggcgtatgcgcgttgtcgagcggttttcgtttttttttcgtttatcgttttttttttttttttttttttttttgtattttcgtcgtttttttttttttttcgttcgttgggtgttgaagttgggcggatggtagtaaatcggtttcgttagaggatcgagtcgtttagtttcgttttttcggatttatcggcgcgttgtttatatttttaggcgatcgggtaagacgttgtttttaaaataagcggtgttaagtaaatgatattaaaatgtttgttttgtattaatggatgga

SEQ ID NO: 15590 - DNA, 583 bp, Artificial Sequence
  chemically treated genomic DNA (Homo sapiens) CpG-island No: 15590
tccatccattaatacaaaacaaacattttaatatcatttacttaacaccgcttattttaaaaacaacgtcttacccgatcgcctaaaaatataaacaacgcgccgataaatccgaaaaaacgaaactaaacgactcgatcctctaacgaaaccgatttactaccatccgcccaacttcaacacccaacgaacgaaaaaaaaaaaaaaacgacgaaaatacaaaaaaaaaaaaaaaaaaaaaaaaaacgataaacgaaaaaaaaacgaaaaccgctcgacaacgcgcatacgcctcgcgaaccgacgcaacccctcgcccgacgcgaccgaaaaaacaacttcccaacccctacgcgcgaccgcgaaaatcccgaccccgccccctccccgaacgacccccgaccccgcccgacctcgcgcgctcgcctaaacgcgacgcccaccgtacgaaaaaactcgaccgaaactctcgacttcgataacgcccgtccgaaacttcgcgaaaaacccgaaatcccgaaaacttccctaaataacaacgactctccgcccgaacccctacaactccactcgcccgtaaccc

SEQ ID NO: 15591 - DNA, 583 bp, Artificial Sequence
  chemically treated genomic DNA (Homo sapiens) CpG-island No: 15591
tttatttattggtgtaaagtagatattttgatgttatttatttagtatcgtttgttttggaggtagcgttttattcggtcgtttggaggtgtgggtagcgcgtcgatgggttcgggggagcggggttgggcggttcggttttttagcggagtcggtttgttgttattcgtttaattttagtatttagcgggcgaggagagagggagagcggcgaggatgtagaggagggggagggggaggagggagcggtgggcggggagggagcgagagtcgttcggtagcgcgtatgcgtttcgcgggtcggcgtagtttttcgttcggcgcggtcggaggggtagttttttagtttttgcgcgcggtcgcgagagtttcggtttcgtttttttttcgggcggttttcggtttcgttcgatttcgcgcgttcgtttgggcgcggcgtttatcgtgcggaggggttcggtcgggattttcggtttcggtgacgttcgttcggagtttcgcgggaggttcggagtttcgagagtttttttgggtgatagcggtttttcgttcgggtttttgtaattttattcgttcgtagttt

SEQ ID NO: 15592 - DNA, 583 bp, Artificial Sequence
  chemically treated genomic DNA (Homo sapiens) CpG-island No: 15592
aaactacgaacgaataaaattacaaaaacccgaacgaaaaaccgctatcacccaaaaaaactctcgaaactccgaacctcccgcgaaactccgaacgaacgtcaccgaaaccgaaaatcccgaccgaacccctccgcacgataaacgccgcgcccaaacgaacgcgcgaaatcgaacgaaaccgaaaaccgcccgaaaaaaaaacgaaaccgaaactctcgcgaccgcgcgcaaaaactaaaaaactacccctccgaccgcgccgaacgaaaaactacgccgacccgcgaaacgcatacgcgctaccgaacgactctcgctccctccccgcccaccgctccctcctccccctccccctcctctacatcctcgccgctctccctctctcctcgcccgctaaatactaaaattaaacgaataacaacaaaccgactccgctaaaaaaccgaaccgcccaaccccgctcccccgaacccatcgacgcgctacccacacctccaaacgaccgaataaaacgctacctccaaaacaaacgatactaaataaataacatcaaaatatctactttacaccaataaataaa

SEQ ID NO: 15593 - DNA, 531 bp, Artificial Sequence
  chemically treated genomic DNA (Homo sapiens) CpG-island No: 15593
gggcggggcgtggagggttaggtttcgtttttcgaacgacggttttaagtgtgcgtacgcgtagggggtcgcgtttttttcgggcggcggtatcgtttatagtttgggacgttagcggcgcgcgacgtgttttgttgtataaatgcggtggcgttcggcgtagggatatttcggttttgagcgtttgggagttaggttgtttgtcggcgtagcggttagcgtttgagttcgtttttgattttcgttgtggtatggcggacgaggggaagtcgtatagcggtaagtgttggttttcgggtcgggaattggttatttggggcgcgggtgggcggcgtcggtttaggttttagttttcggggcgtgaggtcgttaggggttcggcgttcgcggggagcggcgcgcggggggtcgggtattcgaggtggatattcgagttgttgatttttggatttttgttggtattttggtgttgggggatttgcggttcggagcggatggttcgggggtagggtgacgggatttttttgaatt

SEQ ID NO: 15594 - DNA, 531 bp, Artificial Sequence
  chemically treated genomic DNA (Homo sapiens) CpG-island No: 15594
aattcaaaaaaatcccgtcaccctacccccgaaccatccgctccgaaccgcaaatcccccaacaccaaaataccaacaaaaatccaaaaatcaacaactcgaatatccacctcgaatacccgaccccccgcgcgccgctccccgcgaacgccgaacccctaacgacctcacgccccgaaaactaaaacctaaaccgacgccgcccacccgcgccccaaataaccaattcccgacccgaaaaccaacacttaccgctatacgacttcccctcgtccgccataccacaacgaaaatcaaaaacgaactcaaacgctaaccgctacgccgacaaacaacctaactcccaaacgctcaaaaccgaaatatccctacgccgaacgccaccgcatttatacaacaaaacacgtcgcgcgccgctaacgtcccaaactataaacgataccgccgcccgaaaaaaacgcgaccccctacgcgtacgcacacttaaaaccgtcgttcgaaaaacgaaacctaaccctccacgccccgccc

SEQ ID NO: 15595 - DNA, 531 bp, Artificial Sequence
  chemically treated genomic DNA (Homo sapiens) CpG-island No: 15595
agtttaaaggaatttcgttattttattttcgagttattcgtttcgagtcgtaggttttttaatattaggatgttagtaggaatttaggagttaataattcgggtgtttatttcgagtgttcggtttttcgcgcgtcgtttttcgcggacgtcgggtttttagcggttttacgtttcgggggttgaggtttaggtcggcgtcgtttattcgcgttttagatagttagttttcgattcgaagattagtatttatcgttgtacgattttttttcgttcgttatgttatagcgaagattaagggcgggtttaggcgttggtcgttacgtcggtaaataatttaatttttaagcgtttaggatcgaagtgtttttacgtcgggcgttatcgtatttatatagtaaagtacgtcgcgcgtcgttgacgttttaggttgtgggcggtgtcgtcgttcggagaaagcgcggttttttgcgcgtgcgtatatttaaggtcgtcgttcgaggggcggggtttggttttttacgtttcgttt

SEQ ID NO: 15596 - DNA, 531 bp, Artificial Sequence
  chemically treated genomic DNA (Homo sapiens) CpG-island No: 15596
aaacgaaacgtaaaaaaccaaaccccgcccctcgaacgacgaccttaaatatacgcacgcgcaaaaaaccgcgctttctccgaacgacgacaccgcccacaacctaaaacgtcaacgacgcgcgacgtactttactatataaatacgataacgcccgacgtaaaaacacttcgatcctaaacgcttaaaaattaaattatttaccgacgtaacgaccaacgcctaaacccgcccttaatcttcgctataacataacgaacgaaaaaaaatcgtacaacgataaatactaatcttcgaatcgaaaactaactatctaaaacgcgaataaacgacgccgacctaaacctcaacccccgaaacgtaaaaccgctaaaaacccgacgtccgcgaaaaacgacgcgcgaaaaaccgaacactcgaaataaacacccgaattattaactcctaaattcctactaacatcctaatattaaaaaacctacgactcgaaacgaataactcgaaaataaaataacgaaattcctttaaact

SEQ ID NO: 15597 - DNA, 524 bp, Artificial Sequence
  chemically treated genomic DNA (Homo sapiens) CpG-island No: 15597
ggagatagcgatttcgtagttcgggaaggtttcgtttcgtttcgtttcgtttcgtcgtgttggatttcgttttgggttgaagtttcgttttttacggttataaaagcggtcggcggagaggggcgggattttttcgggagtcggaagtttcgttttacggttgttttggtagcgcgcgaggttggtgagtcggtagttttgtggtagtcggcgggttggtttttatggttgtacgattaggtaggggtttcgggcgttttgtttattttcgagttggaggggattggcgggaagcggcggttggttgtagggcgtttcgtcgggcgtggggtgtagtcgtgtcggtgagcgagttttgttcgaggcggagaggagaaattcgggaagtaattgtggttattttaaggttattggtttcgagttaggtcgtgcgattttaggtaagtcgtatatttttttcgtgtagttgtttagtagtgtggatttagtattatcgtgtgtgtaaagttttttttaagaatcgt

SEQ ID NO: 15598 - DNA, 524 bp, Artificial Sequence
  chemically treated genomic DNA (Homo sapiens) CpG-island No: 15598
acgattcttaaaaaaaactttacacacacgataatactaaatccacactactaaacaactacacgaaaaaaatatacgacttacctaaaatcgcacgacctaactcgaaaccaataaccttaaaataaccacaattacttcccgaatttctcctctccgcctcgaacaaaactcgctcaccgacacgactacaccccacgcccgacgaaacgccctacaaccaaccgccgcttcccgccaatcccctccaactcgaaaataaacaaaacgcccgaaacccctacctaatcgtacaaccataaaaaccaacccgccgactaccacaaaactaccgactcaccaacctcgcgcgctaccaaaacaaccgtaaaacgaaacttccgactcccgaaaaaatcccgcccctctccgccgaccgcttttataaccgtaaaaaacgaaacttcaacccaaaacgaaatccaacacgacgaaacgaaacgaaacgaaacgaaaccttcccgaactacgaaatcgctatctcc

SEQ ID NO: 15599 - DNA, 524 bp, Artificial Sequence
  chemically treated genomic DNA (Homo sapiens) CpG-island No: 15599
acgatttttagaaagagttttatatatacggtgatattgaatttatattgttaggtagttgtacggagagaatgtgcgatttgtttaaggtcgtacggtttgattcgaaattagtagttttagagtagttataattgtttttcgagtttttttttttcgtttcgagtagagttcgtttatcgatacggttatattttacgttcggcggagcgttttgtagttaatcgtcgtttttcgttagttttttttagttcgggggtgggtaaagcgttcggagtttttatttaatcgtgtaattatggaaattagttcgtcggttgttatagggttgtcgatttattagtttcgcgcgttgttagggtaatcgtgagacgggattttcggttttcggggaagtttcgttttttttcgtcggtcgtttttgtagtcgtgggaggcggggttttagtttagggcggggtttagtacggcggggcggggcgggacggggcggagttttttcgagttgcgaggtcgttgttttt

SEQ ID NO: 15600 - DNA, 524 bp, Artificial Sequence
  chemically treated genomic DNA (Homo sapiens) CpG-island No: 15600
aaaaacaacgacctcgcaactcgaaaaaactccgccccgtcccgccccgccccgccgtactaaaccccgccctaaactaaaaccccgcctcccacgactacaaaaacgaccgacgaaaaaaaacgaaacttccccgaaaaccgaaaatcccgtctcacgattaccctaacaacgcgcgaaactaataaatcgacaaccctataacaaccgacgaactaatttccataattacacgattaaataaaaactccgaacgctttacccacccccgaactaaaaaaaactaacgaaaaacgacgattaactacaaaacgctccgccgaacgtaaaatataaccgtatcgataaacgaactctactcgaaacgaaaaaaaaaaactcgaaaaacaattataactactctaaaactactaatttcgaatcaaaccgtacgaccttaaacaaatcgcacattctctccgtacaactacctaacaatataaattcaatatcaccgtatatataaaactctttctaaaaatcgt

SEQ ID NO: 15601 - DNA, 1205 bp, Artificial Sequence
  chemically treated genomic DNA (Homo sapiens) CpG-island No: 15601
acgaaattcgattttatttagtgttttaagacgttattgattcgtttttttggcgaggggataatttcgaagtatgatttggttaggaggagttataaagcgcgattagtttcgttgtattttaggtataggtcggcgttagtcgtgttttattaggtttatcggtttcgagtagtagtaagttcggtcggaaagcgaaagtggtttcgttatgtttagatcggttagttttttcgtttatttgatttcgtttcgtagtcgtatttgggttcgagttatcgtcgcggtcgttacggtttcgtataggaaggcggtagtaaagagcgtaagttcgacgcgttgtagttaggatagcgttatggcgttttgattattaggaagcgtcgttgtagtagtatttcgtttaaagtttattttattcggcgcgatttacgaaggtggagacgttattttcgggggcgggatttatttataaggaacgaaggggttattgatttagagcggtaagtatagcgagtagttcgagagcgtttatcggcgggcggggcggttggtacggtcgattatgggtagtttttgtacgtagcgcgaggtcgggttaggttcgtacggcgcggggaaggtagtttggaaaaggcgttcgcggtagcgttttttagtttgtcgttcggttatgatgaaacgaaagtgcggggcgtcgcgcggggcgaaacggttttgggggagaacgtcgcgggtgtcggtttcggggttttgttgtcggggtgtttcgcgcgttcgatgtacgcgcggtaagggtttgtttttagaggcggcgggtttagaggtcgacgcggggtcgttttcgtcgttgtttcgggggttttcgtcgtcgtgcgggttgattatggcgtttgtcgttagttgcggtatttttcgtatcgagttcggggttgtcgtcggtttttttttgttttcgggcggtcgcggagtcgtgggtgtaggttggtcggtgttaaagcgtgtggttaagttgttatcgaagaaggcgtagagttttcggtagatgtcggttaaggttatcgaaagagaagggtttttcggtttcgcgttttttggcggtagcgggaggtcggatttaaagttgggttttgtatcgttttcggaggacgatttttgaaagagaaggttgttttatggtaggtcgtttaggcgtcggtattttt

SEQ ID NO: 15602 - DNA, 1205 bp, Artificial Sequence
  chemically treated genomic DNA (Homo sapiens) CpG-island No: 15602
aaaaataccgacgcctaaacgacctaccataaaacaaccttctctttcaaaaatcgtcctccgaaaacgatacaaaacccaactttaaatccgacctcccgctaccgccaaaaaacgcgaaaccgaaaaacccttctctttcgataaccttaaccgacatctaccgaaaactctacgccttcttcgataacaacttaaccacacgctttaacaccgaccaacctacacccacgactccgcgaccgcccgaaaacaaaaaaaaaccgacgacaaccccgaactcgatacgaaaaataccgcaactaacgacaaacgccataatcaacccgcacgacgacgaaaacccccgaaacaacgacgaaaacgaccccgcgtcgacctctaaacccgccgcctctaaaaacaaacccttaccgcgcgtacatcgaacgcgcgaaacaccccgacaacaaaaccccgaaaccgacacccgcgacgttctcccccaaaaccgtttcgccccgcgcgacgccccgcactttcgtttcatcataaccgaacgacaaactaaaaaacgctaccgcgaacgccttttccaaactaccttccccgcgccgtacgaacctaacccgacctcgcgctacgtacaaaaactacccataatcgaccgtaccaaccgccccgcccgccgataaacgctctcgaactactcgctatacttaccgctctaaatcaataaccccttcgttccttataaataaatcccgcccccgaaaataacgtctccaccttcgtaaatcgcgccgaataaaataaactttaaacgaaatactactacaacgacgcttcctaataatcaaaacgccataacgctatcctaactacaacgcgtcgaacttacgctctttactaccgccttcctatacgaaaccgtaacgaccgcgacgataactcgaacccaaatacgactacgaaacgaaatcaaataaacgaaaaaactaaccgatctaaacataacgaaaccactttcgctttccgaccgaacttactactactcgaaaccgataaacctaataaaacacgactaacgccgacctatacctaaaatacaacgaaactaatcgcgctttataactcctcctaaccaaatcatacttcgaaattatcccctcgccaaaaaaacgaatcaataacgtcttaaaacactaaataaaatcgaatttcgt

SEQ ID NO: 15603 - DNA, 1205 bp, Artificial Sequence
  chemically treated genomic DNA (Homo sapiens) CpG-island No: 15603
gggggtgtcggcgtttggacgatttgttatgggatagtttttttttttaagagtcgtttttcgggggcggtgtagaatttagttttgggttcggtttttcgttgtcgttagggggcgcggggtcggaggatttttttttttcggtgattttggtcgatatttatcgggagttttacgtttttttcggtgatagtttggttatacgttttggtatcggttagtttgtatttacggtttcgcggtcgttcggggataagaaggagtcggcggtagtttcggattcggtgcggaagatgtcgtagttgacggtaagcgttatagttagttcgtacggcgacgagagttttcggggtagcggcggaggcggtttcgcgtcggtttttgggttcgtcgtttttgagagtaggtttttgtcgcgcgtgtatcgggcgcgcggggtatttcggtagtagggtttcgggatcggtattcgcgacgtttttttttagagtcgtttcgtttcgcgcggcgtttcgtattttcgttttattatagtcgggcggtaggttgggaggcgttgtcgcgggcgttttttttagattgtttttttcgcgtcgtacgggtttagttcggtttcgcgttacgtgtagaaattgtttatgatcggtcgtattagtcgtttcgttcgtcggtgggcgttttcggattattcgttgtatttgtcgttttgagttagtggttttttcgttttttgtaaataaatttcgttttcggaagtgacgtttttattttcgtgggtcgcgtcggataaggtgggttttgggcggggtgttgttgtagcggcgttttttggtggttagggcgttatggcgttgttttggttgtagcgcgtcgagtttgcgttttttgttgtcgtttttttgtgcggggtcgtggcggtcgcggcgatgattcggatttaggtgcggttgcggggcggggttaggtaggcgggggagttggtcggtttggatatggcgaggttattttcgtttttcgatcgggtttgttgttgttcggagtcggtggatttggtgaggtacggttggcgtcggtttgtatttgaaatgtagcgaggttaatcgcgttttgtggttttttttggttaggttatatttcgaagttgttttttcgttaaagggacgggttagtagcgttttaaagtattaggtggagtcgggtttcgt

SEQ ID NO: 15604 - DNA, 1205 bp, Artificial Sequence
  chemically treated genomic DNA (Homo sapiens) CpG-island No: 15604
acgaaacccgactccacctaatactttaaaacgctactaacccgtccctttaacgaaaaaacaacttcgaaatataacctaaccaaaaaaaaccacaaaacgcgattaacctcgctacatttcaaatacaaaccgacgccaaccgtacctcaccaaatccaccgactccgaacaacaacaaacccgatcgaaaaacgaaaataacctcgccatatccaaaccgaccaactcccccgcctacctaaccccgccccgcaaccgcacctaaatccgaatcatcgccgcgaccgccacgaccccgcacaaaaaaacgacaacaaaaaacgcaaactcgacgcgctacaaccaaaacaacgccataacgccctaaccaccaaaaaacgccgctacaacaacaccccgcccaaaacccaccttatccgacgcgacccacgaaaataaaaacgtcacttccgaaaacgaaatttatttacaaaaaacgaaaaaaccactaactcaaaacgacaaatacaacgaataatccgaaaacgcccaccgacgaacgaaacgactaatacgaccgatcataaacaatttctacacgtaacgcgaaaccgaactaaacccgtacgacgcgaaaaaaacaatctaaaaaaaacgcccgcgacaacgcctcccaacctaccgcccgactataataaaacgaaaatacgaaacgccgcgcgaaacgaaacgactctaaaaaaaaacgtcgcgaataccgatcccgaaaccctactaccgaaataccccgcgcgcccgatacacgcgcgacaaaaacctactctcaaaaacgacgaacccaaaaaccgacgcgaaaccgcctccgccgctaccccgaaaactctcgtcgccgtacgaactaactataacgcttaccgtcaactacgacatcttccgcaccgaatccgaaactaccgccgactccttcttatccccgaacgaccgcgaaaccgtaaatacaaactaaccgataccaaaacgtataaccaaactatcaccgaaaaaaacgtaaaactcccgataaatatcgaccaaaatcaccgaaaaaaaaaaatcctccgaccccgcgccccctaacgacaacgaaaaaccgaacccaaaactaaattctacaccgcccccgaaaaacgactcttaaaaaaaaaaactatcccataacaaatcgtccaaacgccgacaccccc

SEQ ID NO: 15605 - DNA, 717 bp, Artificial Sequence
  chemically treated genomic DNA (Homo sapiens) CpG-island No: 15605
ataggttcggagtcgatttcgtttcgttcgtagggtttttcgtcgtttcgatatttttttagaaagataaagaatagcgggaggcggtaggttcggcggtttagttgcgagcgttttggtgttcgaggtcgtttttcggtagtagtgggaggaacgtttcgaggggagggtaggagaggggcggggaggagttgagacgggcggggaagagttcgggtttttttttttatatttcgttaggacgtcggttggggcgggtcggtagagggcgcggggcggtttttcgttcggcgggttcggtaggttcggcgggttgggggcgcgttgtttcgggcgtattgtcggagttcgcgggtatcgggtcgcggcggttcgggcggtcggagtcggtaggggaagtgcggcgggcgggtaggcgggcggtcgggaacgggcggggcggggcggggcgcgaagggggcggtgtcgcgagcggggggcggtggcggcggcggcggtggcggtcgaggaggagaatatggcggtcgcggagagcggttgaaatgtttgttttttaggtcgggcgagcgggagtttgacgcgatttgttgagttttgtttttcgacggttgtttcgcggttttgagggttttcgtcgtttgttcgttgttgttttttcgagcggagtttgcgttaggttttttttgtatttttttgcggggggatttttgtttcgga

SEQ ID NO: 15606 - DNA, 717 bp, Artificial Sequence
  chemically treated genomic DNA (Homo sapiens) CpG-island No: 15606
tccgaaacaaaaatccccccgcaaaaaaatacaaaaaaaacctaacgcaaactccgctcgaaaaaacaacaacgaacaaacgacgaaaaccctcaaaaccgcgaaacaaccgtcgaaaaacaaaactcaacaaatcgcgtcaaactcccgctcgcccgacctaaaaaacaaacatttcaaccgctctccgcgaccgccatattctcctcctcgaccgccaccgccgccgccgccaccgccccccgctcgcgacaccgcccccttcgcgccccgccccgccccgcccgttcccgaccgcccgcctacccgcccgccgcacttcccctaccgactccgaccgcccgaaccgccgcgacccgatacccgcgaactccgacaatacgcccgaaacaacgcgcccccaacccgccgaacctaccgaacccgccgaacgaaaaaccgccccgcgccctctaccgacccgccccaaccgacgtcctaacgaaatataaaaaaaaaaacccgaactcttccccgcccgtctcaactcctccccgcccctctcctaccctcccctcgaaacgttcctcccactactaccgaaaaacgacctcgaacaccaaaacgctcgcaactaaaccgccgaacctaccgcctcccgctattctttatctttctaaaaaaatatcgaaacgacgaaaaaccctacgaacgaaacgaaatcgactccgaacctat

SEQ ID NO: 15607 - DNA, 717 bp, Artificial Sequence
  chemically treated genomic DNA (Homo sapiens) CpG-island No: 15607
ttcggagtaggggttttttcgtagggggatgtagagggaatttgacgtaggtttcgttcgagggagtagtagcgaataggcggcggaggtttttaaggtcgcgaggtagtcgtcggaggatagagtttagtaaatcgcgttagattttcgttcgttcggtttgaagaataggtattttagtcgtttttcgcggtcgttatgttttttttttcggtcgttatcgtcgtcgtcgttatcgtttttcgttcgcggtatcgtttttttcgcgtttcgtttcgtttcgttcgttttcggtcgttcgtttgttcgttcgtcgtattttttttgtcggtttcggtcgttcgggtcgtcgcgattcggtgttcgcgagtttcgatagtgcgttcgggatagcgcgtttttagttcgtcgggtttgtcgggttcgtcgagcgaggaatcgtttcgcgttttttgtcggttcgttttagtcggcgttttaacgaagtgtgggaaaggaggttcgaattttttttcgttcgttttaattttttttcgttttttttttgtttttttttcggggcgttttttttattgttgtcgggaagcggtttcgaatattagggcgttcgtagttaggtcgtcgggtttgtcgtttttcgttgttttttatttttttgggaaggtgtcggagcggcgagaggttttgcggacggggcggagtcggtttcgggtttgt

SEQ ID NO: 15608 - DNA, 717 bp, Artificial Sequence
  chemically treated genomic DNA (Homo sapiens) CpG-island No: 15608
acaaacccgaaaccgactccgccccgtccgcaaaacctctcgccgctccgacaccttcccaaaaaaataaaaaacaacgaaaaacgacaaacccgacgacctaactacgaacgccctaatattcgaaaccgcttcccgacaacaataaaaaaaacgccccgaaaaaaaaacaaaaaaaaaacgaaaaaaaattaaaacgaacgaaaaaaaattcgaacctcctttcccacacttcgttaaaacgccgactaaaacgaaccgacaaaaaacgcgaaacgattcctcgctcgacgaacccgacaaacccgacgaactaaaaacgcgctatcccgaacgcactatcgaaactcgcgaacaccgaatcgcgacgacccgaacgaccgaaaccgacaaaaaaaatacgacgaacgaacaaacgaacgaccgaaaacgaacgaaacgaaacgaaacgcgaaaaaaacgataccgcgaacgaaaaacgataacgacgacgacgataacgaccgaaaaaaaaaacataacgaccgcgaaaaacgactaaaatacctattcttcaaaccgaacgaacgaaaatctaacgcgatttactaaactctatcctccgacgactacctcgcgaccttaaaaacctccgccgcctattcgctactactccctcgaacgaaacctacgtcaaattccctctacatccccctacgaaaaaacccctactccgaa

SEQ ID NO: 15609 - DNA, 848 bp, Artificial Sequence
  chemically treated genomic DNA (Homo sapiens) CpG-island No: 15609
gagggggtcggagagtcgcggcgtcgggttcgaggagcggcggaggtcggggcggcgtcgtcgttacggtcgcggacgagtgcggcgtcggtgagcggggtttagaggcggcggcggtaggtgagtggcgggttgcgggtgcggagtttttcggtgggtgtagttgttacgagtcgcgcggtcgcggaggttttagggggcggggagtagttggcgttttttcgttttttgtttttttttttttcgttttattttttttttattttttcgagtttttttcgcggttcggcgcggttggagggggcggaggtcgtagttgttacgggtattagttgggggttgtttttcgtcgggggaaatcgttgtagtagcgattttttttcgttttttttttagttgttttagttagcgcggagagggcgagtattcgcggagggggtgcgagttgcgcggtcgtttgttcggcgtggggagcgggcgtttcgggtcgtcgtcgagagggggagtcggaagtcggcgcggggcgtttttcggtttcgacgacgtcgtgattttggtcggttcgtttatttttcggaatttcgtttgtcgggatcgcgaaatgggggcgatcgcggcgttttttttcgtcggcgtagttttcgacggcgtttgggtttgatttcggcgcgtttgttcgttttttttttcgagaaggggtttcggaggtagatatgggatggatattggatatgtttttgtcgcggttcgggtttggttttttttttgggatttagtcgaaagggtcgaggaagggaagtaaatatgttgacgaggcgattgggaggtggggttggttagtgggtagt

SEQ ID NO: 15610 - DNA, 848 bp, Artificial Sequence
  chemically treated genomic DNA (Homo sapiens) CpG-island No: 15610
actacccactaaccaaccccacctcccaatcgcctcgtcaacatatttacttcccttcctcgaccctttcgactaaatcccaaaaaaaaaaccaaacccgaaccgcgacaaaaacatatccaatatccatcccatatctacctccgaaaccccttctcgaaaaaaaaaacgaacaaacgcgccgaaatcaaacccaaacgccgtcgaaaactacgccgacgaaaaaaaacgccgcgatcgcccccatttcgcgatcccgacaaacgaaattccgaaaaataaacgaaccgaccaaaatcacgacgtcgtcgaaaccgaaaaacgccccgcgccgacttccgactccccctctcgacgacgacccgaaacgcccgctccccacgccgaacaaacgaccgcgcaactcgcaccccctccgcgaatactcgccctctccgcgctaactaaaacaactaaaaaaaaaacgaaaaaaaatcgctactacaacgatttcccccgacgaaaaacaacccccaactaatacccgtaacaactacgacctccgccccctccaaccgcgccgaaccgcgaaaaaaactcgaaaaaataaaaaaaaaataaaacgaaaaaaaaaaaaacaaaaaacgaaaaaacgccaactactccccgccccctaaaacctccgcgaccgcgcgactcgtaacaactacacccaccgaaaaactccgcacccgcaacccgccactcacctaccgccgccgcctctaaaccccgctcaccgacgccgcactcgtccgcgaccgtaacgacgacgccgccccgacctccgccgctcctcgaacccgacgccgcgactctccgaccccctc

SEQ ID NO: 15611 - DNA, 848 bp, Artificial Sequence
  chemically treated genomic DNA (Homo sapiens) CpG-island No: 15611
attgtttattaattaattttattttttaatcgtttcgttaatatgtttgtttttttttttcggttttttcggttgaattttaggaaggggattaaattcgggtcgcgataggaatatgtttagtatttattttatgtttattttcgaaattttttttcgggagaaggggcgagtaagcgcgtcggggttaaatttaagcgtcgtcgagggttgcgtcgacggagagggacgtcgcggtcgtttttatttcgcggtttcggtaggcgagatttcgagaggtgagcgggtcggttaaggttacggcgtcgtcggggtcgaggggcgtttcgcgtcgattttcggttttttttttcggcggcggttcggggcgttcgttttttacgtcgggtaggcggtcgcgtagttcgtatttttttcgcggatgttcgtttttttcgcgttaattagggtaattggaaaagaggcggagagaagtcgttgttgtagcgatttttttcggcggggagtagtttttagttggtgttcgtgatagttgcgattttcgttttttttagtcgcgtcgggtcgcgaggggaattcggggaagtgggaggaggatggagcgggagaaaggagagtagggggcggaggggcgttagttgtttttcgttttttagggttttcgcggtcgcgcggttcgtgatagttgtatttatcgggaggtttcgtattcgtagttcgttatttatttgtcgtcgtcgtttttgggtttcgtttatcggcgtcgtattcgttcgcgatcgtggcggcggcgtcgtttcggttttcgtcgtttttcgggttcggcgtcgcggtttttcggttttttt

SEQ ID NO: 15612 - DNA, 848 bp, Artificial Sequence
  chemically treated genomic DNA (Homo sapiens) CpG-island No: 15612
aaaaaaaccgaaaaaccgcgacgccgaacccgaaaaacgacgaaaaccgaaacgacgccgccgccacgatcgcgaacgaatacgacgccgataaacgaaacccaaaaacgacgacgacaaataaataacgaactacgaatacgaaacctcccgataaatacaactatcacgaaccgcgcgaccgcgaaaaccctaaaaaacgaaaaacaactaacgcccctccgccccctactctcctttctcccgctccatcctcctcccacttccccgaattcccctcgcgacccgacgcgactaaaaaaaacgaaaatcgcaactatcacgaacaccaactaaaaactactccccgccgaaaaaaatcgctacaacaacgacttctctccgcctcttttccaattaccctaattaacgcgaaaaaaacgaacatccgcgaaaaaaatacgaactacgcgaccgcctacccgacgtaaaaaacgaacgccccgaaccgccgccgaaaaaaaaaaccgaaaatcgacgcgaaacgcccctcgaccccgacgacgccgtaaccttaaccgacccgctcacctctcgaaatctcgcctaccgaaaccgcgaaataaaaacgaccgcgacgtccctctccgtcgacgcaaccctcgacgacgcttaaatttaaccccgacgcgcttactcgccccttctcccgaaaaaaaatttcgaaaataaacataaaataaatactaaacatattcctatcgcgacccgaatttaatccccttcctaaaattcaaccgaaaaaaccgaaaaaaaaaaacaaacatattaacgaaacgattaaaaaataaaattaattaataaacaat

SEQ ID NO: 15613 - DNA, 718 bp, Artificial Sequence
  chemically treated genomic DNA (Homo sapiens) CpG-island No: 15613
tcgtcggggtcgggttgttgtttcgcgcgcgttattaggggtcgttcgagttatttaagtttcgtgcgttattcggcggcgttttcgcgcgtgtttattcggagtagcgcgcgtttcgtaatcgtcgtagtcgttttcgtcgtcggtcgtcgtattttaagcgattgtttaaattaagttttcgtggttgggtacgggagcgttttggggataaaaatttttttttaattgtggtttgtattttttcggttcgtgggttgatttggggcgggaagtattagcgttttagttgcgttgtagtcggggaggaaggaggaggtcgagtttggggcggagtttgggttgattggggttggatcgggtaagacgtcgtcgttgttcggatgttgcgatggttgatcgggggaggtcgagaatcgtagggattggtcgaggtaaatttcgggtgggtttgttttgcgttcgtcgagtttgttggaggggcggtttcgtttcggttcggtttttttgggtttcgatcgcggggattcgggcggaggcggggttggttgttgagttcgtgttacgcgttgtttttacgacggtgggggcggagggcgcgggagtcggagttttttagattcggcgggattttaggcgtattttggagttgtagattttcggtttcgttttacggttagttgaatcgtgagattttggtttagggacgtttagttgg

SEQ ID NO: 15614 - DNA, 718 bp, Artificial Sequence
  chemically treated genomic DNA (Homo sapiens) CpG-island No: 15614
ccaactaaacgtccctaaaccaaaatctcacgattcaactaaccgtaaaacgaaaccgaaaatctacaactccaaaatacgcctaaaatcccgccgaatctaaaaaactccgactcccgcgccctccgcccccaccgtcgtaaaaacaacgcgtaacacgaactcaacaaccaaccccgcctccgcccgaatccccgcgatcgaaacccaaaaaaaccgaaccgaaacgaaaccgcccctccaacaaactcgacgaacgcaaaacaaacccacccgaaatttacctcgaccaatccctacgattctcgacctcccccgatcaaccatcgcaacatccgaacaacgacgacgtcttacccgatccaaccccaatcaacccaaactccgccccaaactcgacctcctccttcctccccgactacaacgcaactaaaacgctaatacttcccgccccaaatcaacccacgaaccgaaaaaatacaaaccacaattaaaaaaaaatttttatccccaaaacgctcccgtacccaaccacgaaaacttaatttaaacaatcgcttaaaatacgacgaccgacgacgaaaacgactacgacgattacgaaacgcgcgctactccgaataaacacgcgcgaaaacgccgccgaataacgcacgaaacttaaataactcgaacgacccctaataacgcgcgcgaaacaacaacccgaccccgacga

SEQ ID NO: 15615 - DNA, 718 bp, Artificial Sequence
  chemically treated genomic DNA (Homo sapiens) CpG-island No: 15615
ttagttgagcgtttttgagttaggattttacgatttagttagtcgtgggacggggtcgggggtttgtagttttagggtgcgtttggggtttcgtcgggtttgaggagtttcggttttcgcgtttttcgtttttatcgtcgtgagaatagcgcgtggtacgagtttagtagttagtttcgttttcgttcgggttttcgcggtcggaatttaggaaggtcgaatcggaacgaagtcgtttttttagtaagttcgacggacgtagagtagatttattcggggtttatttcggttagtttttgcggttttcggtttttttcgattagttatcgtaatattcgggtagcggcggcgttttgttcggtttagttttagttagtttaaatttcgttttaggttcggttttttttttttttttcggttgtagcgtaattgagacgttaatatttttcgttttagattagtttacgggtcgaaggaatgtagattatagttgagggagaatttttgtttttaaagcgttttcgtatttagttacggaggtttagtttgggtagtcgtttggggtgcggcggtcgacggcgggggcggttgcggcgattgcggggcgcgcgttgtttcgagtgagtacgcgcgggagcgtcgtcgggtagcgtacggagtttaggtagttcgagcggtttttggtgacgcgcgcggagtagtaattcgatttcggcga

SEQ ID NO: 15616 - DNA, 718 bp, Artificial Sequence
  chemically treated genomic DNA (Homo sapiens) CpG-island No: 15616
tcgccgaaatcgaattactactccgcgcgcgtcaccaaaaaccgctcgaactacctaaactccgtacgctacccgacgacgctcccgcgcgtactcactcgaaacaacgcgcgccccgcaatcgccgcaaccgcccccgccgtcgaccgccgcaccccaaacgactacccaaactaaacctccgtaactaaatacgaaaacgctttaaaaacaaaaattctccctcaactataatctacattccttcgacccgtaaactaatctaaaacgaaaaatattaacgtctcaattacgctacaaccgaaaaaaaaaaaaaaaaccgaacctaaaacgaaatttaaactaactaaaactaaaccgaacaaaacgccgccgctacccgaatattacgataactaatcgaaaaaaaccgaaaaccgcaaaaactaaccgaaataaaccccgaataaatctactctacgtccgtcgaacttactaaaaaaacgacttcgttccgattcgaccttcctaaattccgaccgcgaaaacccgaacgaaaacgaaactaactactaaactcgtaccacgcgctattctcacgacgataaaaacgaaaaacgcgaaaaccgaaactcctcaaacccgacgaaaccccaaacgcaccctaaaactacaaacccccgaccccgtcccacgactaactaaatcgtaaaatcctaactcaaaaacgctcaactaa

SEQ ID NO: 15617 - DNA, 763 bp, Artificial Sequence
  chemically treated genomic DNA (Homo sapiens) CpG-island No: 15617
cgggcgcgggaggagggtcgcgaagtgtggggaaagaggggatcggaggggaggcggcgggcgaggggggtcgtaggcgtcgcgtcgaaggtgtgggtgggaacgtcgttcgttagaaggtcgggaggagggcgcgagtacggttagcgtaagtagggaggttagggtggcgggaagggtgggttgaggcgttgagatcgggtcgagggcgtagttgggtgggaagggaagaggggcggtcgggagacgggggatcgcgggcgatcgaaattaggcggaggggaggtttcgcgggttggggtttggggtgagttcgagcgagtggaggagagaggcgaggacgaaacgagacggggcgaaggtcggggcgggacggggtagggcgtcggggttcgggtgcgcgtcggaagggtttcggggcggttttcggggcggtgttgggggcggagcgggtcggggcgcggttgtattaagtgaagtttatagagattgtgtgttttagcgttttgcggcggagggaggcgatgttggtgtttcgttatacgtcgttgttgttcggggagttgtagagttggggcgaatcggagacgttgttggggtcggggagggaggcgggtattatgtcggggaaggcgggttggtagaggtgcgattgtagtttcgcgtcgttggaattcgttaggttgttggataggtttatggagttgggcggcggatcggtcgttaggttgtattgggatagcgattgcgttatggtttgttg

SEQ ID NO: 15618 - DNA, 763 bp, Artificial Sequence
  chemically treated genomic DNA (Homo sapiens) CpG-island No: 15618
caacaaaccataacgcaatcgctatcccaatacaacctaacgaccgatccgccgcccaactccataaacctatccaacaacctaacgaattccaacgacgcgaaactacaatcgcacctctaccaacccgccttccccgacataatacccgcctccctccccgaccccaacaacgtctccgattcgccccaactctacaactccccgaacaacaacgacgtataacgaaacaccaacatcgcctccctccgccgcaaaacgctaaaacacacaatctctataaacttcacttaatacaaccgcgccccgacccgctccgcccccaacaccgccccgaaaaccgccccgaaacccttccgacgcgcacccgaaccccgacgccctaccccgtcccgccccgaccttcgccccgtctcgtttcgtcctcgcctctctcctccactcgctcgaactcaccccaaaccccaacccgcgaaacctcccctccgcctaatttcgatcgcccgcgatcccccgtctcccgaccgcccctcttcccttcccacccaactacgccctcgacccgatctcaacgcctcaacccacccttcccgccaccctaacctccctacttacgctaaccgtactcgcgccctcctcccgaccttctaacgaacgacgttcccacccacaccttcgacgcgacgcctacgacccccctcgcccgccgcctcccctccgatcccctctttccccacacttcgcgaccctcctcccgcgcccg

SEQ ID NO: 15619 - DNA, 763 bp, Artificial Sequence
  chemically treated genomic DNA (Homo sapiens) CpG-island No: 15619
tagtaggttatggcgtagtcgttgttttagtgtagtttggcggtcggttcgtcgtttaattttatgggtttgtttaatagtttggcgggttttaacggcgcggggttgtagtcgtatttttattagttcgtttttttcggtatggtgttcgttttttttttcggttttagtaacgttttcggttcgttttagttttgtagtttttcggatagtagcgacgtgtggcggggtattagtatcgttttttttcgtcgtaaggcgttagagtatatagtttttatgagttttatttaatgtagtcgcgtttcggttcgtttcgtttttagtatcgtttcgggggtcgtttcgaggttttttcggcgcgtattcggatttcggcgttttgtttcgtttcgtttcggttttcgtttcgtttcgtttcgttttcgttttttttttttattcgttcgggtttattttaagttttagttcgcgaggtttttttttcgtttgatttcgatcgttcgcggtttttcgtttttcggtcgttttttttttttttttatttagttgcgttttcggttcggttttagcgttttagtttatttttttcgttattttggtttttttgtttgcgttggtcgtgttcgcgtttttttttcggttttttgacgggcggcgtttttatttatattttcgacgcgacgtttacgatttttttcgttcgtcgtttttttttcggttttttttttttttatatttcgcgatttttttttcgcgttcg

SEQ ID NO: 15620 - DNA, 763 bp, Artificial Sequence
  chemically treated genomic DNA (Homo sapiens) CpG-island No: 15620
cgaacgcgaaaaaaaaatcgcgaaatataaaaaaaaaaaaaaccgaaaaaaaaacgacgaacgaaaaaaatcgtaaacgtcgcgtcgaaaatataaataaaaacgccgcccgtcaaaaaaccgaaaaaaaaacgcgaacacgaccaacgcaaacaaaaaaaccaaaataacgaaaaaaataaactaaaacgctaaaaccgaaccgaaaacgcaactaaataaaaaaaaaaaaaaaacgaccgaaaaacgaaaaaccgcgaacgatcgaaatcaaacgaaaaaaaaacctcgcgaactaaaacttaaaataaacccgaacgaataaaaaaaaaaaacgaaaacgaaacgaaacgaaacgaaaaccgaaacgaaacgaaacaaaacgccgaaatccgaatacgcgccgaaaaaacctcgaaacgacccccgaaacgatactaaaaacgaaacgaaccgaaacgcgactacattaaataaaactcataaaaactatatactctaacgccttacgacgaaaaaaaacgatactaataccccgccacacgtcgctactatccgaaaaactacaaaactaaaacgaaccgaaaacgttactaaaaccgaaaaaaaaaacgaacaccataccgaaaaaaacgaactaataaaaatacgactacaaccccgcgccgttaaaacccgccaaactattaaacaaacccataaaattaaacgacgaaccgaccgccaaactacactaaaacaacgactacgccataacctacta

SEQ ID NO: 15621 - DNA, 1005 bp, Artificial Sequence
  chemically treated genomic DNA (Homo sapiens) CpG-island No: 15621
gcgtagtttaaagttgtgtattggttggcgattttcgcgttttattagaatgacgttattaagacgcgacgatagtttttttattttttgtagcggcgtaatttgcgtcgtttcgtaaatcggcgcgcgtagtattgtttttaaatattcggtatttttcggagtatcggataggggttgcgagttagttattattaattttttagtttcgatttattacgtatcgcgtttttgtcggcgttggttgttaggttggtataagtacgtagggtaaaggagatttgacgtttacgatttttcggcgtttaggttttgttatttcgagcgttttgcgttttacgacgcgtcgttagttcggtatcgtttatttgtaattgaatgttacggttcgggatgtcgatagcgattaggttatatttttaattaggttaatgttgtcgtcgtttgtcgttttcggtgagacgtggtcgatggaaagattagaggtgttattagagaaacgatcgtcggtgattagcgtataggttttgtcgagatttattgattttaggaagttggttgggtagagtattttttgtattttcggatcgtttttcgggtttttatagcgaattattattatattttcggcgataattttatcgtcgagaatcgtttttatcgtatcgttttggttttcgtatattttcgtcgggtcggtgaatttgaggatgttgttatcgacgtttgtcgtttttacgatgtagtcgtttttcgtaaagttatcgtagagtatcgttaggtcgtcgtttttgttgtaggcgtgttttagcgagcggatatagttattggcgcgatcgtcgtttagcgtatattaacggtattttgcgagaatgtttgtgtggtacgaagtgtttgtaggaatttgcgcggaattattttttttatcgcggttattttgggttagtatacgatcgtatggattttaaacgttggttaggtaaacgttagggtaaagtacgtttt

SEQ ID NO: 15622 - DNA, 1005 bp, Artificial Sequence
  chemically treated genomic DNA (Homo sapiens) CpG-island No: 15622
aaaacgtactttaccctaacgtttacctaaccaacgtttaaaatccatacgatcgtatactaacccaaaataaccgcgataaaaaaaataattccgcgcaaattcctacaaacacttcgtaccacacaaacattctcgcaaaataccgttaatatacgctaaacgacgatcgcgccaataactatatccgctcgctaaaacacgcctacaacaaaaacgacgacctaacgatactctacgataactttacgaaaaacgactacatcgtaaaaacgacaaacgtcgataacaacatcctcaaattcaccgacccgacgaaaatatacgaaaaccaaaacgatacgataaaaacgattctcgacgataaaattatcgccgaaaatataataataattcgctataaaaacccgaaaaacgatccgaaaatacaaaaaatactctacccaaccaacttcctaaaatcaataaatctcgacaaaacctatacgctaatcaccgacgatcgtttctctaataacacctctaatctttccatcgaccacgtctcaccgaaaacgacaaacgacgacaacattaacctaattaaaaatataacctaatcgctatcgacatcccgaaccgtaacattcaattacaaataaacgataccgaactaacgacgcgtcgtaaaacgcaaaacgctcgaaataacaaaacctaaacgccgaaaaatcgtaaacgtcaaatctcctttaccctacgtacttataccaacctaacaaccaacgccgacaaaaacgcgatacgtaataaatcgaaactaaaaaattaataataactaactcgcaacccctatccgatactccgaaaaataccgaatatttaaaaacaatactacgcgcgccgatttacgaaacgacgcaaattacgccgctacaaaaaataaaaaaactatcgtcgcgtcttaataacgtcattctaataaaacgcgaaaatcgccaaccaatacacaactttaaactacgc

SEQ ID NO: 15623 - DNA, 1005 bp, Artificial Sequence
  chemically treated genomic DNA (Homo sapiens) CpG-island No: 15623
aaaacgtattttgttttgacgtttgtttggttaacgtttgggatttatacgatcgtatgttgatttaggatgatcgcggtaaaaaaaatggtttcgcgtaggtttttgtaggtatttcgtattatataggtattttcgtaagatgtcgttggtatacgttggacgacgatcgcgttaatggttgtattcgttcgttggaatacgtttatagtaaagacggcggtttggcggtgttttacggtaattttgcggaaaacggttgtatcgtgaaaacggtaggcgtcgatgatagtatttttaaatttatcggttcggcgaaagtgtacgaaagttaggacgatgcggtagaagcgattttcggcggtaaagttgtcgtcggagatgtggtagtaattcgttatgaaggttcgaaaggcggttcggggatgtaggaaatgttttatttaattagttttttgaaattaatgggtttcggtaaagtttgtgcgttgattatcgacggtcgtttttttggtggtatttttggtttttttatcggttacgttttatcggaagcggtaagcggcggtagtattggtttgattgaagatgtgatttgatcgttatcgatatttcgaatcgtggtatttagttataggtaagcgatgtcgaattggcggcgcgtcgtgaagcgtaggacgttcgaggtgataaagtttggacgtcgaaaaatcgtgaacgttaggttttttttgttttgcgtgtttatgttagtttggtaattagcgtcgataaaggcgcggtgcgtgataaatcgaaattggggggttaataatggttgattcgtaatttttgttcggtgtttcggaaggtgtcgaatatttaagagtagtgttgcgcgcgtcggtttacgaggcggcgtaggttacgtcgttataaaaaatggaaaaattgtcgtcgcgttttgataacgttattttggtgaagcgcgaagatcgttagttagtgtatagttttaagttgcgt

SEQ ID NO: 15624 - DNA, 1005 bp, Artificial Sequence
  chemically treated genomic DNA (Homo sapiens) CpG-island No: 15624
acgcaacttaaaactatacactaactaacgatcttcgcgcttcaccaaaataacgttatcaaaacgcgacgacaatttttccattttttataacgacgtaacctacgccgcctcgtaaaccgacgcgcgcaacactactcttaaatattcgacaccttccgaaacaccgaacaaaaattacgaatcaaccattattaaccccccaatttcgatttatcacgcaccgcgcctttatcgacgctaattaccaaactaacataaacacgcaaaacaaaaaaaacctaacgttcacgatttttcgacgtccaaactttatcacctcgaacgtcctacgcttcacgacgcgccgccaattcgacatcgcttacctataactaaataccacgattcgaaatatcgataacgatcaaatcacatcttcaatcaaaccaatactaccgccgcttaccgcttccgataaaacgtaaccgataaaaaaaccaaaaataccaccaaaaaaacgaccgtcgataatcaacgcacaaactttaccgaaacccattaatttcaaaaaactaattaaataaaacatttcctacatccccgaaccgcctttcgaaccttcataacgaattactaccacatctccgacgacaactttaccgccgaaaatcgcttctaccgcatcgtcctaactttcgtacactttcgccgaaccgataaatttaaaaatactatcatcgacgcctaccgttttcacgatacaaccgttttccgcaaaattaccgtaaaacaccgccaaaccgccgtctttactataaacgtattccaacgaacgaatacaaccattaacgcgatcgtcgtccaacgtataccaacgacatcttacgaaaatacctatataatacgaaatacctacaaaaacctacgcgaaaccattttttttaccgcgatcatcctaaatcaacatacgatcgtataaatcccaaacgttaaccaaacaaacgtcaaaacaaaatacgtttt

SEQ ID NO: 15625 - DNA, 528 bp, Artificial Sequence
  chemically treated genomic DNA (Homo sapiens) CpG-island No: 15625
cgttttagtttgtaatatacgtcgttattgcggtatttttttcgttagttaggttttcgttttgggtaataattggtaggttgagcgtggcgttttttagcggttaagattgttgtcgggataagtaaacgcgagtatttgatcgtaacgttttttttgtttcgtttgggtcgtggtttgtcgttaggaaagtgttttttcggtagcgcgattgttatgataatgaatcggatcgtttgtatagatgagattttgcgtttaggcggttatcgttcgcgttttcgtggtcgttggcgaagtagaaatacgttgcgtggcgttgttgtcggggatggttaggtaatcgttttttcgattggcgttttgttgtaaaaaagtgcgaatcgttacggttatggttttcgttgttttaagaggcgtatttttcgtttcgcgatttagaattttggtaacgtattttttacgatcgagatgcgattttaatttagtttgttttttcggttagtaaggtcgtttacgtgggtgaaa

SEQ ID NO: 15626 - DNA, 528 bp, Artificial Sequence
  chemically treated genomic DNA (Homo sapiens) CpG-island No: 15626
tttcacccacgtaaacgaccttactaaccgaaaaaacaaactaaattaaaatcgcatctcgatcgtaaaaaatacgttaccaaaattctaaatcgcgaaacgaaaaatacgcctcttaaaacaacgaaaaccataaccgtaacgattcgcacttttttacaacaaaacgccaatcgaaaaaacgattacctaaccatccccgacaacaacgccacgcaacgtatttctacttcgccaacgaccacgaaaacgcgaacgataaccgcctaaacgcaaaatctcatctatacaaacgatccgattcattatcataacaatcgcgctaccgaaaaaacactttcctaacgacaaaccacgacccaaacgaaacaaaaaaaacgttacgatcaaatactcgcgtttacttatcccgacaacaatcttaaccgctaaaaaacgccacgctcaacctaccaattattacccaaaacgaaaacctaactaacgaaaaaaataccgcaataacgacgtatattacaaactaaaacg

SEQ ID NO: 15627 - DNA, 528 bp, Artificial Sequence
  chemically treated genomic DNA (Homo sapiens) CpG-island No: 15627
ttttatttacgtgagcgattttattgatcgaaaaggtaaattgaattggagtcgtatttcgatcgtgaagagtacgttgttagagttttggatcgcgaggcgaaaagtacgttttttgaggtagcgaaagttatgatcgtggcgattcgtatttttttatagtaaaacgttaatcgggaaggcgattgtttgattattttcgatagtagcgttacgtagcgtgtttttgtttcgttagcgattacgggggcgcgaacgatgatcgtttggacgtaggattttatttatgtaggcgattcggtttattattatggtagtcgcgttatcgaagggatatttttttggcggtaagttacggtttaggcggggtagggagagcgttacgattagatattcgcgtttgtttatttcgataatagttttagtcgttggggagcgttacgtttaatttgttagttattatttaaagcgaaagtttggttggcgaaaaaaatgtcgtagtggcggcgtatattataagttgagacg

SEQ ID NO: 15628 - DNA, 528 bp, Artificial Sequence
  chemically treated genomic DNA (Homo sapiens) CpG-island No: 15628
cgtctcaacttataatatacgccgccactacgacatttttttcgccaaccaaactttcgctttaaataataactaacaaattaaacgtaacgctccccaacgactaaaactattatcgaaataaacaaacgcgaatatctaatcgtaacgctctccctaccccgcctaaaccgtaacttaccgccaaaaaaatatcccttcgataacgcgactaccataataataaaccgaatcgcctacataaataaaatcctacgtccaaacgatcatcgttcgcgcccccgtaatcgctaacgaaacaaaaacacgctacgtaacgctactatcgaaaataatcaaacaatcgccttcccgattaacgttttactataaaaaaatacgaatcgccacgatcataactttcgctacctcaaaaaacgtacttttcgcctcgcgatccaaaactctaacaacgtactcttcacgatcgaaatacgactccaattcaatttaccttttcgatcaataaaatcgctcacgtaaataaaa

SEQ ID NO: 15629 - DNA, 721 bp, Artificial Sequence
  chemically treated genomic DNA (Homo sapiens) CpG-island No: 15629
cgaggaggcggagattcgttcgttcggcgtttggatttatcgcgtagttagtcggtattcgcgtgcgtgtttttgaggcggaagaggcggcggtgcgcggagttgcggtttacgtattatagtatttatagtagttgtagtagtatgagcgtcgttaggaagtatagtaggtcgtttttgtttacgttcgcggcgtgtacggtttaggttagtagtagtagtagtttcgttacgaatacgattagtttatattggttgtttagtatttcggttagtttttgtgggacgttggcgcgtatatcgtttcgtcggggggtcggggatttcggggatttcggggtcgaggacgagggaggcgagtaggtcgttggtttcgacgattttgcgatcgaggcgtttgtagttgttcggggcgaggcgggcgattttaggttttcgagtattttcgagatattcgcgttaagtttggtttcgggggtggttgtcgtcgggtttcgtttgcgtttttggtttttgtttttgtttcgacgtttttgttaattagtatttttttttttaattttttttcgatttttattttacgtttttgttaatttgtttttttttttgttatttttcgacgttcgttttttttttttttgttttttcgtttttcgttaaggtattattttgtttatttatttagcgttttattttgttgatttgggattttacgagtttt

SEQ ID NO: 15630 - DNA, 721 bp, Artificial Sequence
  chemically treated genomic DNA (Homo sapiens) CpG-island No: 15630
aaaactcgtaaaatcccaaatcaacaaaataaaacgctaaataaataaacaaaataataccttaacgaaaaacgaaaaaacaaaaaaaaaaaaaacgaacgtcgaaaaataacaaaaaaaaaaacaaattaacaaaaacgtaaaataaaaatcgaaaaaaaattaaaaaaaaaaatactaattaacaaaaacgtcgaaacaaaaacaaaaaccaaaaacgcaaacgaaacccgacgacaaccacccccgaaaccaaacttaacgcgaatatctcgaaaatactcgaaaacctaaaatcgcccgcctcgccccgaacaactacaaacgcctcgatcgcaaaatcgtcgaaaccaacgacctactcgcctccctcgtcctcgaccccgaaatccccgaaatccccgaccccccgacgaaacgatatacgcgccaacgtcccacaaaaactaaccgaaatactaaacaaccaatataaactaatcgtattcgtaacgaaactactactactactaacctaaaccgtacacgccgcgaacgtaaacaaaaacgacctactatacttcctaacgacgctcatactactacaactactataaatactataatacgtaaaccgcaactccgcgcaccgccgcctcttccgcctcaaaaacacgcacgcgaataccgactaactacgcgataaatccaaacgccgaacgaacgaatctccgcctcctcg

SEQ ID NO: 15631 - DNA, 721 bp, Artificial Sequence
  chemically treated genomic DNA (Homo sapiens) CpG-island No: 15631
ggagttcgtagaattttaggttagtagggtggggcgttgggtaagtggatagggtggtattttgacggaggacgaaggggtagaagaggggagggcgggcgtcgggaggtgataggagagggggtaggttggtaggggcgtggggtaggaatcggaagggagttgaaaagggaggtgttggttggtagaggcgtcggggtaaggataggagttaggagcgtaggcggggttcgacggtagttattttcgggattagatttggcgcgggtgtttcgaagatgttcgagggtttggggtcgttcgtttcgtttcgggtagttgtaagcgtttcggtcgtagggtcgtcggggttagcggtttgttcgtttttttcgttttcggtttcgaggttttcggaattttcggtttttcggcggggcggtgtgcgcgttagcgttttatagaaattggtcgagatgttgagtagttagtatgggttgatcgtgttcgtggcggggttgttgttgttgttggtttgggtcgtgtacgtcgcgggcgtgagtaagagcgatttgttgtgttttttgacggcgtttatgttgttgtagttgttgtggatgttgtggtacgtgggtcgtagtttcgcgtatcgtcgtttttttcgttttaaggatacgtacgcgggtgtcggttggttgcgcggtgagtttaggcgtcgggcgagcgggttttcgttttttcg

SEQ ID NO: 15632 - DNA, 721 bp, Artificial Sequence
  chemically treated genomic DNA (Homo sapiens) CpG-island No: 15632
cgaaaaaacgaaaacccgctcgcccgacgcctaaactcaccgcgcaaccaaccgacacccgcgtacgtatccttaaaacgaaaaaaacgacgatacgcgaaactacgacccacgtaccacaacatccacaacaactacaacaacataaacgccgtcaaaaaacacaacaaatcgctcttactcacgcccgcgacgtacacgacccaaaccaacaacaacaacaaccccgccacgaacacgatcaacccatactaactactcaacatctcgaccaatttctataaaacgctaacgcgcacaccgccccgccgaaaaaccgaaaattccgaaaacctcgaaaccgaaaacgaaaaaaacgaacaaaccgctaaccccgacgaccctacgaccgaaacgcttacaactacccgaaacgaaacgaacgaccccaaaccctcgaacatcttcgaaacacccgcgccaaatctaatcccgaaaataactaccgtcgaaccccgcctacgctcctaactcctatccttaccccgacgcctctaccaaccaacacctcccttttcaactcccttccgattcctaccccacgcccctaccaacctaccccctctcctatcacctcccgacgcccgccctcccctcttctaccccttcgtcctccgtcaaaataccaccctatccacttacccaacgccccaccctactaacctaaaattctacgaactcc

SEQ ID NO: 15633 - DNA, 849 bp, Artificial Sequence
  chemically treated genomic DNA (Homo sapiens) CpG-island No: 15633
gtttttagggagttcgagcgtaagtaatagtcggaggggttcgtagggacgtaggttgggttcggatatttaggcgttttcgcgttgtcgcggtttttcgcgtttagtttggtcgtatagtttagcgttcgattcgtcgtcgtcggcgtaggcgcgcgggtcggggtagtttatttgaagttgggttcggcgtttggttgatcgcgttgttgtgggtattggttgggcgcggcgttcgttttcgtacgcggtttcggttgcgtcggtcgttttgtattttatttatcgcgcgttttggtgcggagggcggattcggtagtatttagagaaggaggcggtgttgcgcgggcgcggcggttcggggagggtagggtagggtagtgtaggagcgatcggtgggagttggtcgttatcgggggttcggggcgcgttcgcgagggaatggagagttaggggcggtttcggaatttagggttggcgggtttggtagttttcgcgttcgtggtcgtgcgcgcgaggaatttgggagaaatgggtattttttacggttgtttggttcgtatatttggcggggtcggcgagttgagatgttttcgtcggttggcggaattgtgcgtttcgttcgtcgaggttcgttttttttcgaggtttgaggtttagttttataggggcgcgagagagcggcggcgtggggggcgcggaggaagcgtcggttttcgtttttatcgtttttttcgtggttgcggtttaggtcgaatagggtatcgtgtttcggtcgttttggttttggttatcgcgaggttcggggcgattatatttagtagttttgtggtttttttattgttttgg

SEQ ID NO: 15634 - DNA, 849 bp, Artificial Sequence
  chemically treated genomic DNA (Homo sapiens) CpG-island No: 15634
ccaaaacaataaaaaaaccacaaaactactaaatataatcgccccgaacctcgcgataaccaaaaccaaaacgaccgaaacacgataccctattcgacctaaaccgcaaccacgaaaaaaacgataaaaacgaaaaccgacgcttcctccgcgccccccacgccgccgctctctcgcgcccctataaaactaaacctcaaacctcgaaaaaaaacgaacctcgacgaacgaaacgcacaattccgccaaccgacgaaaacatctcaactcgccgaccccgccaaatatacgaaccaaacaaccgtaaaaaatacccatttctcccaaattcctcgcgcgcacgaccacgaacgcgaaaactaccaaacccgccaaccctaaattccgaaaccgcccctaactctccattccctcgcgaacgcgccccgaacccccgataacgaccaactcccaccgatcgctcctacactaccctaccctaccctccccgaaccgccgcgcccgcgcaacaccgcctccttctctaaatactaccgaatccgccctccgcaccaaaacgcgcgataaataaaatacaaaacgaccgacgcaaccgaaaccgcgtacgaaaacgaacgccgcgcccaaccaatacccacaacaacgcgatcaaccaaacgccgaacccaacttcaaataaactaccccgacccgcgcgcctacgccgacgacgacgaatcgaacgctaaactatacgaccaaactaaacgcgaaaaaccgcgacaacgcgaaaacgcctaaatatccgaacccaacctacgtccctacgaacccctccgactattacttacgctcgaactccctaaaaac

SEQ ID NO: 15635 - DNA, 849 bp, Artificial Sequence
  chemically treated genomic DNA (Homo sapiens) CpG-island No: 15635
ttagagtagtaggagggttatagggttgttgggtgtagtcgtttcggatttcgcggtggttaaggttaaggcggtcggggtacggtattttgttcggtttgggtcgtaattacgaaggaggcggtggaggcgggggtcggcgtttttttcgcgttttttacgtcgtcgttttttcgcgtttttatagaattgggttttaggtttcgagggggagcgggtttcggcgggcggggcgtatagtttcgttagtcggcgggggtattttaattcgtcggtttcgttaggtgtgcgggttaggtagtcgtggaaggtgtttattttttttagatttttcgcgcgtacggttacgagcgcggaggttgttaaattcgttagttttgggtttcgaagtcgtttttggttttttattttttcgcgggcgcgtttcgggttttcggtggcggttagtttttatcggtcgtttttgtattgttttgttttgtttttttcgggtcgtcgcgttcgcgtagtatcgtttttttttttaaatattgtcgggttcgtttttcgtattaggacgcgcggtgggtagggtgtagggcggtcggcgtagtcgaggtcgcgtgcggaggcggacgtcgcgtttagttagtgtttatagtagcgcggttagttaggcgtcggatttagttttaggtaagttgtttcggttcgcgcgtttgcgtcggcggcggcgggtcgggcgttgagttgtgcggttaggttgggcgcggggagtcgcggtagcgcggaggcgtttgggtattcgagtttaatttgcgtttttgcgagttttttcggttgttgtttgcgttcgggttttttaaaagt

SEQ ID NO: 15636 - DNA, 849 bp, Artificial Sequence
  chemically treated genomic DNA (Homo sapiens) CpG-island No: 15636
acttttaaaaaacccgaacgcaaacaacaaccgaaaaaactcgcaaaaacgcaaattaaactcgaatacccaaacgcctccgcgctaccgcgactccccgcgcccaacctaaccgcacaactcaacgcccgacccgccgccgccgacgcaaacgcgcgaaccgaaacaacttacctaaaactaaatccgacgcctaactaaccgcgctactataaacactaactaaacgcgacgtccgcctccgcacgcgacctcgactacgccgaccgccctacaccctacccaccgcgcgtcctaatacgaaaaacgaacccgacaatatttaaaaaaaaaaacgatactacgcgaacgcgacgacccgaaaaaaacaaaacaaaacaatacaaaaacgaccgataaaaactaaccgccaccgaaaacccgaaacgcgcccgcgaaaaaataaaaaaccaaaaacgacttcgaaacccaaaactaacgaatttaacaacctccgcgctcgtaaccgtacgcgcgaaaaatctaaaaaaaataaacaccttccacgactacctaacccgcacacctaacgaaaccgacgaattaaaatacccccgccgactaacgaaactatacgccccgcccgccgaaacccgctccccctcgaaacctaaaacccaattctataaaaacgcgaaaaaacgacgacgtaaaaaacgcgaaaaaaacgccgacccccgcctccaccgcctccttcgtaattacgacccaaaccgaacaaaataccgtaccccgaccgccttaaccttaaccaccgcgaaatccgaaacgactacacccaacaaccctataaccctcctactactctaa

SEQ ID NO: 15637 - DNA, 1002 bp, Artificial Sequence
  chemically treated genomic DNA (Homo sapiens) CpG-island No: 15637
tttgttgtttgatcgcgattatatttggaacgataacggcgaatttattcgtattagtagttcgcgttagattcggagttatagttatagtattatcggtaggttgatcggcgtttatattatcgtagcgaatttggatattcgtatttcgtatgttatagattcggtaggtaatcgtttgttcgattcggagttgtattcggatagtatttttagtatgtggtcggataatcgtatcgttcgtgacgcgtattatttttatcggtatgatcgttacggtaggttgatagagaaaatcgattttatttcggaaggggttattcgtacggatgatgagcggatttatcggtattattacgatagttagtatcggttggtgtattatacgcggatataatatgaagagtcgttggtcgaaagtcgttatttttacgattcgttgggtcgtagggtggtaaaacgggtgtggcggcgtgaacgggatttgacgggttggatgtcgttgttacggaaatcgtaagtgatttggtacggttgggacggcgatcggttgattataatatagaacgatagaattcgtatttagacgatttattagtcggggagtttttacgttatttattagagttgaaatcgttatcggtgagttggcgaaaacgtagcgtcgtagtttggcggatgcgttttagtagttcggcggcgaagacggtggtagtgtggtgttttcgtcggtgttggtgtagatgttcgatcggttggaaagtgaaattttggttgatcgggtgagtgaggaaagtcgtcgttggttggtatcgtgcggtttgatcgtggagtagatgtaaaattagatggattcggtgtatacgtcggcgcgaaaaatttatttgtattattgcgattatcgcggtttgtcgttggtttttattagtaaggaagggataatagaatggtgcgtagaatacgatgaatggggtaatttgttgaatgaagagaattcgtatt

SEQ ID NO: 15638 - DNA, 1002 bp, Artificial Sequence
  chemically treated genomic DNA (Homo sapiens) CpG-island No: 15638
aatacgaattctcttcattcaacaaattaccccattcatcgtattctacgcaccattctattatcccttccttactaataaaaaccaacgacaaaccgcgataatcgcaataatacaaataaatttttcgcgccgacgtatacaccgaatccatctaattttacatctactccacgatcaaaccgcacgataccaaccaacgacgactttcctcactcacccgatcaaccaaaatttcactttccaaccgatcgaacatctacaccaacaccgacgaaaacaccacactaccaccgtcttcgccgccgaactactaaaacgcatccgccaaactacgacgctacgttttcgccaactcaccgataacgatttcaactctaataaataacgtaaaaactccccgactaataaatcgtctaaatacgaattctatcgttctatattataatcaaccgatcgccgtcccaaccgtaccaaatcacttacgatttccgtaacaacgacatccaacccgtcaaatcccgttcacgccgccacacccgttttaccaccctacgacccaacgaatcgtaaaaataacgactttcgaccaacgactcttcatattatatccgcgtataatacaccaaccgatactaactatcgtaataataccgataaatccgctcatcatccgtacgaataaccccttccgaaataaaatcgattttctctatcaacctaccgtaacgatcataccgataaaaataatacgcgtcacgaacgatacgattatccgaccacatactaaaaatactatccgaatacaactccgaatcgaacaaacgattacctaccgaatctataacatacgaaatacgaatatccaaattcgctacgataatataaacgccgatcaacctaccgataatactataactataactccgaatctaacgcgaactactaatacgaataaattcgccgttatcgttccaaatataatcgcgatcaaacaacaaa

SEQ ID NO: 15639 - DNA, 1002 bp, Artificial Sequence
  chemically treated genomic DNA (Homo sapiens) CpG-island No: 15639
gatgcgggttttttttatttagtaggttgttttatttatcgtattttgcgtattattttgttgttttttttttgttgataagggttagcggtaggtcgcgatggtcgtagtggtataggtggatttttcgcgtcggcgtgtatatcgggtttatttggttttgtatttgttttacggttaggtcgtacgatgttagttagcggcggttttttttatttattcggttagttaggattttattttttagtcggtcgagtatttgtattagtatcggcgggaatattatattgttatcgttttcgtcgtcggattgttgaagcgtattcgttaggttgcggcgttgcgttttcgttagtttatcggtggcggttttaattttgatgagtggcgtgaaagtttttcggttgataaatcgtttggatgcgggttttgtcgttttgtattgtggttagtcggtcgtcgttttagtcgtattaggttatttgcggttttcgtgatagcgatatttagttcgttaggtttcgtttacgtcgttatattcgttttgttattttgcggtttagcgggtcgtaaagatagcgattttcgattagcggttttttatattgtgttcgcgtgtagtgtattagtcggtgttgattgtcgtaatggtatcggtgagttcgtttattattcgtgcggataatttttttcgggatgaggtcggttttttttgttagtttgtcgtgacggttatatcggtaaagatagtgcgcgttacgggcgatacggttattcggttatatgttgagggtgttgttcgggtgtagtttcgggtcgggtaggcggttatttgtcgggtttgtggtatacgggatgcggatatttagattcgttgcggtggtgtgaacgtcggttagtttgtcggtggtgttgtagttgtaatttcgggtttggcgcgggttgttgatgcggatgagttcgtcgttgtcgttttaggtgtaatcgcggttagatagtagg

SEQ ID NO: 15640 - DNA, 1002 bp, Artificial Sequence
  chemically treated genomic DNA (Homo sapiens) CpG-island No: 15640
cctactatctaaccgcgattacacctaaaacgacaacgacgaactcatccgcatcaacaacccgcgccaaacccgaaattacaactacaacaccaccgacaaactaaccgacgttcacaccaccgcaacgaatctaaatatccgcatcccgtataccacaaacccgacaaataaccgcctacccgacccgaaactacacccgaacaacaccctcaacatataaccgaataaccgtatcgcccgtaacgcgcactatctttaccgatataaccgtcacgacaaactaacaaaaaaaaccgacctcatcccgaaaaaaattatccgcacgaataataaacgaactcaccgataccattacgacaatcaacaccgactaatacactacacgcgaacacaatataaaaaaccgctaatcgaaaatcgctatctttacgacccgctaaaccgcaaaataacaaaacgaatataacgacgtaaacgaaacctaacgaactaaatatcgctatcacgaaaaccgcaaataacctaatacgactaaaacgacgaccgactaaccacaatacaaaacgacaaaacccgcatccaaacgatttatcaaccgaaaaactttcacgccactcatcaaaattaaaaccgccaccgataaactaacgaaaacgcaacgccgcaacctaacgaatacgcttcaacaatccgacgacgaaaacgataacaatataatattcccgccgatactaatacaaatactcgaccgactaaaaaataaaatcctaactaaccgaataaataaaaaaaaccgccgctaactaacatcgtacgacctaaccgtaaaacaaatacaaaaccaaataaacccgatatacacgccgacgcgaaaaatccacctataccactacgaccatcgcgacctaccgctaacccttatcaacaaaaaaaaaacaacaaaataatacgcaaaatacgataaataaaacaacctactaaataaaaaaaacccgcatc

SEQ ID NO: 15641 - DNA, 726 bp, Artificial Sequence
  chemically treated genomic DNA (Homo sapiens) CpG-island No: 15641
cgggcgttgtacgatattcgttttattcgtcgttacgtgatgaaaggattattgttgttgttcggcgttggcggaggttggtagttttggtagtcggaaatcggcgaaggtttgcgggtagattatcgtatcgttaaaggtatagttagtcgttagtaattggaagatggttttttgtttacgttgaatatttaaagcgcggcggatgtgcgttttgatgcgtattagcgtatcgttcggttttggtacggtgaaatcgttattattatcgcgaaagatgttttgtaacgtttttttcgtgttttgattcgttagggttagtttattgcggttagggatagaatttatcgttcgttagtaggataattttacgtagtttgacgtgtagtagtacgttgtggaagtgtttttcgttagtgttttcgcgtaaaaacgtatcgtgaacgttggtgaaagtttgtagtttagcgtttttgagtttggcgtagtgaaatcgttggatgacgagagtataagttggacgaaggatattttgagttttagcgataaatcgttgggtgaggtgatagttacgttaattcgttatcgtaacggcgtgttgcgttgcgatttcgtcgttgtcgggttgcgtttgagcgggacgttttcgttgaaaaatatcgatgcgattttgaacgttatcgcgtaaacgtttttcgttaaaatttagtttattacgcggtattg

SEQ ID NO: 15642 - DNA, 726 bp, Artificial Sequence
  chemically treated genomic DNA (Homo sapiens) CpG-island No: 15642
caataccgcgtaataaactaaattttaacgaaaaacgtttacgcgataacgttcaaaatcgcatcgatatttttcaacgaaaacgtcccgctcaaacgcaacccgacaacgacgaaatcgcaacgcaacacgccgttacgataacgaattaacgtaactatcacctcacccaacgatttatcgctaaaactcaaaatatccttcgtccaacttatactctcgtcatccaacgatttcactacgccaaactcaaaaacgctaaactacaaactttcaccaacgttcacgatacgtttttacgcgaaaacactaacgaaaaacacttccacaacgtactactacacgtcaaactacgtaaaattatcctactaacgaacgataaattctatccctaaccgcaataaactaaccctaacgaatcaaaacacgaaaaaaacgttacaaaacatctttcgcgataataataacgatttcaccgtaccaaaaccgaacgatacgctaatacgcatcaaaacgcacatccgccgcgctttaaatattcaacgtaaacaaaaaaccatcttccaattactaacgactaactatacctttaacgatacgataatctacccgcaaaccttcgccgatttccgactaccaaaactaccaacctccgccaacgccgaacaacaacaataatcctttcatcacgtaacgacgaataaaacgaatatcgtacaacgcccg

SEQ ID NO: 15643 - DNA, 726 bp, Artificial Sequence
  chemically treated genomic DNA (Homo sapiens) CpG-island No: 15643
tagtatcgcgtaatagattgaattttaacgggaagcgtttgcgcgataacgtttaggatcgtatcggtattttttagcgggaacgtttcgtttaggcgtagttcggtaacggcgggatcgtagcgtagtacgtcgttgcggtaacgggttagcgtggttattattttatttagcggtttatcgttgaagtttaggatgtttttcgtttagtttgtattttcgttatttagcggttttattgcgttaaatttagaggcgttgaattgtaggtttttattagcgtttacgatgcgtttttgcgcgggggtattggcgagaagtatttttatagcgtgttgttgtacgttaagttgcgtgaaattattttgttggcggacggtaaattttgtttttaatcgtagtgagttggttttgacgggttaggatacggaaggggcgttgtagggtatttttcgcggtagtaatggcgattttatcgtattagagtcggacggtgcgttgatgcgtattaaaacgtatattcgtcgcgttttgggtatttagcgtgagtagggagttattttttagttgttgacggttgattgtgtttttggcggtgcggtaatttgttcgtagattttcgtcggttttcgattgttagagttgttagttttcgttagcgtcgagtaatagtagtaatttttttattacgtgacggcgggtgaggcgggtatcgtgtaacgttcg

SEQ ID NO: 15644 - DNA, 726 bp, Artificial Sequence
  chemically treated genomic DNA (Homo sapiens) CpG-island No: 15644
cgaacgttacacgatacccgcctcacccgccgtcacgtaataaaaaaattactactattactcgacgctaacgaaaactaacaactctaacaatcgaaaaccgacgaaaatctacgaacaaattaccgcaccgccaaaaacacaatcaaccgtcaacaactaaaaaataactccctactcacgctaaatacccaaaacgcgacgaatatacgttttaatacgcatcaacgcaccgtccgactctaatacgataaaatcgccattactaccgcgaaaaataccctacaacgccccttccgtatcctaacccgtcaaaaccaactcactacgattaaaaacaaaatttaccgtccgccaacaaaataatttcacgcaacttaacgtacaacaacacgctataaaaatacttctcgccaatacccccgcgcaaaaacgcatcgtaaacgctaataaaaacctacaattcaacgcctctaaatttaacgcaataaaaccgctaaataacgaaaatacaaactaaacgaaaaacatcctaaacttcaacgataaaccgctaaataaaataataaccacgctaacccgttaccgcaacgacgtactacgctacgatcccgccgttaccgaactacgcctaaacgaaacgttcccgctaaaaaataccgatacgatcctaaacgttatcgcgcaaacgcttcccgttaaaattcaatctattacgcgatacta

SEQ ID NO: 15645 - DNA, 623 bp, Artificial Sequence
  chemically treated genomic DNA (Homo sapiens) CpG-island No: 15645
cgtagtcgttcgtacggattaggcgcgcgttggtttttcgagttcggagcggcgtagttcgcggcgtttcggatatatttattgggtagttcgcgttagttcgtttcgtcggttagagagcgggagtcggagtttgggtagcggaagtcgggtcggggtcgcgcgggcggcgcgtaggggacgcggggcgcgcggttttgtttatttggcggttcgcgtttcggagcgatcggcggtcgtttcgtttcgtttcgttttcgcgtggttttcggcgtcgggtagtttcgagcgtcgtcgtatggacggtcgttatcgtcgtttagtcgtttcgcgttcgttttgtacgggttttcgttgtgtttcgatttcgcgtcgggttgcgcgggcggttagcggtttaggcgcgcgcggagagttttggtttagagtttgcgattcgagagcgggattcgcgttttttcggttttttttttttttttttttgcggtttttcgttgttatttggagtcgtttttgtcgttttttggcggcgatcgcgggaagggtcggtttttattcgtatttttgatttcggaggttaataacgggatggtttttgggttttaggggaagagatattattt

SEQ ID NO: 15646 - DNA, 623 bp, Artificial Sequence
  chemically treated genomic DNA (Homo sapiens) CpG-island No: 15646
aaataatatctcttcccctaaaacccaaaaaccatcccgttattaacctccgaaatcaaaaatacgaataaaaaccgacccttcccgcgatcgccgccaaaaaacgacaaaaacgactccaaataacaacgaaaaaccgcaaaaaaaaaaaaaaaaaaaaccgaaaaaacgcgaatcccgctctcgaatcgcaaactctaaaccaaaactctccgcgcgcgcctaaaccgctaaccgcccgcgcaacccgacgcgaaatcgaaacacaacgaaaacccgtacaaaacgaacgcgaaacgactaaacgacgataacgaccgtccatacgacgacgctcgaaactacccgacgccgaaaaccacgcgaaaacgaaacgaaacgaaacgaccgccgatcgctccgaaacgcgaaccgccaaataaacaaaaccgcgcgccccgcgtcccctacgcgccgcccgcgcgaccccgacccgacttccgctacccaaactccgactcccgctctctaaccgacgaaacgaactaacgcgaactacccaataaatatatccgaaacgccgcgaactacgccgctccgaactcgaaaaaccaacgcgcgcctaatccgtacgaacgactacg

SEQ ID NO: 15647 - DNA, 623 bp, Artificial Sequence
  chemically treated genomic DNA (Homo sapiens) CpG-island No: 15647
gggtgatgtttttttttttgggatttagggattatttcgttgttgattttcggggttaggggtgcggatgggggtcggtttttttcgcggtcgtcgttagggggcggtaggagcggttttagatgatagcgggaggtcgtaagaggggagggaggaaggatcgagggagcgcggatttcgttttcggatcgtaaattttgagttagagtttttcgcgcgcgtttgaatcgttggtcgttcgcgtagttcgacgcggaatcggggtatagcgggagttcgtgtagggcgggcgcggggcggttgggcggcggtggcggtcgtttatgcggcggcgttcggggttgttcggcgtcgggaattacgcgggggcgaggcgaggcgaggcggtcgtcggtcgtttcgggacgcggatcgttaggtgagtagagtcgcgcgtttcgcgttttttgcgcgtcgttcgcgcggtttcgattcggttttcgttgtttaggtttcggttttcgttttttggtcggcggggcgggttggcgcgggttatttagtgggtgtgttcggggcgtcgcgggttgcgtcgtttcgggttcggggagttagcgcgcgtttggttcgtgcggacggttgcg

SEQ ID NO: 15648 - DNA, 623 bp, Artificial Sequence
  chemically treated genomic DNA (Homo sapiens) CpG-island No: 15648
cgcaaccgtccgcacgaaccaaacgcgcgctaactccccgaacccgaaacgacgcaacccgcgacgccccgaacacacccactaaataacccgcgccaacccgccccgccgaccaaaaaacgaaaaccgaaacctaaacaacgaaaaccgaatcgaaaccgcgcgaacgacgcgcaaaaaacgcgaaacgcgcgactctactcacctaacgatccgcgtcccgaaacgaccgacgaccgcctcgcctcgcctcgcccccgcgtaattcccgacgccgaacaaccccgaacgccgccgcataaacgaccgccaccgccgcccaaccgccccgcgcccgccctacacgaactcccgctataccccgattccgcgtcgaactacgcgaacgaccaacgattcaaacgcgcgcgaaaaactctaactcaaaatttacgatccgaaaacgaaatccgcgctccctcgatccttcctccctcccctcttacgacctcccgctatcatctaaaaccgctcctaccgccccctaacgacgaccgcgaaaaaaaccgacccccatccgcacccctaaccccgaaaatcaacaacgaaataatccctaaatcccaaaaaaaaaaacatcaccc

SEQ ID NO: 15649 - DNA, 1049 bp, Artificial Sequence
  chemically treated genomic DNA (Homo sapiens) CpG-island No: 15649
gggtgatttaggagttcgggtcgcgggttttttttttcgttcgggtatattttgtagaggagggggcggcggggacgggattcgggtttgcgtttgcgtatattttcgcggtttttttcgtttttttcgtcgggtatttgttacggttatcgtcgcggcgttcgttcgttacgttaaatcggatggcgggagtaggggtatggggcggggggcgcggggagggtggtacggcgcgtgcgtgcgcgggagtcgtcgagcgataattgggagtgcgcgcgttcgtcgttcgttcgcgtttcggaggcggagtttgtggcggggggcggagcgggggcgggtttatgttagttacgtgggcgcgggggcggggtggggcggggtggggcggggcgttttcgagcggcgggtcgagggagggcgtagtagttgttttttgaatattttttgatttaatagttttttagcgtcggacgcgtcgcgttttggcggttttagggatttttttcgcgtttgtatttagtttcgcgttcgaggtgagttcggtttttaaatttttcgggcgggggtgggggtgcgggacgttttttttttgttgggggttttggaggcgcgaaggtattaggcgtttcggtagatggttgtatttttcgtttgcggtttttcgtgttttttggggggtcgggtgcgggcgcggaattcgggaggtgttcgtataaaaggtcgagaaaattgcgcgaggttttttttttttcgtttttttcgttttttttttttcgcgttcgtttttttttttttaaattcggtcggttcgagtggagttagtttagtttcggtagtcgtcgcgcgaggaaatggtcgaggggtcggagttataggtaaaggggggcgtttttcgttcgcgttagtcggggcgttcgtttggttttgcggaggttttcgcgtcgttttcgaggcgttcggttttcgttgttttgtttttttttaggatgattttagtttttcgttttagttttttagttgttttttttagggcgttttttttttagtcg

SEQ ID NO: 15650 - DNA, 1049 bp, Artificial Sequence
  chemically treated genomic DNA (Homo sapiens) CpG-island No: 15650
cgactaaaaaaaaaacgccctaaaaaaaacaactaaaaaactaaaacgaaaaactaaaatcatcctaaaaaaaaacaaaacaacgaaaaccgaacgcctcgaaaacgacgcgaaaacctccgcaaaaccaaacgaacgccccgactaacgcgaacgaaaaacgcccccctttacctataactccgacccctcgaccatttcctcgcgcgacgactaccgaaactaaactaactccactcgaaccgaccgaatttaaaaaaaaaaaaacgaacgcgaaaaaaaaaaaacgaaaaaaacgaaaaaaaaaaaacctcgcgcaattttctcgaccttttatacgaacacctcccgaattccgcgcccgcacccgaccccccaaaaaacacgaaaaaccgcaaacgaaaaatacaaccatctaccgaaacgcctaataccttcgcgcctccaaaacccccaacaaaaaaaaaacgtcccgcacccccacccccgcccgaaaaatttaaaaaccgaactcacctcgaacgcgaaactaaatacaaacgcgaaaaaaatccctaaaaccgccaaaacgcgacgcgtccgacgctaaaaaactattaaatcaaaaaatattcaaaaaacaactactacgccctccctcgacccgccgctcgaaaacgccccgccccaccccgccccaccccgcccccgcgcccacgtaactaacataaacccgcccccgctccgccccccgccacaaactccgcctccgaaacgcgaacgaacgacgaacgcgcgcactcccaattatcgctcgacgactcccgcgcacgcacgcgccgtaccaccctccccgcgccccccgccccatacccctactcccgccatccgatttaacgtaacgaacgaacgccgcgacgataaccgtaacaaatacccgacgaaaaaaacgaaaaaaaccgcgaaaatatacgcaaacgcaaacccgaatcccgtccccgccgccccctcctctacaaaatatacccgaacgaaaaaaaaaacccgcgacccgaactcctaaatcaccc

SEQ ID NO: 15651 - DNA, 1049 bp, Artificial Sequence
  chemically treated genomic DNA (Homo sapiens) CpG-island No: 15651
cggttggggagggggcgttttagaaagagtagttagaaagttgagacggggaattgaggttattttggggggggataagataacgagagtcgggcgtttcgggggcggcgcgggagttttcgtaggattaggcgggcgtttcggttggcgcgggcggggggcgtttttttttatttgtggtttcggtttttcggttattttttcgcgcggcggttgtcgggattgagttgattttattcgggtcggtcgggtttgaaagaggaggagcgggcgcggaggggagggggcggggagggcggagggagggaggtttcgcgtagttttttcggttttttgtgcggatatttttcggatttcgcgttcgtattcggttttttaaaagatacggggagtcgtaagcgaggggtgtagttatttgtcgaggcgtttagtgttttcgcgtttttaagatttttaataaaaaaggagcgtttcgtatttttattttcgttcggaggatttaggggtcgggtttatttcgggcgcggggttaagtgtaggcgcggggggggtttttagagtcgttagggcgcggcgcgttcggcgttgggggattgttgggttagaaagtgtttagggagtagttgttgcgttttttttcggttcgtcgttcggagacgtttcgttttatttcgttttatttcgttttcgcgtttacgtgattagtataggttcgttttcgtttcgtttttcgttatagatttcgttttcgggacgcgagcgagcggcgagcgcgcgtatttttagttatcgttcggcgattttcgcgtacgtacgcgtcgtgttatttttttcgcgtttttcgttttatatttttattttcgttattcgatttaacgtggcgggcgagcgtcgcggcggtagtcgtgataggtattcggcggggggggcggggggggtcgcgagggtgtgcgtaggcgtagattcgggtttcgttttcgtcgtttttttttttgtaaggtgtgttcgggcgaggggaggggttcgcggttcgaatttttgggttattt

SEQ ID NO: 15652 - DNA, 1049 bp, Artificial Sequence
  chemically treated genomic DNA (Homo sapiens) CpG-island No: 15652
aaataacccaaaaattcgaaccgcgaacccctcccctcgcccgaacacaccttacaaaaaaaaaaacgacgaaaacgaaacccgaatctacgcctacgcacaccctcgcgaccccccccgccccccccgccgaatacctatcacgactaccgccgcgacgctcgcccgccacgttaaatcgaataacgaaaataaaaatataaaacgaaaaacgcgaaaaaaataacacgacgcgtacgtacgcgaaaatcgccgaacgataactaaaaatacgcgcgctcgccgctcgctcgcgtcccgaaaacgaaatctataacgaaaaacgaaacgaaaacgaacctatactaatcacgtaaacgcgaaaacgaaataaaacgaaataaaacgaaacgtctccgaacgacgaaccgaaaaaaaacgcaacaactactccctaaacactttctaacccaacaatcccccaacgccgaacgcgccgcgccctaacgactctaaaaaccccccccgcgcctacacttaaccccgcgcccgaaataaacccgacccctaaatcctccgaacgaaaataaaaatacgaaacgctccttttttattaaaaatcttaaaaacgcgaaaacactaaacgcctcgacaaataactacacccctcgcttacgactccccgtatcttttaaaaaaccgaatacgaacgcgaaatccgaaaaatatccgcacaaaaaaccgaaaaaactacgcgaaacctccctccctccgccctccccgccccctcccctccgcgcccgctcctcctctttcaaacccgaccgacccgaataaaatcaactcaatcccgacaaccgccgcgcgaaaaaataaccgaaaaaccgaaaccacaaataaaaaaaaacgccccccgcccgcgccaaccgaaacgcccgcctaatcctacgaaaactcccgcgccgcccccgaaacgcccgactctcgttatcttatccccccccaaaataacctcaattccccgtctcaactttctaactactctttctaaaacgccccctccccaaccg

SEQ ID NO: 15653 - DNA, 532 bp, Artificial Sequence
  chemically treated genomic DNA (Homo sapiens) CpG-island No: 15653
ggttacgatttcggtttcggtttttaaagtttttttcgcgtatggttttaaaaggatagagatttgggagcggggtacggatggtcgggttcgggagggtttgcggtttcggtttggtgacgatcgatggcggcggcgttttcgttgttggggcggcggtaggcgtagcgttttttcgtttcgacgcgttgtttttcgtcgtagacgttatcgtcgtcgtttttttcgtcggagacgggagtaaaatatagagaatcggggttataaagtcggtgggtaggtttggttacgtttaaatcgggtagtgtcgcggtttaggcgttttttttttttttagcgattgtataaaatggcggtcgtcgttgagtcggttttaatttaacgttgcgtacggcggagacgatacgtaaatagcgtttcggaatagttcgagggtttcgcggggaattacgggtatttttggaagtattttacgttagttgcgacgatgggtgtattttgcggtttgtataagaaaaataaagtacggagt

SEQ ID NO: 15654 - DNA, 532 bp, Artificial Sequence
  chemically treated genomic DNA (Homo sapiens) CpG-island No: 15654
actccgtactttatttttcttatacaaaccgcaaaatacacccatcgtcgcaactaacgtaaaatacttccaaaaatacccgtaattccccgcgaaaccctcgaactattccgaaacgctatttacgtatcgtctccgccgtacgcaacgttaaattaaaaccgactcaacgacgaccgccattttatacaatcgctaaaaaaaaaaaaaacgcctaaaccgcgacactacccgatttaaacgtaaccaaacctacccaccgactttataaccccgattctctatattttactcccgtctccgacgaaaaaaacgacgacgataacgtctacgacgaaaaacaacgcgtcgaaacgaaaaaacgctacgcctaccgccgccccaacaacgaaaacgccgccgccatcgatcgtcaccaaaccgaaaccgcaaaccctcccgaacccgaccatccgtaccccgctcccaaatctctatccttttaaaaccatacgcgaaaaaaactttaaaaaccgaaaccgaaatcgtaacc

SEQ ID NO: 15655 - DNA, 532 bp, Artificial Sequence
  chemically treated genomic DNA (Homo sapiens) CpG-island No: 15655
gtttcgtattttgttttttttgtatagatcgtaaaatatatttatcgtcgtaattgacgtaaagtgtttttaagaatattcgtagtttttcgcggagttttcgggttatttcgaggcgttgtttacgtatcgttttcgtcgtacgtagcgttaagttggagtcgatttagcggcggtcgttattttgtgtagtcgttgggaaggaaggagacgtttaaatcgcggtattgttcggtttgagcgtagttaaatttgtttatcggttttgtagtttcgattttttgtgttttgttttcgttttcgacgagagaggcggcgacggtggcgtttgcgacgggagatagcgcgtcggagcgagagagcgttgcgtttgtcgtcgttttaatagcggaggcgtcgtcgttatcggtcgttattagatcggagtcgtaggttttttcgagttcggttattcgtgtttcgtttttagatttttatttttttgggattatgcgcggaggaggttttggggatcgggatcgggatcgtgatt

SEQ ID NO: 15656 - DNA, 532 bp, Artificial Sequence
  chemically treated genomic DNA (Homo sapiens) CpG-island No: 15656
aatcacgatcccgatcccgatccccaaaacctcctccgcgcataatcccaaaaaaataaaaatctaaaaacgaaacacgaataaccgaactcgaaaaaacctacgactccgatctaataacgaccgataacgacgacgcctccgctattaaaacgacgacaaacgcaacgctctctcgctccgacgcgctatctcccgtcgcaaacgccaccgtcgccgcctctctcgtcgaaaacgaaaacaaaacacaaaaaatcgaaactacaaaaccgataaacaaatttaactacgctcaaaccgaacaataccgcgatttaaacgtctccttccttcccaacgactacacaaaataacgaccgccgctaaatcgactccaacttaacgctacgtacgacgaaaacgatacgtaaacaacgcctcgaaataacccgaaaactccgcgaaaaactacgaatattcttaaaaacactttacgtcaattacgacgataaatatattttacgatctatacaaaaaaaacaaaatacgaaac

SEQ ID NO: 15657 - DNA, 742 bp, Artificial Sequence
  chemically treated genomic DNA (Homo sapiens) CpG-island No: 15657
tcgggttaggtcgaggggcgggtagggcggggtttcgcgggtagtcggggttttcgggttggggggcgcgcggttttcgtagtggggcgcgggttacgtgtgaggaggggcgaaagtttcgtaaagcggggcggcgtgtcgcgagttgggagttttcggcgcgtcgcgggcggcgggagttcgggttttcgggcgagtcggggacgcggtcgaggcgggggtcggggttcgagatagagggggtcgtacggagagtgggagggggagagatagagaaggataggggtcgcgagggagacggatagagacgcgtaggggagagaggtagcgcgggtagagggaggcggggggaggtcggcgggcgatcgcgacggagacggagatttcgcgggtagagggcgagcggggtcgtaggaggtagggaggtcgggagagggatcgggacgcgagcgcggcggagatttcggcggtaggagagagacgcgagagcggtcggggaggtggcgatagagttcggtcggcgggggcggggagggcgattttaggtcgggaggtcgaggggtcgcggggtcggggtcgagcgtagcggggtcgggagtggagcgtagggtcgggggtagagcgcgcgagtaggagcgggtgatagcgaaggagttgggcgtagcgggggacggcggcggggagggcgtttgtagcgggggtggggtttagtttattgtaatttttgttttttgggtttagg

SEQ ID NO: 15658 - DNA, 742 bp, Artificial Sequence
  chemically treated genomic DNA (Homo sapiens) CpG-island No: 15658
cctaaacccaaaaaacaaaaattacaataaactaaaccccacccccgctacaaacgccctccccgccgccgtcccccgctacgcccaactccttcgctatcacccgctcctactcgcgcgctctacccccgaccctacgctccactcccgaccccgctacgctcgaccccgaccccgcgacccctcgacctcccgacctaaaatcgccctccccgcccccgccgaccgaactctatcgccacctccccgaccgctctcgcgtctctctcctaccgccgaaatctccgccgcgctcgcgtcccgatccctctcccgacctccctacctcctacgaccccgctcgccctctacccgcgaaatctccgtctccgtcgcgatcgcccgccgacctccccccgcctccctctacccgcgctacctctctcccctacgcgtctctatccgtctccctcgcgacccctatccttctctatctctccccctcccactctccgtacgaccccctctatctcgaaccccgacccccgcctcgaccgcgtccccgactcgcccgaaaacccgaactcccgccgcccgcgacgcgccgaaaactcccaactcgcgacacgccgccccgctttacgaaactttcgcccctcctcacacgtaacccgcgccccactacgaaaaccgcgcgccccccaacccgaaaaccccgactacccgcgaaaccccgccctacccgcccctcgacctaacccga

SEQ ID NO: 15659 - DNA, 742 bp, Artificial Sequence
  chemically treated genomic DNA (Homo sapiens) CpG-island No: 15659
tttgaatttaggaggtagaggttgtagtgagttgagttttattttcgttgtaggcgtttttttcgtcgtcgtttttcgttgcgtttagttttttcgttgttattcgtttttgttcgcgcgttttgttttcggttttgcgttttattttcggtttcgttgcgttcggtttcggtttcgcgatttttcggtttttcggtttggggtcgtttttttcgttttcgtcggtcgggttttgtcgttattttttcgatcgttttcgcgttttttttttgtcgtcggggttttcgtcgcgttcgcgtttcggtttttttttcggtttttttgttttttgcggtttcgttcgttttttgttcgcggggttttcgttttcgtcgcggtcgttcgtcggttttttttcgtttttttttgttcgcgttgttttttttttttgcgcgtttttgttcgtttttttcgcggtttttgtttttttttgttttttttttttttatttttcgtgcggttttttttgtttcggatttcggttttcgtttcggtcgcgttttcggttcgttcgggagttcgagttttcgtcgttcgcggcgcgtcgagaatttttaattcgcggtacgtcgtttcgttttgcgagattttcgtttttttttatacgtgattcgcgttttattgcggaggtcgcgcgttttttagttcgggagtttcggttgttcgcgggatttcgttttgttcgtttttcggtttaattcgg

SEQ ID NO: 15660 - DNA, 742 bp, Artificial Sequence
  chemically treated genomic DNA (Homo sapiens) CpG-island No: 15660
ccgaattaaaccgaaaaacgaacaaaacgaaatcccgcgaacaaccgaaactcccgaactaaaaaacgcgcgacctccgcaataaaacgcgaatcacgtataaaaaaaaacgaaaatctcgcaaaacgaaacgacgtaccgcgaattaaaaattctcgacgcgccgcgaacgacgaaaactcgaactcccgaacgaaccgaaaacgcgaccgaaacgaaaaccgaaatccgaaacaaaaaaaaccgcacgaaaaataaaaaaaaaaaaaacaaaaaaaaacaaaaaccgcgaaaaaaacgaacaaaaacgcgcaaaaaaaaaaaacaacgcgaacaaaaaaaaacgaaaaaaaaccgacgaacgaccgcgacgaaaacgaaaaccccgcgaacaaaaaacgaacgaaaccgcaaaaaacaaaaaaaccgaaaaaaaaaccgaaacgcgaacgcgacgaaaaccccgacgacaaaaaaaaaacgcgaaaacgatcgaaaaaataacgacaaaacccgaccgacgaaaacgaaaaaaacgaccccaaaccgaaaaaccgaaaaatcgcgaaaccgaaaccgaacgcaacgaaaccgaaaataaaacgcaaaaccgaaaacaaaacgcgcgaacaaaaacgaataacaacgaaaaaactaaacgcaacgaaaaacgacgacgaaaaaaacgcctacaacgaaaataaaactcaactcactacaacctctacctcctaaattcaaa

SEQ ID NO: 15661 - DNA, 640 bp, Artificial Sequence
  chemically treated genomic DNA (Homo sapiens) CpG-island No: 15661
tttcgattttttcggtttggcgcgatatttttgtagattttttataagggaatatagaagcgtatttttttagatcgttatatattatcgcgttattacgtatagatagttagttataaatcgttagattgtcggataatagataattaacgggtttttatttagagtaggatttaattttacgcggataattcgatttttatcgcgaatttagtacgcgcgttttcggacgcgtttacgtattattcggtcgggcgaggtattagggatagagtaaaatattcgagtatttttaaagttacgattataatatttataaggagaatttttcggcggatttaggttttattcgcgcgtcgattttttttattcgtcgcgaatttttttaattatcgcgtttcgtcggttttttttcgttattttcgtaaattatcggcgatttatgtcggttatggtattaacgcgagtcgggtagcgcgagtaaggtcgtacgtaataatttttcgacgattagtagattagattatcgagtcgtaggcgggtcgtcgatataatatataataagatgatatagtattaaaacgataggtatattttagaaaatagatacgaattagttgttttaattattaaatttagt

SEQ ID NO: 15662 - DNA, 640 bp, Artificial Sequence
  chemically treated genomic DNA (Homo sapiens) CpG-island No: 15662
actaaatttaataattaaaacaactaattcgtatctattttctaaaatatacctatcgttttaatactatatcatcttattatatattatatcgacgacccgcctacgactcgataatctaatctactaatcgtcgaaaaattattacgtacgaccttactcgcgctacccgactcgcgttaataccataaccgacataaatcgccgataatttacgaaaataacgaaaaaaaaccgacgaaacgcgataattaaaaaaattcgcgacgaataaaaaaaatcgacgcgcgaataaaacctaaatccgccgaaaaattctccttataaatattataatcgtaactttaaaaatactcgaatattttactctatccctaatacctcgcccgaccgaataatacgtaaacgcgtccgaaaacgcgcgtactaaattcgcgataaaaatcgaattatccgcgtaaaattaaatcctactctaaataaaaacccgttaattatctattatccgacaatctaacgatttataactaactatctatacgtaataacgcgataatatataacgatctaaaaaaatacgcttctatattcccttataaaaaatctacaaaaatatcgcgccaaaccgaaaaaatcgaaa

SEQ ID NO: 15663 - DNA, 640 bp, Artificial Sequence
  chemically treated genomic DNA (Homo sapiens) CpG-island No: 15663
gttgggtttggtgattgagatagttggttcgtgtttgttttttggggtgtgtttgtcgttttggtgttgtgttattttgttgtgtgttgtgtcggcggttcgtttgcggttcggtggtttgatttgttggtcgtcggggggttattgcgtgcggttttattcgcgttgttcggttcgcgttggtgttatggtcggtatgggtcgtcggtggtttgcgagggtagcgggggggggtcggcggggcgcggtggttaggggggttcgcggcgggtggggggggtcggcgcgcgggtggggtttaggttcgtcggggggttttttttgtgggtattgtggtcgtggttttgggggtgttcgggtgttttgttttgtttttggtgtttcgttcggtcggatggtgcgtggacgcgttcgggggcgcgcgtgttgggttcgcgatgagagtcgggttgttcgcgtggggttgggttttgttttgggtgggggttcgttggttgtttgttgttcggtagtttggcggtttgtggttaattgtttgtgcgtggtgacgcgatgatatgtggcggtttgagagggtgcgtttttatgtttttttgtgggaggtttataggagtgtcgcgttaggtcggaggaatcgggg

SEQ ID NO: 15664 - DNA, 640 bp, Artificial Sequence
  chemically treated genomic DNA (Homo sapiens) CpG-island No: 15664
ccccgattcctccgacctaacgcgacactcctataaacctcccacaaaaaaacataaaaacgcaccctctcaaaccgccacatatcatcgcgtcaccacgcacaaacaattaaccacaaaccgccaaactaccgaacaacaaacaaccaacgaacccccacccaaaacaaaacccaaccccacgcgaacaacccgactctcatcgcgaacccaacacgcgcgcccccgaacgcgtccacgcaccatccgaccgaacgaaacaccaaaaacaaaacaaaacacccgaacacccccaaaaccacgaccacaatacccacaaaaaaaaccccccgacgaacctaaaccccacccgcgcgccgaccccccccacccgccgcgaacccccctaaccaccgcgccccgccgacccccccccgctaccctcgcaaaccaccgacgacccataccgaccataacaccaacgcgaaccgaacaacgcgaataaaaccgcacgcaataaccccccgacgaccaacaaatcaaaccaccgaaccgcaaacgaaccgccgacacaacacacaacaaaataacacaacaccaaaacgacaaacacaccccaaaaaacaaacacgaaccaactatctcaatcaccaaacccaac

SEQ ID NO: 15665 - DNA, 742 bp, Artificial Sequence
  chemically treated genomic DNA (Homo sapiens) CpG-island No: 15665
ttcgaggggcggggtttcggggtcggcgaggggaggggtacggatattagtataggacggggtttcgtagatagcgagcggaggggttttttcgtaaggggcgggtttcgagggtcgcgtttggaaggttttacgaggggttcggtggaagggcggtgaagggcgggttaatcgggaggcgtttaggttttgaaggtttgcgggaggtcgaaatggttttggggaggtcgaggttgaggttttattagtatcgcgggtttggaagcggcgggagttgaaagagtttgcggtgatttgtatggaagttttcgaagttaggtcgaggttttataagacggagttcgagaggtgtcggttttaagttgattgtgattacgttaaattaaggatttataggaaggaaggcggtgtcgaagtcgggagttgcgcggagaaggagcgtttaatatagttttagcggtttattacgtaagcgcgattaacggtttttcgggaagtagttaaaaacgtttggtcgtttattacgttcgcgcgttggagggcggaagtgggtgagatttcgggtattttatatcgtttttcggtttttggttacgttttttttggttatatttattcgttttgtaaggtacgtttttttcgcggcggcggttgttgtttacgtgggttttttcgggcgggcgggtagtgggcgtttttttttgtaggttgggtgtgttcgaagtttgcggttttttgtggg

SEQ ID NO: 15666 - DNA, 742 bp, Artificial Sequence
  chemically treated genomic DNA (Homo sapiens) CpG-island No: 15666
cccacaaaaaaccgcaaacttcgaacacacccaacctacaaaaaaaaacgcccactacccgcccgcccgaaaaaacccacgtaaacaacaaccgccgccgcgaaaaaaacgtaccttacaaaacgaataaatataaccaaaaaaaacgtaaccaaaaaccgaaaaacgatataaaatacccgaaatctcacccacttccgccctccaacgcgcgaacgtaataaacgaccaaacgtttttaactacttcccgaaaaaccgttaatcgcgcttacgtaataaaccgctaaaactatattaaacgctccttctccgcgcaactcccgacttcgacaccgccttccttcctataaatccttaatttaacgtaatcacaatcaacttaaaaccgacacctctcgaactccgtcttataaaacctcgacctaacttcgaaaacttccatacaaatcaccgcaaactctttcaactcccgccgcttccaaacccgcgatactaataaaacctcaacctcgacctccccaaaaccatttcgacctcccgcaaaccttcaaaacctaaacgcctcccgattaacccgcccttcaccgcccttccaccgaacccctcgtaaaaccttccaaacgcgaccctcgaaacccgccccttacgaaaaaacccctccgctcgctatctacgaaaccccgtcctatactaatatccgtacccctcccctcgccgaccccgaaaccccgcccctcgaa

SEQ ID NO: 15667 - DNA, 742 bp, Artificial Sequence
  chemically treated genomic DNA (Homo sapiens) CpG-island No: 15667
tttataggaaatcgtaggtttcgggtatatttagtttgtagggagaggcgtttattgttcgttcgttcggggaggtttacgtgggtagtagtcgtcgtcgcggagggggcgtgttttatagagcgagtgggtgtaattagagggggcgtggttagaaatcggggggcggtatggagtgttcgaggttttatttattttcgttttttagcgcgcggacgtggtaggcggttaagcgtttttggttgtttttcgggaagtcgttggtcgcgtttgcgtagtgaatcgttgaggttgtgttgagcgtttttttttcgcgtaattttcggtttcgatatcgtttttttttttatgaatttttaatttaacgtggttatagttagtttaagatcggtatttttcgggtttcgttttgtaggatttcggtttggtttcgagggtttttatataggttatcgtaggtttttttaattttcgtcgtttttaggttcgcggtattagtgagattttagtttcgatttttttaggattatttcgatttttcgtaggtttttaaggtttgagcgtttttcgattagttcgttttttatcgtttttttatcgggtttttcgtaaggttttttaaacgcgattttcgaagttcgttttttacggggaagttttttcgttcgttgtttgcgaagtttcgttttgtattggtgttcgtgttttttttttcgtcggtttcgaagtttcgtttttcgaa

SEQ ID NO: 15668 - DNA, 742 bp, Artificial Sequence
  chemically treated genomic DNA (Homo sapiens) CpG-island No: 15668
ttcgaaaaacgaaacttcgaaaccgacgaaaaaaaaaacacgaacaccaatacaaaacgaaacttcgcaaacaacgaacgaaaaaacttccccgtaaaaaacgaacttcgaaaatcgcgtttaaaaaaccttacgaaaaacccgataaaaaaacgataaaaaacgaactaatcgaaaaacgctcaaaccttaaaaacctacgaaaaatcgaaataatcctaaaaaaatcgaaactaaaatctcactaataccgcgaacctaaaaacgacgaaaattaaaaaaacctacgataacctatataaaaaccctcgaaaccaaaccgaaatcctacaaaacgaaacccgaaaaataccgatcttaaactaactataaccacgttaaattaaaaattcataaaaaaaaaaacgatatcgaaaccgaaaattacgcgaaaaaaaaacgctcaacacaacctcaacgattcactacgcaaacgcgaccaacgacttcccgaaaaacaaccaaaaacgcttaaccgcctaccacgtccgcgcgctaaaaaacgaaaataaataaaacctcgaacactccataccgccccccgatttctaaccacgccccctctaattacacccactcgctctataaaacacgccccctccgcgacgacgactactacccacgtaaacctccccgaacgaacgaacaataaacgcctctccctacaaactaaatatacccgaaacctacgatttcctataaa

SEQ ID NO: 15669 - DNA, 618 bp, Artificial Sequence
  chemically treated genomic DNA (Homo sapiens) CpG-island No: 15669
gtttttttttttttgttcgtttttatttttttgttaggtttttcggtcgtttattgttttttttttttcgtcgttttttttttttcgcggttcggcgcgcggaggtttcgtgtgtttatttgaaggttttcggggtgcgtttggtcgttcgtcggattttcgttttggggattgcgttttatttacgataaattatttttcgagaaaggggtgagttttgttgttgttttcgcgagagtaggcgtcggtttaagttttgtcgttttcgtttagttttgtattcgtttaggttatttcgatagtcgcggtttcggtcgtgggtaggacgggaaggttgcgaggtcgggcggagaggcgttttgaggtcggagcgcgtgaggacgattttttttcgttggagacgtcgtcgtcgtcgcgtttggtcgggttgtatcggggtttgggcggagggcgcgggcgcgcggggtcgcgaggggaagagtagaagcggaggcgaaggcgaggggcgtcgcgtatttgtttcgggttgtacggaagcggtttttagtggggattggcggtttttttcggtttttagggtttattcgcggttttgaaattttagtgttaggcgtttgt

SEQ ID NO: 15670 - DNA, 618 bp, Artificial Sequence
  chemically treated genomic DNA (Homo sapiens) CpG-island No: 15670
acaaacgcctaacactaaaatttcaaaaccgcgaataaaccctaaaaaccgaaaaaaaccgccaatccccactaaaaaccgcttccgtacaacccgaaacaaatacgcgacgcccctcgccttcgcctccgcttctactcttcccctcgcgaccccgcgcgcccgcgccctccgcccaaaccccgatacaacccgaccaaacgcgacgacgacgacgtctccaacgaaaaaaaatcgtcctcacgcgctccgacctcaaaacgcctctccgcccgacctcgcaaccttcccgtcctacccacgaccgaaaccgcgactatcgaaataacctaaacgaatacaaaactaaacgaaaacgacaaaacttaaaccgacgcctactctcgcgaaaacaacaacaaaactcacccctttctcgaaaaataatttatcgtaaataaaacgcaatccccaaaacgaaaatccgacgaacgaccaaacgcaccccgaaaaccttcaaataaacacacgaaacctccgcgcgccgaaccgcgaaaaaaaaaaaacgacgaaaaaaaaaaaacaataaacgaccgaaaaacctaacaaaaaaataaaaacgaacaaaaaaaaaaaaac

SEQ ID NO: 15671 - DNA, 618 bp, Artificial Sequence
  chemically treated genomic DNA (Homo sapiens) CpG-island No: 15671
ataggcgtttggtattggggttttagagtcgcgagtaggttttgaaggtcgggagggatcgttagtttttattggaagtcgttttcgtgtagttcgggataggtgcgcggcgtttttcgttttcgttttcgtttttgttttttttttcgcggtttcgcgcgttcgcgtttttcgtttagatttcggtgtagttcggttaggcgcggcggcggcggcgtttttagcgagggaaggtcgtttttacgcgtttcggttttagggcgttttttcgttcggtttcgtagttttttcgttttgtttacggtcgaggtcgcggttgtcggggtggtttggacgggtgtagggttgggcgggggcggtaggatttgaatcggcgtttgttttcgcggaggtagtagtagagtttatttttttttcgggaaatggtttatcgtggataaaacgtagtttttaaagcgaaggttcgacgggcggttagacgtatttcggggatttttaggtggatatacggggttttcgcgcgtcgagtcgcgagggaagaggggcggcgggagggagggagtagtgggcggtcggggagtttggtagaagagtgggggcgagtagggaaggaggggt

SEQ ID NO: 15672 - DNA, 618 bp, Artificial Sequence
  chemically treated genomic DNA (Homo sapiens) CpG-island No: 15672
acccctccttccctactcgcccccactcttctaccaaactccccgaccgcccactactccctccctcccgccgcccctcttccctcgcgactcgacgcgcgaaaaccccgtatatccacctaaaaatccccgaaatacgtctaaccgcccgtcgaaccttcgctttaaaaactacgttttatccacgataaaccatttcccgaaaaaaaaataaactctactactacctccgcgaaaacaaacgccgattcaaatcctaccgcccccgcccaaccctacacccgtccaaaccaccccgacaaccgcgacctcgaccgtaaacaaaacgaaaaaactacgaaaccgaacgaaaaaacgccctaaaaccgaaacgcgtaaaaacgaccttccctcgctaaaaacgccgccgccgccgcgcctaaccgaactacaccgaaatctaaacgaaaaacgcgaacgcgcgaaaccgcgaaaaaaaaaacaaaaacgaaaacgaaaacgaaaaacgccgcgcacctatcccgaactacacgaaaacgacttccaataaaaactaacgatccctcccgaccttcaaaacctactcgcgactctaaaaccccaataccaaacgcctat

SEQ ID NO: 15673 - DNA, 851 bp, Artificial Sequence
  chemically treated genomic DNA (Homo sapiens) CpG-island No: 15673
tcggacgggtcgattcggaggtggcgcgggtagtattaggtcgtcggcggcgtcgtaggcgttgagcgagacgagggagtcggggtggtcgagtatacggttcgagtagaagtatagttcggcggggcggtcgcggcgtcgggtcgcgttcgttttttttatttcgaagtttcgggataggaagcgtaggtcgcggcgtagttgaaggtataggtcgcgttcgaaggtcggtaggtgtagtagtagggcgcgtttttcgggtcgggcgcgcggggcggttgggggcgtgcgggggcgtcgtcgtcgtcggggttcgggggttgcgggtagcggcggtaggtgtacgtcgtcggggcgtattcgttacgggagtattatttttacgtcggtcgtcgcgtcgtcgatagttgcggggagagaggagacgcgttagcgcggcggggttcgttcggacgttcgttttttcgttggtcgttagtcgcgttagcgcggggatagcgcgattcggagtcggcgttgtttttttttttttcgttcggtatttttacgttggttcgcgttattcggggagggttttcggcgtagtcgcgcgagtatttttcggaacggcgtcgcgtatcggcgagcggagattcggcggcggcgcgtttgttacggagttattcgattttcgtatttcggtcgcggttcgcgtttttttcgttcgggcgtcgttagcggtttcgtcgtcgttttcgggtcgttaggacgtcgcgagaacgtagagggaaggtagtcgtaggacgcggggtgaagagggttgtgggagggggcgttatttgtgttcgggtttagtttttaaattagtagta

SEQ ID NO: 15674 - DNA, 851 bp, Artificial Sequence
  chemically treated genomic DNA (Homo sapiens) CpG-island No: 15674
tactactaatttaaaaactaaacccgaacacaaataacgccccctcccacaaccctcttcaccccgcgtcctacgactaccttccctctacgttctcgcgacgtcctaacgacccgaaaacgacgacgaaaccgctaacgacgcccgaacgaaaaaaacgcgaaccgcgaccgaaatacgaaaatcgaataactccgtaacaaacgcgccgccgccgaatctccgctcgccgatacgcgacgccgttccgaaaaatactcgcgcgactacgccgaaaaccctccccgaataacgcgaaccaacgtaaaaataccgaacgaaaaaaaaaaaaacaacgccgactccgaatcgcgctatccccgcgctaacgcgactaacgaccaacgaaaaaacgaacgtccgaacgaaccccgccgcgctaacgcgtctcctctctccccgcaactatcgacgacgcgacgaccgacgtaaaaataatactcccgtaacgaatacgccccgacgacgtacacctaccgccgctacccgcaacccccgaaccccgacgacgacgacgcccccgcacgcccccaaccgccccgcgcgcccgacccgaaaaacgcgccctactactacacctaccgaccttcgaacgcgacctataccttcaactacgccgcgacctacgcttcctatcccgaaacttcgaaataaaaaaaacgaacgcgacccgacgccgcgaccgccccgccgaactatacttctactcgaaccgtatactcgaccaccccgactccctcgtctcgctcaacgcctacgacgccgccgacgacctaatactacccgcgccacctccgaatcgacccgtccga

SEQ ID NO: 15675 - DNA, 851 bp, Artificial Sequence
  chemically treated genomic DNA (Homo sapiens) CpG-island No: 15675
tgttgttggtttggggattggattcgggtataggtagcgtttttttttatagttttttttatttcgcgttttgcggttattttttttttgcgttttcgcggcgttttggcggttcgggggcggcggcgggatcgttgacggcgttcgagcggaggaggcgcgggtcgcggtcggagtacgggaatcgggtggtttcgtggtaggcgcgtcgtcgtcgggttttcgttcgtcgatgcgcggcgtcgtttcgggaggtgttcgcgcggttgcgtcggagatttttttcgggtggcgcgggttagcgtggaggtgtcgggcgagggaagggaaggtagcgtcggtttcgggtcgcgttgttttcgcgttggcgcggttggcggttagcgggagggcgggcgttcgggcgggtttcgtcgcgttgacgcgtttttttttttttcgtagttgtcggcgacgcggcggtcgacgtggaggtggtgttttcgtggcgggtgcgtttcgacgacgtgtatttgtcgtcgttgttcgtagttttcgggtttcgacggcggcgacgttttcgtacgtttttagtcgtttcgcgcgttcggttcggagagcgcgttttgttgttgtatttgtcggttttcgggcgcgatttgtatttttagttgcgtcgcgatttgcgttttttgtttcgaggtttcgaggtggaggaggcgggcgcggttcggcgtcgcggtcgtttcgtcgagttgtgtttttattcgggtcgtgtgttcggttatttcggttttttcgtttcgtttagcgtttgcggcgtcgtcggcggtttggtattgttcgcgttattttcgggtcggttcgttcgg

SEQ ID NO: 15676 - DNA, 851 bp, Artificial Sequence
  chemically treated genomic DNA (Homo sapiens) CpG-island No: 15676
ccgaacgaaccgacccgaaaataacgcgaacaataccaaaccgccgacgacgccgcaaacgctaaacgaaacgaaaaaaccgaaataaccgaacacacgacccgaataaaaacacaactcgacgaaacgaccgcgacgccgaaccgcgcccgcctcctccacctcgaaacctcgaaacaaaaaacgcaaatcgcgacgcaactaaaaatacaaatcgcgcccgaaaaccgacaaatacaacaacaaaacgcgctctccgaaccgaacgcgcgaaacgactaaaaacgtacgaaaacgtcgccgccgtcgaaacccgaaaactacgaacaacgacgacaaatacacgtcgtcgaaacgcacccgccacgaaaacaccacctccacgtcgaccgccgcgtcgccgacaactacgaaaaaaaaaaaaacgcgtcaacgcgacgaaacccgcccgaacgcccgccctcccgctaaccgccaaccgcgccaacgcgaaaacaacgcgacccgaaaccgacgctaccttcccttccctcgcccgacacctccacgctaacccgcgccacccgaaaaaaatctccgacgcaaccgcgcgaacacctcccgaaacgacgccgcgcatcgacgaacgaaaacccgacgacgacgcgcctaccacgaaaccacccgattcccgtactccgaccgcgacccgcgcctcctccgctcgaacgccgtcaacgatcccgccgccgcccccgaaccgccaaaacgccgcgaaaacgcaaaaaaaaaataaccgcaaaacgcgaaataaaaaaaactataaaaaaaaacgctacctatacccgaatccaatccccaaaccaacaaca

SEQ ID NO: 15677 - DNA, 502 bp, Artificial Sequence
  chemically treated genomic DNA (Homo sapiens) CpG-island No: 15677
gttcgtatattcgttagcgttcgttatttgagtcgtcggtttcgcgggtgtttttttttttttttcggcgtttaagggattatttcgagtcgttcggggattttcgtcgtttttttgtatagtttggttgtcgtcgtttacgttggcgttagttttttcggtggacgaggcggcggcggcgtcgagtagttcgtgggtttcgttcgcgttttcgatagttacggtgtgtattagttacgtatttattcgggcgcgagggatgaaggggatttcgagtacgcgtatttttcggagtagttggttttcgggttgcgcggtagcgtttagttttcggtttttggggtgtaagtggttcgcgcgtttttattttttcgaggtcgagaaggggttgagcgcgtaggtagagttagtcgggtcgtttaggaatagtagttcgtttcggagtacggaatttttatttttggtgtatgagttttaaattgtagatatgtttagagtaatt

SEQ ID NO: 15678 - DNA, 502 bp, Artificial Sequence
  chemically treated genomic DNA (Homo sapiens) CpG-island No: 15678
aattactctaaacatatctacaatttaaaactcatacaccaaaaataaaaattccgtactccgaaacgaactactattcctaaacgacccgactaactctacctacgcgctcaaccccttctcgacctcgaaaaaataaaaacgcgcgaaccacttacaccccaaaaaccgaaaactaaacgctaccgcgcaacccgaaaaccaactactccgaaaaatacgcgtactcgaaatccccttcatccctcgcgcccgaataaatacgtaactaatacacaccgtaactatcgaaaacgcgaacgaaacccacgaactactcgacgccgccgccgcctcgtccaccgaaaaaactaacgccaacgtaaacgacgacaaccaaactatacaaaaaaacgacgaaaatccccgaacgactcgaaataatcccttaaacgccgaaaaaaaaaaaaaaacacccgcgaaaccgacgactcaaataacgaacgctaacgaatatacgaac

SEQ ID NO: 15679 - DNA, 502 bp, Artificial Sequence
  chemically treated genomic DNA (Homo sapiens) CpG-island No: 15679
agttgttttagatatgtttataatttagaatttatgtattaaagatgaaaatttcgtgtttcgggacgaattgttgtttttgggcggttcggttagttttgtttacgcgtttagttttttttcggtttcgggagggtgggggcgcgcgggttatttgtattttaagggtcgggagttggacgttgtcgcgtagttcgagggttagttgtttcgggaggtgcgcgtgttcggggttttttttatttttcgcgttcgggtggatgcgtggttggtgtatatcgtggttgtcgggagcgcggacgaggtttacgggttgttcggcgtcgtcgtcgtttcgtttatcggaggagttggcgttagcgtggacggcggtagttaggttgtgtaggggggcggcggggattttcgagcggttcggagtggttttttggacgtcggggaagaggagaaggtattcgcggaatcgacggtttaggtggcggacgttggcggatgtgcgagt

SEQ ID NO: 15680 - DNA, 502 bp, Artificial Sequence
  chemically treated genomic DNA (Homo sapiens) CpG-island No: 15680
actcgcacatccgccaacgtccgccacctaaaccgtcgattccgcgaataccttctcctcttccccgacgtccaaaaaaccactccgaaccgctcgaaaatccccgccgcccccctacacaacctaactaccgccgtccacgctaacgccaactcctccgataaacgaaacgacgacgacgccgaacaacccgtaaacctcgtccgcgctcccgacaaccacgatatacaccaaccacgcatccacccgaacgcgaaaaataaaaaaaaccccgaacacgcgcacctcccgaaacaactaaccctcgaactacgcgacaacgtccaactcccgacccttaaaatacaaataacccgcgcgcccccaccctcccgaaaccgaaaaaaaactaaacgcgtaaacaaaactaaccgaaccgcccaaaaacaacaattcgtcccgaaacacgaaattttcatctttaatacataaattctaaattataaacatatctaaaacaact

SEQ ID NO: 15681 - DNA, 507 bp, Artificial Sequence
  chemically treated genomic DNA (Homo sapiens) CpG-island No: 15681
ggaaagagggagaaaatgagggagatatagagatagatacgcgcgggtgttattaatttcgtttcggagtagaatcggttattttttaagtttattatttatcgtagggttcgtttattttgtttcggtcggagttttttggcgtttttttttttttttttcgttgttttattttcgcgttgtattcgggggttttattcggtttcgtttttttaagtagtttacggcgaattttaatattttcgttttttttagtttcgggtttcggaggttttatagacgggaggggagggcgtagagatagaaaggggtggggagaaagggggaaagtggtagggggaagaagggagggacggatgcgggagttggtggtgttttcgatcgtatttgcgtattgtttatagaacgcgcgattaaatgcggagtggagatgattaaggaaagttttggtttattttgagacgaaattgtttaattttaggggttggaattaatgtttaacgcgtg

SEQ ID NO: 15682 - DNA, 507 bp, Artificial Sequence
  chemically treated genomic DNA (Homo sapiens) CpG-island No: 15682
cacgcgttaaacattaattccaacccctaaaattaaacaatttcgtctcaaaataaaccaaaactttccttaatcatctccactccgcatttaatcgcgcgttctataaacaatacgcaaatacgatcgaaaacaccaccaactcccgcatccgtccctcccttcttccccctaccactttccccctttctccccacccctttctatctctacgccctcccctcccgtctataaaacctccgaaacccgaaactaaaaaaaacgaaaatattaaaattcgccgtaaactacttaaaaaaacgaaaccgaataaaacccccgaatacaacgcgaaaataaaacaacgaaaaaaaaaaaaaaaaacgccaaaaaactccgaccgaaacaaaataaacgaaccctacgataaataataaacttaaaaaataaccgattctactccgaaacgaaattaataacacccgcgcgtatctatctctatatctccctcattttctccctctttcc

SEQ ID NO: 15683 - DNA, 507 bp, Artificial Sequence
  chemically treated genomic DNA (Homo sapiens) CpG-island No: 15683
tacgcgttgggtattggttttaatttttaggattggatagtttcgttttagggtgggttaggattttttttggttatttttatttcgtatttggtcgcgcgttttgtgggtagtgcgtaaatgcgatcgggggtattattagttttcgtattcgtttttttttttttttttttgttattttttttttttttttttatttttttttgtttttgcgtttttttttttcgtttgtagaattttcggaattcgaagttggagaaagcggagatattggagttcgtcgtgggttatttgagggagcgaagtcgggtggagttttcgggtatagcgcgggggtggggtagcggagggagggaggggggacgttaggaggtttcggtcggggtagagtgggcgggttttgcggtggatggtgggtttggggagtggtcggttttgtttcgaggcgaggttaataatattcgcgcgtgtttgtttttgtgttttttttatttttttttttttttt

SEQ ID NO: 15684 - DNA, 507 bp, Artificial Sequence
  chemically treated genomic DNA (Homo sapiens) CpG-island No: 15684
aaaaaaaaaaaaaaaataaaaaaaacacaaaaacaaacacgcgcgaatattattaacctcgcctcgaaacaaaaccgaccactccccaaacccaccatccaccgcaaaacccgcccactctaccccgaccgaaacctcctaacgtcccccctccctccctccgctaccccacccccgcgctatacccgaaaactccacccgacttcgctccctcaaataacccacgacgaactccaatatctccgctttctccaacttcgaattccgaaaattctacaaacgaaaaaaaaaaacgcaaaaacaaaaaaaaataaaaaaaaaaaaaaaaaataacaaaaaaaaaaaaaaaaaaacgaatacgaaaactaataatacccccgatcgcatttacgcactacccacaaaacgcgcgaccaaatacgaaataaaaataaccaaaaaaaatcctaacccaccctaaaacgaaactatccaatcctaaaaattaaaaccaatacccaacgcgta

SEQ ID NO: 15685 - DNA, 561 bp, Artificial Sequence
  chemically treated genomic DNA (Homo sapiens) CpG-island No: 15685
gggtaggaggatattgggttcgttttttttcgcggttatcgttcgagtcggttagttcgggacgcggggtttttcggtcgttcgcgcgtagttatcggtttgggtttggtttcggggcgcggggaacgtaggagagatttcgggtattttcgacggtcggttgttaagggcggcggtcggcgtagggaagcgcggtgagggtggcgggcggtcgatttatatggcgggggtagcgggtggaggatttggtagcggtagtgatggcggcggcggttcgcgttggtttcgattggcgttggttgttcgggacggaaagatggcggtcgcgcgttattcgtattcgggtattgcgggcgggggcggggcgtcgcgggagacgcgtcgcgagcggggtcgcgggggcggggcgttgcggggcgttgcggggcgggggtcgtgtcgggtaggattacgggtttcgcgttattatgtttcggtagttttttcggtattcgcgggattttaaggcgggttgttgcggtttttttaaatttatcgttattttattttgtttgattatag

SEQ ID NO: 15686 - DNA, 561 bp, Artificial Sequence
  chemically treated genomic DNA (Homo sapiens) CpG-island No: 15686
ctataatcaaacaaaataaaataacgataaatttaaaaaaaccgcaacaacccgccttaaaatcccgcgaataccgaaaaaactaccgaaacataataacgcgaaacccgtaatcctacccgacacgacccccgccccgcaacgccccgcaacgccccgcccccgcgaccccgctcgcgacgcgtctcccgcgacgccccgcccccgcccgcaatacccgaatacgaataacgcgcgaccgccatctttccgtcccgaacaaccaacgccaatcgaaaccaacgcgaaccgccgccgccatcactaccgctaccaaatcctccacccgctacccccgccatataaatcgaccgcccgccaccctcaccgcgcttccctacgccgaccgccgcccttaacaaccgaccgtcgaaaatacccgaaatctctcctacgttccccgcgccccgaaaccaaacccaaaccgataactacgcgcgaacgaccgaaaaaccccgcgtcccgaactaaccgactcgaacgataaccgcgaaaaaaaacgaacccaatatcctcctaccc

SEQ ID NO: 15687 - DNA, 561 bp, Artificial Sequence
  chemically treated genomic DNA (Homo sapiens) CpG-island No: 15687
ttgtggttagatagggtggggtggcggtgggtttggggaagtcgtagtagttcgttttggggtttcgcgagtgtcgagggagttgtcggggtatggtggcgcggggttcgtggttttgttcggtacgattttcgtttcgtagcgtttcgtagcgtttcgttttcgcggtttcgttcgcgacgcgtttttcgcggcgtttcgttttcgttcgtagtgttcggatgcgggtgacgcgcggtcgttattttttcgtttcgggtagttagcgttagtcggagttagcgcgagtcgtcgtcgttattattgtcgttgttaagttttttattcgttgttttcgttatgtgagtcggtcgttcgttatttttatcgcgtttttttgcgtcggtcgtcgtttttggtaatcggtcgtcgggagtgttcggggttttttttgcgtttttcgcgtttcggggttaggtttaagtcggtgattgcgcgcgggcggtcgaggagtttcgcgtttcgggttggtcggttcgggcgatggtcgcgggaaggagcggatttagtgtttttttgttt

SEQ ID NO: 15688 - DNA, 561 bp, Artificial Sequence
  chemically treated genomic DNA (Homo sapiens) CpG-island No: 15688
aaacaaaaaaacactaaatccgctccttcccgcgaccatcgcccgaaccgaccaacccgaaacgcgaaactcctcgaccgcccgcgcgcaatcaccgacttaaacctaaccccgaaacgcgaaaaacgcaaaaaaaaccccgaacactcccgacgaccgattaccaaaaacgacgaccgacgcaaaaaaacgcgataaaaataacgaacgaccgactcacataacgaaaacaacgaataaaaaacttaacaacgacaataataacgacgacgactcgcgctaactccgactaacgctaactacccgaaacgaaaaaataacgaccgcgcgtcacccgcatccgaacactacgaacgaaaacgaaacgccgcgaaaaacgcgtcgcgaacgaaaccgcgaaaacgaaacgctacgaaacgctacgaaacgaaaatcgtaccgaacaaaaccacgaaccccgcgccaccataccccgacaactccctcgacactcgcgaaaccccaaaacgaactactacgacttccccaaacccaccgccaccccaccctatctaaccacaa

SEQ ID NO: 15689 - DNA, 1207 bp, Artificial Sequence
  chemically treated genomic DNA (Homo sapiens) CpG-island No: 15689
gtttatagtatcgcggtaggtttggatgtaatttacgtttagcgtcgttagtttttgtatcgcgttatttagatcgcgaagtagacggtttattcggttttttagttttcgatttaatcgttttagatttcgtagtatttcggggtcgattgggggaatggtcggtgtgggtgtgggtgtaggcgttgggtagggtcgcgtaggggtagaaggcgggggtggaggcgcgtcgtttagacggattttgagttgtaggttgttggcgataaagtgggtaaggtcgtcgtggcggtttattgtgttttcgagttttaggggattggagatggtggcgcggcgttcgtcgttcgcgtcggattcggtattttttgaggattcggcgttatcgtacgtttcgtttagttcgtttaggttgcggttgttttgaagacggttggagaacgagcggtcggttttgttgttcgcggtcgttttttcgtcgttgtttttttttttttgttgtttaatatttatttcgtcgtttggtttttttcgacggtagtttttttcggaggagggtttgttttcgggcggcgtcgggtttttgtgtcgggaggatagggaaggttcgtgttttgtattcggcgtttttttgcggttttcggttttagatagcgttttttgagggtcgggttcgttttttagagtttttcgtttcggtcggtggacgacgtcgtagtttgacgttttcggggacgttttggggtggcggttcgcgtttttaacgttttcggttttttttttttcggatattcggaggtttgcgggcggtttagaggacgttcggttcggttcgtcgttaaagattagggtttgatgtttcgttatagttagaaggttcgtttcgggttcgggtcgttttcgagacgattttatattgtaggtgggggtcgtaacggaggaattggttcgtttcggtttcggaggtagtggttgcgtttttaaggggcgttggtagaggcgagtcgattggtagcggttgataatggtaaggataggaaaagtattttgattggtcgcggcgattaggaagtttcggaagaagagttgttattgtatagcggaatatacgtgaacgtcggtagggtggagagaaggaggtgatagttgttttcgtcgtttcgttttttttgaaagttgatggggtagattttaaagattaaggttt

SEQ ID NO: 15690 - DNA, 1207 bp, Artificial Sequence
  chemically treated genomic DNA (Homo sapiens) CpG-island No: 15690
aaaccttaatctttaaaatctaccccatcaactttcaaaaaaaacgaaacgacgaaaacaactatcacctccttctctccaccctaccgacgttcacgtatattccgctatacaataacaactcttcttccgaaacttcctaatcgccgcgaccaatcaaaatacttttcctatccttaccattatcaaccgctaccaatcgactcgcctctaccaacgccccttaaaaacgcaaccactacctccgaaaccgaaacgaaccaattcctccgttacgacccccacctacaatataaaatcgtctcgaaaacgacccgaacccgaaacgaaccttctaactataacgaaacatcaaaccctaatctttaacgacgaaccgaaccgaacgtcctctaaaccgcccgcaaacctccgaatatccgaaaaaaaaaaaaccgaaaacgttaaaaacgcgaaccgccaccccaaaacgtccccgaaaacgtcaaactacgacgtcgtccaccgaccgaaacgaaaaactctaaaaaacgaacccgaccctcaaaaaacgctatctaaaaccgaaaaccgcaaaaaaacgccgaatacaaaacacgaaccttccctatcctcccgacacaaaaacccgacgccgcccgaaaacaaaccctcctccgaaaaaaactaccgtcgaaaaaaaccaaacgacgaaataaatattaaacaacaaaaaaaaaaaaacaacgacgaaaaaacgaccgcgaacaacaaaaccgaccgctcgttctccaaccgtcttcaaaacaaccgcaacctaaacgaactaaacgaaacgtacgataacgccgaatcctcaaaaaataccgaatccgacgcgaacgacgaacgccgcgccaccatctccaatcccctaaaactcgaaaacacaataaaccgccacgacgaccttacccactttatcgccaacaacctacaactcaaaatccgtctaaacgacgcgcctccacccccgccttctacccctacgcgaccctacccaacgcctacacccacacccacaccgaccattcccccaatcgaccccgaaatactacgaaatctaaaacgattaaatcgaaaactaaaaaaccgaataaaccgtctacttcgcgatctaaataacgcgatacaaaaactaacgacgctaaacgtaaattacatccaaacctaccgcgatactataaac

SEQ ID NO: 15691 - DNA, 1207 bp, Artificial Sequence
  chemically treated genomic DNA (Homo sapiens) CpG-island No: 15691
ggattttggtttttaagatttgttttattagtttttagaaagggcggggcgacgggagtagttgttatttttttttttttattttgtcggcgtttacgtgtgtttcgttgtgtagtaatagtttttttttcgggattttttggtcgtcgcgattaattaaaatgttttttttgtttttattattgttagtcgttgttaatcggttcgtttttattaacgttttttaaaggcgtagttattgttttcggagtcggggcgaattaattttttcgttgcggtttttatttgtagtatggagtcgtttcgggggcggttcgggttcgagacggattttttggttgtagcggaatattaggttttagtttttggcggcgggtcgggtcgaacgttttttgagtcgttcgtaggttttcgggtgttcggggaggaagagatcgagaacgttgggggcgcgaatcgttattttaggacgttttcgaagacgttaagttgcggcgtcgtttatcggtcggaacgggaggttttggagaacgagttcggtttttaagggacgttgtttggggtcgggagtcgtaggggggcgtcgggtgtagagtacgaattttttttgttttttcggtataagaattcggcgtcgttcgagggtaagttttttttcgggagggattgtcgtcgagggggattaggcggcgggatggatgttgagtagtaggaggaggaagataacgacgaggaggcggtcgcgggtagtagagtcggtcgttcgttttttagtcgtttttaggatagtcgtagtttggacgggttgagcgaggcgtgcggtggcgtcgggtttttagggagtgtcgagttcggcgcgggcggcggacgtcgcgttattatttttagttttttggagttcgaaggtatagtgagtcgttacggcgattttatttattttgtcgttaataatttgtaatttaagattcgtttgagcggcgcgtttttattttcgttttttgtttttgcgcggttttgtttagcgtttgtatttatatttatatcggttatttttttaatcgatttcgaggtgttgcgggatttggagcggttgagtcgggagttgggaggtcgggtggatcgtttgtttcgcggtttgggtggcgcggtgtaggagttgacggcgttgagcgtgggttgtatttagatttatcgcgatgttgtggat

SEQ ID NO: 15692 - DNA, 1207 bp, Artificial Sequence
  chemically treated genomic DNA (Homo sapiens) CpG-island No: 15692
atccacaacatcgcgataaatctaaatacaacccacgctcaacgccgtcaactcctacaccgcgccacccaaaccgcgaaacaaacgatccacccgacctcccaactcccgactcaaccgctccaaatcccgcaacacctcgaaatcgattaaaaaaataaccgatataaatataaatacaaacgctaaacaaaaccgcgcaaaaacaaaaaacgaaaataaaaacgcgccgctcaaacgaatcttaaattacaaattattaacgacaaaataaataaaatcgccgtaacgactcactataccttcgaactccaaaaaactaaaaataataacgcgacgtccgccgcccgcgccgaactcgacactccctaaaaacccgacgccaccgcacgcctcgctcaacccgtccaaactacgactatcctaaaaacgactaaaaaacgaacgaccgactctactacccgcgaccgcctcctcgtcgttatcttcctcctcctactactcaacatccatcccgccgcctaatccccctcgacgacaatccctcccgaaaaaaaacttaccctcgaacgacgccgaattcttataccgaaaaaacaaaaaaaattcgtactctacacccgacgcccccctacgactcccgaccccaaacaacgtcccttaaaaaccgaactcgttctccaaaacctcccgttccgaccgataaacgacgccgcaacttaacgtcttcgaaaacgtcctaaaataacgattcgcgcccccaacgttctcgatctcttcctccccgaacacccgaaaacctacgaacgactcaaaaaacgttcgacccgacccgccgccaaaaactaaaacctaatattccgctacaaccaaaaaatccgtctcgaacccgaaccgcccccgaaacgactccatactacaaataaaaaccgcaacgaaaaaattaattcgccccgactccgaaaacaataactacgcctttaaaaaacgttaataaaaacgaaccgattaacaacgactaacaataataaaaacaaaaaaaacattttaattaatcgcgacgaccaaaaaatcccgaaaaaaaaactattactacacaacgaaacacacgtaaacgccgacaaaataaaaaaaaaaaaataacaactactcccgtcgccccgccctttctaaaaactaataaaacaaatcttaaaaaccaaaatcc

SEQ ID NO: 15693 - DNA, 540 bp, Artificial Sequence
  chemically treated genomic DNA (Homo sapiens) CpG-island No: 15693
  unsure (3)
ganatgcggatttaagcggagttttttcggtagcgtttgttagagtgcggttagtcggtgatttttatttagtttcgttatatcgtcgcgtattagttatagtgattcgttgcggttgtaatcgtttttatcgggaaataggtgtttaaaatataggtttttgtcgtcgtagttattgagtattagtgtgttatcgcgtagttgtaagcggatattcgtaggtattttttagtcggggtcgaggtttttatatcggcgcgggcgtttttgttcggtaattgttgtaggtgcgggagagaatgaacggtagcgggtcgggtagggcgatgtcggttttatcgggaaggatttttgtatcgagtagcggattgatcggatggtcggacgttatttcgtcggggtatatcgaataggttacgtcggtgggggtatcgatgcgtatttcggttgaattttggataatgttatcgttatattgcgttatgtcgttttgacgcgtcgtcggtttttcgtttatcgtaaaattttttttttattatt

SEQ ID NO: 15694 - DNA, 540 bp, Artificial Sequence
  chemically treated genomic DNA (Homo sapiens) CpG-island No: 15694
  unsure (538)
aataataaaaaaaaaattttacgataaacgaaaaaccgacgacgcgtcaaaacgacataacgcaatataacgataacattatccaaaattcaaccgaaatacgcatcgatacccccaccgacgtaacctattcgatataccccgacgaaataacgtccgaccatccgatcaatccgctactcgatacaaaaatccttcccgataaaaccgacatcgccctacccgacccgctaccgttcattctctcccgcacctacaacaattaccgaacaaaaacgcccgcgccgatataaaaacctcgaccccgactaaaaaatacctacgaatatccgcttacaactacgcgataacacactaatactcaataactacgacgacaaaaacctatattttaaacacctatttcccgataaaaacgattacaaccgcaacgaatcactataactaatacgcgacgatataacgaaactaaataaaaatcaccgactaaccgcactctaacaaacgctaccgaaaaaactccgcttaaatccgcatntc

SEQ ID NO: 15695 - DNA, 540 bp, Artificial Sequence
  chemically treated genomic DNA (Homo sapiens) CpG-island No: 15695
  unsure (538)
aataatagaaaaaggattttacgataagcggaaaatcggcggcgcgttagggcgatatgacgtagtatggcggtagtattgtttagggtttagtcggggtacgtatcggtgtttttatcggcgtggtttgttcggtgtgtttcggcggggtgacgttcggttattcggttaattcgttgttcggtgtaaaggtttttttcggtgaaatcgatatcgttttgttcggttcgttgtcgtttattttttttcgtatttatagtagttatcggataaaaacgttcgcgtcggtgtgggagtttcggtttcggttggaaaatgtttgcggatattcgtttatagttgcgcgataatatattgatatttagtgattacggcggtagaagtttgtattttgagtatttgtttttcggtgaggacggttatagtcgtagcgagttattgtggttggtgcgcggcggtgtggcgaaattggatgaaggttatcggttggtcgtattttggtaggcgttgtcggaagaatttcgtttaagttcgtatntt

SEQ ID NO: 15696 - DNA, 540 bp, Artificial Sequence
  chemically treated genomic DNA (Homo sapiens) CpG-island No: 15696
  unsure (3)
aanatacgaacttaaacgaaattcttccgacaacgcctaccaaaatacgaccaaccgataaccttcatccaatttcgccacaccgccgcgcaccaaccacaataactcgctacgactataaccgtcctcaccgaaaaacaaatactcaaaatacaaacttctaccgccgtaatcactaaatatcaatatattatcgcgcaactataaacgaatatccgcaaacattttccaaccgaaaccgaaactcccacaccgacgcgaacgtttttatccgataactactataaatacgaaaaaaaataaacgacaacgaaccgaacaaaacgatatcgatttcaccgaaaaaaacctttacaccgaacaacgaattaaccgaataaccgaacgtcaccccgccgaaacacaccgaacaaaccacgccgataaaaacaccgatacgtaccccgactaaaccctaaacaatactaccgccatactacgtcatatcgccctaacgcgccgccgattttccgcttatcgtaaaatcctttttctattatt

SEQ ID NO: 15697 - DNA, 589 bp, Artificial Sequence
  chemically treated genomic DNA (Homo sapiens) CpG-island No: 15697
acgtagagtttttcgcgttagcggggataaatcgtagtcgaagttaaaggtgatgtcgaatacgttgagtttttcgcgttagcggggataaatcgggttttttgtcggttgtaattgataatgttgagagtttttcgcgttagcggggataaatcgtttggatcgggtttggaatttttgagcggtcgcgagtttttcgcgttagcggggataaatcgcgaatcgcgtatattttgcgcgtcgtcgtttgcgagtttttcgcgttagcggggataaatcgttagttttataaattcggagatacggaaattagagtttttcgcgttagcgaggattaatcggatttatttcgaaagagattgttagttagtttgagtttttcgcgttagcggggataaatcgttgttggagttggttgtaaggtaagtcgtttagagtttttcggcgttagcggggattaatcggggggcgtatggatcgtaaatattatttttcgggagtttttcgcgttagcggggataaatcgggagttttagatattatgtggtattgatggttttttaatttttcgcggttaataggggataaa

SEQ ID NO: 15698 - DNA, 589 bp, Artificial Sequence
  chemically treated genomic DNA (Homo sapiens) CpG-island No: 15698
tttatcccctattaaccgcgaaaaattaaaaaaccatcaataccacataatatctaaaactcccgatttatccccgctaacgcgaaaaactcccgaaaaataatatttacgatccatacgccccccgattaatccccgctaacgccgaaaaactctaaacgacttaccttacaaccaactccaacaacgatttatccccgctaacgcgaaaaactcaaactaactaacaatctctttcgaaataaatccgattaatcctcgctaacgcgaaaaactctaatttccgtatctccgaatttataaaactaacgatttatccccgctaacgcgaaaaactcgcaaacgacgacgcgcaaaatatacgcgattcgcgatttatccccgctaacgcgaaaaactcgcgaccgctcaaaaattccaaacccgatccaaacgatttatccccgctaacgcgaaaaactctcaacattatcaattacaaccgacaaaaaacccgatttatccccgctaacgcgaaaaactcaacgtattcgacatcacctttaacttcgactacgatttatccccgctaacgcgaaaaactctacgt

SEQ ID NO: 15699 - DNA, 589 bp, Artificial Sequence
  chemically treated genomic DNA (Homo sapiens) CpG-island No: 15699
tttattttttgttaatcgcggggaattggaaggttattaatgttatatagtgtttggaattttcggtttattttcgttggcgcggggaattttcggggaataatgtttacggtttatgcgtttttcggttaattttcgttggcgtcggggaattttgggcggtttgttttgtagttagttttagtagcggtttattttcgttggcgcggggaatttaagttggttggtaatttttttcggggtgagttcggttaattttcgttggcgcggggaattttagttttcgtattttcggatttataaagttgacggtttattttcgttggcgcggggaattcgtaggcggcgacgcgtagggtatgcgcgattcgcggtttattttcgttggcgcggggaattcgcgatcgtttagaaattttagattcgatttaaacggtttattttcgttggcgcggggaatttttaatattattaattataatcgatagggagttcggtttattttcgttggcgcggggaatttagcgtgttcggtattatttttggtttcggttgcggtttattttcgttggcgcggggaattttgcgt

SEQ ID NO: 15700 - DNA, 589 bp, Artificial Sequence
  chemically treated genomic DNA (Homo sapiens) CpG-island No: 15700
acgcaaaattccccgcgccaacgaaaataaaccgcaaccgaaaccaaaaataataccgaacacgctaaattccccgcgccaacgaaaataaaccgaactccctatcgattataattaataatattaaaaattccccgcgccaacgaaaataaaccgtttaaatcgaatctaaaatttctaaacgatcgcgaattccccgcgccaacgaaaataaaccgcgaatcgcgcataccctacgcgtcgccgcctacgaattccccgcgccaacgaaaataaaccgtcaactttataaatccgaaaatacgaaaactaaaattccccgcgccaacgaaaattaaccgaactcaccccgaaaaaaattaccaaccaacttaaattccccgcgccaacgaaaataaaccgctactaaaactaactacaaaacaaaccgcccaaaattccccgacgccaacgaaaattaaccgaaaaacgcataaaccgtaaacattattccccgaaaattccccgcgccaacgaaaataaaccgaaaattccaaacactatataacattaataaccttccaattccccgcgattaacaaaaaataaa

SEQ ID NO: 15701 - DNA, 545 bp, Artificial Sequence
  chemically treated genomic DNA (Homo sapiens) CpG-island No: 15701
acgtattttcgaagcgtatatatttacgtagcggcggcggaataatttttttattaatttgtaaggttgcgtgttcgagatcgattaacggtcggttttggatacgaataaatagttacgtttcgtttatcgttaatagtataatcgttagcgtatagcggaatagcggagagaaatcgttttgatgaatttcggttagcggtacgcgtatttagatattgggcgatagttaggtttttagttagacgataggcgaatttttgttgattttaacgcgtattttcgtcgggtcgtttagttgttgcgttatttgatggtttaagaatttatagtgttgcgtttaacgtagatttgttttttcggtagtttcgttggagtagagagagatttttagtttacggtagatttttcgacggaaagcgggaggtataattaattgcgtgtcgttttttagttgtagtttgtcggttattaatatacgtatttcgtacgcgaggattttattaaattgttggaggttcggtaaaatcgcgaagtttagtatt

SEQ ID NO: 15702 - DNA, 545 bp, Artificial Sequence
  chemically treated genomic DNA (Homo sapiens) CpG-island No: 15702
aatactaaacttcgcgattttaccgaacctccaacaatttaataaaatcctcgcgtacgaaatacgtatattaataaccgacaaactacaactaaaaaacgacacgcaattaattatacctcccgctttccgtcgaaaaatctaccgtaaactaaaaatctctctctactccaacgaaactaccgaaaaaacaaatctacgttaaacgcaacactataaattcttaaaccatcaaataacgcaacaactaaacgacccgacgaaaatacgcgttaaaatcaacaaaaattcgcctatcgtctaactaaaaacctaactatcgcccaatatctaaatacgcgtaccgctaaccgaaattcatcaaaacgatttctctccgctattccgctatacgctaacgattatactattaacgataaacgaaacgtaactatttattcgtatccaaaaccgaccgttaatcgatctcgaacacgcaaccttacaaattaataaaaaaattattccgccgccgctacgtaaatatatacgcttcgaaaatacgt

SEQ ID NO: 15703 - DNA, 545 bp, Artificial Sequence
  chemically treated genomic DNA (Homo sapiens) CpG-island No: 15703
ggtgttgaatttcgcgattttgtcgagtttttagtagtttaataaagttttcgcgtacgaagtgcgtatgttgatgatcgataaattgtaattggaggacggtacgtagttggttgtgtttttcgtttttcgtcgggagatttatcgtgagttggggatttttttttattttaacgaggttgtcgaagaggtaggtttgcgttgggcgtaatattatgaatttttaagttattagatggcgtagtaattgggcggttcgacggaagtgcgcgttgaggttaataaaagttcgtttgtcgtttggttgaaaatttggttgtcgtttaatatttgggtacgcgtgtcgttgatcgaaatttattagggcgattttttttcgttgtttcgttatacgttggcgattatgttattggcgataggcggggcgtggttgtttattcgtatttagaatcgatcgttggtcgatttcgaatacgtagttttgtaggttggtaaagggattatttcgtcgtcgttgcgtgagtatgtgcgtttcggaggtgcgt

SEQ ID NO: 15704 - DNA, 545 bp, Artificial Sequence
  chemically treated genomic DNA (Homo sapiens) CpG-island No: 15704
acgcacctccgaaacgcacatactcacgcaacgacgacgaaataatccctttaccaacctacaaaactacgtattcgaaatcgaccaacgatcgattctaaatacgaataaacaaccacgccccgcctatcgccaataacataatcgccaacgtataacgaaacaacgaaaaaaaatcgccctaataaatttcgatcaacgacacgcgtacccaaatattaaacgacaaccaaattttcaaccaaacgacaaacgaacttttattaacctcaacgcgcacttccgtcgaaccgcccaattactacgccatctaataacttaaaaattcataatattacgcccaacgcaaacctacctcttcgacaacctcgttaaaataaaaaaaaatccccaactcacgataaatctcccgacgaaaaacgaaaaacacaaccaactacgtaccgtcctccaattacaatttatcgatcatcaacatacgcacttcgtacgcgaaaactttattaaactactaaaaactcgacaaaatcgcgaaattcaacacc

SEQ ID NO: 15705 - DNA, 517 bp, Artificial Sequence
  chemically treated genomic DNA (Homo sapiens) CpG-island No: 15705
tattaggttggcgaatagtaaggtgacgatgagtaataacgtacgggtaaatgaatttcgtggcgagaagcgtaatcgttttatgttttagagtcgttcggtataaagacgtagtttagattttagacggtttgaatgtaacgcggatgcgttggatttttttttattatgcggcgtagacgcgaaatttgtacgtcgatggagcgttttattgcggaatatttacgattacgggtaaggtttattagtttatcgcgggagagcggtttacgcggatgggtgattagtgttttagtatcgaaattttcggtggtgagcggatcggtcgtttcgcggaaaattcggcgtacgaggttacgttgatttacgaaggaatacggttttcgggagagggtagaagatgttgcggtataaatcgtagggataggtatagaatcggtaacggtgagtggtaggtaattagcgaaaggattttttggtatgaggggggtttaagaggtaaacgggatattaaagg

SEQ ID NO: 15706 - DNA, 517 bp, Artificial Sequence
  chemically treated genomic DNA (Homo sapiens) CpG-island No: 15706
cctttaatatcccgtttacctcttaaacccccctcataccaaaaaatcctttcgctaattacctaccactcaccgttaccgattctatacctatccctacgatttataccgcaacatcttctaccctctcccgaaaaccgtattccttcgtaaatcaacgtaacctcgtacgccgaattttccgcgaaacgaccgatccgctcaccaccgaaaatttcgatactaaaacactaatcacccatccgcgtaaaccgctctcccgcgataaactaataaaccttacccgtaatcgtaaatattccgcaataaaacgctccatcgacgtacaaatttcgcgtctacgccgcataataaaaaaaaatccaacgcatccgcgttacattcaaaccgtctaaaatctaaactacgtctttataccgaacgactctaaaacataaaacgattacgcttctcgccacgaaattcatttacccgtacgttattactcatcgtcaccttactattcgccaacctaata

SEQ ID NO: 15707 - DNA, 517 bp, Artificial Sequence
  chemically treated genomic DNA (Homo sapiens) CpG-island No: 15707
tttttggtgtttcgtttgttttttagattttttttatgttaaggaattttttcgttgattgtttattatttatcgttatcggttttgtgtttatttttgcggtttatatcgtaatattttttgttttttttcgagaatcgtattttttcgtaagttaacgtgatttcgtacgtcgaatttttcgcgaaacgatcgattcgtttattatcgggagtttcggtattgaagtattggttatttattcgcgtgagtcgttttttcgcgataagttgatgaattttgttcgtggtcgtgaatatttcgtaatggaacgttttatcgacgtgtagatttcgcgtttgcgtcgtatggtggaagaagatttagcgtattcgcgttatatttagatcgtttggggtttgggttacgtttttgtatcggacggttttaaagtatgaggcgattgcgtttttcgttacgaagtttatttgttcgtacgttattgtttatcgttattttgttgttcgttagtttggtg

SEQ ID NO: 15708 - DNA, 517 bp, Artificial Sequence
  chemically treated genomic DNA (Homo sapiens) CpG-island No: 15708
caccaaactaacgaacaacaaaataacgataaacaataacgtacgaacaaataaacttcgtaacgaaaaacgcaatcgcctcatactttaaaaccgtccgatacaaaaacgtaacccaaaccccaaacgatctaaatataacgcgaatacgctaaatcttcttccaccatacgacgcaaacgcgaaatctacacgtcgataaaacgttccattacgaaatattcacgaccacgaacaaaattcatcaacttatcgcgaaaaaacgactcacgcgaataaataaccaatacttcaataccgaaactcccgataataaacgaatcgatcgtttcgcgaaaaattcgacgtacgaaatcacgttaacttacgaaaaaatacgattctcgaaaaaaaacaaaaaatattacgatataaaccgcaaaaataaacacaaaaccgataacgataaataataaacaatcaacgaaaaaattccttaacataaaaaaaatctaaaaaacaaacgaaacaccaaaaa

SEQ ID NO: 15709 - DNA, 605 bp, Artificial Sequence
  chemically treated genomic DNA (Homo sapiens) CpG-island No: 15709
tttatgtagcgcgattaggtgttgacgtagtgggcgttgtttagtatgttgcgttagggcggtagtaattttatcggcggttaacgttaacgtgatcgtcgtaagcgtattaagtttttgtttagtatgggttaattgttgttgttattgtcgtagatgttcgcgatcgttggtttgttgggagaattgcgtacgttaattcgtcggttcgttgttttattgacggaagcggtcgtgtttttgtaattaggtatttaggttttgttgttgttgttgtaattttgttgattgtttcgtcgcgtggtggcgaatgttcgcgcgaagcgttattgtgttttgtaagcgagtatttatttttttaatttgttggcgaatatgcgttagcgtcgcgttgtgttttgcgatgcgtttttagtgtggacgaagatttcgtgtcggttgtgttagattaagcgtcgttagttgaggttgcgttttttttttttcggttaacgtttgttgtaaggtttgttgacggcggttggttttttgttgtaattcgttttgacgcgttaattagtttagcgattgttgtttttgttgttgcgcggtaattaattgttttt

SEQ ID NO: 15710 - DNA, 605 bp, Artificial Sequence
  chemically treated genomic DNA (Homo sapiens) CpG-island No: 15710
aaaaacaattaattaccgcgcaacaacaaaaacaacaatcgctaaactaattaacgcgtcaaaacgaattacaacaaaaaaccaaccgccgtcaacaaaccttacaacaaacgttaaccgaaaaaaaaaaaacgcaacctcaactaacgacgcttaatctaacacaaccgacacgaaatcttcgtccacactaaaaacgcatcgcaaaacacaacgcgacgctaacgcatattcgccaacaaattaaaaaaataaatactcgcttacaaaacacaataacgcttcgcgcgaacattcgccaccacgcgacgaaacaatcaacaaaattacaacaacaacaacaaaacctaaatacctaattacaaaaacacgaccgcttccgtcaataaaacaacgaaccgacgaattaacgtacgcaattctcccaacaaaccaacgatcgcgaacatctacgacaataacaacaacaattaacccatactaaacaaaaacttaatacgcttacgacgatcacgttaacgttaaccgccgataaaattactaccgccctaacgcaacatactaaacaacgcccactacgtcaacacctaatcgcgctacataaa

SEQ ID NO: 15711 - DNA, 605 bp, Artificial Sequence
  chemically treated genomic DNA (Homo sapiens) CpG-island No: 15711
aaaaatagttaattatcgcgtagtagtaagaataataatcgttaaattggttaacgcgttaggacgaattgtagtaagaagttagtcgtcgttagtaggttttgtaataggcgttagtcgaagaagaaaaagcgtaattttaattggcggcgtttagtttggtataatcggtacgaaattttcgtttatattgggaacgtatcgtagaatatagcgcggcgttggcgtatattcgttagtagattgaagaagtaaatattcgtttatagagtataatggcgtttcgcgcgagtattcgttattacgcggcgaagtagttagtagaattatagtagtagtaataaagtttgaatatttggttataggaatacgatcgttttcgttagtggaataacgaatcggcgggttggcgtgcgtagtttttttaataaattagcgatcgcgagtatttgcggtaatggtagtaatagttaatttatgttgagtaaaaatttaatgcgtttgcggcgattacgttgacgttaatcgtcgatgaagttgttatcgttttggcgtaatatgttgagtaacgtttattgcgttagtatttggtcgcgttgtatgga

SEQ ID NO: 15712 - DNA, 605 bp, Artificial Sequence
  chemically treated genomic DNA (Homo sapiens) CpG-island No: 15712
tccatacaacgcgaccaaatactaacgcaataaacgttactcaacatattacgccaaaacgataacaacttcatcgacgattaacgtcaacgtaatcgccgcaaacgcattaaatttttactcaacataaattaactattactaccattaccgcaaatactcgcgatcgctaatttattaaaaaaactacgcacgccaacccgccgattcgttattccactaacgaaaacgatcgtattcctataaccaaatattcaaactttattactactactataattctactaactacttcgccgcgtaataacgaatactcgcgcgaaacgccattatactctataaacgaatatttacttcttcaatctactaacgaatatacgccaacgccgcgctatattctacgatacgttcccaatataaacgaaaatttcgtaccgattataccaaactaaacgccgccaattaaaattacgctttttcttcttcgactaacgcctattacaaaacctactaacgacgactaacttcttactacaattcgtcctaacgcgttaaccaatttaacgattattattcttactactacgcgataattaactattttt

SEQ ID NO: 15713 - DNA, 868 bp, Artificial Sequence
  chemically treated genomic DNA (Homo sapiens) CpG-island No: 15713
ttgttttgtcgttagtttttcggcgattttaatcggtagcgtgatcgtgttgttatcgtaattaaaggagacgcgtgtatttgcgtttatatttaatttcgcggtattcgttgggttgagtttgatgtacggttgcggtatacggttttggaagatcggagtacgttgtgataatttatcgttgttaaataggtggtaatacggcgcgatacgttatttttcgttttgcggttggaagcgtgtcggtacgttggtgaagtaatttagattattttcgttggttttaaatagacgtacgttcggatcgttaaagcgtagtttgtcgtttatttcgttttggaatttgttttacgtttgcggggagttttagttcggcgtttaggtaaacggtatttgcgaacggtgcgtagtcggttggttgttattttttatcgagaaggtgaatatggtgttaatattttgcggttgacgcggtttatgaacgttgatattggcgcgtatggcggtacgatcgttgtaacggtgcggtttacgggttagtttttgtttacgaatacggaatgtcgtattcggcgtagtatttttgatatttgttagtttcgggattttcgttataatagcgttattatatggtcgagttgcgtttagtttattttacggtttagtagggtgttgtgtagcgagtgtaattagcgttagttttttagtatgatagttttgttgtcgtaataagtaggatcgtaaatttggaagaaacgttgggcgcggttttcgttgttgattatcgtatcgtcgtttttagtaaagttggtagtagaaagtattagatgggcgttttttataatcgttgtgcgttgatgattaatta

SEQ ID NO: 15714 - DNA, 868 bp, Artificial Sequence
  chemically treated genomic DNA (Homo sapiens) CpG-island No: 15714
taattaatcatcaacgcacaacgattataaaaaacgcccatctaatactttctactaccaactttactaaaaacgacgatacgataatcaacaacgaaaaccgcgcccaacgtttcttccaaatttacgatcctacttattacgacaacaaaactatcatactaaaaaactaacgctaattacactcgctacacaacaccctactaaaccgtaaaataaactaaacgcaactcgaccatataataacgctattataacgaaaatcccgaaactaacaaatatcaaaaatactacgccgaatacgacattccgtattcgtaaacaaaaactaacccgtaaaccgcaccgttacaacgatcgtaccgccatacgcgccaatatcaacgttcataaaccgcgtcaaccgcaaaatattaacaccatattcaccttctcgataaaaaataacaaccaaccgactacgcaccgttcgcaaataccgtttacctaaacgccgaactaaaactccccgcaaacgtaaaacaaattccaaaacgaaataaacgacaaactacgctttaacgatccgaacgtacgtctatttaaaaccaacgaaaataatctaaattacttcaccaacgtaccgacacgcttccaaccgcaaaacgaaaaataacgtatcgcgccgtattaccacctatttaacaacgataaattatcacaacgtactccgatcttccaaaaccgtataccgcaaccgtacatcaaactcaacccaacgaataccgcgaaattaaatataaacgcaaatacacgcgtctcctttaattacgataacaacacgatcacgctaccgattaaaatcgccgaaaaactaacgacaaaacaa

SEQ ID NO: 15715 - DNA, 868 bp, Artificial Sequence
  chemically treated genomic DNA (Homo sapiens) CpG-island No: 15715
tggttgattattaacgtatagcgattatggaaaacgtttatttggtattttttgttgttagttttgttgaaagcgacggtacggtgattaataacgaaggtcgcgtttaacgttttttttaggtttacgattttgtttattacgatagtaaaattgttatgttggaaagttggcgttggttatattcgttgtatagtattttgttgagtcgtgaagtggattggacgtagttcgattatgtgatgacgttgttgtggcgaaaatttcggaattggtaggtattaaagatgttgcgtcggatgcgatatttcgtattcgtgggtagaaattggttcgtgaatcgtatcgttatagcggtcgtatcgttatgcgcgttaatattagcgtttatgagtcgcgttagtcgtaggatattgatattatgtttattttttcgatggaaggtaataattagtcgattgcgtatcgttcgtaagtgtcgtttgtttgggcgtcgggttggaatttttcgtaggcgtggaataaattttaggacgaagtgggcggtaaattgcgttttggcgattcgggcgtgcgtttgtttgaaattagcgaaaatggtttggattattttattagcgtatcggtacgtttttagtcgtaggacgggaaatggcgtatcgcgtcgtattattatttgtttggtagcgatgaattgttatagcgtgtttcggttttttagagtcgtatgtcgtagtcgtatattaaatttaatttagcggatgtcgcgaagttgggtgtgaacgtaggtatacgcgttttttttagttacgatggtaatacggttacgttgtcggttgaaatcgtcgaaggattgacggtagggtag

SEQ ID NO: 15716 - DNA, 868 bp, Artificial Sequence
  chemically treated genomic DNA (Homo sapiens) CpG-island No: 15716
ctaccctaccgtcaatccttcgacgatttcaaccgacaacgtaaccgtattaccatcgtaactaaaaaaaacgcgtatacctacgttcacacccaacttcgcgacatccgctaaattaaatttaatatacgactacgacatacgactctaaaaaaccgaaacacgctataacaattcatcgctaccaaacaaataataatacgacgcgatacgccatttcccgtcctacgactaaaaacgtaccgatacgctaataaaataatccaaaccattttcgctaatttcaaacaaacgcacgcccgaatcgccaaaacgcaatttaccgcccacttcgtcctaaaatttattccacgcctacgaaaaattccaacccgacgcccaaacaaacgacacttacgaacgatacgcaatcgactaattattaccttccatcgaaaaaataaacataatatcaatatcctacgactaacgcgactcataaacgctaatattaacgcgcataacgatacgaccgctataacgatacgattcacgaaccaatttctacccacgaatacgaaatatcgcatccgacgcaacatctttaatacctaccaattccgaaattttcgccacaacaacgtcatcacataatcgaactacgtccaatccacttcacgactcaacaaaatactatacaacgaatataaccaacgccaactttccaacataacaattttactatcgtaataaacaaaatcgtaaacctaaaaaaaacgttaaacgcgaccttcgttattaatcaccgtaccgtcgctttcaacaaaactaacaacaaaaaataccaaataaacgttttccataatcgctatacgttaataatcaacca

SEQ ID NO: 15717 - DNA, 516 bp, Artificial Sequence
  chemically treated genomic DNA (Homo sapiens) CpG-island No: 15717
tcgcgtttcgcgaagttttaatgagcgttttggcgtagattcgcgagtaaggttacgttttggatagcgaagagaacgagtagggcgtgcgttgcgtggcggtgtcggtgtggaattacgagtttcgcgttatcgtcgttttgagtttgtcgacgttgatttttcgcgtggacgacgcggagttggttaattttcgcgagtagttttagtaggtcgggttcgcgttttcgcgcgcgttgggttattcggtttgagtcgttagatcggttcgtaggtaagtagtcgaagttcgcgtatgtagtcgtcgtcgttgatgttttcgtagtgtaggtttataaacgcgtcggtgaagaagtcgcgttcgtcgatgtagtcgttcgatagtttttacgttttatacgtttatcggtacggtgtgtttacgtttttgttatttaaacgagttagttttatgcggtagatttatcgtattacgtttattcggtaatcggaagttttcgtattgtttcggaacgg

SEQ ID NO: 15718 - DNA, 516 bp, Artificial Sequence
  chemically treated genomic DNA (Homo sapiens) CpG-island No: 15718
ccgttccgaaacaatacgaaaacttccgattaccgaataaacgtaatacgataaatctaccgcataaaactaactcgtttaaataacaaaaacgtaaacacaccgtaccgataaacgtataaaacgtaaaaactatcgaacgactacatcgacgaacgcgacttcttcaccgacgcgtttataaacctacactacgaaaacatcaacgacgacgactacatacgcgaacttcgactacttacctacgaaccgatctaacgactcaaaccgaataacccaacgcgcgcgaaaacgcgaacccgacctactaaaactactcgcgaaaattaaccaactccgcgtcgtccacgcgaaaaatcaacgtcgacaaactcaaaacgacgataacgcgaaactcgtaattccacaccgacaccgccacgcaacgcacgccctactcgttctcttcgctatccaaaacgtaaccttactcgcgaatctacgccaaaacgctcattaaaacttcgcgaaacgcga

SEQ ID NO: 15719 - DNA, 516 bp, Artificial Sequence
  chemically treated genomic DNA (Homo sapiens) CpG-island No: 15719
tcgtttcggaataatgcgagagttttcggttgtcgggtgaacgtgatacggtgggtttatcgtataaagttaattcgtttagatggtagagacgtggatatatcgtgtcggtgaacgtatgaggcgtggaagttgtcggacgattatatcggcgggcgcggtttttttatcggcgcgtttgtgggtttgtattgcgaggatattagcggcgacggttgtatacgcggatttcgattatttatttacgagtcggtttaacggtttaggtcgggtagtttagcgcgcgcgagagcgcgagttcggtttgttgaagttgttcgcggaaattagttagtttcgcgtcgtttacgcgggaggttagcgtcgataggtttagggcggcgatgacgcgggattcgtggttttatatcggtatcgttacgtagcgtacgttttgttcgtttttttcgttgtttagggcgtagttttgttcgcgggtttgcgttagggcgtttattaaggtttcgcgagacgcga

SEQ ID NO: 15720 - DNA, 516 bp, Artificial Sequence
  chemically treated genomic DNA (Homo sapiens) CpG-island No: 15720
tcgcgtctcgcgaaaccttaataaacgccctaacgcaaacccgcgaacaaaactacgccctaaacaacgaaaaaaacgaacaaaacgtacgctacgtaacgataccgatataaaaccacgaatcccgcgtcatcgccgccctaaacctatcgacgctaacctcccgcgtaaacgacgcgaaactaactaatttccgcgaacaacttcaacaaaccgaactcgcgctctcgcgcgcgctaaactacccgacctaaaccgttaaaccgactcgtaaataaataatcgaaatccgcgtatacaaccgtcgccgctaatatcctcgcaatacaaacccacaaacgcgccgataaaaaaaccgcgcccgccgatataatcgtccgacaacttccacgcctcatacgttcaccgacacgatatatccacgtctctaccatctaaacgaattaactttatacgataaacccaccgtatcacgttcacccgacaaccgaaaactctcgcattattccgaaacga

SEQ ID NO: 15721 - DNA, 514 bp, Artificial Sequence
  chemically treated genomic DNA (Homo sapiens) CpG-island No: 15721
ttaaattatcgtattagttaatattcggttgtataatgtcgatatcggtttttgaaagcgtacgaaaagattgtagtgtgtcgtggtgtttatcgttggtgattattatttcgattggcgcgttgcgttttagttcgcgataatttttatattgttgtggcggtaggtatttttcgatttattttaggttatagggcgcgtaagcgtgggttagtttggtcgtatagtttacgttttgatttatttagtagtcgagtattaattagaaatttttatcgtattttttacgtatattcgcgattatagcggtatttttgcggattttcgtatcgttattatgtggtttttagtgcgtcggtattttgttatcgataaagtttattttttttgttagattcggacgcgtatttgtggcgtagaattgaattttattacgaatagcgtcgtttaaaagtttataaatcggaagttcgattattttgtcgaatagattttatagagttagatcgatata

SEQ ID NO: 15722 - DNA, 514 bp, Artificial Sequence
  chemically treated genomic DNA (Homo sapiens) CpG-island No: 15722
tatatcgatctaactctataaaatctattcgacaaaataatcgaacttccgatttataaacttttaaacgacgctattcgtaataaaattcaattctacgccacaaatacgcgtccgaatctaacaaaaaaaataaactttatcgataacaaaataccgacgcactaaaaaccacataataacgatacgaaaatccgcaaaaataccgctataatcgcgaatatacgtaaaaaatacgataaaaatttctaattaatactcgactactaaataaatcaaaacgtaaactatacgaccaaactaacccacgcttacgcgccctataacctaaaataaatcgaaaaatacctaccgccacaacaatataaaaattatcgcgaactaaaacgcaacgcgccaatcgaaataataatcaccaacgataaacaccacgacacactacaatcttttcgtacgctttcaaaaaccgatatcgacattatacaaccgaatattaactaatacgataatttaa

SEQ ID NO: 15723 - DNA, 514 bp, Artificial Sequence
  chemically treated genomic DNA (Homo sapiens) CpG-island No: 15723
tgtgtcgatttggttttgtgggatttgttcggtaaagtggtcgggttttcggtttataaatttttaggcggcgttgttcgtgatgagatttagttttacgttataggtgcgcgttcggatttggtaaaagagatgggttttatcggtggtaaaatgtcgacgtattgggggttatatgatggcgatgcggggattcgtaaagatgtcgttatggtcgcggatatgcgtgaaaaatgcggtgaggatttttggttaatgttcgattgttggatgagttaggacgtgaattatgcgattaaattggtttacgtttgcgcgttttataatttgaaatggatcgaagagtgtttgtcgttatagtagtatgaaagttatcgcgaattgaaacgtaacgcgttagtcggaatgatggttattagcggtgagtattacggtatattgtaattttttcgtacgtttttagaaatcggtatcgatattatgtagtcggatgttggttggtgcggtggtttaa

SEQ ID NO: 15724 - DNA, 514 bp, Artificial Sequence
  chemically treated genomic DNA (Homo sapiens) CpG-island No: 15724
ttaaaccaccgcaccaaccaacatccgactacataatatcgataccgatttctaaaaacgtacgaaaaaattacaatataccgtaatactcaccgctaataaccatcattccgactaacgcgttacgtttcaattcgcgataactttcatactactataacgacaaacactcttcgatccatttcaaattataaaacgcgcaaacgtaaaccaatttaatcgcataattcacgtcctaactcatccaacaatcgaacattaaccaaaaatcctcaccgcatttttcacgcatatccgcgaccataacgacatctttacgaatccccgcatcgccatcatataacccccaatacgtcgacattttaccaccgataaaacccatctcttttaccaaatccgaacgcgcacctataacgtaaaactaaatctcatcacgaacaacgccgcctaaaaatttataaaccgaaaacccgaccactttaccgaacaaatcccacaaaaccaaatcgacaca

SEQ ID NO: 15725 - DNA, 669 bp, Artificial Sequence
  chemically treated genomic DNA (Homo sapiens) CpG-island No: 15725
gtttgcggtcgtgtgttcgtttcgttcgggttgtggttttcgttcggtttgttcgtgatggatgggagtgtgcgatgtgttcgttgttttcgtgtgttttgttcggtgtcggttcggaatgatgggatggagatggtcgcggggagtttaggtcgtcggggttttcggagtaattattcgagtagacggagtatacggagtagcggtttcggtttcgttaacgttgtcgtcgggtgagtcggggttttcgttcggcgttcgagtttcgcgcgggggtgggaaggggttgcggaaaagttgggagtttcgggtgtcgttttgtcgcggggtcgcggaggggtcgggttgggaaggtcgcggggtcggggcgaggagggaggcggcgttggcggggggcgttgcgggcgtttatggcggcggtcgtcgggtaaggcgggcgtagcgttttaagggagcggtcggggtcggcgggtttggcgtcgcggtgttcgcggtagcgtcgttttgagtcggagaagttttttcgggtaataggtagggcggaaggtggggacgcgggggttgcgggcgacggggtcgagtcgtgggtttttttttgttggggagtggaggagtttggtgattattggcgcgagagtttttattttggtagcggttcgcggggttgtt

SEQ ID NO: 15726 - DNA, 669 bp, Artificial Sequence
  chemically treated genomic DNA (Homo sapiens) CpG-island No: 15726
aacaaccccgcgaaccgctaccaaaataaaaactctcgcgccaataatcaccaaactcctccactccccaacaaaaaaaaacccacgactcgaccccgtcgcccgcaacccccgcgtccccaccttccgccctacctattacccgaaaaaacttctccgactcaaaacgacgctaccgcgaacaccgcgacgccaaacccgccgaccccgaccgctcccttaaaacgctacgcccgccttacccgacgaccgccgccataaacgcccgcaacgccccccgccaacgccgcctccctcctcgccccgaccccgcgaccttcccaacccgacccctccgcgaccccgcgacaaaacgacacccgaaactcccaacttttccgcaaccccttcccacccccgcgcgaaactcgaacgccgaacgaaaaccccgactcacccgacgacaacgttaacgaaaccgaaaccgctactccgtatactccgtctactcgaataattactccgaaaaccccgacgacctaaactccccgcgaccatctccatcccatcattccgaaccgacaccgaacaaaacacacgaaaacaacgaacacatcgcacactcccatccatcacgaacaaaccgaacgaaaaccacaacccgaacgaaacgaacacacgaccgcaaac

SEQ ID NO: 15727 - DNA, 669 bp, Artificial Sequence
  chemically treated genomic DNA (Homo sapiens) CpG-island No: 15727
ggtaatttcgcgggtcgttgttagggtggaggttttcgcgttaatggttattaagtttttttattttttaataaagggaagtttacggttcggtttcgtcgttcgtagttttcgcgtttttatttttcgttttatttgttgttcgggaaagttttttcggtttagggcggcgttgtcgcggatatcgcggcgttaggttcgtcggtttcggtcgtttttttgaggcgttgcgttcgttttattcggcggtcgtcgttatgagcgttcgtagcgtttttcgttagcgtcgttttttttttcgtttcggtttcgcggtttttttagttcgattttttcgcggtttcgcgataaagcggtattcggggtttttaattttttcgtagtttttttttattttcgcgcggggttcgggcgtcgggcgggggtttcgatttattcggcggtagcgttggcggggtcggggtcgttgtttcgtgtatttcgtttgttcgggtggttgtttcgaggatttcgacggtttggatttttcgcgattatttttattttattatttcggatcgatatcgaataggatatacgaaggtaacgaatatatcgtatatttttatttattacgaatagatcgaacggaagttatagttcgaacgaaacgaatatacgatcgtaggt

SEQ ID NO: 15728 - DNA, 669 bp, Artificial Sequence
  chemically treated genomic DNA (Homo sapiens) CpG-island No: 15728
acctacgatcgtatattcgtttcgttcgaactataacttccgttcgatctattcgtaataaataaaaatatacgatatattcgttaccttcgtatatcctattcgatatcgatccgaaataataaaataaaaataatcgcgaaaaatccaaaccgtcgaaatcctcgaaacaaccacccgaacaaacgaaatacacgaaacaacgaccccgaccccgccaacgctaccgccgaataaatcgaaacccccgcccgacgcccgaaccccgcgcgaaaataaaaaaaaactacgaaaaaattaaaaaccccgaataccgctttatcgcgaaaccgcgaaaaaatcgaactaaaaaaaccgcgaaaccgaaacgaaaaaaaaaacgacgctaacgaaaaacgctacgaacgctcataacgacgaccgccgaataaaacgaacgcaacgcctcaaaaaaacgaccgaaaccgacgaacctaacgccgcgatatccgcgacaacgccgccctaaaccgaaaaaactttcccgaacaacaaataaaacgaaaaataaaaacgcgaaaactacgaacgacgaaaccgaaccgtaaacttccctttattaaaaaataaaaaaacttaataaccattaacgcgaaaacctccaccctaacaacgacccgcgaaattacc

SEQ ID NO: 15729 - DNA, 660 bp, Artificial Sequence
  chemically treated genomic DNA (Homo sapiens) CpG-island No: 15729
tcgttttgtattttgtcggtaaagatacgttcgtaacgtagttggtggttttattttttaaagatgtgatgtcgtagttggggttgttttatattttgttggtttatttcgttattgtgggtattggtaacgcggtaaatttgatcgatggtttcgacggtttggtaattatgtcgatcgtatttgtcgtcggtggttttgcgttggtggcgtgggcgatcggtaatatgaattttgttagttatttgtatatatcgtatttgcgatacgtcggggaattggttattgtttgtatcgcgatagtcggggtaggattggttttttgttggtttaatatttattcggcgtaggtttttatgggcgatgtaggttcgttggcgttaggtggtgcgttaggtattatcgtcgtattgttacgttaggaatttttgttggtgattatggggggcgtgttcgtggtagaaacgttttttgttattttgtaggtcggtttttttaaattgcgcggataacgtattttttcgtatggtatcgatttattattattatgaattgaaaggttggtcggaatcgcgcgttattgtgcgtttttggattatttcgttgatgttggttttgattggtttggttacgttgaaggtacgttaattatggttgatt

SEQ ID NO: 15730 - DNA, 660 bp, Artificial Sequence
  chemically treated genomic DNA (Homo sapiens) CpG-island No: 15730
aatcaaccataattaacgtaccttcaacgtaaccaaaccaatcaaaaccaacatcaacgaaataatccaaaaacgcacaataacgcgcgattccgaccaacctttcaattcataataataataaatcgataccatacgaaaaaatacgttatccgcgcaatttaaaaaaaccgacctacaaaataacaaaaaacgtttctaccacgaacacgccccccataatcaccaacaaaaattcctaacgtaacaatacgacgataatacctaacgcaccacctaacgccaacgaacctacatcgcccataaaaacctacgccgaataaatattaaaccaacaaaaaaccaatcctaccccgactatcgcgatacaaacaataaccaattccccgacgtatcgcaaatacgatatatacaaataactaacaaaattcatattaccgatcgcccacgccaccaacgcaaaaccaccgacgacaaatacgatcgacataattaccaaaccgtcgaaaccatcgatcaaatttaccgcgttaccaatacccacaataacgaaataaaccaacaaaatataaaacaaccccaactacgacatcacatctttaaaaaataaaaccaccaactacgttacgaacgtatctttaccgacaaaatacaaaacga

SEQ ID NO: 15731 - DNA, 660 bp, Artificial Sequence
  chemically treated genomic DNA (Homo sapiens) CpG-island No: 15731
aattagttatgattaacgtatttttagcgtggttagattaattagaattagtattagcgaaataatttagaaacgtataatgacgcgcggtttcggttagttttttagtttatagtggtgatgaatcggtgttatgcgggaaaatacgttgttcgcgtagtttaaaggagtcgatttgtaggatgatagaaagcgtttttattacgaatacgttttttataattattagtaggaatttttgacgtagtagtacggcgataatgtttaacgtattatttaacgttagcgaatttatatcgtttataaagatttgcgtcggataggtgttaaattaataggaagttagttttgtttcgattatcgcggtatagataataattagtttttcggcgtgtcgtagatacggtatatgtaagtagttggtaaagtttatattgtcggtcgtttacgttattagcgtaaaattatcggcgataaatacggtcggtataattgttaggtcgtcgagattatcggttaggtttatcgcgttgttagtatttataatgacgaagtaagttagtagaatgtagaatagttttagttgcggtattatatttttaaagaatgggattattagttgcgttgcgggcgtgtttttgtcggtaaggtatagggcga

SEQ ID NO: 15732 - DNA, 660 bp, Artificial Sequence
  chemically treated genomic DNA (Homo sapiens) CpG-island No: 15732
tcgccctataccttaccgacaaaaacacgcccgcaacgcaactaataatcccattctttaaaaatataataccgcaactaaaactattctacattctactaacttacttcgtcattataaatactaacaacgcgataaacctaaccgataatctcgacgacctaacaattataccgaccgtatttatcgccgataattttacgctaataacgtaaacgaccgacaatataaactttaccaactacttacatataccgtatctacgacacgccgaaaaactaattattatctataccgcgataatcgaaacaaaactaacttcctattaatttaacacctatccgacgcaaatctttataaacgatataaattcgctaacgttaaataatacgttaaacattatcgccgtactactacgtcaaaaattcctactaataattataaaaaacgtattcgtaataaaaacgctttctatcatcctacaaatcgactcctttaaactacgcgaacaacgtattttcccgcataacaccgattcatcaccactataaactaaaaaactaaccgaaaccgcgcgtcattatacgtttctaaattatttcgctaatactaattctaattaatctaaccacgctaaaaatacgttaatcataactaatt

SEQ ID NO: 15733 - DNA, 1035 bp, Artificial Sequence
  chemically treated genomic DNA (Homo sapiens) CpG-island No: 15733
  unsure (623)
gtaggtttcgcggtcgatgcgtatcggtgcgaagtcgggcggtagcgcgtcgttggttattatatgcgcggtagtgatgtgggttttgtcgtcgcggttgtcgaatagcgttagtttattcgagcgtacgttgacggcgtatagcgttagtcgcgtgtcgtcggaggcggtgaggtcgaagtcgacgaggtcgtttagcgtttgggttagcggcgtggtgtcgtagaagtttagttcgtttaggggcgtttcgcggtttaggttttaggttagcggttcgcgcggtcggaagaagtcgggtacgtcgtttattagggtttgttaggtttgtaggttcgcgttgaaggcgttcgtcgggtcggttatcggtaggttcggtcgcgttacgcgcgattagaattcgcgtagcgtcgcgaggcggtcggtcggtttgttgtcggcgattagcgtcgcgttgatggcgtcgatggaggtgtcgattagttagttcggcgcgatgtcgtcggcgtttagcgtttcggttatatcggtttggtaggcgtttagggtattatcgttttggaagacgtagacggtttggggagggcgtcgcgtcgttattaggtgggttgtagttgtaagtngtcgtcgtagggaacggcgcggaagaacggtagggtttcgacggtcgcggtatgcgcggcgagtcgcgggaagttttcggtcggtatcgagttcgggtagtacgaattgcgtgaaagtttaggttacgtcgatcgtgagggtcgtttggtcgagatcggtttcgttcgtgtttagcggttgcgcggttagttcggcgttaagggcgcggtaggcggcgtcgagttggtcgttgacgcgttcgatttagggttggtggcgtttttcggtcgggcgtaggtcgcgttcgtagacgatttgggcgtttttttcgtaggtcgttagcgttaggtcgatgaggcgtagttcgcgtagtagcgcggcgggttgggcgggtattaggttgcggtcgtttagggtttcgacgtaggttag

SEQ ID NO: 15734 - DNA, 1035 bp, Artificial Sequence
  chemically treated genomic DNA (Homo sapiens) CpG-island No: 15734
  unsure (413)
ctaacctacgtcgaaaccctaaacgaccgcaacctaatacccgcccaacccgccgcgctactacgcgaactacgcctcatcgacctaacgctaacgacctacgaaaaaaacgcccaaatcgtctacgaacgcgacctacgcccgaccgaaaaacgccaccaaccctaaatcgaacgcgtcaacgaccaactcgacgccgcctaccgcgcccttaacgccgaactaaccgcgcaaccgctaaacacgaacgaaaccgatctcgaccaaacgaccctcacgatcgacgtaacctaaactttcacgcaattcgtactacccgaactcgataccgaccgaaaacttcccgcgactcgccgcgcataccgcgaccgtcgaaaccctaccgttcttccgcgccgttccctacgacgacnacttacaactacaacccacctaataacgacgcgacgccctccccaaaccgtctacgtcttccaaaacgataataccctaaacgcctaccaaaccgatataaccgaaacgctaaacgccgacgacatcgcgccgaactaactaatcgacacctccatcgacgccatcaacgcgacgctaatcgccgacaacaaaccgaccgaccgcctcgcgacgctacgcgaattctaatcgcgcgtaacgcgaccgaacctaccgataaccgacccgacgaacgccttcaacgcgaacctacaaacctaacaaaccctaataaacgacgtacccgacttcttccgaccgcgcgaaccgctaacctaaaacctaaaccgcgaaacgcccctaaacgaactaaacttctacgacaccacgccgctaacccaaacgctaaacgacctcgtcgacttcgacctcaccgcctccgacgacacgcgactaacgctatacgccgtcaacgtacgctcgaataaactaacgctattcgacaaccgcgacgacaaaacccacatcactaccgcgcatataataaccaacgacgcgctaccgcccgacttcgcaccgatacgcatcgaccgcgaaacctac

SEQ ID NO: 15735 - DNA, 1035 bp, Artificial Sequence
  chemically treated genomic DNA (Homo sapiens) CpG-island No: 15735
  unsure (413)
ttggtttacgtcgaggttttgggcggtcgtagtttgatgttcgtttagttcgtcgcgttgttgcgcgagttgcgttttatcggtttggcgttggcggtttgcgagaagagcgtttagatcgtttacgagcgcggtttgcgttcggtcgagaagcgttattagttttggatcgagcgcgttagcggttagttcgacgtcgtttatcgcgtttttgacgtcgaattggtcgcgtaatcgttggatacgggcgaggtcggtttcggttaggcggtttttacggtcggcgtggtttggatttttacgtagttcgtgttgttcgagttcggtgtcggtcgagggtttttcgcggttcgtcgcgtatgtcgcggtcgtcgaggttttgtcgttttttcgcgtcgttttttgcgacgatngtttgtagttgtagtttatttgatggcgacgcgacgttttttttagatcgtttacgttttttagggcggtggtgttttgggcgtttattaggtcggtgtggtcgaggcgttggacgtcggcggtatcgcgtcggattggttggtcggtatttttatcggcgttattaacgcggcgttgatcgtcggtaataagtcggtcgatcgtttcgcggcgttgcgcgagttttggtcgcgcgtgacgcggtcgggtttgtcgatggtcggttcggcgaacgtttttagcgcgggtttgtagatttggtagattttggtgggcggcgtgttcggtttttttcggtcgcgcgggtcgttggtttgggatttgaatcgcgaggcgtttttgaacgaattgggtttttacgatattacgtcgttggtttagacgttgaacgatttcgtcgatttcgattttatcgttttcggcgatacgcggttgacgttgtgcgtcgttaacgtgcgttcgggtgagttggcgttgttcgataatcgcgacggtaagatttatattattgtcgcgtatgtgatggttagcggcgcgttgtcgttcggtttcgtatcggtgcgtatcggtcgcgaggtttat

SEQ ID NO: 15736 - DNA, 1035 bp, Artificial Sequence
  chemically treated genomic DNA (Homo sapiens) CpG-island No: 15736
  unsure (623)
ataaacctcgcgaccgatacgcaccgatacgaaaccgaacgacaacgcgccgctaaccatcacatacgcgacaataatataaatcttaccgtcgcgattatcgaacaacgccaactcacccgaacgcacgttaacgacgcacaacgtcaaccgcgtatcgccgaaaacgataaaatcgaaatcgacgaaatcgttcaacgtctaaaccaacgacgtaatatcgtaaaaacccaattcgttcaaaaacgcctcgcgattcaaatcccaaaccaacgacccgcgcgaccgaaaaaaaccgaacacgccgcccaccaaaatctaccaaatctacaaacccgcgctaaaaacgttcgccgaaccgaccatcgacaaacccgaccgcgtcacgcgcgaccaaaactcgcgcaacgccgcgaaacgatcgaccgacttattaccgacgatcaacgccgcgttaataacgccgataaaaataccgaccaaccaatccgacgcgataccgccgacgtccaacgcctcgaccacaccgacctaataaacgcccaaaacaccaccgccctaaaaaacgtaaacgatctaaaaaaaacgtcgcgtcgccatcaaataaactacaactacaaacnatcgtcgcaaaaaacgacgcgaaaaaacgacaaaacctcgacgaccgcgacatacgcgacgaaccgcgaaaaaccctcgaccgacaccgaactcgaacaacacgaactacgtaaaaatccaaaccacgccgaccgtaaaaaccgcctaaccgaaaccgacctcgcccgtatccaacgattacgcgaccaattcgacgtcaaaaacgcgataaacgacgtcgaactaaccgctaacgcgctcgatccaaaactaataacgcttctcgaccgaacgcaaaccgcgctcgtaaacgatctaaacgctcttctcgcaaaccgccaacgccaaaccgataaaacgcaactcgcgcaacaacgcgacgaactaaacgaacatcaaactacgaccgcccaaaacctcgacgtaaaccaa

SEQ ID NO: 15737 - DNA, 855 bp, Artificial Sequence
  chemically treated genomic DNA (Homo sapiens) CpG-island No: 15737
tgaaaaattaggatggcgcggtggtgggttgtatcgtattgtgtatcgaaatcggtgaagtggtttattttaaagttcgcgttatcgtgttggcgattggcggagtagggcgtatttattagtttattattaacgtttatattaatatcggcgacggtgtcggtatggttattcgtgtcggcgtatcggtgtaggatatggaaatgtggtagttttattcgatcggtattgtcggtgcgggcgtattggttatcgaaggttgtcgtggtgaaggcggttatttgttgaataaatatggttatcgtagtttgtaagattacggtatgggttcggaaatttcgttgggcgagtcgaaaaataaatatatggaattgggtttacgcgataaagttttttaggttttttggtacgaatggcgtaaaggtaatattatttttacgtcgcgtggcgatgtggtttatttcgatttgcgttatttcggcgagaaaaaattgtatgaacgtttgtcgtttatttgcgaattggcgaaagcgtacgttggcgtcgattcggttaaagaatcgatttcggtacgttcgatcgtatattatattatgggcggtatcgaaatcgattagaattgtgaaattcgtattaaaggtttgttcgtcgtgggtgaatgtttttttgttggtttgtacggtgtaaatcgtttgggttttaattttttggcggaattggtggttttcggtcgtttggtcggtgaataagcgatagagcgtgtagtaattgtcggtaatggtaacgaagcggtaattgaagcgtaggtagttggcgttgaataacgtttgaaagatttggttaattaggatggcg

SEQ ID NO: 15738 - DNA, 855 bp, Artificial Sequence
  chemically treated genomic DNA (Homo sapiens) CpG-island No: 15738
cgccatcctaattaaccaaatctttcaaacgttattcaacgccaactacctacgcttcaattaccgcttcgttaccattaccgacaattactacacgctctatcgcttattcaccgaccaaacgaccgaaaaccaccaattccgccaaaaaattaaaacccaaacgatttacaccgtacaaaccaacaaaaaaacattcacccacgacgaacaaacctttaatacgaatttcacaattctaatcgatttcgataccgcccataatataatatacgatcgaacgtaccgaaatcgattctttaaccgaatcgacgccaacgtacgctttcgccaattcgcaaataaacgacaaacgttcatacaattttttctcgccgaaataacgcaaatcgaaataaaccacatcgccacgcgacgtaaaaataatattacctttacgccattcgtaccaaaaaacctaaaaaactttatcgcgtaaacccaattccatatatttatttttcgactcgcccaacgaaatttccgaacccataccgtaatcttacaaactacgataaccatatttattcaacaaataaccgccttcaccacgacaaccttcgataaccaatacgcccgcaccgacaataccgatcgaataaaactaccacatttccatatcctacaccgatacgccgacacgaataaccataccgacaccgtcgccgatattaatataaacgttaataataaactaataaatacgccctactccgccaatcgccaacacgataacgcgaactttaaaataaaccacttcaccgatttcgatacacaatacgatacaacccaccaccgcgccatcctaatttttca

SEQ ID NO: 15739 - DNA, 855 bp, Artificial Sequence
  chemically treated genomic DNA (Homo sapiens) CpG-island No: 15739
cgttattttggttaattagattttttagacgttgtttaacgttagttgtttgcgttttaattgtcgtttcgttgttattatcggtagttgttgtacgttttgtcgtttgtttatcggttagacggtcgaagattattagtttcgttagggagttagaatttagacggtttgtatcgtgtagattaatagaggaatatttatttacggcgaatagatttttaatgcgggttttatagttttgatcggtttcgatatcgtttatggtgtagtgtgcggtcggacgtatcggaatcggttttttaatcggatcgacgttaacgtacgttttcgttagttcgtagatgaacggtagacgtttatgtagttttttttcgtcgaggtgacgtaagtcgagataaattatatcgttacgcggcgtggagatggtgttgtttttacgttattcgtgttagaaggtttgagagattttgtcgcgtggatttagttttatatatttgtttttcggttcgtttagcggagttttcgggtttatgtcgtaattttgtagattacggtagttatgtttgtttagtagataatcgtttttattacggtaattttcggtgattagtacgttcgtatcggtaatgtcggtcgggtggaattgttatatttttatattttgtatcggtacgtcggtacggatagttatgtcgatatcgtcgtcggtgttaatgtgggcgttggtggtggattgataaatacgttttgtttcgttagtcgttagtacggtagcgcgggttttgaaataaattattttatcggtttcgatgtatagtgcggtataatttattatcgcgttattttggtttttta

SEQ ID NO: 15740 - DNA, 855 bp, Artificial Sequence
  chemically treated genomic DNA (Homo sapiens) CpG-island No: 15740
taaaaaaccaaaataacgcgataataaattataccgcactatacatcgaaaccgataaaataatttatttcaaaacccgcgctaccgtactaacgactaacgaaacaaaacgtatttatcaatccaccaccaacgcccacattaacaccgacgacgatatcgacataactatccgtaccgacgtaccgatacaaaatataaaaatataacaattccacccgaccgacattaccgatacgaacgtactaatcaccgaaaattaccgtaataaaaacgattatctactaaacaaacataactaccgtaatctacaaaattacgacataaacccgaaaactccgctaaacgaaccgaaaaacaaatatataaaactaaatccacgcgacaaaatctctcaaaccttctaacacgaataacgtaaaaacaacaccatctccacgccgcgtaacgatataatttatctcgacttacgtcacctcgacgaaaaaaaactacataaacgtctaccgttcatctacgaactaacgaaaacgtacgttaacgtcgatccgattaaaaaaccgattccgatacgtccgaccgcacactacaccataaacgatatcgaaaccgatcaaaactataaaacccgcattaaaaatctattcgccgtaaataaatattcctctattaatctacacgatacaaaccgtctaaattctaactccctaacgaaactaataatcttcgaccgtctaaccgataaacaaacgacaaaacgtacaacaactaccgataataacaacgaaacgacaattaaaacgcaaacaactaacgttaaacaacgtctaaaaaatctaattaaccaaaataacg

SEQ ID NO: 15741 - DNA, 788 bp, Artificial Sequence
  chemically treated genomic DNA (Homo sapiens) CpG-island No: 15741
gtagaggtggagtcgcgtcgtattcgggtatttttcggcgtgggcgttttcggcgggcgggttttggtcgagggcgttcggcggtttggaacggtgagtcgggtgtcgggtttgttacgtagtcgtagagatttagtttcgtcggcgggcggtaggaagggaggcgacgttttttggagcgcggtaggaattcgttcggttcgttttttagttcgtttagtcgcgtcggttttagaagtggcgaaagtcgtagtcgagtttaggttacgtcgaagttttgtttttttaagggggagttttgaaacggcgtttgggttttatgtttgtatcgttcgcgggaaggaaattttatgttgtaataaagtttttttcgcgtttttttttttttttttttttttagaatttggtttttttttttttcggagttcgcggggattttttttttttattttttttttttttttcgcgtttcgaattcggtttagtcgggggggaggtcgggcgttcgggttagagttcgtcggagcggagcgcgttcggttttatggatagttcggtcgttattatttagattagtaaggaggaggttcggggtcgttgcggggtaaaggtatcggggttgcggggagggggtcgaagtcggggcgtcgtgggaggagagaaggggtcgggattttttttaggggagttcgtcgcgcgttcgggcggtcgttttagttgtgttcgaagtttttagttcgagagggagtagggagagagtttgaatttagaggaggtttagagacgcg

SEQ ID NO: 15742 - DNA, 788 bp, Artificial Sequence
  chemically treated genomic DNA (Homo sapiens) CpG-island No: 15742
cgcgtctctaaacctcctctaaattcaaactctctccctactccctctcgaactaaaaacttcgaacacaactaaaacgaccgcccgaacgcgcgacgaactcccctaaaaaaaatcccgaccccttctctcctcccacgacgccccgacttcgaccccctccccgcaaccccgatacctttaccccgcaacgaccccgaacctcctccttactaatctaaataataacgaccgaactatccataaaaccgaacgcgctccgctccgacgaactctaacccgaacgcccgacctcccccccgactaaaccgaattcgaaacgcgaaaaaaaaaaaaaaaataaaaaaaaaaaatccccgcgaactccgaaaaaaaaaaaaaccaaattctaaaaaaaaaaaaaaaaaaaaaaacgcgaaaaaaactttattacaacataaaatttccttcccgcgaacgatacaaacataaaacccaaacgccgtttcaaaactcccccttaaaaaaacaaaacttcgacgtaacctaaactcgactacgactttcgccacttctaaaaccgacgcgactaaacgaactaaaaaacgaaccgaacgaattcctaccgcgctccaaaaaacgtcgcctcccttcctaccgcccgccgacgaaactaaatctctacgactacgtaacaaacccgacacccgactcaccgttccaaaccgccgaacgccctcgaccaaaacccgcccgccgaaaacgcccacgccgaaaaatacccgaatacgacgcgactccacctctac

SEQ ID NO: 15743 - DNA, 788 bp, Artificial Sequence
  chemically treated genomic DNA (Homo sapiens) CpG-island No: 15743
cgcgtttttgagttttttttgagtttaaattttttttttgttttttttcgggttgggagtttcgggtatagttaaggcggtcgttcgggcgcgcggcgagtttttttggggaagatttcggttttttttttttttttacggcgtttcggtttcggtttttttttcgtagtttcggtatttttgtttcgtagcggtttcgagttttttttttgttgatttgagtaatgacggtcgagttgtttatggggtcgggcgcgtttcgtttcggcggattttggttcgggcgttcggtttttttttcggttgggtcgaattcggggcgcgggggggaggggaggggtgggagggagggattttcgcgagtttcggagggaaggggagttaggttttaggggggagggggagggagggggcgcggaggaaattttgttataatatggagtttttttttcgcgagcgatgtaaatatggaatttaggcgtcgttttaaggtttttttttaaaagggtaaggtttcggcgtgatttggattcggttgcggttttcgttatttttgggatcggcgcggttaggcggattgggaggcgggtcgggcgggtttttgtcgcgttttagggggcgtcgtttttttttttgtcgttcgtcggcggggttgagtttttgcggttgcgtggtaggttcggtattcggtttatcgttttaggtcgtcgagcgttttcggttaaggttcgttcgtcgggagcgtttacgtcggggagtgttcgagtgcggcgcggttttatttttgt

SEQ ID NO: 15744 - DNA, 788 bp, Artificial Sequence
  chemically treated genomic DNA (Homo sapiens) CpG-island No: 15744
acaaaaataaaaccgcgccgcactcgaacactccccgacgtaaacgctcccgacgaacgaaccttaaccgaaaacgctcgacgacctaaaacgataaaccgaataccgaacctaccacgcaaccgcaaaaactcaaccccgccgacgaacgacaaaaaaaaaaacgacgccccctaaaacgcgacaaaaacccgcccgacccgcctcccaatccgcctaaccgcgccgatcccaaaaataacgaaaaccgcaaccgaatccaaatcacgccgaaaccttacccttttaaaaaaaaaccttaaaacgacgcctaaattccatatttacatcgctcgcgaaaaaaaaactccatattataacaaaatttcctccgcgccccctccctccccctcccccctaaaacctaactccccttccctccgaaactcgcgaaaatccctccctcccacccctcccctcccccccgcgccccgaattcgacccaaccgaaaaaaaaaccgaacgcccgaaccaaaatccgccgaaacgaaacgcgcccgaccccataaacaactcgaccgtcattactcaaatcaacaaaaaaaaaactcgaaaccgctacgaaacaaaaataccgaaactacgaaaaaaaaaccgaaaccgaaacgccgtaaaaaaaaaaaaaaaaccgaaatcttccccaaaaaaactcgccgcgcgcccgaacgaccgccttaactatacccgaaactcccaacccgaaaaaaaacaaaaaaaaaatttaaactcaaaaaaaactcaaaaacgcg

SEQ ID NO: 15745 - DNA, 840 bp, Artificial Sequence
  chemically treated genomic DNA (Homo sapiens) CpG-island No: 15745
atcgtggcgtatgcgtcgttagttattttttttttttttaggtaaaagttattcgtttcgagagagacgagtagcgattggtcgcgattttgggatatgtaaatttaggtcggtggggcggggcgcggcgcgagagcgcgaaatgcggtagtgaacggtcgggggcggtaggcggcgcgagcgttcgcgttgggagcgcgtttttcgcgcgtttttttcgggtcggggcggtggggatcgggtttggcggcggttttaggcgcggtttgggttacgcggggataatggaggggtggtcgtcgcggtcggggggaggggcggtatttcgagacggcggggtttcggggtcgtacgtattcgtttgcgcgcgtttcggtttttgttcgtttgcgcgttaattcgcggaggtcgtcgcggtagtttcgcgtggggtgattgcgtcgagttaatggtttcgttggcggcgagcgcgcgattgtatcgtcggtcggcgtcgcgtagttcgggagggttttcgggtttttttttttcgtcgttgttggcgttgaattcgtttggttttcgttttggcgcggttgaggattggaacggcggcgggcgggaattcggcggggagggttcggttacgttcggtttcggagagggcggttgtttttcgggagcgttcgggttcggtttttgggggcggggaatgggcgcgggtcggggggaggttgtagagacgggatttggttcgcgtggaggcgtcgggttgtaggaaatgagagttttgaggaaatttttttaatttcgagtcgggaaggaggtattcggggaaggttgcggggtatgggaaatttt

SEQ ID NO: 15746 - DNA, 840 bp, Artificial Sequence
  chemically treated genomic DNA (Homo sapiens) CpG-island No: 15746
aaaatttcccataccccgcaaccttccccgaatacctccttcccgactcgaaattaaaaaaatttcctcaaaactctcatttcctacaacccgacgcctccacgcgaaccaaatcccgtctctacaacctccccccgacccgcgcccattccccgcccccaaaaaccgaacccgaacgctcccgaaaaacaaccgccctctccgaaaccgaacgtaaccgaaccctccccgccgaattcccgcccgccgccgttccaatcctcaaccgcgccaaaacgaaaaccaaacgaattcaacgccaacaacgacgaaaaaaaaaaacccgaaaaccctcccgaactacgcgacgccgaccgacgatacaatcgcgcgctcgccgccaacgaaaccattaactcgacgcaatcaccccacgcgaaactaccgcgacgacctccgcgaattaacgcgcaaacgaacaaaaaccgaaacgcgcgcaaacgaatacgtacgaccccgaaaccccgccgtctcgaaataccgcccctccccccgaccgcgacgaccacccctccattatccccgcgtaacccaaaccgcgcctaaaaccgccgccaaacccgatccccaccgccccgacccgaaaaaaacgcgcgaaaaacgcgctcccaacgcgaacgctcgcgccgcctaccgcccccgaccgttcactaccgcatttcgcgctctcgcgccgcgccccgccccaccgacctaaatttacatatcccaaaatcgcgaccaatcgctactcgtctctctcgaaacgaataacttttacctaaaaaaaaaaaaaataactaacgacgcatacgccacgat

SEQ ID NO: 15747 - DNA, 840 bp, Artificial Sequence
  chemically treated genomic DNA (Homo sapiens) CpG-island No: 15747
ggggttttttatatttcgtagtttttttcggatgtttttttttcggttcggagttggaagggtttttttagggtttttattttttgtagttcggcgtttttacgcgggttagatttcgtttttgtagttttttttcggttcgcgtttatttttcgtttttaggagtcgggttcggacgttttcgggaagtagtcgtttttttcggggtcgggcgtggtcgggtttttttcgtcgggttttcgttcgtcgtcgttttagtttttagtcgcgttagggcgggggttaggcgagtttagcgttagtaacggcgggggaggagggttcgggagttttttcgggttgcgcggcgtcggtcggcggtgtagtcgcgcgttcgtcgttagcgaagttattggttcggcgtagttattttacgcggggttgtcgcggcggttttcgcggattggcgcgtaggcgggtagggatcggggcgcgcgtaggcgagtgcgtgcggtttcgaagtttcgtcgtttcggggtgtcgttttttttttcggtcgcgacgattatttttttattgttttcgcgtggtttaggtcgcgtttggggtcgtcgttaaattcggtttttatcgtttcggttcgaagaaagcgcgcgaaaggcgcgtttttagcgcgggcgttcgcgtcgtttgtcgttttcggtcgtttattgtcgtatttcgcgttttcgcgtcgcgtttcgttttatcggtttaaatttgtatattttaggatcgcggttaatcgttgttcgtttttttcgaagcggatggtttttgtttgagaggaaagggagtggttggcggcgtatgcgttacggt

SEQ ID NO: 15748 - DNA, 840 bp, Artificial Sequence
  chemically treated genomic DNA (Homo sapiens) CpG-island No: 15748
accgtaacgcatacgccgccaaccactccctttcctctcaaacaaaaaccatccgcttcgaaaaaaacgaacaacgattaaccgcgatcctaaaatatacaaatttaaaccgataaaacgaaacgcgacgcgaaaacgcgaaatacgacaataaacgaccgaaaacgacaaacgacgcgaacgcccgcgctaaaaacgcgcctttcgcgcgctttcttcgaaccgaaacgataaaaaccgaatttaacgacgaccccaaacgcgacctaaaccacgcgaaaacaataaaaaaataatcgtcgcgaccgaaaaaaaaaacgacaccccgaaacgacgaaacttcgaaaccgcacgcactcgcctacgcgcgccccgatccctacccgcctacgcgccaatccgcgaaaaccgccgcgacaaccccgcgtaaaataactacgccgaaccaataacttcgctaacgacgaacgcgcgactacaccgccgaccgacgccgcgcaacccgaaaaaactcccgaaccctcctcccccgccgttactaacgctaaactcgcctaacccccgccctaacgcgactaaaaactaaaacgacgacgaacgaaaacccgacgaaaaaaacccgaccacgcccgaccccgaaaaaaacgactacttcccgaaaacgtccgaacccgactcctaaaaacgaaaaataaacgcgaaccgaaaaaaaactacaaaaacgaaatctaacccgcgtaaaaacgccgaactacaaaaaataaaaaccctaaaaaaacccttccaactccgaaccgaaaaaaaaacatccgaaaaaaactacgaaatataaaaaacccc

SEQ ID NO: 15749 - DNA, 639 bp, Artificial Sequence
  chemically treated genomic DNA (Homo sapiens) CpG-island No: 15749
tcgtcgtgttattggttttgcggcgcgggcgtagggcgtacgggatttcgtagtaggcgtttcgttgtagatgtcgcggtagttgttgtaggtgtggttgcggttgagcgggtagtagtggtcgcggagtttcggggtcgggagtagaggagaagtcgtcgggggaattcgtagtcgttcgtcgtacgttgttgtcgttattcgggtgtttttttagtattttcgtgttgtttcggaattcggggtaaaggtaaggaagaaagttgggtttattagtggtgcgcgcggcgttcgtttcggtttcggcgtttagcggttttgttttagtttcgtttttttcggagcgtttagattagatgcggttatagcgtattagttttttatttgagattagaacgggtttcggtaattgagtatgtttagtgtcgtttcgcgagtttcgcgtagggagcggcgttgacgagattttatttttttaggttttggtagcggttgcgcgagggaaggttggagggattcggcggggagggggtcgaatgggagaaaggcggggtcggggggtgggggtcgggtagaaggaggcgggtcgcgtttttagggcgatttttgtaggtggaggcggtagggtttgcgggaggt

SEQ ID NO: 15750 - DNA, 639 bp, Artificial Sequence
  chemically treated genomic DNA (Homo sapiens) CpG-island No: 15750
acctcccgcaaaccctaccgcctccacctacaaaaatcgccctaaaaacgcgacccgcctccttctacccgacccccaccccccgaccccgcctttctcccattcgaccccctccccgccgaatccctccaaccttccctcgcgcaaccgctaccaaaacctaaaaaaataaaatctcgtcaacgccgctccctacgcgaaactcgcgaaacgacactaaacatactcaattaccgaaacccgttctaatctcaaataaaaaactaatacgctataaccgcatctaatctaaacgctccgaaaaaaacgaaactaaaacaaaaccgctaaacgccgaaaccgaaacgaacgccgcgcgcaccactaataaacccaactttcttccttacctttaccccgaattccgaaacaacacgaaaatactaaaaaaacacccgaataacgacaacaacgtacgacgaacgactacgaattcccccgacgacttctcctctactcccgaccccgaaactccgcgaccactactacccgctcaaccgcaaccacacctacaacaactaccgcgacatctacaacgaaacgcctactacgaaatcccgtacgccctacgcccgcgccgcaaaaccaataacacgacga

SEQ ID NO: 15751 - DNA, 639 bp, Artificial Sequence
  chemically treated genomic DNA (Homo sapiens) CpG-island No: 15751
gtttttcgtaggttttgtcgtttttatttgtaggggtcgttttgggagcgcggttcgtttttttttgttcggtttttatttttcggtttcgttttttttttattcggtttttttttcgtcgggtttttttagttttttttcgcgtagtcgttgttaaagtttggagaagtggaatttcgttagcgtcgttttttgcgcgggattcgcggaacggtattgagtatgtttagttgtcggagttcgttttggttttaagtaggaagttagtgcgttgtaatcgtatttgatttgggcgtttcgggaagggcgagattggagtagagtcgttgggcgtcggagtcgaggcgagcgtcgcgcgtattattggtgagtttagtttttttttttgtttttgtttcggatttcggggtagtacgagagtgttggggaaatattcgggtagcggtagtagcgtgcggcgagcggttgcgggttttttcggcggttttttttttgttttcggtttcggggtttcgcggttattgttgttcgtttagtcgtagttatatttgtagtagttgtcgcggtatttgtagcggggcgtttgttgcggagtttcgtgcgttttgcgttcgcgtcgtagggttagtggtacggcga

SEQ ID NO: 15752 - DNA, 639 bp, Artificial Sequence
  chemically treated genomic DNA (Homo sapiens) CpG-island No: 15752
tcgccgtaccactaaccctacgacgcgaacgcaaaacgcacgaaactccgcaacaaacgccccgctacaaataccgcgacaactactacaaatataactacgactaaacgaacaacaataaccgcgaaaccccgaaaccgaaaacaaaaaaaaaaccgccgaaaaaacccgcaaccgctcgccgcacgctactaccgctacccgaatatttccccaacactctcgtactaccccgaaatccgaaacaaaaacaaaaaaaaaaactaaactcaccaataatacgcgcgacgctcgcctcgactccgacgcccaacgactctactccaatctcgcccttcccgaaacgcccaaatcaaatacgattacaacgcactaacttcctacttaaaaccaaaacgaactccgacaactaaacatactcaataccgttccgcgaatcccgcgcaaaaaacgacgctaacgaaattccacttctccaaactttaacaacgactacgcgaaaaaaaactaaaaaaacccgacgaaaaaaaaaccgaataaaaaaaaaacgaaaccgaaaaataaaaaccgaacaaaaaaaaacgaaccgcgctcccaaaacgacccctacaaataaaaacgacaaaacctacgaaaaac

SEQ ID NO: 15753 - DNA, 658 bp, Artificial Sequence
  chemically treated genomic DNA (Homo sapiens) CpG-island No: 15753
gaaaatatcgttttcgggacgtgtttgggtttgagtagtcgtgacgtgtaggcgaatcgcggttttggttggagtttcgtggagtttttttttcgttagtttttttttcgttttttcgtcgggattttttttttttttatttcgcggtttttttcgtttttttttttatatattcgttcgcgttttcggtaggtagaattttaggaagtcgtagcggtcgcgtcgcgcgagtcgagtttttggcgggcggcggggcgtatcgtagttgtgtataagaaggggcgcgcggtattcgggacgcgcgcgtatacgagtacgcgggaggtcgtcgcgcggacgcgttttcgggatacgcgtatttttcgcgcgcgcgtttaagggagagcgagtattgcgcgtcggcgcgtatattcgagatagagttttattatttcgttttttttcgcgttttttttttcgttgggtatttaaatagtttttcgatattattagttaaggattttttttttcgttttttttagtcgtcgttcgtttattagtatttgtaggggggaggaggaggagggaggaaagcggaaagaggaaaaagtataagtttgagtttttcgattcgattacgaatatttttgtaataaatttatcgttttaataaatttgt

SEQ ID NO: 15754 - DNA, 658 bp, Artificial Sequence
  chemically treated genomic DNA (Homo sapiens) CpG-island No: 15754
acaaatttattaaaacgataaatttattacaaaaatattcgtaatcgaatcgaaaaactcaaacttatactttttcctctttccgctttcctccctcctcctcctcccccctacaaatactaataaacgaacgacgactaaaaaaaacgaaaaaaaaaatccttaactaataatatcgaaaaactatttaaatacccaacgaaaaaaaaaacgcgaaaaaaaacgaaataataaaactctatctcgaatatacgcgccgacgcgcaatactcgctctcccttaaacgcgcgcgcgaaaaatacgcgtatcccgaaaacgcgtccgcgcgacgacctcccgcgtactcgtatacgcgcgcgtcccgaataccgcgcgccccttcttatacacaactacgatacgccccgccgcccgccaaaaactcgactcgcgcgacgcgaccgctacgacttcctaaaattctacctaccgaaaacgcgaacgaatatataaaaaaaaaaacgaaaaaaaccgcgaaataaaaaaaaaaaaaatcccgacgaaaaaacgaaaaaaaaactaacgaaaaaaaaactccacgaaactccaaccaaaaccgcgattcgcctacacgtcacgactactcaaacccaaacacgtcccgaaaacgatattttc

SEQ ID NO: 15755 - DNA, 658 bp, Artificial Sequence
  chemically treated genomic DNA (Homo sapiens) CpG-island No: 15755
gtagatttgttggggcggtgggtttattataggagtattcgtggtcggatcggaaggtttaagtttatgttttttttttttttcgtttttttttttttttttttttttttttgtaggtattgatggacggacggcgattaaggagagcggggaaaaaaatttttggttggtgatgtcggaaagttgtttgaatgtttagcgaggagggaggcgcgagagggagcgagatagtaaagttttgtttcgggtgtgcgcgtcggcgcgtagtgttcgtttttttttgggcgcgcgcgcggggggtgcgcgtgtttcgggagcgcgttcgcgcggcggtttttcgcgtgttcgtgtgcgcgcgcgtttcgggtgtcgcgcgtttttttttatgtatagttgcggtgcgtttcgtcgttcgttagaggttcggttcgcgcggcgcggtcgttgcgattttttggagttttgtttgtcgggggcgcgggcgggtgtgtgagagagaaggcgaagggagtcgcggggtgggagaggagggagtttcggcgggagggcgggggagaggttggcgggaggggggttttacggagttttagttagggtcgcggttcgtttgtacgttacggttatttaaatttaagtacgtttcgaaagcggtattttt

SEQ ID NO: 15756 - DNA, 658 bp, Artificial Sequence
  chemically treated genomic DNA (Homo sapiens) CpG-island No: 15756
aaaaataccgctttcgaaacgtacttaaatttaaataaccgtaacgtacaaacgaaccgcgaccctaactaaaactccgtaaaacccccctcccgccaacctctcccccgccctcccgccgaaactccctcctctcccaccccgcgactcccttcgccttctctctcacacacccgcccgcgcccccgacaaacaaaactccaaaaaatcgcaacgaccgcgccgcgcgaaccgaacctctaacgaacgacgaaacgcaccgcaactatacataaaaaaaaacgcgcgacacccgaaacgcgcgcgcacacgaacacgcgaaaaaccgccgcgcgaacgcgctcccgaaacacgcgcaccccccgcgcgcgcgcccaaaaaaaaacgaacactacgcgccgacgcgcacacccgaaacaaaactttactatctcgctccctctcgcgcctccctcctcgctaaacattcaaacaactttccgacatcaccaaccaaaaatttttttccccgctctccttaatcgccgtccgtccatcaatacctacaaaaaaaaaaaaaaaaaaaaaaaaaaacgaaaaaaaaaaaaaacataaacttaaaccttccgatccgaccacgaatactcctataataaacccaccgccccaacaaatctac

SEQ ID NO: 15757 - DNA, 547 bp, Artificial Sequence
  chemically treated genomic DNA (Homo sapiens) CpG-island No: 15757
tttggataacggggagcgggaaaaaagttacgtaggagtttggatcgggcgaagttcgcgggaaatcgttttgggtgcgtaggataaagacgcggggatagcggggagggtcggtcgtagtttgtcgggttgtttttacggcgcggaacgcgcgtagtaatttttattaggttttcgcgtttggattttcgttttgtttttgggtttttttcgtttatcggcggcgtttttcgcgaagttcgttgggtttcgtttttatttttttttttttttttacgtcgggttttgtttttggttttggatttttggttgcgtagttcgcgttttcgcggtttttcgtcggtcgcgcgttttcgagttatgttgtttgtttgggtaaattttatttcgcgagtgacgtattcggtcgcgatgcgttagaacgtcggtttcgtttcgaggcggtgcgtttggttacgttttttcgttggaggtttagttacgtttttaaaggaagttttattttatattcgtggttattaaaaaattgcgggaagtaggaaagagt

SEQ ID NO: 15758 - DNA, 547 bp, Artificial Sequence
  chemically treated genomic DNA (Homo sapiens) CpG-island No: 15758
actctttcctacttcccgcaattttttaataaccacgaatataaaataaaacttcctttaaaaacgtaactaaacctccaacgaaaaaacgtaaccaaacgcaccgcctcgaaacgaaaccgacgttctaacgcatcgcgaccgaatacgtcactcgcgaaataaaatttacccaaacaaacaacataactcgaaaacgcgcgaccgacgaaaaaccgcgaaaacgcgaactacgcaaccaaaaatccaaaaccaaaaacaaaacccgacgtaaaaaaaaaaaaaaaaataaaaacgaaacccaacgaacttcgcgaaaaacgccgccgataaacgaaaaaaacccaaaaacaaaacgaaaatccaaacgcgaaaacctaataaaaattactacgcgcgttccgcgccgtaaaaacaacccgacaaactacgaccgaccctccccgctatccccgcgtctttatcctacgcacccaaaacgatttcccgcgaacttcgcccgatccaaactcctacgtaacttttttcccgctccccgttatccaaa

SEQ ID NO: 15759 - DNA, 547 bp, Artificial Sequence
  chemically treated genomic DNA (Homo sapiens) CpG-island No: 15759
gtttttttttgtttttcgtagttttttagtggttacgggtatggggtggagttttttttaggggcgtgattaggtttttaacgaaggggcgtggttaagcgtatcgtttcggggcggggtcggcgttttagcgtatcgcggtcgggtgcgttattcgcgaagtggaatttgtttagataagtaatatggttcggaaacgcgcggtcggcggggagtcgcggggacgcgaattgcgtagttagaaatttaaggttaagagtaaggttcggcgtgaggaggaggaggagggtgagagcgaggtttagcgggtttcgcgggagacgtcgtcggtgggcggaggaggtttagaggtagggcgggagtttagacgcggaggtttggtggaggttgttgcgcgcgtttcgcgtcgtgggggtagttcggtaggttgcggtcggtttttttcgttgttttcgcgtttttgttttgcgtatttagagcggtttttcgcgagtttcgttcgatttaagtttttgcgtagtttttttttcgtttttcgttgtttaga

SEQ ID NO: 15760 - DNA, 547 bp, Artificial Sequence
  chemically treated genomic DNA (Homo sapiens) CpG-island No: 15760
tctaaacaacgaaaaacgaaaaaaaaactacgcaaaaacttaaatcgaacgaaactcgcgaaaaaccgctctaaatacgcaaaacaaaaacgcgaaaacaacgaaaaaaaccgaccgcaacctaccgaactacccccacgacgcgaaacgcgcgcaacaacctccaccaaacctccgcgtctaaactcccgccctacctctaaacctcctccgcccaccgacgacgtctcccgcgaaacccgctaaacctcgctctcaccctcctcctcctcctcacgccgaaccttactcttaaccttaaatttctaactacgcaattcgcgtccccgcgactccccgccgaccgcgcgtttccgaaccatattacttatctaaacaaattccacttcgcgaataacgcacccgaccgcgatacgctaaaacgccgaccccgccccgaaacgatacgcttaaccacgccccttcgttaaaaacctaatcacgcccctaaaaaaaactccaccccatacccgtaaccactaaaaaactacgaaaaacaaaaaaaaac

SEQ ID NO: 15761 - DNA, 539 bp, Artificial Sequence
  chemically treated genomic DNA (Homo sapiens) CpG-island No: 15761
ggagggggaggggaggggagcgggcgggttttttagtcgtttcggggttcgagtttaagttcggcgttcgcggtttttttcgttcgcgttcgagcgtttttttttttttttttttcgttttttagattttcgtgtcgttgttttttcgttcgtttattcgttttttcggtcgtcggatttcgtcgtcgtttcgtcgttttagtttcgtttgttataggagttgttttaacgttttgacgttatcgcgtcgtcgtcgtcgtcgtcgtcgtcgttttagattcgttaggaagagggaggggcgggcgtcgggagcggaggaggggttgcggcgtatgcgtcgggttgggtcgggtcggggtcgcgttgttttttagcgggcgggcggttgagcggtgttattcggtcggcgggcgagtttgcgtgcgaggtgttgttttttacgtttcgtacgtttttgttaattttgggagaggttttttttttttagtttttcgtttgatttgcggttttttttgaattttggttttgtttatttcgtt

SEQ ID NO: 15762 - DNA, 539 bp, Artificial Sequence
  chemically treated genomic DNA (Homo sapiens) CpG-island No: 15762
aacgaaataaacaaaaccaaaattcaaaaaaaaccgcaaatcaaacgaaaaactaaaaaaaaaaaacctctcccaaaattaacaaaaacgtacgaaacgtaaaaaacaacacctcgcacgcaaactcgcccgccgaccgaataacaccgctcaaccgcccgcccgctaaaaaacaacgcgaccccgacccgacccaacccgacgcatacgccgcaacccctcctccgctcccgacgcccgcccctccctcttcctaacgaatctaaaacgacgacgacgacgacgacgacgacgcgataacgtcaaaacgttaaaacaactcctataacaaacgaaactaaaacgacgaaacgacgacgaaatccgacgaccgaaaaaacgaataaacgaacgaaaaaacaacgacacgaaaatctaaaaaacgaaaaaaaaaaaaaaaaaaacgctcgaacgcgaacgaaaaaaaccgcgaacgccgaacttaaactcgaaccccgaaacgactaaaaaacccgcccgctcccctcccctccccctcc

SEQ ID NO: 15763 - DNA, 539 bp, Artificial Sequence
  chemically treated genomic DNA (Homo sapiens) CpG-island No: 15763
agcgaggtgagtagagttagagtttagaaggggtcgtaagttagacgaggggttgggaaaaaagagttttttttaaggttaatagaagcgtgcggagcgtgagaagtagtatttcgtacgtagattcgttcgtcggtcgggtggtatcgtttagtcgttcgttcgttagaaggtagcgcggtttcggttcggtttagttcggcgtatgcgtcgtagtttttttttcgttttcggcgttcgtttttttttttttttggcgggtttggggcggcggcggcggcggcggcggcggcgcggtgacgttagggcgttggggtagtttttgtgatagacggagttggagcggcggggcggcggcggagttcggcggtcgggagagcgagtgagcgagcggaggagtagcgatacgggagtttagggagcgagaaggagaaggaggggagcgttcgggcgcgagcgagagaaatcgcgagcgtcgagtttggattcgagtttcggaacggttgaggagttcgttcgtttttttttttttttttttt

SEQ ID NO: 15764 - DNA, 539 bp, Artificial Sequence
  chemically treated genomic DNA (Homo sapiens) CpG-island No: 15764
aaaaaaaaaaaaaaaaaaaacgaacgaactcctcaaccgttccgaaactcgaatccaaactcgacgctcgcgatttctctcgctcgcgcccgaacgctcccctccttctccttctcgctccctaaactcccgtatcgctactcctccgctcgctcactcgctctcccgaccgccgaactccgccgccgccccgccgctccaactccgtctatcacaaaaactaccccaacgccctaacgtcaccgcgccgccgccgccgccgccgccgccgccccaaacccgccaaaaaaaaaaaaaaacgaacgccgaaaacgaaaaaaaaactacgacgcatacgccgaactaaaccgaaccgaaaccgcgctaccttctaacgaacgaacgactaaacgataccacccgaccgacgaacgaatctacgtacgaaatactacttctcacgctccgcacgcttctattaaccttaaaaaaaactcttttttcccaacccctcgtctaacttacgaccccttctaaactctaactctactcacctcgct

SEQ ID NO: 15765 - DNA, 1378 bp, Artificial Sequence
  chemically treated genomic DNA (Homo sapiens) CpG-island No: 15765
gtttttttcgcggttttcggatttcgcgaggtaggtaggttttgggtcgggtcggtcgggttcgtgcggggcgtcgatttcgtttacgacgtcgtagtttcgttttttaggagtttcggtttttgcgggtacgcgttttcgttacggggtcgattataatggaggtcgttttcgttttttcgtggaggggttcggtgttttcggtgattttgttagattcggtaggacgttttttgggttaattcgttcggggcgggggagatttcggttttttcgaagatttttcgcgttcgaagatcgtttcggagcgttcgtaattattgagttttcgaagattcgcggggtttttttaggtcgtttcgatttagatttttgtttttgttttttttttttttcgcggttgcggcgttcgttcgtttttatcggatttgggcgggtagcggtatacggaattagacgggatgtttattttttttacgttcgcgtgttgtcggttcgttagggtttttatgggtttttggggttgaaatttcggttcggtttcggtgttcgcgtcgtttttcgcgatttatcgcggtcgttcgtttcgcgttcgggtgcgggggtcgattgttcgtcgcggtcgggtttcgttgcggcgttgcggttttggcggcggggagttttcggcgcgtcgcgtattattttttcgtcgggtatcgcggcggcgtttttgttaagggggttgcgggtttgggtcggggggtttttttttttttttttttaggtcgcgtgatgttagcggtcgtttcgcgcggggatcgcggcggttttagttaatggcgaggcggggcgggagcgttcgcgtcggagtagttaatgagcgcgggattgtagtaggagtcggcggcgcgtgtttcgcgcggggagtcgcggttggattcggcgcgcgtggacgcggtttagggtttcgcggcgggggcgtgggcgtgggcggggattcgcgacggggacgggggcgcggtcgggtgttcgcggcggggcggggcgggatcggtcggagttgggattttaggagacgagcgttgtattcggtcgggacgcgtcgttttttcgcgtttgtttatttcggttcggattatcgcgtagggagtcgttttttttcgcggttcgcgaggattggtcgggagttcgttcgttattgttttgggcgttttaaagcgggcggttttcgtttcgttgttttcgcgtttggaggaagtttttttaatttcgttttttagcgtcggtcggcggaggttttcggaaattttatgtaggggggtagggagaggggttttacggtgtattcgtatgttttttgtttcgtgttaatgttggtgatcggttaggaagatgt

SEQ ID NO: 15766 - DNA, 1378 bp, Artificial Sequence
  chemically treated genomic DNA (Homo sapiens) CpG-island No: 15766
acatcttcctaaccgatcaccaacattaacacgaaacaaaaaacatacgaatacaccgtaaaacccctctccctacccccctacataaaatttccgaaaacctccgccgaccgacgctaaaaaacgaaattaaaaaaacttcctccaaacgcgaaaacaacgaaacgaaaaccgcccgctttaaaacgcccaaaacaataacgaacgaactcccgaccaatcctcgcgaaccgcgaaaaaaaacgactccctacgcgataatccgaaccgaaataaacaaacgcgaaaaaacgacgcgtcccgaccgaatacaacgctcgtctcctaaaatcccaactccgaccgatcccgccccgccccgccgcgaacacccgaccgcgcccccgtccccgtcgcgaatccccgcccacgcccacgcccccgccgcgaaaccctaaaccgcgtccacgcgcgccgaatccaaccgcgactccccgcgcgaaacacgcgccgccgactcctactacaatcccgcgctcattaactactccgacgcgaacgctcccgccccgcctcgccattaactaaaaccgccgcgatccccgcgcgaaacgaccgctaacatcacgcgacctaaaaaaaaaaaaaaaaaaaccccccgacccaaacccgcaacccccttaacaaaaacgccgccgcgatacccgacgaaaaaataatacgcgacgcgccgaaaactccccgccgccaaaaccgcaacgccgcaacgaaacccgaccgcgacgaacaatcgacccccgcacccgaacgcgaaacgaacgaccgcgataaatcgcgaaaaacgacgcgaacaccgaaaccgaaccgaaatttcaaccccaaaaacccataaaaaccctaacgaaccgacaacacgcgaacgtaaaaaaaataaacatcccgtctaattccgtataccgctacccgcccaaatccgataaaaacgaacgaacgccgcaaccgcgaaaaaaaaaaaaaacaaaaacaaaaatctaaatcgaaacgacctaaaaaaaccccgcgaatcttcgaaaactcaataattacgaacgctccgaaacgatcttcgaacgcgaaaaatcttcgaaaaaaccgaaatctcccccgccccgaacgaattaacccaaaaaacgtcctaccgaatctaacaaaatcaccgaaaacaccgaacccctccacgaaaaaacgaaaacgacctccattataatcgaccccgtaacgaaaacgcgtacccgcaaaaaccgaaactcctaaaaaacgaaactacgacgtcgtaaacgaaatcgacgccccgcacgaacccgaccgacccgacccaaaacctacctacctcgcgaaatccgaaaaccgcgaaaaaaac

SEQ ID NO: 15767 - DNA, 1378 bp, Artificial Sequence
  chemically treated genomic DNA (Homo sapiens) CpG-island No: 15767
gtatttttttagtcggttattagtattaatacggggtaggagatatgcgaatgtatcgtgggatttttttttttatttttttgtatgagattttcgaagattttcgtcggtcgacgttgaggggcggggttgggaaggttttttttaggcgcgggagtagcggagcggggatcgttcgttttgggacgtttaggataatggcgagcgagttttcggttagttttcgcggatcgcgggagggggcggttttttgcgcggtaattcgagtcgggataaataggcgcggaggggcgacgcgtttcggtcgggtgtagcgttcgttttttggggttttagtttcggtcggtttcgtttcgtttcgtcgcgggtattcggtcgcgttttcgttttcgtcgcgagttttcgtttacgtttacgttttcgtcgcgaggttttgggtcgcgtttacgcgcgtcgagtttagtcgcggtttttcgcgcgaggtacgcgtcgtcggtttttgttgtagtttcgcgtttattggttgtttcggcgcgggcgttttcgtttcgtttcgttattggttggggtcgtcgcggttttcgcgcggagcggtcgttgatattacgcggtttgagggggggggggggggggtttttcggtttagattcgtagtttttttggtagaggcgtcgtcgcggtgttcggcggagggatggtgcgcggcgcgtcgggggtttttcgtcgttagagtcgtagcgtcgtagcggagttcggtcgcggcgggtagtcggttttcgtattcgggcgcggggcgggcggtcgcggtgaatcgcggagggcggcgcgggtatcggggtcgggtcggggttttaattttaagggtttatgggggttttgacgagtcggtagtacgcgggcgtggaggaggtggatatttcgtttaatttcgtgtatcgttattcgtttaagttcggtgagggcgggcgggcgtcgtagtcgcgaggagggagaggggtaggggtaggggtttgggtcgggacggtttgagggggtttcgcgggttttcggggatttagtggttgcggacgtttcgaaacggttttcgagcgcgggaggttttcgagaaggtcgaggtttttttcgtttcgggcgaattagtttaaggggcgttttgtcgggtttagtagggttatcgagggtatcgagtttttttacgggaggacgggagcggtttttattgtaatcggtttcgtgacggggacgcgtgttcgtagggatcgaggtttttggggagcggggttgcggcgtcgtaggcgaggtcggcgtttcgtacggattcggtcggttcggtttaaagtttatttgtttcgcggggttcgagggtcgcgagggaggt

SEQ ID NO: 15768 - DNA, 1378 bp, Artificial Sequence
  chemically treated genomic DNA (Homo sapiens) CpG-island No: 15768
acctccctcgcgaccctcgaaccccgcgaaacaaataaactttaaaccgaaccgaccgaatccgtacgaaacgccgacctcgcctacgacgccgcaaccccgctccccaaaaacctcgatccctacgaacacgcgtccccgtcacgaaaccgattacaataaaaaccgctcccgtcctcccgtaaaaaaactcgataccctcgataaccctactaaacccgacaaaacgccccttaaactaattcgcccgaaacgaaaaaaacctcgaccttctcgaaaacctcccgcgctcgaaaaccgtttcgaaacgtccgcaaccactaaatccccgaaaacccgcgaaaccccctcaaaccgtcccgacccaaacccctacccctacccctctccctcctcgcgactacgacgcccgcccgccctcaccgaacttaaacgaataacgatacacgaaattaaacgaaatatccacctcctccacgcccgcgtactaccgactcgtcaaaacccccataaacccttaaaattaaaaccccgacccgaccccgatacccgcgccgccctccgcgattcaccgcgaccgcccgccccgcgcccgaatacgaaaaccgactacccgccgcgaccgaactccgctacgacgctacgactctaacgacgaaaaacccccgacgcgccgcgcaccatccctccgccgaacaccgcgacgacgcctctaccaaaaaaactacgaatctaaaccgaaaaaccccccccccccccccctcaaaccgcgtaatatcaacgaccgctccgcgcgaaaaccgcgacgaccccaaccaataacgaaacgaaacgaaaacgcccgcgccgaaacaaccaataaacgcgaaactacaacaaaaaccgacgacgcgtacctcgcgcgaaaaaccgcgactaaactcgacgcgcgtaaacgcgacccaaaacctcgcgacgaaaacgtaaacgtaaacgaaaactcgcgacgaaaacgaaaacgcgaccgaatacccgcgacgaaacgaaacgaaaccgaccgaaactaaaaccccaaaaaacgaacgctacacccgaccgaaacgcgtcgcccctccgcgcctatttatcccgactcgaattaccgcgcaaaaaaccgccccctcccgcgatccgcgaaaactaaccgaaaactcgctcgccattatcctaaacgtcccaaaacgaacgatccccgctccgctactcccgcgcctaaaaaaaaccttcccaaccccgcccctcaacgtcgaccgacgaaaatcttcgaaaatctcatacaaaaaaataaaaaaaaaaatcccacgatacattcgcatatctcctaccccgtattaatactaataaccgactaaaaaaatac

SEQ ID NO: 15769 - DNA, 1140 bp, Artificial Sequence
  chemically treated genomic DNA (Homo sapiens) CpG-island No: 15769
gcggtttcgtttcgaacgttcggtcgtgattaattaggaggtcggatgagttaaaatatagcggtcggttaatgttggggagttttacggcgtcgagtttcgttaatgggcgcggtcgggcgaaaagagaaatagtgagggttttataggtcgtaggattcgaatcgaacgtttttacgggagtcgggcgttggcggagcggcgtttcggttaattagcggtagttttcgaacgttgggtcggtttagtttcgtttcgcgttgttgtttgtggtgtcggtcgggtcgcgggagtcgaattataatattcgtcgggcgggcggcggcggagcgggcggcggagcggcggtagtagcggtgagcgcgagtttcggagtttcgggcggtcggtttttcgcgttcgcgtagtttcgtgtttgcgttcggtcggagacgtcgggtttcgcgtcgcgtcgcgttatgtcggtgaatatggacgagttgcggtattaggttatgattaattagttcgtgttggtcgcgggttgcgcggtcgattaggcgaagtagttgttgtaggcggtttattggtagttcgaggtgcgagtttggtcgtcgcggggtcgggtcgcgggggtcggggacgtcgggcggcggcgggggcggggagcgtttttgttgtcggttcggaaggcgatcggcgttcgcgagcgggttttacgcgggatcggggtcgggatcggtttttttttgtacgtggggtagtcgagggtcgggggtcgcgggtcgggcgcggaggcggggagagtcggtggggggtttagtcgttgcgttttttgatttcgtttggttcgtcgtgttattgttttgtttgttcgtagatcgcgttgagtacgtttttttaagaaattaatatttttaatagttattattattattagatggtaagcggcggcgggtaggggcgcgggtcggggtcgttgttagcgcggcggtgatagttatgttgtcggggagcgtcgcgtcgcgaatgtaaataaagagttaaaatgttttttaggaaagagcggttttcgggtcggcgttggcgtttttaattttgaggttcgtttttcgggttgttgttgtttggtttcgggattggtgttcggtattggttttt

SEQ ID NO: 15770 - DNA, 1140 bp, Artificial Sequence
  chemically treated genomic DNA (Homo sapiens) CpG-island No: 15770
aaaaaccaataccgaacaccaatcccgaaaccaaacaacaacaacccgaaaaacgaacctcaaaattaaaaacgccaacgccgacccgaaaaccgctctttcctaaaaaacattttaactctttatttacattcgcgacgcgacgctccccgacaacataactatcaccgccgcgctaacaacgaccccgacccgcgcccctacccgccgccgcttaccatctaataataataataactattaaaaatattaatttcttaaaaaaacgtactcaacgcgatctacgaacaaacaaaacaataacacgacgaaccaaacgaaatcaaaaaacgcaacgactaaaccccccaccgactctccccgcctccgcgcccgacccgcgacccccgaccctcgactaccccacgtacaaaaaaaaaccgatcccgaccccgatcccgcgtaaaacccgctcgcgaacgccgatcgccttccgaaccgacaacaaaaacgctccccgcccccgccgccgcccgacgtccccgacccccgcgacccgaccccgcgacgaccaaactcgcacctcgaactaccaataaaccgcctacaacaactacttcgcctaatcgaccgcgcaacccgcgaccaacacgaactaattaatcataacctaataccgcaactcgtccatattcaccgacataacgcgacgcgacgcgaaacccgacgtctccgaccgaacgcaaacacgaaactacgcgaacgcgaaaaaccgaccgcccgaaactccgaaactcgcgctcaccgctactaccgccgctccgccgcccgctccgccgccgcccgcccgacgaatattataattcgactcccgcgacccgaccgacaccacaaacaacaacgcgaaacgaaactaaaccgacccaacgttcgaaaactaccgctaattaaccgaaacgccgctccgccaacgcccgactcccgtaaaaacgttcgattcgaatcctacgacctataaaaccctcactatttctcttttcgcccgaccgcgcccattaacgaaactcgacgccgtaaaactccccaacattaaccgaccgctatattttaactcatccgacctcctaattaatcacgaccgaacgttcgaaacgaaaccgc

SEQ ID NO: 15771 - DNA, 1140 bp, Artificial Sequence
  chemically treated genomic DNA (Homo sapiens) CpG-island No: 15771
agggattagtgtcgggtattagtttcgaggttaagtagtagtagttcgggaggcgggttttaaagttggaggcgttagcgtcggttcgggagtcgtttttttttggaagatattttggttttttgtttatattcgcggcgcggcgtttttcggtaatatggttgttatcgtcgcgttgatagcggtttcggttcgcgtttttgttcgtcgtcgtttattatttggtggtggtggtggttgttgggaatgttggttttttggaagaacgtgtttagcgcggtttgcggataaatagggtagtgatacggcgggttaggcggagttaggaaacgtagcggttgggttttttatcggtttttttcgttttcgcgttcggttcgcggttttcgattttcggttgttttacgtgtagaggggagtcggtttcggtttcggtttcgcgtaagattcgttcgcgggcgtcgatcgtttttcgggtcgataataggagcgtttttcgttttcgtcgtcgttcggcgttttcgattttcgcggttcggtttcgcggcggttaggttcgtatttcgaattgttagtgggtcgtttgtagtaattgtttcgtttggtcggtcgcgtagttcgcggttagtacgaattggttgattatgatttggtgtcgtagttcgtttatgtttatcgatatggcgcggcgcggcgcggggttcggcgttttcggtcggacgtaaatacggggttgcgcgggcgcgggaggtcggtcgttcggggtttcggggttcgcgtttatcgttgttgtcgtcgtttcgtcgttcgtttcgtcgtcgttcgttcggcgaatgttgtggttcgattttcgcggttcggtcgatattataaataatagcgcggggcggggttgggtcggtttaacgttcggggattgtcgttgattggtcggggcgtcgtttcgttagcgttcggttttcgtaaggacgttcgattcgaattttgcggtttgtggggtttttattgttttttttttcgttcggtcgcgtttattggcggagttcggcgtcgtggggttttttagtattggtcggtcgttgtgttttggtttattcggttttttggttggttacggtcgggcgttcggggcggggtcgt

SEQ ID NO: 15772 - DNA, 1140 bp, Artificial Sequence
  chemically treated genomic DNA (Homo sapiens) CpG-island No: 15772
acgaccccgccccgaacgcccgaccgtaaccaaccaaaaaaccgaataaaccaaaacacaacgaccgaccaatactaaaaaaccccacgacgccgaactccgccaataaacgcgaccgaacgaaaaaaaaaacaataaaaaccccacaaaccgcaaaattcgaatcgaacgtccttacgaaaaccgaacgctaacgaaacgacgccccgaccaatcaacgacaatccccgaacgttaaaccgacccaaccccgccccgcgctattatttataatatcgaccgaaccgcgaaaatcgaaccacaacattcgccgaacgaacgacgacgaaacgaacgacgaaacgacgacaacaacgataaacgcgaaccccgaaaccccgaacgaccgacctcccgcgcccgcgcaaccccgtatttacgtccgaccgaaaacgccgaaccccgcgccgcgccgcgccatatcgataaacataaacgaactacgacaccaaatcataatcaaccaattcgtactaaccgcgaactacgcgaccgaccaaacgaaacaattactacaaacgacccactaacaattcgaaatacgaacctaaccgccgcgaaaccgaaccgcgaaaatcgaaaacgccgaacgacgacgaaaacgaaaaacgctcctattatcgacccgaaaaacgatcgacgcccgcgaacgaatcttacgcgaaaccgaaaccgaaaccgactcccctctacacgtaaaacaaccgaaaatcgaaaaccgcgaaccgaacgcgaaaacgaaaaaaaccgataaaaaacccaaccgctacgtttcctaactccgcctaacccgccgtatcactaccctatttatccgcaaaccgcgctaaacacgttcttccaaaaaaccaacattcccaacaaccaccaccaccaccaaataataaacgacgacgaacaaaaacgcgaaccgaaaccgctatcaacgcgacgataacaaccatattaccgaaaaacgccgcgccgcgaatataaacaaaaaaccaaaatatcttccaaaaaaaaacgactcccgaaccgacgctaacgcctccaactttaaaacccgcctcccgaactactactacttaacctcgaaactaatacccgacactaatccct

SEQ ID NO: 15773 - DNA, 862 bp, Artificial Sequence
  chemically treated genomic DNA (Homo sapiens) CpG-island No: 15773
cgtttttttttggtttcggttcggtcgtcgattttttgtcgttcgcgtcgtttagttttcgttcgtcgtattttggttttttttatatgttgtttgacgtttttcgggtattattggacgcgtacgtagtcgcggcgtagggggttggttcggtttttttcgtggttcgcgttttcggtttcggagtatttcgagttttcgcggttttttttttcgtttttcgagttcgagttttcgtcgtggatgaggcgtattagttcgaagtgtacggagttacggtaacggttcgatattaggtcgtgagaaaatagtaggcgttgcgagtcggtttttgggtcggagttcgaggacggttcggaggtcgagttcgaggcgggcgtcggcgtcgggacgggggttgcggttggggtcgggattgttttcggggttggagtcggggtttgggttggagcgggagttgcgggcgtgggggttgcgggattcgttataattgttttgcgcgagtttcgggcggcggcggcgatagcggcggcgaacgaggcgcggggaggcgggattagcgggcgtcgggggcggggttatagcgcgttgacgtgtttttgcgtggcgtcgtcgttagggagtcgggatgtagttgttaggagttatcgtttcgtcgttaggggacgttgaagatgtcgcggggggcgggggtaggatggaatttattaagaaggggcgagattagtgaggatttaattaaagggagcgagaaggggcggggattcgggaggaggaagtggagtggttatcgaggaagaggggagtggtcggggtggggtataggatggtggagagattgttaataatttttaatgagttt

SEQ ID NO: 15774 - DNA, 862 bp, Artificial Sequence
  chemically treated genomic DNA (Homo sapiens) CpG-island No: 15774
aaactcattaaaaattattaacaatctctccaccatcctataccccaccccgaccactcccctcttcctcgataaccactccacttcctcctcccgaatccccgccccttctcgctccctttaattaaatcctcactaatctcgccccttcttaataaattccatcctacccccgccccccgcgacatcttcaacgtcccctaacgacgaaacgataactcctaacaactacatcccgactccctaacgacgacgccacgcaaaaacacgtcaacgcgctataaccccgcccccgacgcccgctaatcccgcctccccgcgcctcgttcgccgccgctatcgccgccgccgcccgaaactcgcgcaaaacaattataacgaatcccgcaacccccacgcccgcaactcccgctccaacccaaaccccgactccaaccccgaaaacaatcccgaccccaaccgcaacccccgtcccgacgccgacgcccgcctcgaactcgacctccgaaccgtcctcgaactccgacccaaaaaccgactcgcaacgcctactattttctcacgacctaatatcgaaccgttaccgtaactccgtacacttcgaactaatacgcctcatccacgacgaaaactcgaactcgaaaaacgaaaaaaaaaaccgcgaaaactcgaaatactccgaaaccgaaaacgcgaaccacgaaaaaaaccgaaccaaccccctacgccgcgactacgtacgcgtccaataatacccgaaaaacgtcaaacaacatataaaaaaaaccaaaatacgacgaacgaaaactaaacgacgcgaacgacaaaaaatcgacgaccgaaccgaaaccaaaaaaaaacg

SEQ ID NO: 15775 - DNA, 862 bp, Artificial Sequence
  chemically treated genomic DNA (Homo sapiens) CpG-island No: 15775
gagtttattaaaagttgttgatagtttttttattattttgtgttttatttcgattatttttttttttttcggtggttattttatttttttttttcgggttttcgttttttttcgttttttttagttgaatttttattggtttcgtttttttttagtggattttattttgttttcgtttttcgcggtatttttagcgttttttagcgacgaggcggtggtttttagtaattgtatttcggttttttgacgacggcgttacgtagggatacgttagcgcgttatggtttcgttttcggcgttcgttggtttcgttttttcgcgtttcgttcgtcgtcgttgtcgtcgtcgtcgttcgagattcgcgtagagtagttatggcggatttcgtagtttttacgttcgtagttttcgttttagtttaggtttcggttttagtttcggaggtagtttcggttttagtcgtagttttcgtttcggcgtcggcgttcgtttcggattcggttttcgggtcgttttcggatttcggtttagaagtcggttcgtagcgtttgttgtttttttacgatttggtgtcgggtcgttatcgtggtttcgtgtatttcgggttggtgcgttttatttacggcgaggattcggattcggagggcgaggaggagggtcgcgggagttcggggtgtttcgaggtcgggggcgcgggttacgaggagggtcgggttagttttttgcgtcgcggttacgtgcgcgtttagtggtattcggagggcgttaagtagtatgtgaaggagattaaggtgcggcgggcgggggttgggcggcgcgggcggtagggggtcggcggtcgggtcgaggttagggaaggacg

SEQ ID NO: 15776 - DNA, 862 bp, Artificial Sequence
  chemically treated genomic DNA (Homo sapiens) CpG-island No: 15776
cgtccttccctaacctcgacccgaccgccgaccccctaccgcccgcgccgcccaacccccgcccgccgcaccttaatctccttcacatactacttaacgccctccgaataccactaaacgcgcacgtaaccgcgacgcaaaaaactaacccgaccctcctcgtaacccgcgcccccgacctcgaaacaccccgaactcccgcgaccctcctcctcgccctccgaatccgaatcctcgccgtaaataaaacgcaccaacccgaaatacacgaaaccacgataacgacccgacaccaaatcgtaaaaaaacaacaaacgctacgaaccgacttctaaaccgaaatccgaaaacgacccgaaaaccgaatccgaaacgaacgccgacgccgaaacgaaaactacgactaaaaccgaaactacctccgaaactaaaaccgaaacctaaactaaaacgaaaactacgaacgtaaaaactacgaaatccgccataactactctacgcgaatctcgaacgacgacgacgacaacgacgacgaacgaaacgcgaaaaaacgaaaccaacgaacgccgaaaacgaaaccataacgcgctaacgtatccctacgtaacgccgtcgtcaaaaaaccgaaatacaattactaaaaaccaccgcctcgtcgctaaaaaacgctaaaaataccgcgaaaaacgaaaacaaaataaaatccactaaaaaaaaacgaaaccaataaaaattcaactaaaaaaaacgaaaaaaaacgaaaacccgaaaaaaaaaaataaaataaccaccgaaaaaaaaaaaaataatcgaaataaaacacaaaataataaaaaaactatcaacaacttttaataaactc

SEQ ID NO: 15777 - DNA, 502 bp, Artificial Sequence
  chemically treated genomic DNA (Homo sapiens) CpG-island No: 15777
ggtcgttcgcgcgtaggtagggaagaggcggagcgtcgtcgtttcgttttcgaggagttatcgtttagtcgttcgtaggcgtcgtacggagttgcgtttcggggatttggggtcgtagggaggtgagcgcggggcgacgagcggggtaggatttacggtcgtttagtcgtaggcgtcggaagggtttcgaggttgtgttcgagtttgttttggagcggtggtgcgcggttaggaagggtgtttagtgttcggtgttcgttttgcggagcgtttgggttttacgtgggttcggttggaggttcgggttggtttagacggcgtcggcggggtcgttggattcggtttgttggtttttagggttcggttcggataggacgtttaaggggtttttgggcgacggggcgttagatgtaggggtaagacgattgggtagagatttaaattttcggaggaagagaggagattgcgtagggtagtttcgtttgcgttttagaagtgtttg

SEQ ID NO: 15778 - DNA, 502 bp, Artificial Sequence
  chemically treated genomic DNA (Homo sapiens) CpG-island No: 15778
caaacacttctaaaacgcaaacgaaactaccctacgcaatctcctctcttcctccgaaaatttaaatctctacccaatcgtcttacccctacatctaacgccccgtcgcccaaaaaccccttaaacgtcctatccgaaccgaaccctaaaaaccaacaaaccgaatccaacgaccccgccgacgccgtctaaaccaacccgaacctccaaccgaacccacgtaaaacccaaacgctccgcaaaacgaacaccgaacactaaacacccttcctaaccgcgcaccaccgctccaaaacaaactcgaacacaacctcgaaacccttccgacgcctacgactaaacgaccgtaaatcctaccccgctcgtcgccccgcgctcacctccctacgaccccaaatccccgaaacgcaactccgtacgacgcctacgaacgactaaacgataactcctcgaaaacgaaacgacgacgctccgcctcttccctacctacgcgcgaacgacc

SEQ ID NO: 15779 - DNA, 502 bp, Artificial Sequence
  chemically treated genomic DNA (Homo sapiens) CpG-island No: 15779
taggtatttttgggacgtaggcgggattgttttgcgtagtttttttttttttttcggaggtttaaatttttgtttaatcgttttgtttttatatttggcgtttcgtcgtttagggattttttaggcgttttgttcgagtcgagttttaggggttagtagatcgggtttagcggtttcgtcggcgtcgtttgagttagttcgggtttttagtcgagtttacgtgggatttaggcgtttcgtagggcgggtatcgggtattgggtattttttttggtcgcgtattatcgttttagggtaggttcgggtataatttcgggattttttcggcgtttgcggttgggcggtcgtgagttttgtttcgttcgtcgtttcgcgtttatttttttgcggttttaagttttcgggacgtaatttcgtgcggcgtttgcgagcggttgggcggtggtttttcgggggcggggcggcggcgtttcgttttttttttatttgcgcgcgggcggtt

SEQ ID NO: 15780 - DNA, 502 bp, Artificial Sequence
  chemically treated genomic DNA (Homo sapiens) CpG-island No: 15780
aaccgcccgcgcgcaaataaaaaaaaaacgaaacgccgccgccccgcccccgaaaaaccaccgcccaaccgctcgcaaacgccgcacgaaattacgtcccgaaaacttaaaaccgcaaaaaaataaacgcgaaacgacgaacgaaacaaaactcacgaccgcccaaccgcaaacgccgaaaaaatcccgaaattatacccgaacctaccctaaaacgataatacgcgaccaaaaaaaatacccaatacccgatacccgccctacgaaacgcctaaatcccacgtaaactcgactaaaaacccgaactaactcaaacgacgccgacgaaaccgctaaacccgatctactaacccctaaaactcgactcgaacaaaacgcctaaaaaatccctaaacgacgaaacgccaaatataaaaacaaaacgattaaacaaaaatttaaacctccgaaaaaaaaaaaaaaactacgcaaaacaatcccgcctacgtcccaaaaataccta

SEQ ID NO: 15781 - DNA, 695 bp, Artificial Sequence
  chemically treated genomic DNA (Homo sapiens) CpG-island No: 15781
gtcgtcgtcgcgttcgtgtatcgagggtatggaggtgttgggcggaaggagagggggcgtaggtttttggcgttcgaggtcggaggtgcgtttaagtttcgatagtcggggcggtgggcgggtagggggacgattttcgtgttaattttttagagtttgggcgtttagagtcgtgggagtggcgtcgcggtttttagcggttggttcgggggcgcggggagaggttcgggcgaggggagtttagttaggtttacggcggtcgtcggaggggtttttgttcgtttttacgggcgggttggcggtcggtttcgtcgcgaaagttcgggagtgttggattttgagttagtttttcgtcgcgggaagggttcgtacgcgtatattcgcgacgtcgtaagtattgggattcggaatttagcgttttcggttcgcgttcgttttagcgtatttttgtgcggttcgcgtcgtttagcgtcgcgtgatcgtttatttttttcgggatttttagcgtttcggttatatttattcgagtttcgtttcgcggtgtaatttcgtcgtggtttgcgggtgggcgggcggtagtcgcgtcgtttttatttcgcgtagtttttattttgtcggtattggtttttatttatacggggttgggggtttggagcggatttgtttttttaaatattttttagtagattatattt

SEQ ID NO: 15782 - DNA, 695 bp, Artificial Sequence
  chemically treated genomic DNA (Homo sapiens) CpG-island No: 15782
aaatataatctactaaaaaatatttaaaaaaacaaatccgctccaaacccccaaccccgtataaataaaaaccaataccgacaaaataaaaactacgcgaaataaaaacgacgcgactaccgcccgcccacccgcaaaccacgacgaaattacaccgcgaaacgaaactcgaataaatataaccgaaacgctaaaaatcccgaaaaaaataaacgatcacgcgacgctaaacgacgcgaaccgcacaaaaatacgctaaaacgaacgcgaaccgaaaacgctaaattccgaatcccaatacttacgacgtcgcgaatatacgcgtacgaacccttcccgcgacgaaaaactaactcaaaatccaacactcccgaactttcgcgacgaaaccgaccgccaacccgcccgtaaaaacgaacaaaaacccctccgacgaccgccgtaaacctaactaaactcccctcgcccgaacctctccccgcgcccccgaaccaaccgctaaaaaccgcgacgccactcccacgactctaaacgcccaaactctaaaaaattaacacgaaaatcgtccccctacccgcccaccgccccgactatcgaaacttaaacgcacctccgacctcgaacgccaaaaacctacgccccctctccttccgcccaacacctccataccctcgatacacgaacgcgacgacgac

SEQ ID NO: 15783 - DNA, 695 bp, Artificial Sequence
  chemically treated genomic DNA (Homo sapiens) CpG-island No: 15783
ggatgtggtttgttggaaaatgtttaaaaaaataaattcgttttaaatttttagtttcgtgtgggtaagagttaatgtcggtaaggtgaaggttgcgcggggtgggggcgacgcgattgtcgttcgtttattcgtaggttacggcggagttgtatcgcggggcggggttcgggtaggtgtggtcggggcgttgggggtttcgggaggaatgggcggttacgcggcgttgggcggcgcgggtcgtataggagtgcgttggggcgggcgcgggtcgggagcgttgggtttcgggttttagtgtttgcggcgtcgcgagtgtgcgcgtgcggatttttttcgcggcggggaattgatttaaagtttaatattttcgagttttcgcggcgaggtcgatcgttagttcgttcgtgggggcgaataggagttttttcggcggtcgtcgtggatttagttgggtttttttcgttcgggttttttttcgcgttttcgagttagtcgttgggggtcgcggcgttatttttacggttttggacgtttaggttttggggggttagtacgggggtcgtttttttgttcgtttatcgtttcggttgtcggaatttgagcgtattttcgatttcgggcgttagaggtttgcgtttttttttttttcgtttagtatttttatgttttcggtgtacgaacgcggcggcggt

SEQ ID NO: 15784 - DNA, 695 bp, Artificial Sequence
  chemically treated genomic DNA (Homo sapiens) CpG-island No: 15784
accgccgccgcgttcgtacaccgaaaacataaaaatactaaacgaaaaaaaaaaaaacgcaaacctctaacgcccgaaatcgaaaatacgctcaaattccgacaaccgaaacgataaacgaacaaaaaaacgacccccgtactaaccccccaaaacctaaacgtccaaaaccgtaaaaataacgccgcgacccccaacgactaactcgaaaacgcgaaaaaaaacccgaacgaaaaaaacccaactaaatccacgacgaccgccgaaaaaactcctattcgcccccacgaacgaactaacgatcgacctcgccgcgaaaactcgaaaatattaaactttaaatcaattccccgccgcgaaaaaaatccgcacgcgcacactcgcgacgccgcaaacactaaaacccgaaacccaacgctcccgacccgcgcccgccccaacgcactcctatacgacccgcgccgcccaacgccgcgtaaccgcccattcctcccgaaacccccaacgccccgaccacacctacccgaaccccgccccgcgatacaactccgccgtaacctacgaataaacgaacgacaatcgcgtcgcccccaccccgcgcaaccttcaccttaccgacattaactcttacccacacgaaactaaaaatttaaaacgaatttatttttttaaacattttccaacaaaccacatcc

SEQ ID NO: 15785 - DNA, 552 bp, Artificial Sequence
  chemically treated genomic DNA (Homo sapiens) CpG-island No: 15785
gtcgaagtatttgttcgcgcgttcggtaggtttggtcgtttagtttcgggttttttttcggtcgcggtttttttaggtattttcggcgttcgcggtcgtttcgttttcgtttcggggtcgttgttgcgcgcggggattttattttggagatcggcgttcgcgttgtttagttttcgtgtttttttcgttcgtttttcgtcggttttttcgttttcgttaaattaaataattcgttttgtgtttaagcgttcgtttttcgtagcgcggaggtcgttggggtcgcggcggtcgagggcggggtgggggggggggtcggcggttggtgagtttttcgttttttagttggttcgcgggtcgtttcgcgtggtattcggcgttttagtgggtttttcgttattgtcgtcggtgggcgcgaagggggaaagatggtcggagttggtgggaggatatttaattatttcggggagggcgtgggtagtagggagagttttgggtagaagatgggtaggggtgaggtcgggggaaggggttgtggagcgtagtttatggttt

SEQ ID NO: 15786 - DNA, 552 bp, Artificial Sequence
  chemically treated genomic DNA (Homo sapiens) CpG-island No: 15786
aaaccataaactacgctccacaaccccttcccccgacctcacccctacccatcttctacccaaaactctccctactacccacgccctccccgaaataattaaatatcctcccaccaactccgaccatctttcccccttcgcgcccaccgacgacaataacgaaaaacccactaaaacgccgaataccacgcgaaacgacccgcgaaccaactaaaaaacgaaaaactcaccaaccgccgacccccccccccaccccgccctcgaccgccgcgaccccaacgacctccgcgctacgaaaaacgaacgcttaaacacaaaacgaattatttaatttaacgaaaacgaaaaaaccgacgaaaaacgaacgaaaaaaacacgaaaactaaacaacgcgaacgccgatctccaaaataaaatccccgcgcgcaacaacgaccccgaaacgaaaacgaaacgaccgcgaacgccgaaaatacctaaaaaaaccgcgaccgaaaaaaaacccgaaactaaacgaccaaacctaccgaacgcgcgaacaaatacttcgac

SEQ ID NO: 15787 - DNA, 552 bp, Artificial Sequence
  chemically treated genomic DNA (Homo sapiens) CpG-island No: 15787
gagttatgaattgcgttttatagttttttttttcggttttatttttatttattttttgtttaaggttttttttattatttacgtttttttcgaaatagttaagtatttttttattaatttcgattattttttttttttcgcgtttatcggcggtagtggcgaagggtttattgaagcgtcgggtgttacgcggggcggttcgcgggttagttagggggcggggaatttattagtcgtcgatttttttttttatttcgttttcggtcgtcgcggttttagcggttttcgcgttgcgaggagcgggcgtttggatatagggcgagttgtttgatttggcggaggcggggaggtcggcggggagcgagcgagggaggtacgagagttgggtagcgcgggcgtcggtttttagggtagggttttcgcgcgtagtagcggtttcggggcgggggcgaggcgatcgcgggcgtcggggatgtttggaggggtcgcggtcgagaggagattcgggattggacggttagatttgtcgggcgcgcgggtaggtgtttcggt

SEQ ID NO: 15788 - DNA, 552 bp, Artificial Sequence
  chemically treated genomic DNA (Homo sapiens) CpG-island No: 15788
accgaaacacctacccgcgcgcccgacaaatctaaccgtccaatcccgaatctcctctcgaccgcgacccctccaaacatccccgacgcccgcgatcgcctcgcccccgccccgaaaccgctactacgcgcgaaaaccctaccctaaaaaccgacgcccgcgctacccaactctcgtacctccctcgctcgctccccgccgacctccccgcctccgccaaatcaaacaactcgccctatatccaaacgcccgctcctcgcaacgcgaaaaccgctaaaaccgcgacgaccgaaaacgaaataaaaaaaaaaatcgacgactaataaattccccgccccctaactaacccgcgaaccgccccgcgtaacacccgacgcttcaataaacccttcgccactaccgccgataaacgcgaaaaaaaaaaaataatcgaaattaataaaaaaatacttaactatttcgaaaaaaacgtaaataataaaaaaaaccttaaacaaaaaataaataaaaataaaaccgaaaaaaaaaactataaaacgcaattcataactc

SEQ ID NO: 15789 - DNA, 652 bp, Artificial Sequence
  chemically treated genomic DNA (Homo sapiens) CpG-island No: 15789
ttcgacgaatttcgatattgtttatatttaaattaatattttacgtgtataatattttgtttcgtcgggattttttatagtttatcgttttattatggtgcgtttttttttagttttttttggattatttcgtttttttttcgagattcgtattttttcgtatattcgttatcgtcgttcgttttttttttagtttagttttcgtttgtcgttttttcgcgtacggtttcggtttttcgtttttttcggcgcggttttttttcgtttttcgtttttttcgcgtttcgtcgtttttgtttttatgcgttttcgtttttcgtcgttttgttttttgcgttgtttcgtttttttcggcggttagtatttttgtttttatgtcgtttttgcgtttatttcgttttgttcgttttttgttttttttacgttggtttttttttttcgatcgttttttagttttttttttttcgttttcgtttcgtttttttttttttttttttttttcgtgtttttttatcgtttatttttgtttttttttttttcgtcggttcgcgtttattcgtttgcgttttttttttgttattcgttttttcggttttttttcgttttttttacgcgttcgcggatcgcgttttttttttttttcgttgcggcg

SEQ ID NO: 15790 - DNA, 652 bp, Artificial Sequence
  chemically treated genomic DNA (Homo sapiens) CpG-island No: 15790
cgccgcaacgaaaaaaaaaaaaaacgcgatccgcgaacgcgtaaaaaaaacgaaaaaaaaccgaaaaaacgaataacaaaaaaaaaacgcaaacgaataaacgcgaaccgacgaaaaaaaaaaaaacaaaaataaacgataaaaaaacacgaaaaaaaaaaaaaaaaaaaaaaacgaaacgaaaacgaaaaaaaaaaaactaaaaaacgatcgaaaaaaaaaaaccaacgtaaaaaaaacaaaaaacgaacaaaacgaaataaacgcaaaaacgacataaaaacaaaaatactaaccgccgaaaaaaacgaaacaacgcaaaaaacaaaacgacgaaaaacgaaaacgcataaaaacaaaaacgacgaaacgcgaaaaaaacgaaaaacgaaaaaaaaccgcgccgaaaaaaacgaaaaaccgaaaccgtacgcgaaaaaacgacaaacgaaaactaaactaaaaaaaaaacgaacgacgataacgaatatacgaaaaaatacgaatctcgaaaaaaaaacgaaataatccaaaaaaaactaaaaaaaaacgcaccataataaaacgataaactataaaaaatcccgacgaaacaaaatattatacacgtaaaatattaatttaaatataaacaatatcgaaattcgtcgaa

SEQ ID NO: 15791 - DNA, 652 bp, Artificial Sequence
  chemically treated genomic DNA (Homo sapiens) CpG-island No: 15791
cgtcgtaacgaaagaggagaggaacgcgattcgcggacgcgtaaaggaagcggaggaggatcggaaagacggatgataagggaggagcgtagacggataggcgcggatcgacgaagaagagagaggtagagataggcggtaggagagtacgagagaaagagggaaggggaggaacgggacggagacgaaggaaggaagattgaaagacgatcggagaggaagaattagcgtgggaggagtagaaggcgggtaggacggaatggacgtaggagcggtatgggagtagggatgttggtcgtcggagaaggcgaagtagcgtaagaagtagggcgacgagaggcgagagcgtatgggagtagagacggcggggcgcggaagaagcggaggacgaagaggagtcgcgtcggaggggacggggagtcggggtcgtacgcggagaggcggtaggcggagattaggttggaaagagagcgagcgacggtgacggatgtgcgagggagtgcggatttcgaggaaggggcgggatggtttagaaggggttagagaggaacgtattatagtggggcggtgggttgtggggagtttcggcggggtagggtgttatgtacgtggaatgttagtttgagtgtgagtagtgtcgggattcgtcggg

SEQ ID NO: 15792 - DNA, 652 bp, Artificial Sequence
  chemically treated genomic DNA (Homo sapiens) CpG-island No: 15792
cccgacgaatcccgacactactcacactcaaactaacattccacgtacataacaccctaccccgccgaaactccccacaacccaccgccccactataatacgttcctctctaaccccttctaaaccatcccgccccttcctcgaaatccgcactccctcgcacatccgtcaccgtcgctcgctctctttccaacctaatctccgcctaccgcctctccgcgtacgaccccgactccccgtcccctccgacgcgactcctcttcgtcctccgcttcttccgcgccccgccgtctctactcccatacgctctcgcctctcgtcgccctacttcttacgctacttcgccttctccgacgaccaacatccctactcccataccgctcctacgtccattccgtcctacccgccttctactcctcccacgctaattcttcctctccgatcgtctttcaatcttccttccttcgtctccgtcccgttcctccccttccctctttctctcgtactctcctaccgcctatctctacctctctcttcttcgtcgatccgcgcctatccgtctacgctcctcccttatcatccgtctttccgatcctcctccgcttcctttacgcgtccgcgaatcgcgttcctctcctctttcgttacgacg

SEQ ID NO: 15793 - DNA, 729 bp, Artificial Sequence
  chemically treated genomic DNA (Homo sapiens) CpG-island No: 15793
ggtttcggttcgcggatttgaggagtggatcgatcgagcgttgtgcgtaaaaggatcgttggggtatacgttcgagcgttatcggagttaggagatcgcggttcggaggtcggcgagtcgggggtaggttcggagttttttttacggggggcggggcgggttatatggcggtggcgcggtagcgcgcgatgtagtataggttagaggttgcgtaagcgcggggttcgtttttgggatttttcgggtcgggcggtttggttttttagcgttcgggcgtcggggcggtaaaaggtcggtagaagggaggtatttgaggtaggtgttgcgcgtcggggtttcgcgaggtacgtgatgttcgtaggcggggtttgtcgcggcgtaggtggggaaattgaggtagtgtagggtcggtagggtgggtgttgggttggtgaggcgcgtttttcgggttcgcgttaatttttttaggagtcgtcgtagcgttggcgtttttttcgaggacgacgattttttcgttattttgcgtggcggtcgatggaaaaattttgcgtttagacgtcggagaacggagacggggattcggcgttgttgcggcgggttagggttttttttgtttacgttcgtaagttttgagtgacgtcggtggcgttaattttcgcgaattgttgggataaagaatagaggagagggttttgttttggagtatgggttcgggggtcgttttgttgg

SEQ ID NO: 15794 - DNA, 729 bp, Artificial Sequence
  chemically treated genomic DNA (Homo sapiens) CpG-island No: 15794
ccaacaaaacgacccccgaacccatactccaaaacaaaaccctctcctctattctttatcccaacaattcgcgaaaattaacgccaccgacgtcactcaaaacttacgaacgtaaacaaaaaaaaccctaacccgccgcaacaacgccgaatccccgtctccgttctccgacgtctaaacgcaaaatttttccatcgaccgccacgcaaaataacgaaaaaatcgtcgtcctcgaaaaaaacgccaacgctacgacgactcctaaaaaaattaacgcgaacccgaaaaacgcgcctcaccaacccaacacccaccctaccgaccctacactacctcaatttccccacctacgccgcgacaaaccccgcctacgaacatcacgtacctcgcgaaaccccgacgcgcaacacctacctcaaatacctcccttctaccgaccttttaccgccccgacgcccgaacgctaaaaaaccaaaccgcccgacccgaaaaatcccaaaaacgaaccccgcgcttacgcaacctctaacctatactacatcgcgcgctaccgcgccaccgccatataacccgccccgccccccgtaaaaaaaactccgaacctacccccgactcgccgacctccgaaccgcgatctcctaactccgataacgctcgaacgtataccccaacgatccttttacgcacaacgctcgatcgatccactcctcaaatccgcgaaccgaaacc

SEQ ID NO: 15795 - DNA, 729 bp, Artificial Sequence
  chemically treated genomic DNA (Homo sapiens) CpG-island No: 15795
ttagtagggcggttttcgggtttatgttttagggtagggtttttttttttgttttttgttttaataattcgcgaaggttggcgttatcggcgttatttaaggtttgcgggcgtggatagagggggttttagttcgtcgtagtagcgtcgggttttcgttttcgtttttcgacgtttgggcgtagggtttttttatcggtcgttacgtagggtggcggaagggtcgtcgttttcggagggagcgttagcgttgcggcggtttttaagaaagttggcgcgggttcgaggggcgcgttttattagtttagtatttattttatcggttttgtattgttttagtttttttatttacgtcgcggtaggtttcgtttacggatattacgtgtttcgcggagtttcggcgcgtagtatttattttaagtgttttttttttgtcggttttttatcgtttcgacgttcgggcgttaaggggttaaatcgttcggttcggagggttttaggggcgggtttcgcgtttgcgtagtttttagtttgtgttgtatcgcgcgttatcgcgttatcgttatgtgattcgtttcgtttttcgtgggaggagtttcgggtttgttttcgattcgtcgattttcgggtcgcggttttttagtttcggtggcgttcgggcgtgtgttttagcggtttttttacgtatagcgttcggtcggtttattttttaagttcgcgaatcgaggtt

SEQ ID NO: 15796 - DNA, 729 bp, Artificial Sequence
  chemically treated genomic DNA (Homo sapiens) CpG-island No: 15796
aacctcgattcgcgaacttaaaaaataaaccgaccgaacgctatacgtaaaaaaaccgctaaaacacacgcccgaacgccaccgaaactaaaaaaccgcgacccgaaaatcgacgaatcgaaaacaaacccgaaactcctcccacgaaaaacgaaacgaatcacataacgataacgcgataacgcgcgatacaacacaaactaaaaactacgcaaacgcgaaacccgcccctaaaaccctccgaaccgaacgatttaaccccttaacgcccgaacgtcgaaacgataaaaaaccgacaaaaaaaaaacacttaaaataaatactacgcgccgaaactccgcgaaacacgtaatatccgtaaacgaaacctaccgcgacgtaaataaaaaaactaaaacaatacaaaaccgataaaataaatactaaactaataaaacgcgcccctcgaacccgcgccaactttcttaaaaaccgccgcaacgctaacgctccctccgaaaacgacgacccttccgccaccctacgtaacgaccgataaaaaaaccctacgcccaaacgtcgaaaaacgaaaacgaaaacccgacgctactacgacgaactaaaaccccctctatccacgcccgcaaaccttaaataacgccgataacgccaaccttcgcgaattattaaaacaaaaaacaaaaaaaaaaaccctaccctaaaacataaacccgaaaaccgccctactaa

SEQ ID NO: 15797 - DNA, 586 bp, Artificial Sequence
  chemically treated genomic DNA (Homo sapiens) CpG-island No: 15797
atttcggttcgcgtcggcgatcgcgttcgtacggcgttttatttgtttcgggttcgcgtcgatacgtttagcgatcggttcgttttcgcgttttcgttcggttttcggttttttagtaggtcgttggatttagcgcgggatttagcgtggtgtagttatcggtcggtcgggtcgtcgaggatagtagaagcggcgcgtagtagtcgggcgtttttagcggtagttatcgttcgcggtcgggaattgtcggaagcgacgtaggtcgcgttttgaggtcgcgagagattttaaagaggcgggggcggtagttgcggcgtagacgttcgagggtcgcggcgaggggcgcggggttggagtggcggagagattttgttggaagtatcgcgtcgaggtttcgcgtgtttttcgggtgatttataaagatattggtaagtagagcgcggtttcgtttcgttttttacgtttacgtcgttcggttttatggggcggggttagcgtagggggtttttattaattttttaggtttcgttgtaagttggatgtttttttagcggttgaagttgtcgtgtagaaataaaatattttg

SEQ ID NO: 15798 - DNA, 586 bp, Artificial Sequence
  chemically treated genomic DNA (Homo sapiens) CpG-island No: 15798
caaaatattttatttctacacgacaacttcaaccgctaaaaaaacatccaacttacaacgaaacctaaaaaattaataaaaaccccctacgctaaccccgccccataaaaccgaacgacgtaaacgtaaaaaacgaaacgaaaccgcgctctacttaccaatatctttataaatcacccgaaaaacacgcgaaacctcgacgcgatacttccaacaaaatctctccgccactccaaccccgcgcccctcgccgcgaccctcgaacgtctacgccgcaactaccgcccccgcctctttaaaatctctcgcgacctcaaaacgcgacctacgtcgcttccgacaattcccgaccgcgaacgataactaccgctaaaaacgcccgactactacgcgccgcttctactatcctcgacgacccgaccgaccgataactacaccacgctaaatcccgcgctaaatccaacgacctactaaaaaaccgaaaaccgaacgaaaacgcgaaaacgaaccgatcgctaaacgtatcgacgcgaacccgaaacaaataaaacgccgtacgaacgcgatcgccgacgcgaaccgaaat

SEQ ID NO: 15799 - DNA, 586 bp, Artificial Sequence
  chemically treated genomic DNA (Homo sapiens) CpG-island No: 15799
taaaatattttgtttttgtacggtaattttagtcgttaaaaaagtatttagtttataacggaatttggagggttggtaaaggttttttgcgttggtttcgttttatgggatcgggcggcgtgggcgtgagaggcggggcggggtcgcgttttgtttgttaatgtttttataggttattcggaaggtacgcggaatttcggcgcggtgtttttagtagggttttttcgttattttagtttcgcgtttttcgtcgcggttttcgggcgtttgcgtcgtagttgtcgttttcgtttttttggagtttttcgcggttttaaagcgcggtttgcgtcgttttcggtagttttcgatcgcgggcgatggttgtcgttgggggcgttcggttgttgcgcgtcgtttttgttgttttcggcggttcggtcggtcggtggttgtattacgttgggtttcgcgttggatttagcggtttgttgaggaatcgggggtcgggcgggagcgcggaggcgagtcggtcgttgagcgtgtcggcgcgggttcggagtaggtagggcgtcgtgcgggcgcgatcgtcggcgcgggtcggggt

SEQ ID NO: 15800 - DNA, 586 bp, Artificial Sequence
  chemically treated genomic DNA (Homo sapiens) CpG-island No: 15800
accccgacccgcgccgacgatcgcgcccgcacgacgccctacctactccgaacccgcgccgacacgctcaacgaccgactcgcctccgcgctcccgcccgacccccgattcctcaacaaaccgctaaatccaacgcgaaacccaacgtaatacaaccaccgaccgaccgaaccgccgaaaacaacaaaaacgacgcgcaacaaccgaacgcccccaacgacaaccatcgcccgcgatcgaaaactaccgaaaacgacgcaaaccgcgctttaaaaccgcgaaaaactccaaaaaaacgaaaacgacaactacgacgcaaacgcccgaaaaccgcgacgaaaaacgcgaaactaaaataacgaaaaaaccctactaaaaacaccgcgccgaaattccgcgtaccttccgaataacctataaaaacattaacaaacaaaacgcgaccccgccccgcctctcacgcccacgccgcccgatcccataaaacgaaaccaacgcaaaaaacctttaccaaccctccaaattccgttataaactaaatacttttttaacgactaaaattaccgtacaaaaacaaaatatttta

SEQ ID NO: 15801 - DNA, 637 bp, Artificial Sequence
  chemically treated genomic DNA (Homo sapiens) CpG-island No: 15801
tttcggtcgatcgcggtttattcgggttaaattttagcggtttgtttagtcgcgtttagcgggtttaggaatgcggaagggtggcggagttattaaaggagtgggggacgagggtcgggttgcgggcgatcgtcgtagcgtaggtcgcgatatcgtagcggatcggagtaggtcggaggggtaattaagatttcggtcgtgtgcgttcggttttagtagtttcgtcgttcggcggatacgtagatttcgtcggttcgggcgcgaatatttagcgtattttcgttttatttggtttcgtcgcgtttttcggtgcgtttttcggtgcgtttttcgtttcgtttttttaggtaggaagtgtcggcgtcgttattgttcggttatagtttaacgtttttcgttgtcgtttgcggtttcgcgtagggcggtttcggttttggtgtttggcgtcgggtgagtcgcgttcgattttgttcgcgagatttttcgggtcgtcgttttcgtattttcgcgtttttttttcgtcgcgcgtttgcggtcggatttcgttttagggcggttaggcggcggtaggatttgttagattggttgagaaggaggcgcggggtcggaggtggagggaggagggttgttggcgagg

SEQ ID NO: 15802 - DNA, 637 bp, Artificial Sequence
  chemically treated genomic DNA (Homo sapiens) CpG-island No: 15802
cctcgccaacaaccctcctccctccacctccgaccccgcgcctccttctcaaccaatctaacaaatcctaccgccgcctaaccgccctaaaacgaaatccgaccgcaaacgcgcgacgaaaaaaaaacgcgaaaatacgaaaacgacgacccgaaaaatctcgcgaacaaaatcgaacgcgactcacccgacgccaaacaccaaaaccgaaaccgccctacgcgaaaccgcaaacgacaacgaaaaacgttaaactataaccgaacaataacgacgccgacacttcctacctaaaaaaacgaaacgaaaaacgcaccgaaaaacgcaccgaaaaacgcgacgaaaccaaataaaacgaaaatacgctaaatattcgcgcccgaaccgacgaaatctacgtatccgccgaacgacgaaactactaaaaccgaacgcacacgaccgaaatcttaattacccctccgacctactccgatccgctacgatatcgcgacctacgctacgacgatcgcccgcaacccgaccctcgtcccccactcctttaataactccgccacccttccgcattcctaaacccgctaaacgcgactaaacaaaccgctaaaatttaacccgaataaaccgcgatcgaccgaaa

SEQ ID NO: 15803 - DNA, 637 bp, Artificial Sequence
  chemically treated genomic DNA (Homo sapiens) CpG-island No: 15803
tttcgttagtaatttttttttttttattttcggtttcgcgttttttttttagttagtttgataggttttgtcgtcgtttggtcgttttggggcggggttcggtcgtaggcgcgcgacgggaggggggcgcgggggtacggagacggcggttcgaggggtttcgcgagtagagtcgagcgcgatttattcgacgttaaatattagaatcggggtcgttttgcgcgagatcgtaaacgatagcgaagagcgttaggttgtggtcggatagtggcggcgtcgatattttttgtttgaaggggcggagcggaaggcgtatcggaaggcgtatcggaaggcgcggcgggattaagtggaacgggggtgcgttgagtgttcgcgttcgggtcggcggggtttgcgtgttcgtcgagcggcggggttgttgaggtcggacgtatacggtcggggttttaattgttttttcggtttgtttcgattcgttgcgatatcgcggtttgcgttgcggcggtcgttcgtagttcggttttcgttttttatttttttggtagtttcgttattttttcgtatttttgggttcgttgggcgcggttgggtaggtcgttggaatttgattcgagtgggtcgcgatcggtcgagg

SEQ ID NO: 15804 - DNA, 637 bp, Artificial Sequence
  chemically treated genomic DNA (Homo sapiens) CpG-island No: 15804
cctcgaccgatcgcgacccactcgaatcaaattccaacgacctacccaaccgcgcccaacgaacccaaaaatacgaaaaaataacgaaactaccaaaaaaataaaaaacgaaaaccgaactacgaacgaccgccgcaacgcaaaccgcgatatcgcaacgaatcgaaacaaaccgaaaaaacaattaaaaccccgaccgtatacgtccgacctcaacaaccccgccgctcgacgaacacgcaaaccccgccgacccgaacgcgaacactcaacgcacccccgttccacttaatcccgccgcgccttccgatacgccttccgatacgccttccgctccgccccttcaaacaaaaaatatcgacgccgccactatccgaccacaacctaacgctcttcgctatcgtttacgatctcgcgcaaaacgaccccgattctaatatttaacgtcgaataaatcgcgctcgactctactcgcgaaacccctcgaaccgccgtctccgtacccccgcgcccccctcccgtcgcgcgcctacgaccgaaccccgccccaaaacgaccaaacgacgacaaaacctatcaaactaactaaaaaaaaaacgcgaaaccgaaaataaaaaaaaaaaaattactaacgaaa

SEQ ID NO: 15805 - DNA, 979 bp, Artificial Sequence
  chemically treated genomic DNA (Homo sapiens) CpG-island No: 15805
ataagcgggagagtagggcgatttcgagtattttttcgttttggggcgcgagggtatttcgggcgggtagggttagttgtcggggcgcgtttttttttcgttagttcgttcgtcgggttcgttttttcgttagcgatatagcggattagggcggtgtttcgtttcgtattcgtcgtcgttttagtttttttgtttttaattttcggtttttattttcggttcggtatttttgattacgttgttgtagatggtggggcggaatttttcgcgcgcgcgttggtcgaagttttgttcgtggatgattcgtatttgttttaggaaggtggatttgtcgttttcgttcgcgtttagtagtaggatttttattagtcgttttatataggttttttttcgagataggtatttgtcgatttttttggatttgcgttgttgttcggtttcgttattcgttagtaggtagtcggggaagtatacggatagtacggatcgcgacggtaggaagttcgttattttgtcgtcgtcgtcgtcgtttcggcgggttttttcggttttttttattttttttttcggcggcgggcggtttcggtatcgaggttcgagggcggggagcgcggcggcggttcgagcgcgtttagggagggagggaattagcgaattgattcgtagggcgggtcgggtagggcgggttaggatagcgggggagggagggagggaaggagggcgggttcggtttcggaggggcggtggtttcggagcgtgcgcgttttcgttgtttttcggaggcgcgttcgtacgtcgcggtcgttttttcgtttttcgttttgggcggcgagttacgagttcgatgtgtcgttcgggtgttcgcgttcgtagtcgcggtcgggcgcgcggggagggttgaggaatcgcggttacgtgggttaggttggggagttcgattttttgttttttttttatggtttgagtttatttgtgggta

SEQ ID NO: 15806 - DNA, 979 bp, Artificial Sequence
  chemically treated genomic DNA (Homo sapiens) CpG-island No: 15806
tacccacaaataaactcaaaccataaaaaaaaaacaaaaaatcgaactccccaacctaacccacgtaaccgcgattcctcaaccctccccgcgcgcccgaccgcgactacgaacgcgaacacccgaacgacacatcgaactcgtaactcgccgcccaaaacgaaaaacgaaaaaacgaccgcgacgtacgaacgcgcctccgaaaaacaacgaaaacgcgcacgctccgaaaccaccgcccctccgaaaccgaacccgccctccttccctccctccctcccccgctatcctaacccgccctacccgacccgccctacgaatcaattcgctaattccctccctccctaaacgcgctcgaaccgccgccgcgctccccgccctcgaacctcgataccgaaaccgcccgccgccgaaaaaaaaaataaaaaaaaccgaaaaaacccgccgaaacgacgacgacgacgacaaaataacgaacttcctaccgtcgcgatccgtactatccgtatacttccccgactacctactaacgaataacgaaaccgaacaacaacgcaaatccaaaaaaatcgacaaatacctatctcgaaaaaaaacctatataaaacgactaataaaaatcctactactaaacgcgaacgaaaacgacaaatccaccttcctaaaacaaatacgaatcatccacgaacaaaacttcgaccaacgcgcgcgcgaaaaattccgccccaccatctacaacaacgtaatcaaaaataccgaaccgaaaataaaaaccgaaaattaaaaacaaaaaaactaaaacgacgacgaatacgaaacgaaacaccgccctaatccgctatatcgctaacgaaaaaacgaacccgacgaacgaactaacgaaaaaaaaacgcgccccgacaactaaccctacccgcccgaaataccctcgcgccccaaaacgaaaaaatactcgaaatcgccctactctcccgcttat

SEQ ID NO: 15807 - DNA, 979 bp, Artificial Sequence
  chemically treated genomic DNA (Homo sapiens) CpG-island No: 15807
tgtttataagtgggtttaggttatgaaagggaaatagaaagtcgggttttttagtttggtttacgtgatcgcggttttttagtttttttcgcgcgttcggtcgcggttgcgggcgcgggtattcgagcgatatatcgagttcgtgattcgtcgtttagggcgggaggcggagaagcggtcgcggcgtgcgagcgcgttttcgggaggtagcgggagcgcgtacgtttcggggttatcgttttttcggggtcgggttcgttttttttttttttttttttttttcgttgttttggttcgttttgttcggttcgttttgcgagttagttcgttggttttttttttttttgggcgcgttcgggtcgtcgtcgcgtttttcgttttcgagtttcggtgtcggagtcgttcgtcgtcggaggaggaggtggagggagtcggaggggttcgtcgaggcggcggcggcggcggtaagatggcggattttttgtcgtcgcggttcgtgttgttcgtgtgttttttcggttgtttgttgacgagtggcgaggtcgagtagtaacgtaagtttaaggagatcgataaatgtttgtttcgggaaaagatttatgtgaagcggttggtgaagattttgttgttgggcgcgggcgagagcggtaagtttatttttttgaagtagatgcggattatttacgggtaggatttcgattagcgcgcgcgcgaggagtttcgttttattatttatagtaacgtgattaaaggtgtcgggtcgggaatgggggtcgggggttaagggtaggggggttggggcggcggcgggtgcggggcggggtatcgttttggttcgttgtgtcgttggcgaaggaacgggttcggcgggcgggttggcgggaagggggcgcgtttcggtaattggttttgttcgttcggggtgttttcgcgttttagggcgagaggatgttcggggtcgttttgttttttcgtttgt

SEQ ID NO: 15808 - DNA, 979 bp, Artificial Sequence
  chemically treated genomic DNA (Homo sapiens) CpG-island No: 15808
acaaacgaaaaaacaaaacgaccccgaacatcctctcgccctaaaacgcgaaaacaccccgaacgaacaaaaccaattaccgaaacgcgcccccttcccgccaacccgcccgccgaacccgttccttcgccaacgacacaacgaaccaaaacgataccccgccccgcacccgccgccgccccaacccccctacccttaacccccgacccccattcccgacccgacacctttaatcacgttactataaataataaaacgaaactcctcgcgcgcgcgctaatcgaaatcctacccgtaaataatccgcatctacttcaaaaaaataaacttaccgctctcgcccgcgcccaacaacaaaatcttcaccaaccgcttcacataaatcttttcccgaaacaaacatttatcgatctccttaaacttacgttactactcgacctcgccactcgtcaacaaacaaccgaaaaaacacacgaacaacacgaaccgcgacgacaaaaaatccgccatcttaccgccgccgccgccgcctcgacgaacccctccgactccctccacctcctcctccgacgacgaacgactccgacaccgaaactcgaaaacgaaaaacgcgacgacgacccgaacgcgcccaaaaaaaaaaaaaaccaacgaactaactcgcaaaacgaaccgaacaaaacgaaccaaaacaacgaaaaaaaaaaaaaaaaaaaaaaaacgaacccgaccccgaaaaaacgataaccccgaaacgtacgcgctcccgctacctcccgaaaacgcgctcgcacgccgcgaccgcttctccgcctcccgccctaaacgacgaatcacgaactcgatatatcgctcgaatacccgcgcccgcaaccgcgaccgaacgcgcgaaaaaaactaaaaaaccgcgatcacgtaaaccaaactaaaaaacccgactttctatttccctttcataacctaaacccacttataaaca

SEQ ID NO: 15809 - DNA, 511 bp, Artificial Sequence
  chemically treated genomic DNA (Homo sapiens) CpG-island No: 15809
ttttgttagttttcggcgtcgttgttttttttttgcgtatcgttttttcgttcgttttttttttcgagtgttcgcgttatcgttgttttttcgtttattttcgtagtttatgcgttattttgtcgagttggttttgttatatttatcgtcgtttgttcgtatgtgttcgggtggatgttttatgttggtttttcgggttagacgattttcgttgcgcggcggtgttgttgcgtttgatcgttttttttaatttttcggttgattttcgttttgtcgttcggcggtatttttttttttgttgtcgttttcgtttttttttttttttgtttattttattttgtttcgttcgtttttattacgtttttatcgcgtttttatgttcgcgcgtttttcgtttttcgcgtttcgtattcgtcgttgttttgttgttgtttgatttcggttttttttttagttttgcgtttttgtttatttttttttttttttgttatttttttttgttatttttatt

SEQ ID NO: 15810 - DNA, 511 bp, Artificial Sequence
  chemically treated genomic DNA (Homo sapiens) CpG-island No: 15810
aataaaaataacaaaaaaaaataacaaaaaaaaaaaaaaataaacaaaaacgcaaaactaaaaaaaaaaccgaaatcaaacaacaacaaaacaacgacgaatacgaaacgcgaaaaacgaaaaacgcgcgaacataaaaacgcgataaaaacgtaataaaaacgaacgaaacaaaataaaataaacaaaaaaaaaaaaaaacgaaaacgacaacaaaaaaaaaaataccgccgaacgacaaaacgaaaatcaaccgaaaaattaaaaaaaacgatcaaacgcaacaacaccgccgcgcaacgaaaatcgtctaacccgaaaaaccaacataaaacatccacccgaacacatacgaacaaacgacgataaatataacaaaaccaactcgacaaaataacgcataaactacgaaaataaacgaaaaaacaacgataacgcgaacactcgaaaaaaaaaacgaacgaaaaaacgatacgcaaaaaaaaaacaacgacgccgaaaactaacaaaa

SEQ ID NO: 15811 - DNA, 511 bp, Artificial Sequence
  chemically treated genomic DNA (Homo sapiens) CpG-island No: 15811
ggtaagagtggtagaagagagtgataggagagaaagggagtagataggaacgtagagttaggaggaagatcgagattaaataatagtaagataacggcgagtgcggaacgcgagaggcggagggcgcgcgaatatgggagcgcgatggggacgtagtgagagcgagcggggtaggatgagatagatagagggagagggaagcggaagcggtaataaagagggaggtgtcgtcgggcgatagggcggagattaatcgaaagattaagaaggacgattaagcgtagtaatatcgtcgcgtagcgagagtcgtttggttcggaggattaatatgaagtatttattcgagtatatgcgagtaaacgacggtgagtatgataaagttaattcgataaagtggcgtataggttgcggaagtgaacggagagatagcgatagcgcgggtattcgagaggagagacggacgggggggcggtgcgtaaggagggagtagcgacgtcgggggttaatagaa

SEQ ID NO: 15812 - DNA, 511 bp, Artificial Sequence
  chemically treated genomic DNA (Homo sapiens) CpG-island No: 15812
ttctattaacccccgacgtcgctactccctccttacgcaccgcccccccgtccgtctctcctctcgaatacccgcgctatcgctatctctccgttcacttccgcaacctatacgccactttatcgaattaactttatcatactcaccgtcgtttactcgcatatactcgaataaatacttcatattaatcctccgaaccaaacgactctcgctacgcgacgatattactacgcttaatcgtccttcttaatctttcgattaatctccgccctatcgcccgacgacacctccctctttattaccgcttccgcttccctctccctctatctatctcatcctaccccgctcgctctcactacgtccccatcgcgctcccatattcgcgcgccctccgcctctcgcgttccgcactcgccgttatcttactattatttaatctcgatcttcctcctaactctacgttcctatctactccctttctctcctatcactctcttctaccactcttacc

SEQ ID NO: 15813 - DNA, 947 bp, Artificial Sequence
  chemically treated genomic DNA (Homo sapiens) CpG-island No: 15813
tgcgttttttttttagtttagggtttcgtttttggttcgtagtgtttcgggttgttttcgcgtttttgagtttatgggttgtcgtttttcgcgcgttgcggtggtcgcgcgggtcggagcggagcgggttggagcgcggcggttacggttcggggcgggggtgcgggttcgcgggggcggcgttgggcgttttttttcgttagttttttttcgtcggcgcggggggtggggtggggggggggcgcggtcgtcgttcggcgtttttaagggagcgggagggagcggcgaggcggcggcggttgcggtggcggtagtcgaggcgagcggggcgggggcgcgggcgcggcgttcggagttcgttcggggtcggaggcggtcggggtcgggttcgggaagcgcgaggagcgcgcgtagcgtcgtcggagttcgtcgttcgggatatggttaaggcgggtcgtgtaggtgagggcgggcgcggggagggtagggtcggggttcgggggagggattcgcgcgtttagaggaggggtcgtcggtttaggtgaatttttcgcgtaggtgggcggaggtttcgggagggcgtagggggcggtagcggggttggatttttcgcgcgtggagagggggtttcgcgcgtttttcgttttttttgcgttttcggttatttcgggggatatcgcgtttttttttttacggtttcgtcggaaagggttaggtttgttggcgtttcgggttagtttcgtcgttgggagttttttgtatttcgcggaggtttcgggtagattcgggtttcgttatcgaaggggatgtttcgcggtcgtcgtttcgttttatattttaacgtaaatcgggacgcgttttttgtttttgtagttttttttatttaggacgttataatttttcgttttagttttcgttattagtttagtttagagatttagattttt

SEQ ID NO: 15814 - DNA, 947 bp, Artificial Sequence
  chemically treated genomic DNA (Homo sapiens) CpG-island No: 15814
aaaaatctaaatctctaaactaaactaataacgaaaactaaaacgaaaaattataacgtcctaaataaaaaaaactacaaaaacaaaaaacgcgtcccgatttacgttaaaatataaaacgaaacgacgaccgcgaaacatccccttcgataacgaaacccgaatctacccgaaacctccgcgaaatacaaaaaactcccaacgacgaaactaacccgaaacgccaacaaacctaaccctttccgacgaaaccgtaaaaaaaaaaacgcgatatcccccgaaataaccgaaaacgcaaaaaaaacgaaaaacgcgcgaaaccccctctccacgcgcgaaaaatccaaccccgctaccgccccctacgccctcccgaaacctccgcccacctacgcgaaaaattcacctaaaccgacgacccctcctctaaacgcgcgaatccctcccccgaaccccgaccctaccctccccgcgcccgccctcacctacacgacccgccttaaccatatcccgaacgacgaactccgacgacgctacgcgcgctcctcgcgcttcccgaacccgaccccgaccgcctccgaccccgaacgaactccgaacgccgcgcccgcgcccccgccccgctcgcctcgactaccgccaccgcaaccgccgccgcctcgccgctccctcccgctcccttaaaaacgccgaacgacgaccgcgccccccccccaccccaccccccgcgccgacgaaaaaaaactaacgaaaaaaaacgcccaacgccgcccccgcgaacccgcacccccgccccgaaccgtaaccgccgcgctccaacccgctccgctccgacccgcgcgaccaccgcaacgcgcgaaaaacgacaacccataaactcaaaaacgcgaaaacaacccgaaacactacgaaccaaaaacgaaaccctaaactaaaaaaaaaacgca

SEQ ID NO: 15815 - DNA, 947 bp, Artificial Sequence
  chemically treated genomic DNA (Homo sapiens) CpG-island No: 15815
aggaatttgggtttttggattgagttggtgacgggggttggggcggggggttgtggcgttttggatggagagagttgtaggagtagggggcgcgtttcggtttgcgttggggtgtgggacgaagcggcggtcgcgggatatttttttcggtggcgaagttcgggtttgttcggggttttcgcggggtgtagagggtttttaacggcgggattggttcggggcgttagtagatttggtttttttcggcggggtcgtggagaaggggacgcggtgtttttcgaggtgatcgggggcgtaggaaggacggggggcgcgcggagttttttttttacgcgcgggaggtttagtttcgttatcgttttttacgttttttcgggattttcgtttatttgcgcgaggggtttatttgggtcggcggttttttttttagacgcgcgagtttttttttcgggtttcggttttgtttttttcgcgttcgtttttatttgtacggttcgttttggttatgtttcgggcggcgggtttcggcggcgttacgcgcgtttttcgcgtttttcgggttcggtttcgatcgttttcggtttcgaacggatttcgagcgtcgcgttcgcgttttcgtttcgttcgtttcggttgtcgttatcgtagtcgtcgtcgtttcgtcgttttttttcgtttttttaaaggcgtcgagcggcggtcgcgttttttttttattttatttttcgcgtcggcggggagggattgacgaaggaaggcgtttaacgtcgttttcgcgggttcgtattttcgtttcgggtcgtggtcgtcgcgttttagttcgtttcgtttcggttcgcgcggttatcgtagcgcgcgaggggcggtagtttatgggtttagagacgcggagatagttcgagatattgcgggttagagacggggttttggattgggagaggggcgta

SEQ ID NO: 15816 - DNA, 947 bp, Artificial Sequence
  chemically treated genomic DNA (Homo sapiens) CpG-island No: 15816
tacgcccctctcccaatccaaaaccccgtctctaacccgcaatatctcgaactatctccgcgtctctaaacccataaactaccgcccctcgcgcgctacgataaccgcgcgaaccgaaacgaaacgaactaaaacgcgacgaccacgacccgaaacgaaaatacgaacccgcgaaaacgacgttaaacgccttccttcgtcaatccctccccgccgacgcgaaaaataaaataaaaaaaaaacgcgaccgccgctcgacgcctttaaaaaaacgaaaaaaaacgacgaaacgacgacgactacgataacgacaaccgaaacgaacgaaacgaaaacgcgaacgcgacgctcgaaatccgttcgaaaccgaaaacgatcgaaaccgaacccgaaaaacgcgaaaaacgcgcgtaacgccgccgaaacccgccgcccgaaacataaccaaaacgaaccgtacaaataaaaacgaacgcgaaaaaaacaaaaccgaaacccgaaaaaaaaactcgcgcgtctaaaaaaaaaaccgccgacccaaataaacccctcgcgcaaataaacgaaaatcccgaaaaaacgtaaaaaacgataacgaaactaaacctcccgcgcgtaaaaaaaaaactccgcgcgccccccgtccttcctacgcccccgatcacctcgaaaaacaccgcgtccccttctccacgaccccgccgaaaaaaaccaaatctactaacgccccgaaccaatcccgccgttaaaaaccctctacaccccgcgaaaaccccgaacaaacccgaacttcgccaccgaaaaaaatatcccgcgaccgccgcttcgtcccacaccccaacgcaaaccgaaacgcgccccctactcctacaactctctccatccaaaacgccacaaccccccgccccaacccccgtcaccaactcaatccaaaaacccaaattcct

SEQ ID NO: 15817 - DNA, 577 bp, Artificial Sequence
  chemically treated genomic DNA (Homo sapiens) CpG-island No: 15817
tttgttcgcgattatgaagagggggagcgacgtttttaatagttggaataaagtttatttgagattggaaatgattttcgggtttgttagaagcgtatttttattcgtagtcgtttttttttcgagtttagcgcggagtagtcgggtttgaggatgttagcgagtagttaattagcgttcgcggtttaaggtaagagatgagtttgtagtttagtttgttaattacgcgtttttttcgttcggtttataattcgggtttcgggaagggtatcgtttagtaaatttgggtaaagttcgcgtttcggacgtcgcggggtttcggggggacgcggtgggtcggattttttgttatcgtcgcggtttttcgttggttagggttagggcgcgggggttttgattcgggcgtttatatggcgagggtttggcgtgggtatgaacgggtggtttttttgttggcggggatcgtgattcgttgggacgtgggttcgcgaggaatcgagggtagaaagtatagggatgtttttagaagtttcgttcgggtaggttaggattagagggtgggggaacgtattttttt

SEQ ID NO: 15818 - DNA, 577 bp, Artificial Sequence
  chemically treated genomic DNA (Homo sapiens) CpG-island No: 15818
aaaaaaatacgttcccccaccctctaatcctaacctacccgaacgaaacttctaaaaacatccctatactttctaccctcgattcctcgcgaacccacgtcccaacgaatcacgatccccgccaacaaaaaaaccacccgttcatacccacgccaaaccctcgccatataaacgcccgaatcaaaacccccgcgccctaaccctaaccaacgaaaaaccgcgacgataacaaaaaatccgacccaccgcgtccccccgaaaccccgcgacgtccgaaacgcgaactttacccaaatttactaaacgatacccttcccgaaacccgaattataaaccgaacgaaaaaaacgcgtaattaacaaactaaactacaaactcatctcttaccttaaaccgcgaacgctaattaactactcgctaacatcctcaaacccgactactccgcgctaaactcgaaaaaaaaacgactacgaataaaaatacgcttctaacaaacccgaaaatcatttccaatctcaaataaactttattccaactattaaaaacgtcgctccccctcttcataatcgcgaacaaa

SEQ ID NO: 15819 - DNA, 577 bp, Artificial Sequence
  chemically treated genomic DNA (Homo sapiens) CpG-island No: 15819
gagggggtgcgtttttttattttttgattttgatttgttcgagcggggtttttggaaatatttttgtgttttttattttcgatttttcgcgggtttacgttttaacgggttacggttttcgttagtaaaggagttattcgtttatgtttacgttaagttttcgttatgtgaacgttcgggttaaagttttcgcgttttaattttggttagcgggggatcgcggcggtagtagagggttcggtttatcgcgttttttcgaagtttcgcggcgttcggggcgcgggttttgtttaagtttgttgggcgatgtttttttcggagttcgagttgtgggtcgggcgggaggggcgcgtgattgataggttgaattatagatttattttttattttaggtcgcgggcgttgattggttgttcgttgatatttttaaattcggttgtttcgcgttgggttcgggaggggggcggttgcgggtggaggtgcgtttttgataagttcgaaagttatttttaattttaagtggattttgttttaattattgggggcgtcgttttttttttttatggtcgcgggtaaa

SEQ ID NO: 15820 - DNA, 577 bp, Artificial Sequence
  chemically treated genomic DNA (Homo sapiens) CpG-island No: 15820
tttacccgcgaccataaaaaaaaaaaacgacgcccccaataattaaaacaaaatccacttaaaattaaaaataactttcgaacttatcaaaaacgcacctccacccgcaaccgcccccctcccgaacccaacgcgaaacaaccgaatttaaaaatatcaacgaacaaccaatcaacgcccgcgacctaaaataaaaaataaatctataattcaacctatcaatcacgcgcccctcccgcccgacccacaactcgaactccgaaaaaaacatcgcccaacaaacttaaacaaaacccgcgccccgaacgccgcgaaacttcgaaaaaacgcgataaaccgaaccctctactaccgccgcgatcccccgctaaccaaaattaaaacgcgaaaactttaacccgaacgttcacataacgaaaacttaacgtaaacataaacgaataactcctttactaacgaaaaccgtaacccgttaaaacgtaaacccgcgaaaaatcgaaaataaaaaacacaaaaatatttccaaaaaccccgctcgaacaaatcaaaatcaaaaaataaaaaaacgcaccccctc

SEQ ID NO: 15821 - DNA, 1247 bp, Artificial Sequence
  chemically treated genomic DNA (Homo sapiens) CpG-island No: 15821
gcgtttttatcgttcgaggttttttttattttttttggacgcgtacgattttttgtttcgagatcgggaatagttcgttttatttatttatttagttttttcggttttcgtttcgtagggcgaaggcggagggtggggaaggagttcgaggtaaggacggttcgtcggaggttaggatggcggtagatagggtatcggcgtgaggatttcgagagggtattagagagcgggattgacgtttgaacgggcggggtcggggcggacggggttagggttcgaggcgtgcgtagagttcgagattcggcgggatgaggagagcggcggttggggggcgattagagattcggatattgaatagggcgatggattcggagtcggggaagttggagatcgaatttagggcgcgaatttcgattgcgaagtgggttgggtcgcgtcgggttagggtttgagttcgagatttcggcggggttaaggatagcgggagggaaaaattggtttagttgtagcgtaggagggagagataggtaggtcggggagcgggcggggggcgcggcgggtattgattcgaagtaggaggcggcggcggcgggtagcgttagtaggtagagttcggttagggttagcgcgggcggggggcgtatggtgttggcggcgttgcgttttttagtattttttcgcgtcgtttaagttcgtagtttcgttattattcgttcgcgggattttaaattcgggtggggcggggtaggcggcgttgggaaaggaggagattgggaggttttttagtttcggcggcgagtttttcgttttattggttttatcgttttcgtttcgtttcgtcgcgggtggggtagtcgtttttggatcgttttcgttttttttttattgtttcgtttttcggttttaggtgagcgtttatttggcgtcgcgttcgttcggggtcgcggtggttgaacgtgaagtttttcgggtttggagaggcggggaggagggtacgaggcggggacggaggagattttgttttttcgggatggggcggaggtaagcgtaatggttttttcgaggtagagaaggtggaggggtaggaggagggacgtatttggagtcggtggaaaattcgggttattgttcgtttttttgtcgggtaagtgcggttttttcgtcgtagttcgtagatttagggtagggtcgggttttggtgtagaatcgttttttggaagcgggggaaatgtatgtttaatggttta

SEQ ID NO: 15822 - DNA, 1247 bp, Artificial Sequence
  chemically treated genomic DNA (Homo sapiens) CpG-island No: 15822
taaaccattaaacatacatttcccccgcttccaaaaaacgattctacaccaaaacccgaccctaccctaaatctacgaactacgacgaaaaaaccgcacttacccgacaaaaaaacgaacaataacccgaattttccaccgactccaaatacgtccctcctcctacccctccaccttctctacctcgaaaaaaccattacgcttacctccgccccatcccgaaaaaacaaaatctcctccgtccccgcctcgtaccctcctccccgcctctccaaacccgaaaaacttcacgttcaaccaccgcgaccccgaacgaacgcgacgccaaataaacgctcacctaaaaccgaaaaacgaaacaataaaaaaaaaacgaaaacgatccaaaaacgactaccccacccgcgacgaaacgaaacgaaaacgataaaaccaataaaacgaaaaactcgccgccgaaactaaaaaacctcccaatctcctcctttcccaacgccgcctaccccgccccacccgaatttaaaatcccgcgaacgaataataacgaaactacgaacttaaacgacgcgaaaaaatactaaaaaacgcaacgccgccaacaccatacgccccccgcccgcgctaaccctaaccgaactctacctactaacgctacccgccgccgccgcctcctacttcgaatcaatacccgccgcgccccccgcccgctccccgacctacctatctctccctcctacgctacaactaaaccaatttttccctcccgctatccttaaccccgccgaaatctcgaactcaaaccctaacccgacgcgacccaacccacttcgcaatcgaaattcgcgccctaaattcgatctccaacttccccgactccgaatccatcgccctattcaatatccgaatctctaatcgccccccaaccgccgctctcctcatcccgccgaatctcgaactctacgcacgcctcgaaccctaaccccgtccgccccgaccccgcccgttcaaacgtcaatcccgctctctaataccctctcgaaatcctcacgccgataccctatctaccgccatcctaacctccgacgaaccgtccttacctcgaactccttccccaccctccgccttcgccctacgaaacgaaaaccgaaaaaactaaataaataaataaaacgaactattcccgatctcgaaacaaaaaatcgtacgcgtccaaaaaaaataaaaaaaacctcgaacgataaaaacgc

SEQ ID NO: 15823 - DNA, 1247 bp, Artificial Sequence
  chemically treated genomic DNA (Homo sapiens) CpG-island No: 15823
tgagttattggatatgtatttttttcgtttttagagagcggttttgtattaggattcggttttgttttgagtttgcgggttgcggcgaagagatcgtatttgttcggtaggagggcggataatgattcgggttttttatcgattttagatgcgtttttttttttatttttttattttttttatttcggagaagttattgcgtttgttttcgttttatttcggagaggtagaatttttttcgttttcgtttcgtattttttttttcgtttttttaggttcggggggttttacgtttagttatcgcgatttcgggcgggcgcggcgttaggtgagcgtttatttggggtcggagggcggggtaatgggggaggggcgggggcggtttaggggcggttgttttattcgcgacggggcggggcgagggcggtggggttaatggggcggggggttcgtcgtcggggttggggagttttttaattttttttttttttagcgtcgtttgtttcgttttattcgggtttaaagtttcgcgggcgggtggtggcggagttgcgagtttgagcggcgcgaggagatgttagagggcgtagcgtcgttagtattatgcgtttttcgttcgcgttggttttggtcgggttttgtttgttggcgttgttcgtcgtcgtcgttttttatttcgggttagtgttcgtcgcgtttttcgttcgtttttcggtttgtttgttttttttttttgcgttatagttgggttaatttttttttttcgttgtttttggtttcgtcgaggtttcgaatttagattttagttcggcgcgatttaatttatttcgtagtcggagttcgcgttttgagttcggtttttagttttttcggtttcgaatttatcgttttgtttagtgttcgagtttttggtcgttttttagtcgtcgttttttttatttcgtcgggtttcggattttgcgtacgtttcggattttggtttcgttcgtttcggtttcgttcgtttaggcgttagtttcgttttttgatgttttttcgggatttttacgtcggtgttttgtttgtcgttattttggttttcggcgagtcgtttttgtttcggattttttttttatttttcgttttcgttttgcggagcggagatcgagagggttgggtggatgggtgggacgggttgttttcggtttcggggtagaggatcgtgcgcgtttagggagaatgggggaaatttcggacggtgagagcgt

SEQ ID NO: 15824 - DNA, 1247 bp, Artificial Sequence
  chemically treated genomic DNA (Homo sapiens) CpG-island No: 15824
acgctctcaccgtccgaaatttcccccattctccctaaacgcgcacgatcctctaccccgaaaccgaaaacaacccgtcccacccatccacccaaccctctcgatctccgctccgcaaaacgaaaacgaaaaataaaaaaaaaatccgaaacaaaaacgactcgccgaaaaccaaaataacgacaaacaaaacaccgacgtaaaaatcccgaaaaaacatcaaaaaacgaaactaacgcctaaacgaacgaaaccgaaacgaacgaaaccaaaatccgaaacgtacgcaaaatccgaaacccgacgaaataaaaaaaacgacgactaaaaaacgaccaaaaactcgaacactaaacaaaacgataaattcgaaaccgaaaaaactaaaaaccgaactcaaaacgcgaactccgactacgaaataaattaaatcgcgccgaactaaaatctaaattcgaaacctcgacgaaaccaaaaacaacgaaaaaaaaaaattaacccaactataacgcaaaaaaaaaaaacaaacaaaccgaaaaacgaacgaaaaacgcgacgaacactaacccgaaataaaaaacgacgacgacgaacaacgccaacaaacaaaacccgaccaaaaccaacgcgaacgaaaaacgcataatactaacgacgctacgccctctaacatctcctcgcgccgctcaaactcgcaactccgccaccacccgcccgcgaaactttaaacccgaataaaacgaaacaaacgacgctaaaaaaaaaaaaaattaaaaaactccccaaccccgacgacgaaccccccgccccattaaccccaccgccctcgccccgccccgtcgcgaataaaacaaccgcccctaaaccgcccccgcccctcccccattaccccgccctccgaccccaaataaacgctcacctaacgccgcgcccgcccgaaatcgcgataactaaacgtaaaaccccccgaacctaaaaaaacgaaaaaaaaaatacgaaacgaaaacgaaaaaaattctacctctccgaaataaaacgaaaacaaacgcaataacttctccgaaataaaaaaaataaaaaaataaaaaaaaaaacgcatctaaaatcgataaaaaacccgaatcattatccgccctcctaccgaacaaatacgatctcttcgccgcaacccgcaaactcaaaacaaaaccgaatcctaatacaaaaccgctctctaaaaacgaaaaaaatacatatccaataactca

SEQ ID NO: 15825 - DNA, 1236 bp, Artificial Sequence
  chemically treated genomic DNA (Homo sapiens) CpG-island No: 15825
gatcgggggtcggggttcggggagtcgtgggcgtcggtacggtggtcgttataggggtggtcggcgtcgggttagtggtcgtcgaaagggtggtcggcgcgggtttggtcggcgtttgagaggtggtcgaagtgcgtttcgtcgtcggaggggtggtcggcgaggggtcgagcggcgtttgaaaggtggtggaagagggtttagtagtcgtttaaagaggggtggttttcggggattgggttggagaagtcgtagttaggggtcggtggacggtggcgcgcgggggttcggttttcggggtttgggtcgtgggagtcgtcgttttagggaaggggtggttgggttcgtttcgtaattcggggttcggcgacgcgtttatttgtttcgcggtttcgtcgttatcggtgatatttttcgtcgaggcggttgaggcgacggcggcggcggcggcggcggcggcgtagtataatagggcgaggtcgtttaggttcggtaggttttttatggcgcgttcggtttcgttatttatttatttagttagtcggttggttagttatttttttttcgttgtaattcgattaaggaagttttcgtaatcgtcgtcgttatcgttatcgggcgtattatcgttatttttttttgataggcggtcggtttcgcgggcgggttttagcgcggagggagcgatcggatcgagcgcggatcgttcgtttttttcgattggtagtcgcgtttaattaatgggaagttatagtcgtttacgtgattcgttcgtttttcggtttttttgtagtttcgtaggttaattagaggacgtttaggagagggggcggttcgtgaggcgggagaagggtggtgcgagtttagttttagttcgtcgggttcgcggcggtttcggttttgtttgtttaaagagtggggcgcgggtttcgggtatcgggcgtcgcggagtagataaaggatgcgtttcgcgcggtagacgtcgggtttagttatttgttttatcgggttgcgagtacgagcggggggtggaattagtattcgggagtattttcgtttttttgaataatggggcgttagcgtcgtattttagttcgggcggggatcgcgcgggaatttcgcgatgggagagggtagcggtagcgacgatgtagagtttggtatgttttttgttgttttagagagtttggtcgtagttttgcgaggtttttgtcgttatttttattttagagatgg

SEQ ID NO: 15826 - DNA, 1236 bp, Artificial Sequence
  chemically treated genomic DNA (Homo sapiens) CpG-island No: 15826
ccatctctaaaataaaaataacgacaaaaacctcgcaaaactacgaccaaactctctaaaacaacaaaaaacataccaaactctacatcgtcgctaccgctaccctctcccatcgcgaaattcccgcgcgatccccgcccgaactaaaatacgacgctaacgccccattattcaaaaaaacgaaaatactcccgaatactaattccaccccccgctcgtactcgcaacccgataaaacaaataactaaacccgacgtctaccgcgcgaaacgcatcctttatctactccgcgacgcccgatacccgaaacccgcgccccactctttaaacaaacaaaaccgaaaccgccgcgaacccgacgaactaaaactaaactcgcaccacccttctcccgcctcacgaaccgccccctctcctaaacgtcctctaattaacctacgaaactacaaaaaaaccgaaaaacgaacgaatcacgtaaacgactataacttcccattaattaaacgcgactaccaatcgaaaaaaacgaacgatccgcgctcgatccgatcgctccctccgcgctaaaacccgcccgcgaaaccgaccgcctatcaaaaaaaaataacgataatacgcccgataacgataacgacgacgattacgaaaacttccttaatcgaattacaacgaaaaaaaaataactaaccaaccgactaactaaataaataaataacgaaaccgaacgcgccataaaaaacctaccgaacctaaacgacctcgccctattatactacgccgccgccgccgccgccgccgccgtcgcctcaaccgcctcgacgaaaaatatcaccgataacgacgaaaccgcgaaacaaataaacgcgtcgccgaaccccgaattacgaaacgaacccaaccaccccttccctaaaacgacgactcccacgacccaaaccccgaaaaccgaacccccgcgcgccaccgtccaccgacccctaactacgacttctccaacccaatccccgaaaaccacccctctttaaacgactactaaaccctcttccaccacctttcaaacgccgctcgacccctcgccgaccacccctccgacgacgaaacgcacttcgaccacctctcaaacgccgaccaaacccgcgccgaccaccctttcgacgaccactaacccgacgccgaccacccctataacgaccaccgtaccgacgcccacgactccccgaaccccgacccccgatc

SEQ ID NO: 15827 - DNA, 1236 bp, Artificial Sequence
  chemically treated genomic DNA (Homo sapiens) CpG-island No: 15827
ttatttttgaaatgggaatggcggtagagatttcgtaaggttgcgattaggttttttggagtagtagagggtatgttaagttttatatcgtcgttgtcgttgtttttttttatcgcggggttttcgcgcggttttcgttcgagttggggtgcggcgttggcgttttattgtttaggagggcggggatgttttcgagtgttgattttatttttcgttcgtgttcgtagttcggtggagtagatgattaggttcggcgtttgtcgcgcggggcgtattttttgtttgtttcgcggcgttcggtgttcgaggttcgcgttttattttttgggtagataaagtcggggtcgtcgcgagttcggcgggttagagttgggttcgtattatttttttttcgttttacggatcgtttttttttttggacgttttttgattggtttacggggttataaagaggtcgggaagcgggcggattacgtgggcgattgtggttttttattggttaggcgcggttgttaatcgaggagggcgggcggttcgcgttcggttcggtcgtttttttcgcgttggggttcgttcgcggggtcggtcgtttgttagagggaggtggcgatggtgcgttcggtggcggtggcggcggcggttgcggaggtttttttggtcggattgtaacgaggagaagatgattgattaatcgattggttgaatgaatgaatggcggagtcgagcgcgttatgaggagtttgtcgagtttgggcggtttcgttttgttgtgttgcgtcgtcgtcgtcgtcgtcgtcgtcgtcgttttagtcgtttcggcggggaatgttatcggtggcggcggggtcgcggggtaggtggacgcgtcgtcgggtttcgggttgcggggcgagtttagttattttttttttagggcgacggtttttacggtttaggtttcgaggatcgggttttcgcgcgttatcgtttatcgatttttggttgcgatttttttagtttagttttcggagattatttttttttgggcgattgttggatttttttttattattttttaggcgtcgttcggtttttcgtcgattattttttcggcggcggaacgtatttcgattattttttaggcgtcgattagattcgcgtcgattattttttcgacgattattggttcggcgtcgattatttttgtagcgattatcgtatcggcgtttacgatttttcggatttcgattttcgatt

SEQ ID NO: 15828 - DNA, 1236 bp, Artificial Sequence
  chemically treated genomic DNA (Homo sapiens) CpG-island No: 15828
aatcgaaaatcgaaatccgaaaaatcgtaaacgccgatacgataatcgctacaaaaataatcgacgccgaaccaataatcgtcgaaaaaataatcgacgcgaatctaatcgacgcctaaaaaataatcgaaatacgttccgccgccgaaaaaataatcgacgaaaaaccgaacgacgcctaaaaaataataaaaaaaaatccaacaatcgcccaaaaaaaaataatctccgaaaactaaactaaaaaaatcgcaaccaaaaatcgataaacgataacgcgcgaaaacccgatcctcgaaacctaaaccgtaaaaaccgtcgccctaaaaaaaaaataactaaactcgccccgcaacccgaaacccgacgacgcgtccacctaccccgcgaccccgccgccaccgataacattccccgccgaaacgactaaaacgacgacgacgacgacgacgacgacgacgcaacacaacaaaacgaaaccgcccaaactcgacaaactcctcataacgcgctcgactccgccattcattcattcaaccaatcgattaatcaatcatcttctcctcgttacaatccgaccaaaaaaacctccgcaaccgccgccgccaccgccaccgaacgcaccatcgccacctccctctaacaaacgaccgaccccgcgaacgaaccccaacgcgaaaaaaacgaccgaaccgaacgcgaaccgcccgccctcctcgattaacaaccgcgcctaaccaataaaaaaccacaatcgcccacgtaatccgcccgcttcccgacctctttataaccccgtaaaccaatcaaaaaacgtccaaaaaaaaaaacgatccgtaaaacgaaaaaaaaataatacgaacccaactctaacccgccgaactcgcgacgaccccgactttatctacccaaaaaataaaacgcgaacctcgaacaccgaacgccgcgaaacaaacaaaaaatacgccccgcgcgacaaacgccgaacctaatcatctactccaccgaactacgaacacgaacgaaaaataaaatcaacactcgaaaacatccccgccctcctaaacaataaaacgccaacgccgcaccccaactcgaacgaaaaccgcgcgaaaaccccgcgataaaaaaaaacaacgacaacgacgatataaaacttaacataccctctactactccaaaaaacctaatcgcaaccttacgaaatctctaccgccattcccatttcaaaaataa

SEQ ID NO: 15829 - DNA, 1161 bp, Artificial Sequence
  chemically treated genomic DNA (Homo sapiens) CpG-island No: 15829
cgagggcggtgtaaggattcggatagaattttttcggtcgtagattttttttagggtatatttggtttggcgcggtcgcgggggtttcggggttgcgcgcgtaattcgttcgaggaattgttaacggtcgcggagtttcggtagtttcggcggtttcgcgcgtttatagtttggggagtttcgggaggtaacggcggtcgcgcggttcgggggtcggggttttaaggcgttttcgtcgttttcggtttttagttcgtttttcggagttcgttacggtttagcgtcgttcgttttatttgtgcggtttcggcgtttttttcgtcgtcggtcgttttcgtagaagtttagcgtttttgtgagttgaggcgtcggcgggggtttttgttcgtcgttgtcgttcggttgtttcgtttcgtcgcggtcgtttcgttgcgggtcgtttacgtcgttatcgtcgttttttttcggagcggtcgcgtcgtcgacgttcgttatgtttcgagtataataaattgttttcgtcgtttttttttagtttttgttttcggtcggtttttttttcgtttcgtttcgtttttcgtcggagttcgagtcgtcgtcgtcgtcgtcgtcgttattcgcggttcgtcgatcggcgcgagttattggcgttagcgacgcgtgtgaggtcgttgtcgtcgtcgtcgtcgttacggtagtcgttattttttttttgttttcgtcgtggcgggcgacggtttttcgcgtcgtggttggttcggtcggtcggggtatcgcgtcgggttttatgtagtcgggttgcgcggtttcgtagagcgggcgtttcggggttcgagtcggggattcggtaggagcgggtcggggatggcggcggcgggcggcgggtcggtcgtggagtttcggagaggcggtcgttattatcgttgttcgtagtttgcgaggtgttcggcggttcgtttagggttttttttgtagattcggtgttcggagtgcgtcggcgtcgttcgttaggttttggtattgttggcgcggtcgcggcggcgggggttcggttttagattatcgatttttacgagcgtcggttttgtttgttcgttattttggttttattttttttgtatatttatgtttgtttgttatattttttggtttttgagtgtt

SEQ ID NO: 15830 - DNA, 1161 bp, Artificial Sequence
  chemically treated genomic DNA (Homo sapiens) CpG-island No: 15830
aacactcaaaaaccaaaaaatataacaaacaaacataaatatacaaaaaaaataaaaccaaaataacgaacaaacaaaaccgacgctcgtaaaaatcgataatctaaaaccgaacccccgccgccgcgaccgcgccaacaataccaaaacctaacgaacgacgccgacgcactccgaacaccgaatctacaaaaaaaaccctaaacgaaccgccgaacacctcgcaaactacgaacaacgataataacgaccgcctctccgaaactccacgaccgacccgccgcccgccgccgccatccccgacccgctcctaccgaatccccgactcgaaccccgaaacgcccgctctacgaaaccgcgcaacccgactacataaaacccgacgcgataccccgaccgaccgaaccaaccacgacgcgaaaaaccgtcgcccgccacgacgaaaacaaaaaaaaaataacgactaccgtaacgacgacgacgacgacaacgacctcacacgcgtcgctaacgccaataactcgcgccgatcgacgaaccgcgaataacgacgacgacgacgacgacgactcgaactccgacgaaaaacgaaacgaaacgaaaaaaaaaccgaccgaaaacaaaaactaaaaaaaaacgacgaaaacaatttattatactcgaaacataacgaacgtcgacgacgcgaccgctccgaaaaaaaacgacgataacgacgtaaacgacccgcaacgaaacgaccgcgacgaaacgaaacaaccgaacgacaacgacgaacaaaaacccccgccgacgcctcaactcacaaaaacgctaaacttctacgaaaacgaccgacgacgaaaaaaacgccgaaaccgcacaaataaaacgaacgacgctaaaccgtaacgaactccgaaaaacgaactaaaaaccgaaaacgacgaaaacgccttaaaaccccgacccccgaaccgcgcgaccgccgttacctcccgaaactccccaaactataaacgcgcgaaaccgccgaaactaccgaaactccgcgaccgttaacaattcctcgaacgaattacgcgcgcaaccccgaaacccccgcgaccgcgccaaaccaaatataccctaaaaaaaatctacgaccgaaaaaattctatccgaatccttacaccgccctcg

SEQ ID NO: 15831 - DNA, 1161 bp, Artificial Sequence
  chemically treated genomic DNA (Homo sapiens) CpG-island No: 15831
gatatttagaggttagggaatgtaataggtaagtataaatatgtagaagagatggaattaaaatagcgggtaggtagggtcggcgttcgtgggggtcggtgatttggagtcgggttttcgtcgtcgcggtcgcgttagtagtgttaagatttggcgggcggcgtcggcgtatttcgggtatcgagtttgtaaaagaggttttgagcggatcgtcggatatttcgtagattgcgggtagcggtggtggcggtcgttttttcggggttttacggtcgattcgtcgttcgtcgtcgttattttcggttcgtttttgtcgggttttcgattcgagtttcggagcgttcgttttgcgggatcgcgtagttcggttgtatggagttcggcgcggtgtttcggtcggtcgagttagttacggcgcgagaaatcgtcgttcgttacggcgagggtaggaagaagatggcggttatcgtggcggcggcggcggcggtagcggttttatacgcgtcgttgacgttaatggttcgcgtcggtcggcgggtcgcggatggcggcggcggcggcggcggcggttcgggtttcggcgaggggcggggcgaggcggggagggggtcggtcggaggtagaggttggagggaggcggcggggatagtttgttgtgttcggaatatggcgggcgtcggcgacgcggtcgtttcgggagaaggcggcggtggcggcgtggacggttcgtagcgggacggtcgcggcgaggcggagtagtcgggcggtagcggcggataggggttttcgtcggcgttttagtttatagagacgttgggtttttacgagagcgatcggcggcgggagaggcgtcggggtcgtataggtgaggcgggcggcgttaggtcgtggcgggtttcgaggggcggattggggatcgagggcggcgggggcgttttggaatttcggttttcgagtcgcgcggtcgtcgttgtttttcggggttttttaggttgtgggcgcgcggagtcgtcgaggttgtcgaggtttcgcggtcgttgatagtttttcgggcgggttgcgcgcgtagtttcgaggttttcgcggtcgcgttaggttaggtgtgttttagaaggggtttgcggtcgggaaagttttgttcgggtttttgtatcgttttcg

SEQ ID NO: 15832 - DNA, 1161 bp, Artificial Sequence
  chemically treated genomic DNA (Homo sapiens) CpG-island No: 15832
cgaaaacgatacaaaaacccgaacaaaactttcccgaccgcaaaccccttctaaaacacacctaacctaacgcgaccgcgaaaacctcgaaactacgcgcgcaacccgcccgaaaaactatcaacgaccgcgaaacctcgacaacctcgacgactccgcgcgcccacaacctaaaaaaccccgaaaaacaacgacgaccgcgcgactcgaaaaccgaaattccaaaacgcccccgccgccctcgatccccaatccgcccctcgaaacccgccacgacctaacgccgcccgcctcacctatacgaccccgacgcctctcccgccgccgatcgctctcgtaaaaacccaacgtctctataaactaaaacgccgacgaaaacccctatccgccgctaccgcccgactactccgcctcgccgcgaccgtcccgctacgaaccgtccacgccgccaccgccgccttctcccgaaacgaccgcgtcgccgacgcccgccatattccgaacacaacaaactatccccgccgcctccctccaacctctacctccgaccgaccccctccccgcctcgccccgcccctcgccgaaacccgaaccgccgccgccgccgccgccgccatccgcgacccgccgaccgacgcgaaccattaacgtcaacgacgcgtataaaaccgctaccgccgccgccgccgccacgataaccgccatcttcttcctaccctcgccgtaacgaacgacgatttctcgcgccgtaactaactcgaccgaccgaaacaccgcgccgaactccatacaaccgaactacgcgatcccgcaaaacgaacgctccgaaactcgaatcgaaaacccgacaaaaacgaaccgaaaataacgacgacgaacgacgaatcgaccgtaaaaccccgaaaaaacgaccgccaccaccgctacccgcaatctacgaaatatccgacgatccgctcaaaacctcttttacaaactcgatacccgaaatacgccgacgccgcccgccaaatcttaacactactaacgcgaccgcgacgacgaaaacccgactccaaatcaccgacccccacgaacgccgaccctacctacccgctattttaattccatctcttctacatatttatacttacctattacattccctaacctctaaatatc

SEQ ID NO: 15833 - DNA, 618 bp, Artificial Sequence
  chemically treated genomic DNA (Homo sapiens) CpG-island No: 15833
acgtcgtgcgtttgcggttaggagtattcggaatgggataagttttttattatgttggagaattcgtagatgagagagcgtatgttgttgtaagttacggacgacgttttgcggggcgagttgtagaggttgcgggaggagttgggtcggttcgcggaaagtttggcgaggtcgtgcgcgtcgggggttttcgtagaggttaggttgattagtgttttggacgagttgttgtaggcgattcgcgacgcgggtcgtaggttggcgcgtatggagggcgcggaggcgtagcgtttagaggaggcggggcgcgttttggtcgcggtgttagaggagttgcggtagacgcgagtcgatttgtacgcggtgtagggttgggttgttcggagttggttgtcggtaggtaaggaggtaagcggggtcgggattttttattgcggttttgtttcgggagcgcgcgtaacggtaagttaagttaggtaattttttaggggaagtttttatgggaagcgcgcgcgcgcgcgcgtatatatatatatatatatatatatatatatatatttttatttttgtatgcgcggttatagagtttaggtatattatataaggcgggaaaattgg

SEQ ID NO: 15834 - DNA, 618 bp, Artificial Sequence
  chemically treated genomic DNA (Homo sapiens) CpG-island No: 15834
ccaattttcccgccttatataatatacctaaactctataaccgcgcatacaaaaataaaaatatatatatatatatatatatatatatatatatacgcgcgcgcgcgcgcgcttcccataaaaacttcccctaaaaaattacctaacttaacttaccgttacgcgcgctcccgaaacaaaaccgcaataaaaaatcccgaccccgcttacctccttacctaccgacaaccaactccgaacaacccaaccctacaccgcgtacaaatcgactcgcgtctaccgcaactcctctaacaccgcgaccaaaacgcgccccgcctcctctaaacgctacgcctccgcgccctccatacgcgccaacctacgacccgcgtcgcgaatcgcctacaacaactcgtccaaaacactaatcaacctaacctctacgaaaacccccgacgcgcacgacctcgccaaactttccgcgaaccgacccaactcctcccgcaacctctacaactcgccccgcaaaacgtcgtccgtaacttacaacaacatacgctctctcatctacgaattctccaacataataaaaaacttatcccattccgaatactcctaaccgcaaacgcacgacgt

SEQ ID NO: 15835 - DNA, 618 bp, Artificial Sequence
  chemically treated genomic DNA (Homo sapiens) CpG-island No: 15835
ttaattttttcgttttgtatggtgtgtttgagttttgtgatcgcgtatgtagaaataggggtgtgtgtgtgtgtgtgtgtgtgtgtgtgtgtgtgcgcgcgcgcgcgcgcgttttttatgaaagttttttttagaaggttgtttggtttggtttgtcgttacgcgcgttttcggaataaagtcgtagtgggaggtttcggtttcgtttgtttttttatttgtcggtagttagtttcgggtagtttagttttgtatcgcgtgtaggtcggttcgcgtttgtcgtagtttttttagtatcgcggttagggcgcgtttcgttttttttgggcgttgcgttttcgcgttttttatacgcgttagtttgcggttcgcgtcgcgggtcgtttgtagtagttcgtttagagtattggttagtttggtttttgcgggagttttcggcgcgtacggtttcgttaggtttttcgcgagtcggtttagtttttttcgtagtttttgtagttcgtttcgtaggacgtcgttcgtggtttgtagtagtatgcgtttttttatttgcgagttttttagtatgatgaagagtttgttttatttcgagtgtttttgatcgtaggcgtacggcgt

SEQ ID NO: 15836 - DNA, 618 bp, Artificial Sequence
  chemically treated genomic DNA (Homo sapiens) CpG-island No: 15836
acgccgtacgcctacgatcaaaaacactcgaaataaaacaaactcttcatcatactaaaaaactcgcaaataaaaaaacgcatactactacaaaccacgaacgacgtcctacgaaacgaactacaaaaactacgaaaaaaactaaaccgactcgcgaaaaacctaacgaaaccgtacgcgccgaaaactcccgcaaaaaccaaactaaccaatactctaaacgaactactacaaacgacccgcgacgcgaaccgcaaactaacgcgtataaaaaacgcgaaaacgcaacgcccaaaaaaaacgaaacgcgccctaaccgcgatactaaaaaaactacgacaaacgcgaaccgacctacacgcgatacaaaactaaactacccgaaactaactaccgacaaataaaaaaacaaacgaaaccgaaacctcccactacgactttattccgaaaacgcgcgtaacgacaaaccaaaccaaacaaccttctaaaaaaaactttcataaaaaacgcgcgcgcgcgcgcgcacacacacacacacacacacacacacacacacacccctatttctacatacgcgatcacaaaactcaaacacaccatacaaaacgaaaaaattaa

SEQ ID NO: 15837 - DNA, 611 bp, Artificial Sequence
  chemically treated genomic DNA (Homo sapiens) CpG-island No: 15837
aggcgggtaggggttgggaggcgggtaggggttgggaggcgggtaggggttgggaggcgggtaaggtttgggaggcgggtaggggttgggaggcgggtaggggttgggaggcgggtaggggttgggaggcgggtaaggtttgggaggcgggtaggggttgggaggcgggtagggtttgggaggcgggtaacgtttgggaggcgggtaggggttgggaggcgggtaggggttgggaggcgggtaggggttgggaggcgggtaaggtttgggaggcgggtaggggttgggaggcgggtagggtttgggaggcgggtagggtttgggaggcgggtaggggttgggaggcgggtaggggttgggaggcgggtaggggttgggaggcgggtagggtttgggaggcgggtaaggtttgggaggcgggtagggtttgggaggcggataaggtttgggaggcgggtaggggttgggaggcgggtagggtttgggaggcgggtagggtttgggaggcgggtaggggttgggaggcgggtaaggtttgggaggcgggtagggtttgggaggcgggtaggggttgggaggcgggtaggttttttatcggttttgtttttttt

SEQ ID NO: 15838 - DNA, 611 bp, Artificial Sequence
  chemically treated genomic DNA (Homo sapiens) CpG-island No: 15838
aaaaaaaacaaaaccgataaaaaacctacccgcctcccaacccctacccgcctcccaaaccctacccgcctcccaaaccttacccgcctcccaacccctacccgcctcccaaaccctacccgcctcccaaaccctacccgcctcccaacccctacccgcctcccaaaccttatccgcctcccaaaccctacccgcctcccaaaccttacccgcctcccaaaccctacccgcctcccaacccctacccgcctcccaacccctacccgcctcccaacccctacccgcctcccaaaccctacccgcctcccaaaccctacccgcctcccaacccctacccgcctcccaaaccttacccgcctcccaacccctacccgcctcccaacccctacccgcctcccaacccctacccgcctcccaaacgttacccgcctcccaaaccctacccgcctcccaacccctacccgcctcccaaaccttacccgcctcccaacccctacccgcctcccaacccctacccgcctcccaacccctacccgcctcccaaaccttacccgcctcccaacccctacccgcctcccaacccctacccgcctcccaacccctacccgcct

SEQ ID NO: 15839 - DNA, 611 bp, Artificial Sequence
  chemically treated genomic DNA (Homo sapiens) CpG-island No: 15839
agaagaagtagagtcgataggaaatttattcgttttttagtttttattcgttttttagattttattcgttttttagattttattcgttttttagtttttattcgttttttaggttttattcgttttttagattttattcgttttttagtttttattcgttttttagattttattcgttttttagattttattcgttttttagattttattcgttttttagattttattcgttttttagtttttattcgttttttagtttttattcgttttttagtttttattcgttttttagattttattcgttttttagattttattcgttttttagtttttattcgttttttagattttattcgttttttagtttttattcgttttttagtttttattcgttttttagtttttattcgttttttagacgttattcgttttttagattttattcgttttttagtttttattcgttttttagattttattcgttttttagtttttattcgttttttagtttttattcgttttttagtttttattcgttttttagattttattcgttttttagtttttattcgttttttagtttttattcgttttttagtttttattcgttt

SEQ ID NO: 15840 - DNA, 611 bp, Artificial Sequence
  chemically treated genomic DNA (Homo sapiens) CpG-island No: 15840
aaacgaataaaaactaaaaaacgaataaaaactaaaaaacgaataaaaactaaaaaacgaataaaatctaaaaaacgaataaaaactaaaaaacgaataaaaactaaaaaacgaataaaaactaaaaaacgaataaaatctaaaaaacgaataaaaactaaaaaacgaataaaatctaaaaaacgaataacgtctaaaaaacgaataaaaactaaaaaacgaataaaaactaaaaaacgaataaaaactaaaaaacgaataaaatctaaaaaacgaataaaaactaaaaaacgaataaaatctaaaaaacgaataaaatctaaaaaacgaataaaaactaaaaaacgaataaaaactaaaaaacgaataaaaactaaaaaacgaataaaatctaaaaaacgaataaaatctaaaaaacgaataaaatctaaaaaacgaataaaatctaaaaaacgaataaaaactaaaaaacgaataaaatctaaaaaacgaataaaacctaaaaaacgaataaaaactaaaaaacgaataaaatctaaaaaacgaataaaatctaaaaaacgaataaaaactaaaaaacgaataaatttcctatcgactctacttcttct

SEQ ID NO: 15841 - DNA, 540 bp, Artificial Sequence
  chemically treated genomic DNA (Homo sapiens) CpG-island No: 15841
tgagggattcgtttttttattcgcgaaattaggacggcgtcgtttatatttcgcggcgttcggggcgggttgaatgggtcgttgagtaggggttatatttacgtttttcgtttttcgttttcggtacggagcgacggttacggtagtgtttttaaggtatcgaaatcgaggcgggggtttcggttttttcgcgtaaggagggaggcggatcgtacgtggtaggatttatcgtttcgtacgtggtaggatttatcgtttcgtacgtggtaggatttatcgtttcgtacgtggtaggatttatcgtttcgcgtcgcgtttttcgagttatggcgttagcgttgtggcgggtttgtaacggatttatggtcgtttttttcgcgttggcggttttggtgtaggttaggcggtcgcggtgggagggggattcgttcggtttttagtttcgttttttggtttagcgggtcgtgtaattgattagcgggtagagtcgtaggggcgtatagttagtggggaggacggaatttgggttttttgtttggg

SEQ ID NO: 15842 - DNA, 540 bp, Artificial Sequence
  chemically treated genomic DNA (Homo sapiens) CpG-island No: 15842
cccaaacaaaaaacccaaattccgtcctccccactaactatacgcccctacgactctacccgctaatcaattacacgacccgctaaaccaaaaaacgaaactaaaaaccgaacgaatccccctcccaccgcgaccgcctaacctacaccaaaaccgccaacgcgaaaaaaacgaccataaatccgttacaaacccgccacaacgctaacgccataactcgaaaaacgcgacgcgaaacgataaatcctaccacgtacgaaacgataaatcctaccacgtacgaaacgataaatcctaccacgtacgaaacgataaatcctaccacgtacgatccgcctccctccttacgcgaaaaaaccgaaacccccgcctcgatttcgataccttaaaaacactaccgtaaccgtcgctccgtaccgaaaacgaaaaacgaaaaacgtaaatataacccctactcaacgacccattcaacccgccccgaacgccgcgaaatataaacgacgccgtcctaatttcgcgaataaaaaaacgaatccctca

SEQ ID NO: 15843 - DNA, 540 bp, Artificial Sequence
  chemically treated genomic DNA (Homo sapiens) CpG-island No: 15843
tttaagtagaaagtttaggtttcgttttttttattaattgtgcgtttttgcgattttgttcgttagttagttatacggttcgttaggttagggggcggagttgggagtcgggcgggttttttttttatcgcggtcgtttgatttgtattaaggtcgttagcgcgaagaaggcggttatgagttcgttgtaggttcgttatagcgttggcgttatggttcggagaacgcggcgcggggcggtgagttttgttacgtgcggggcggtgagttttgttacgtgcggggcggtgagttttgttacgtgcggggcggtgagttttgttacgtacggttcgtttttttttttgcgcggagggatcgagattttcgtttcggtttcggtgttttggggatattgtcgtggtcgtcgtttcgtgtcgggggcggggagcgaagggcgtgggtgtagtttttatttagcgatttatttagttcgtttcgaacgtcgcggggtgtaggcggcgtcgttttggtttcgcggatgggaaagcgagtttttta

SEQ ID NO: 15844 - DNA, 540 bp, Artificial Sequence
  chemically treated genomic DNA (Homo sapiens) CpG-island No: 15844
taaaaaactcgctttcccatccgcgaaaccaaaacgacgccgcctacaccccgcgacgttcgaaacgaactaaataaatcgctaaataaaaactacacccacgcccttcgctccccgcccccgacacgaaacgacgaccacgacaatatccccaaaacaccgaaaccgaaacgaaaatctcgatccctccgcgcaaaaaaaaaaacgaaccgtacgtaacaaaactcaccgccccgcacgtaacaaaactcaccgccccgcacgtaacaaaactcaccgccccgcacgtaacaaaactcaccgccccgcgccgcgttctccgaaccataacgccaacgctataacgaacctacaacgaactcataaccgccttcttcgcgctaacgaccttaatacaaatcaaacgaccgcgataaaaaaaaaacccgcccgactcccaactccgccccctaacctaacgaaccgtataactaactaacgaacaaaatcgcaaaaacgcacaattaataaaaaaaacgaaacctaaactttctacttaaa

SEQ ID NO: 15845 - DNA, 552 bp, Artificial Sequence
  chemically treated genomic DNA (Homo sapiens) CpG-island No: 15845
ttatgaaatgtgttcgaagaagttgacgtagtttgtgacgttcgcggttttttgatggggatcggtagtagcggcgttttcgtcgaggagggacgatttgagtcggcgttcgggtttttttttcgtcggtagtcgcgcgtttcggcgtttagtttgggggtcgttggttcggggcgcgagtatttgttttcggttgcgcgcgtcgttttcgttttgattagtttaggttattatataagatgttacggagaggaaaggggcgagcgagaggcgcgttggggagggcgcggtggtttttcgcgagtggtagggaggggtaggaggtaggattcggcgggatttatttgtacgtttttcgcgttttttgcgggcgttgttcgcgcgcgtgtcggggtggtgggtgtgggggggtacggacggacgtgttcgttgtttttatttttttttcgttaatattcgggtagcggtcgaaacgtgttattttttcgttgttattttttttgggtttataggtttttggttttaggcgtttgtattttgaaatatttgttt

SEQ ID NO: 15846 - DNA, 552 bp, Artificial Sequence
  chemically treated genomic DNA (Homo sapiens) CpG-island No: 15846
aaacaaatatttcaaaatacaaacgcctaaaaccaaaaacctataaacccaaaaaaaataacaacgaaaaaataacacgtttcgaccgctacccgaatattaacgaaaaaaaaataaaaacaacgaacacgtccgtccgtacccccccacacccaccaccccgacacgcgcgcgaacaacgcccgcaaaaaacgcgaaaaacgtacaaataaatcccgccgaatcctacctcctacccctccctaccactcgcgaaaaaccaccgcgccctccccaacgcgcctctcgctcgcccctttcctctccgtaacatcttatataataacctaaactaatcaaaacgaaaacgacgcgcgcaaccgaaaacaaatactcgcgccccgaaccaacgacccccaaactaaacgccgaaacgcgcgactaccgacgaaaaaaaaacccgaacgccgactcaaatcgtccctcctcgacgaaaacgccgctactaccgatccccatcaaaaaaccgcgaacgtcacaaactacgtcaacttcttcgaacacatttcataa

SEQ ID NO: 15847 - DNA, 552 bp, Artificial Sequence
  chemically treated genomic DNA (Homo sapiens) CpG-island No: 15847
aaataaatgttttaaagtataaacgtttggggttagaaatttgtagatttaggagaggtggtagcgaaaaaatagtacgtttcggtcgttgttcgagtgttggcggggaggggatgggagtagcgggtacgttcgttcgtgtttttttatatttattatttcggtacgcgcgcgggtagcgttcgtagggggcgcggagggcgtataggtgggtttcgtcgggttttgttttttgtttttttttgttattcgcggaaggttatcgcgttttttttaacgcgtttttcgttcgtttttttttttttcgtgatattttatataataatttgagttaattaaaacggaagcgacgcgcgtagtcgggagtagatgttcgcgtttcgagttagcggtttttaaattaggcgtcggggcgcgcggttgtcggcgggggaagggttcgagcgtcgatttaggtcgttttttttcggcggaggcgtcgttgttgtcggtttttattaggaagtcgcgagcgttataaattgcgttagttttttcgaatatattttatgg

SEQ ID NO: 15848 - DNA, 552 bp, Artificial Sequence
  chemically treated genomic DNA (Homo sapiens) CpG-island No: 15848
ccataaaatatattcgaaaaaactaacgcaatttataacgctcgcgacttcctaataaaaaccgacaacaacgacgcctccgccgaaaaaaaacgacctaaatcgacgctcgaacccttcccccgccgacaaccgcgcgccccgacgcctaatttaaaaaccgctaactcgaaacgcgaacatctactcccgactacgcgcgtcgcttccgttttaattaactcaaattattatataaaatatcacgaaaaaaaaaaaaacgaacgaaaaacgcgttaaaaaaaacgcgataaccttccgcgaataacaaaaaaaaacaaaaaacaaaacccgacgaaacccacctatacgccctccgcgccccctacgaacgctacccgcgcgcgtaccgaaataataaatataaaaaaacacgaacgaacgtacccgctactcccatcccctccccgccaacactcgaacaacgaccgaaacgtactattttttcgctaccacctctcctaaatctacaaatttctaaccccaaacgtttatactttaaaacatttattt

SEQ ID NO: 15849 - DNA, 2017 bp, Artificial Sequence
  chemically treated genomic DNA (Homo sapiens) CpG-island No: 15849
cgcggagttcgtagtagtcgtagaaggcgttttgtagaatgtgttgcgcgtatacgtagtagtaggtgggttggttgaataggttcgtgtcgcgttattcgtgtttgtttttgcggaagatgtttttgcggtgtagttgtcggcgcgatcgttggaggttatattagaaggtgatgaatatcggtagtaggatcgagtatagcgtttataagattaggtgttcgttcgtaaataggttttcggagggcgagttcggcgtcggtcgttttttcgtttttattttttttaaggacgatatttaattagaaaagaaataggcggtgtatttcgagttcgttatttttttttcgttttttttttgttttttcggggttaaatcgggcgtttttagtgaaggtggtttcgttttttcgagggcgggattgcgtttcgttttttcgtttttcgggatttgtcgcgtcgagaaggcgacgtttagttattacgttttaatttttattttttaattcgttttatttcgggagcgcgtttaggagtttaaggcggttgttgttgtcgtcgtcgttttattttgtcgtcggtttgatttacggaagggcgtaatatataggggtaagttgttttttatcgaaaggtcgggcgtttaggttaggtaacgtcggtcggcgttcgtaatcgtcggtttaggtttcgtattttttttcggggcgtcgttttttttcgggttttattcgtttttacgcgcggttcggcgattttagtttttttcgggaggttttcggagatttgcgtcgcgtcggttttcgaagttttatttcgcgcgggtggaggcgcggtttcgggttagtaggttttggtcgtttcgcgtaggaggagaacgacgttgggtcgttagtagggatgaagtcgggcgggggaaacgtttaaggttttagtcgtacgtacgtcgattcggcgcgcggggtcgcgagttggaggcggggtttgtggcggcgagtttcgtggttgggcggagttagggttgacgggcggggcggaggtgtgaggtgggaggggagacggatcggtttgagggggcggggtcgtggaggaggttggagacggatggaagaggtagggtattgcggttgggggcggggtttaggggaagggggcggagtaatagtggggcgtttgagaggatcgcgagggttgaatgttaaatttcgtaatcgtagaaaattttggaaagtcgtcggcggggtaaggttacgaggatttttttcgtagtatcgcgtcgcgcggggtttaggggtcgcgtttacgttcgtcgttcggcgtagatacgagtgttttcgatttgagtcgaatttttagtcgatgtcggcgtcgtcgtcgtcggggatgcgtaagtcgattgggaagcgagggggggaggcggtttgcgcggtatcgttcgatttggtcgcggcgggttgaggtaggtgtggcggtcgtagtaacgtaaatttgagggttttttcgttgcggagcggcgggcgggcgcggaggtcgagggcgagcggggtagtcgttcgttcgtcgtcgttgatttcgagttcggtcgcggttttcgttttttgtcgtggcgggcgggttttttttgcgttattttttcgttcgcgttcgttagcgttcgaggtcggggagaaaggggagtagcgggagtcggggattatcggagatgggagtacgttttttgttgttgtcgtttagttttaggtttcggaggaatgttcgtttttcgttggagttttattagtttaatacggatttgagtcgcgattacgcgggttgtagtttgtagtatattagttattcggagaacgcggacgcggaagtatcgttgtttagtattttcgaagaaatacggaatttagagaggtataggtatcgtttcggcgcgtatagttgtatttagcggttttttttttattatatatatatataggagtgggagtcgaggattatttgttgtttgcggattttttttagtata

SEQ ID NO: 15850 - DNA, 2017 bp, Artificial Sequence
  chemically treated genomic DNA (Homo sapiens) CpG-island No: 15850
tatactaaaaaaaatccgcaaacaacaaataatcctcgactcccactcctatatatatatataataaaaaaaaaaccgctaaatacaactatacgcgccgaaacgatacctatacctctctaaattccgtatttcttcgaaaatactaaacaacgatacttccgcgtccgcgttctccgaataactaatatactacaaactacaacccgcgtaatcgcgactcaaatccgtattaaactaataaaactccaacgaaaaacgaacattcctccgaaacctaaaactaaacgacaacaacaaaaaacgtactcccatctccgataatccccgactcccgctactcccctttctccccgacctcgaacgctaacgaacgcgaacgaaaaaataacgcaaaaaaaacccgcccgccacgacaaaaaacgaaaaccgcgaccgaactcgaaatcaacgacgacgaacgaacgactaccccgctcgccctcgacctccgcgcccgcccgccgctccgcaacgaaaaaaccctcaaatttacgttactacgaccgccacacctacctcaacccgccgcgaccaaatcgaacgataccgcgcaaaccgcctccccccctcgcttcccaatcgacttacgcatccccgacgacgacgacgccgacatcgactaaaaattcgactcaaatcgaaaacactcgtatctacgccgaacgacgaacgtaaacgcgacccctaaaccccgcgcgacgcgatactacgaaaaaaatcctcgtaaccttaccccgccgacgactttccaaaattttctacgattacgaaatttaacattcaaccctcgcgatcctctcaaacgccccactattactccgcccccttcccctaaaccccgcccccaaccgcaataccctacctcttccatccgtctccaacctcctccacgaccccgccccctcaaaccgatccgtctcccctcccacctcacacctccgccccgcccgtcaaccctaactccgcccaaccacgaaactcgccgccacaaaccccgcctccaactcgcgaccccgcgcgccgaatcgacgtacgtacgactaaaaccttaaacgtttcccccgcccgacttcatccctactaacgacccaacgtcgttctcctcctacgcgaaacgaccaaaacctactaacccgaaaccgcgcctccacccgcgcgaaataaaacttcgaaaaccgacgcgacgcaaatctccgaaaacctcccgaaaaaaactaaaatcgccgaaccgcgcgtaaaaacgaataaaacccgaaaaaaaacgacgccccgaaaaaaaatacgaaacctaaaccgacgattacgaacgccgaccgacgttacctaacctaaacgcccgacctttcgataaaaaacaacttacccctatatattacgcccttccgtaaatcaaaccgacgacaaaataaaacgacgacgacaacaacaaccgccttaaactcctaaacgcgctcccgaaataaaacgaattaaaaaataaaaattaaaacgtaataactaaacgtcgccttctcgacgcgacaaatcccgaaaaacgaaaaaacgaaacgcaatcccgccctcgaaaaaacgaaaccaccttcactaaaaacgcccgatttaaccccgaaaaaacaaaaaaaaaacgaaaaaaaaataacgaactcgaaatacaccgcctatttcttttctaattaaatatcgtccttaaaaaaaataaaaacgaaaaaacgaccgacgccgaactcgccctccgaaaacctatttacgaacgaacacctaatcttataaacgctatactcgatcctactaccgatattcatcaccttctaatataacctccaacgatcgcgccgacaactacaccgcaaaaacatcttccgcaaaaacaaacacgaataacgcgacacgaacctattcaaccaacccacctactactacgtatacgcgcaacacattctacaaaacgccttctacgactactacgaactccgcg

SEQ ID NO: 15851 - DNA, 2017 bp, Artificial Sequence
  chemically treated genomic DNA (Homo sapiens) CpG-island No: 15851
tatgttagaggaagttcgtaagtaataagtggttttcggtttttatttttatgtatgtatgtagtaggaaggaagtcgttgagtgtagttgtgcgcgtcggggcggtgtttgtgtttttttggatttcgtgttttttcgggggtgttgagtagcggtgttttcgcgttcgcgtttttcgggtagttgatgtgttgtaggttgtagttcgcgtggtcgcggtttaggttcgtgttgggttggtaggattttagcggggagcgagtattttttcggaatttggggttggacgatagtagtaggaggcgtgtttttattttcggtagttttcggttttcgttgttttttttttttttcggtttcgggcgttggcgggcgcgggcgagggggtagcgtaggggaggttcgttcgttacggtagggggcggaaatcgcggtcgggttcggggttagcggcgacgagcgggcggttgtttcgttcgttttcggttttcgcgttcgttcgtcgtttcgtagcggaggagtttttaggtttgcgttattgcggtcgttatatttattttagttcgtcgcggttaggtcgggcggtgtcgcgtaggtcgtttttttttttcgttttttagtcggtttacgtattttcggcggcggcggcgtcggtatcggttagaggttcggtttaagtcgggggtattcgtgtttgcgtcgagcggcgggcgtgagcgcggtttttgggtttcgcgcggcgcggtgttgcgaggaggattttcgtggttttgtttcgtcggcggttttttagaattttttacgattacgaagtttggtatttaattttcgcgatttttttaaacgttttattgttatttcgttttttttttttaggtttcgtttttagtcgtagtgttttgttttttttattcgtttttagttttttttacggtttcgtttttttaggtcggttcgtttttttttttattttatattttcgtttcgttcgttagttttggtttcgtttagttacggggttcgtcgttataggtttcgtttttagttcgcggtttcgcgcgtcggatcggcgtgcgtgcggttggagttttaagcgtttttttcgttcggttttatttttgttggcggtttagcgtcgttttttttttgcgcgaggcggttaaggtttgttggttcggagtcgcgtttttattcgcgcgaggtagggtttcgaggatcggcgcggcgtaggttttcggaggtttttcgagaggggttagggtcgtcgggtcgcgcgtgggagcgggtggggttcgggaggagacggcgtttcggaggggagtgcgaggtttgggtcgacggttacgggcgtcgatcggcgttgtttggtttgaacgttcggtttttcggtggagggtagtttgtttttgtatgttgcgttttttcgtgggttagatcggcggtaaggtgaggcggcggcggtagtagtagtcgttttgggtttttggacgcgttttcgaggtggggcgggttggggagtggggattggagcgtgatggttggacgtcgttttttcggcgcggtaggtttcgggagacggggggacgaggcgtagtttcgttttcgggagagcggagttatttttattgagggcgttcggtttggtttcggaaaggtaggaagggggcggggaagggatggcgagttcggggtgtatcgtttgttttttttttggttaggtatcgtttttggagaagatggaagcggagaggcggtcggcgtcgggttcgtttttcgagggtttgtttgcggacgggtatttgattttgtggacgttgtgttcggttttgttgtcggtgtttattattttttggtgtagtttttagcggtcgcgtcggtagttgtatcgtagggatatttttcgtaagagtaagtacgggtggcgcgatacggatttgtttagttagtttatttattgttgcgtgtgcgcgtagtatattttgtagggcgttttttgcgattgttgcgggtttcgcg

SEQ ID NO: 15852 - DNA, 2017 bp, Artificial Sequence
  chemically treated genomic DNA (Homo sapiens) CpG-island No: 15852
cgcgaaacccgcaacaatcgcaaaaaacgccctacaaaatatactacgcgcacacgcaacaataaataaactaactaaacaaatccgtatcgcgccacccgtacttactcttacgaaaaatatccctacgatacaactaccgacgcgaccgctaaaaactacaccaaaaaataataaacaccgacaacaaaaccgaacacaacgtccacaaaatcaaatacccgtccgcaaacaaaccctcgaaaaacgaacccgacgccgaccgcctctccgcttccatcttctccaaaaacgatacctaaccaaaaaaaaaacaaacgatacaccccgaactcgccatcccttccccgcccccttcctacctttccgaaaccaaaccgaacgccctcaataaaaataactccgctctcccgaaaacgaaactacgcctcgtccccccgtctcccgaaacctaccgcgccgaaaaaacgacgtccaaccatcacgctccaatccccactccccaacccgccccacctcgaaaacgcgtccaaaaacccaaaacgactactactaccgccgccgcctcaccttaccgccgatctaacccacgaaaaaacgcaacatacaaaaacaaactaccctccaccgaaaaaccgaacgttcaaaccaaacaacgccgatcgacgcccgtaaccgtcgacccaaacctcgcactcccctccgaaacgccgtctcctcccgaaccccacccgctcccacgcgcgacccgacgaccctaacccctctcgaaaaacctccgaaaacctacgccgcgccgatcctcgaaaccctacctcgcgcgaataaaaacgcgactccgaaccaacaaaccttaaccgcctcgcgcaaaaaaaaaacgacgctaaaccgccaacaaaaataaaaccgaacgaaaaaaacgcttaaaactccaaccgcacgcacgccgatccgacgcgcgaaaccgcgaactaaaaacgaaacctataacgacgaaccccgtaactaaacgaaaccaaaactaacgaacgaaacgaaaatataaaataaaaaaaaaaacgaaccgacctaaaaaaacgaaaccgtaaaaaaaactaaaaacgaataaaaaaaacaaaacactacgactaaaaacgaaacctaaaaaaaaaaaacgaaataacaataaaacgtttaaaaaaatcgcgaaaattaaataccaaacttcgtaatcgtaaaaaattctaaaaaaccgccgacgaaacaaaaccacgaaaatcctcctcgcaacaccgcgccgcgcgaaacccaaaaaccgcgctcacgcccgccgctcgacgcaaacacgaatacccccgacttaaaccgaacctctaaccgataccgacgccgccgccgccgaaaatacgtaaaccgactaaaaaacgaaaaaaaaaaacgacctacgcgacaccgcccgacctaaccgcgacgaactaaaataaatataacgaccgcaataacgcaaacctaaaaactcctccgctacgaaacgacgaacgaacgcgaaaaccgaaaacgaacgaaacaaccgcccgctcgtcgccgctaaccccgaacccgaccgcgatttccgccccctaccgtaacgaacgaacctcccctacgctaccccctcgcccgcgcccgccaacgcccgaaaccgaaaaaaaaaaaaaacaacgaaaaccgaaaactaccgaaaataaaaacacgcctcctactactatcgtccaaccccaaattccgaaaaaatactcgctccccgctaaaatcctaccaacccaacacgaacctaaaccgcgaccacgcgaactacaacctacaacacatcaactacccgaaaaacgcgaacgcgaaaacaccgctactcaacacccccgaaaaaacacgaaatccaaaaaaacacaaacaccgccccgacgcgcacaactacactcaacgacttccttcctactacatacatacataaaaataaaaaccgaaaaccacttattacttacgaacttcctctaacata

SEQ ID NO: 15853 - DNA, 877 bp, Artificial Sequence
  chemically treated genomic DNA (Homo sapiens) CpG-island No: 15853
gtttcgcggtcggttgggttcgttttattacggtagtttttgttttttttggtttgatttatcgagaattttttttttcgcgttttcgttgtcggcggcggtggttaaagaggcggcggtcgcggtgttcgtggttgcgggggtcgcgtttttatcggggttttttgcgacgtgggcggcgggcgtcggggtcgcggtttggggcgtatcgttgtttatcgggtttttgggcgcggggttttggggagtcgcggcggtcgttttcgtcggagtttgcgggagggtggtggtggtggtggtggtggtttcgttcgttttatttatgttttttttttttttgttttcgtttaggcgtttcggtggcggttggtcggcggttagcgcggttggtggtcgcggcggtcggggttcgttttcggggaggtcggggcggatttcgcggcgtaggcggcggcggtcgaggtggggtcgcgcggcggaggcggttcgagtttcgtgttgcgcgtttttttttgggtttttcgttcgattttattgttttaaaaatggtttcgtataagtttttttaggcggcgtatcggttcgggagggaagggcgggcgaggggagagggtggggaaatttggttcgggagtcgggttttggatttttattagtatttaaaggcgttcggtgcgttttttatggttttaattcgtcgggacgcgagcgcgcgggtcgcgttgtagaattaaggaaagttagggtgaacggggcgttcgggttgttttttggagcgtttcgaggagttcgcgttgttgattttttgttggagcggggtgtattggttttttttttttaattcgttttgatattcgtagttgataaggagaggtaa

SEQ ID NO: 15854 - DNA, 877 bp, Artificial Sequence
  chemically treated genomic DNA (Homo sapiens) CpG-island No: 15854
ttacctctccttatcaactacgaatatcaaaacgaattaaaaaaaaaaaaccaatacaccccgctccaacaaaaaatcaacaacgcgaactcctcgaaacgctccaaaaaacaacccgaacgccccgttcaccctaactttccttaattctacaacgcgacccgcgcgctcgcgtcccgacgaattaaaaccataaaaaacgcaccgaacgcctttaaatactaataaaaatccaaaacccgactcccgaaccaaatttccccaccctctcccctcgcccgcccttccctcccgaaccgatacgccgcctaaaaaaacttatacgaaaccatttttaaaacaataaaatcgaacgaaaaacccaaaaaaaaacgcgcaacacgaaactcgaaccgcctccgccgcgcgaccccacctcgaccgccgccgcctacgccgcgaaatccgccccgacctccccgaaaacgaaccccgaccgccgcgaccaccaaccgcgctaaccgccgaccaaccgccaccgaaacgcctaaacgaaaacaaaaaaaaaaaaaacataaataaaacgaacgaaaccaccaccaccaccaccaccaccctcccgcaaactccgacgaaaacgaccgccgcgactccccaaaaccccgcgcccaaaaacccgataaacaacgatacgccccaaaccgcgaccccgacgcccgccgcccacgtcgcaaaaaaccccgataaaaacgcgacccccgcaaccacgaacaccgcgaccgccgcctctttaaccaccgccgccgacaacgaaaacgcgaaaaaaaaaattctcgataaatcaaaccaaaaaaaacaaaaactaccgtaataaaacgaacccaaccgaccgcgaaac

SEQ ID NO: 15855 - DNA, 877 bp, Artificial Sequence
  chemically treated genomic DNA (Homo sapiens) CpG-island No: 15855
ttatttttttttgttagttgcgggtgttaagacgggttgagggaggagagttaatgtatttcgttttaataaagggttagtagcgcgggtttttcggaacgttttagaagataattcgggcgtttcgtttattttggttttttttggttttgtaacgcgattcgcgcgttcgcgtttcggcggattggagttatagaaagcgtatcgggcgtttttaaatgttaatgagagtttagggttcgattttcgagttaagtttttttatttttttttttcgttcgtttttttttttcgggtcggtgcgtcgtttagaaaaatttgtgcggggttatttttggggtagtaagatcgagcgaggagtttaagagagagcgcgtagtacgaagttcgagtcgttttcgtcgcgcgattttatttcggtcgtcgtcgtttgcgtcgcgagattcgtttcggttttttcgagagcgagtttcggtcgtcgcgattattagtcgcgttaatcgtcgattaatcgttatcgaggcgtttgagcgagagtagaggaggaggaggtatgagtgaggcgggcgaggttattattattattattattattttttcgtaggtttcgacggaggcggtcgtcgcggttttttaggatttcgcgtttaagagttcggtgggtagcggtgcgttttaggtcgcggtttcggcgttcgtcgtttacgtcgtaggaaatttcggtggggacgcggttttcgtagttacgggtatcgcggtcgtcgtttttttagttatcgtcgtcggtagcgaagacgcggagaaaaaagttttcggtgagttaggttagggagggtaggggttgtcgtagtggggcgggtttagtcggtcgcggagt

SEQ ID NO: 15856 - DNA, 877 bp, Artificial Sequence
  chemically treated genomic DNA (Homo sapiens) CpG-island No: 15856
actccgcgaccgactaaacccgccccactacgacaacccctaccctccctaacctaactcaccgaaaacttttttctccgcgtcttcgctaccgacgacgataactaaaaaaacgacgaccgcgatacccgtaactacgaaaaccgcgtccccaccgaaatttcctacgacgtaaacgacgaacgccgaaaccgcgacctaaaacgcaccgctacccaccgaactcttaaacgcgaaatcctaaaaaaccgcgacgaccgcctccgtcgaaacctacgaaaaaataataataataataataataacctcgcccgcctcactcatacctcctcctcctctactctcgctcaaacgcctcgataacgattaatcgacgattaacgcgactaataatcgcgacgaccgaaactcgctctcgaaaaaaccgaaacgaatctcgcgacgcaaacgacgacgaccgaaataaaatcgcgcgacgaaaacgactcgaacttcgtactacgcgctctctcttaaactcctcgctcgatcttactaccccaaaaataaccccgcacaaatttttctaaacgacgcaccgacccgaaaaaaaaaaacgaacgaaaaaaaaaaataaaaaaacttaactcgaaaatcgaaccctaaactctcattaacatttaaaaacgcccgatacgctttctataactccaatccgccgaaacgcgaacgcgcgaatcgcgttacaaaaccaaaaaaaaccaaaataaacgaaacgcccgaattatcttctaaaacgttccgaaaaacccgcgctactaaccctttattaaaacgaaatacattaactctcctccctcaacccgtcttaacacccgcaactaacaaaaaaaaataa

SEQ ID NO: 15857 - DNA, 585 bp, Artificial Sequence
  chemically treated genomic DNA (Homo sapiens) CpG-island No: 15857
tgggcgcgtttcgcggtcgtttcggtcgtcgtttattttttttacgttaggttcgcgcggtcgtttcgttttcgcgcgcgtttttcgtttgttcgtttgcgtttgcgcgtaggtgtcggcgtttagggggagggggtttcggcgcgttcgcgttacgttcgcgtttttatttttttagtgcgcggtcgtttcgcgtttgcgtaggagaggtggtaggttcgggtggttggtttcggggagatagcgtttgttagtcggtgggtcggttttcgcgtcggtttttttttttttcggttttcgggggaggcgcggtggagttcgttttcggggtttttcgatgggggagaagcggcgacggcggtagtggagtaatcgagtcggagcgtgagcggtttcggtgtttcgttttttacggaggttatgggcgatttagttttcgttcgtagtttggacgatatcgatttgttcgttttgcgggtgagcgcgtcgttttttagtttcgttttggtttttgttttcgtcgtaagggagggagcggggtggttgtacgttttacgtgttttcgggcgttttttttattagttt

SEQ ID NO: 15858 - DNA, 585 bp, Artificial Sequence
  chemically treated genomic DNA (Homo sapiens) CpG-island No: 15858
aaactaataaaaaaaacgcccgaaaacacgtaaaacgtacaaccaccccgctccctcccttacgacgaaaacaaaaaccaaaacgaaactaaaaaacgacgcgctcacccgcaaaacgaacaaatcgatatcgtccaaactacgaacgaaaactaaatcgcccataacctccgtaaaaaacgaaacaccgaaaccgctcacgctccgactcgattactccactaccgccgtcgccgcttctcccccatcgaaaaaccccgaaaacgaactccaccgcgcctcccccgaaaaccgaaaaaaaaaaaaaccgacgcgaaaaccgacccaccgactaacaaacgctatctccccgaaaccaaccacccgaacctaccacctctcctacgcaaacgcgaaacgaccgcgcactaaaaaaataaaaacgcgaacgtaacgcgaacgcgccgaaaccccctccccctaaacgccgacacctacgcgcaaacgcaaacgaacaaacgaaaaacgcgcgcgaaaacgaaacgaccgcgcgaacctaacgtaaaaaaaataaacgacgaccgaaacgaccgcgaaacgcgccca

SEQ ID NO: 15859 - DNA, 585 bp, Artificial Sequence
  chemically treated genomic DNA (Homo sapiens) CpG-island No: 15859
aagttggtggagggggcgttcgggagtacgtgaggcgtgtagttatttcgtttttttttttgcggcggggataggaattagggcgaggttgggggacggcgcgtttattcgtagggcggataggtcgatgtcgtttaggttgcgggcgggggttgggtcgtttatggttttcgtggggaacggggtatcggggtcgtttacgtttcggttcggttattttattgtcgtcgtcgtcgttttttttttatcggagaatttcgggggcggattttatcgcgtttttttcggagatcggggagggggagggtcggcgcgaggatcgatttatcgattgataggcgttattttttcggagttagttattcgagtttattattttttttgcgtaggcgcggagcgatcgcgtattgggagggtggaagcgcgagcgtgacgcgagcgcgtcggggttttttttttttaggcgtcgatatttgcgcgtaggcgtaggcgagtaggcgaaaggcgcgcgcgaggacggagcgatcgcgcgagtttggcgtgaaagaagtgggcggcggtcgaggcggtcgcggagcgcgttta

SEQ ID NO: 15860 - DNA, 585 bp, Artificial Sequence
  chemically treated genomic DNA (Homo sapiens) CpG-island No: 15860
taaacgcgctccgcgaccgcctcgaccgccgcccacttctttcacgccaaactcgcgcgatcgctccgtcctcgcgcgcgcctttcgcctactcgcctacgcctacgcgcaaatatcgacgcctaaaaaaaaaaaaccccgacgcgctcgcgtcacgctcgcgcttccaccctcccaatacgcgatcgctccgcgcctacgcaaaaaaaataataaactcgaataactaactccgaaaaaataacgcctatcaatcgataaatcgatcctcgcgccgaccctccccctccccgatctccgaaaaaaacgcgataaaatccgcccccgaaattctccgataaaaaaaaaacgacgacgacgacaataaaataaccgaaccgaaacgtaaacgaccccgataccccgttccccacgaaaaccataaacgacccaacccccgcccgcaacctaaacgacatcgacctatccgccctacgaataaacgcgccgtcccccaacctcgccctaattcctatccccgccgcaaaaaaaaaaacgaaataactacacgcctcacgtactcccgaacgccccctccaccaactt

SEQ ID NO: 15861 - DNA, 806 bp, Artificial Sequence
  chemically treated genomic DNA (Homo sapiens) CpG-island No: 15861
tttgtagtcgttattatttttcgaaggtaaatatttcgcggtggagggtgcgcgggtgcggttgtgacgttagggttgttcgagttttcgtcggtttagcgggcggttacgtttttcgggttcggtgcgttcgcgggtggttgtttcgtaggtgcgcgcggtcggggttggcggcgattttttttatcgggtcgttcgggaggtttatgtagcgcggttgggtttcgcggcgttcggatcggggaagtgaaagtgtttcggaggaggagggtcggttcggtagtgtagtcgttttataggtcggcggacgggttaggcgggcggttttttgaatcgaatcgaatcggtttttcgggtcgtcgttttttcgttttttttcgttcgtcgtcggagttttttttcggttttttttaagatttttggttttttttcgacggagtcgggtttagtgcgggggcgtagggcgcgggagttttattttttcggttttttttgcgtttagaggttggtatggcgcgggtcgagtattgagcgtacggtcggggtatagtagggtcggggggtgtagttggttcgcgtttttttttcggtcgtcgtttttttcggttttcggcgaaagttattgagatattagttggacgttacgcgtcggagtatgtttgggagttagagcgaggtggttttattttcgtagagttcgcggagtttcgagatgggacgggatttgcggttcgggtttcgcgtgtttttgtttttgtttttgtttttgttggtgtatttgatttagttaggttagtcgggggcgg

SEQ ID NO: 15862 - DNA, 806 bp, Artificial Sequence
  chemically treated genomic DNA (Homo sapiens) CpG-island No: 15862
ccgcccccgactaacctaactaaatcaaatacaccaacaaaaacaaaaacaaaaacaaaaacacgcgaaacccgaaccgcaaatcccgtcccatctcgaaactccgcgaactctacgaaaataaaaccacctcgctctaactcccaaacatactccgacgcgtaacgtccaactaatatctcaataactttcgccgaaaaccgaaaaaaacgacgaccgaaaaaaaaacgcgaaccaactacaccccccgaccctactataccccgaccgtacgctcaatactcgacccgcgccataccaacctctaaacgcaaaaaaaaccgaaaaaataaaactcccgcgccctacgcccccgcactaaacccgactccgtcgaaaaaaaaccaaaaatcttaaaaaaaaccgaaaaaaaactccgacgacgaacgaaaaaaaacgaaaaaacgacgacccgaaaaaccgattcgattcgattcaaaaaaccgcccgcctaacccgtccgccgacctataaaacgactacactaccgaaccgaccctcctcctccgaaacactttcacttccccgatccgaacgccgcgaaacccaaccgcgctacataaacctcccgaacgacccgataaaaaaaatcgccgccaaccccgaccgcgcgcacctacgaaacaaccacccgcgaacgcaccgaacccgaaaaacgtaaccgcccgctaaaccgacgaaaactcgaacaaccctaacgtcacaaccgcacccgcgcaccctccaccgcgaaatatttaccttcgaaaaataataacgactacaaa

SEQ ID NO: 15863 - DNA, 806 bp, Artificial Sequence
  chemically treated genomic DNA (Homo sapiens) CpG-island No: 15863
tcgttttcggttaatttggttgagttaggtatattagtaggagtagaagtaggagtaggagtacgcgggattcgggtcgtaagtttcgttttatttcggggtttcgcggattttgcggggatggagttatttcgttttgatttttagatatgtttcggcgcgtgacgtttagttggtgttttaatggttttcgtcggggatcggaggagacggcggtcggagaggaggcgcgagttagttgtatttttcggttttgttgtgtttcgatcgtgcgtttagtattcggttcgcgttatgttagtttttggacgtagggaaagtcgaggaggtggagttttcgcgttttgcgttttcgtattgggttcggtttcgtcgagggaaggttaggaattttggaagaaatcgaaagaaaatttcggcggcgggcgaggaggggcgggaggacgacggttcgaggagtcgattcggttcggtttaggaggtcgttcgtttggttcgttcgtcgatttgtgaggcggttgtattgtcggatcggtttttttttttcgaggtatttttattttttcgattcgggcgtcgcgggatttagtcgcgttgtatgagtttttcgggcggttcggtggagagagtcgtcgttagtttcggtcgcgcgtatttgcggggtagttattcgcggacgtatcgagttcggggggcgtggtcgttcgttgagtcggcgagggttcgggtagttttgacgttataatcgtattcgcgtattttttatcgcgaggtatttattttcgaaaagtggtggcggttgtagg

SEQ ID NO: 15864 - DNA, 806 bp, Artificial Sequence
  chemically treated genomic DNA (Homo sapiens) CpG-island No: 15864
cctacaaccgccaccacttttcgaaaataaatacctcgcgataaaaaatacgcgaatacgattataacgtcaaaactacccgaaccctcgccgactcaacgaacgaccacgccccccgaactcgatacgtccgcgaataactaccccgcaaatacgcgcgaccgaaactaacgacgactctctccaccgaaccgcccgaaaaactcatacaacgcgactaaatcccgcgacgcccgaatcgaaaaaataaaaatacctcgaaaaaaaaaaaccgatccgacaatacaaccgcctcacaaatcgacgaacgaaccaaacgaacgacctcctaaaccgaaccgaatcgactcctcgaaccgtcgtcctcccgcccctcctcgcccgccgccgaaattttctttcgatttcttccaaaattcctaaccttccctcgacgaaaccgaacccaatacgaaaacgcaaaacgcgaaaactccacctcctcgactttccctacgtccaaaaactaacataacgcgaaccgaatactaaacgcacgatcgaaacacaacaaaaccgaaaaatacaactaactcgcgcctcctctccgaccgccgtctcctccgatccccgacgaaaaccattaaaacaccaactaaacgtcacgcgccgaaacatatctaaaaatcaaaacgaaataactccatccccgcaaaatccgcgaaaccccgaaataaaacgaaacttacgacccgaatcccgcgtactcctactcctacttctactcctactaatatacctaactcaaccaaattaaccgaaaacga

SEQ ID NO: 15865 - DNA, 1015 bp, Artificial Sequence
  chemically treated genomic DNA (Homo sapiens) CpG-island No: 15865
cgggagcggggtatttatcggtagttttcgtagcggaggcgcgtttttcgggcgtcgaggtagcgttcgcggttggaggggttcggggcgggcgtcgagttcgagggatgcgcgtagcgcggggtgtttcgggaggtagcggtcgggtacgttgggatcgacggcgcgggacgtttcgacgtcgggtagtatttattcgtcgtatcgagagagttacgcggtttcgcggttttgtagggtatagggcggttttttgttcggggttttcggtggcgtattgggcggcggggcgggtcgagggtagcgggggcgggataggatagacgagaatttcgcggaggtgaggtcgggggtcgtttcgttttcgagggtaggttttgagtttcggtttcgtttcggtcggtttcgtttcggtcggggcgtgggtttcggttgtagtttcggtttgtttttttggtttcggaattttcgcgggcgttggtttcgtttgttagggtgagggggtcgggaaggggcgcgcgggggtttcgggtttcggaaatcgggcggggacggaacgggttcgggttgcggggtttttagatttagtcgtacgtttagatttcgggatttttattttcggttgggatcgcgtaatttttttattttcgtttggatttttgttttcggttcgtttggtttggcgtgagtttcgtagtcgcgcgtttttcggattatttagggtcgttttttcgcgtagttgttgcgtcgttttaggtcggagtttttcgggtttggttgggtgtttttcggggttttggttacgggacggggcggggggcggggggcgggattgggattgtggatgaaggattaaggtaggggatgggggttcgaaggggtcggtggggcgttgtaaattggttaggcgttattcgcgggcggttaggaggtcgtgggggaagaggaggatttggaagagatggaggatttgcgggagttaggatggggggcgggttttgtaggatagttcgtt

SEQ ID NO: 15866 - DNA, 1015 bp, Artificial Sequence
  chemically treated genomic DNA (Homo sapiens) CpG-island No: 15866
aacgaactatcctacaaaacccgccccccatcctaactcccgcaaatcctccatctcttccaaatcctcctcttcccccacgacctcctaaccgcccgcgaataacgcctaaccaatttacaacgccccaccgaccccttcgaacccccatcccctaccttaatccttcatccacaatcccaatcccgccccccgccccccgccccgtcccgtaaccaaaaccccgaaaaacacccaaccaaacccgaaaaactccgacctaaaacgacgcaacaactacgcgaaaaaacgaccctaaataatccgaaaaacgcgcgactacgaaactcacgccaaaccaaacgaaccgaaaacaaaaatccaaacgaaaataaaaaaattacgcgatcccaaccgaaaataaaaatcccgaaatctaaacgtacgactaaatctaaaaaccccgcaacccgaacccgttccgtccccgcccgatttccgaaacccgaaacccccgcgcgccccttcccgaccccctcaccctaacaaacgaaaccaacgcccgcgaaaattccgaaaccaaaaaaacaaaccgaaactacaaccgaaacccacgccccgaccgaaacgaaaccgaccgaaacgaaaccgaaactcaaaacctaccctcgaaaacgaaacgacccccgacctcacctccgcgaaattctcgtctatcctatcccgcccccgctaccctcgacccgccccgccgcccaatacgccaccgaaaaccccgaacaaaaaaccgccctataccctacaaaaccgcgaaaccgcgtaactctctcgatacgacgaataaatactacccgacgtcgaaacgtcccgcgccgtcgatcccaacgtacccgaccgctacctcccgaaacaccccgcgctacgcgcatccctcgaactcgacgcccgccccgaacccctccaaccgcgaacgctacctcgacgcccgaaaaacgcgcctccgctacgaaaactaccgataaataccccgctcccg

SEQ ID NO: 15867 - DNA, 1015 bp, Artificial Sequence
  chemically treated genomic DNA (Homo sapiens) CpG-island No: 15867
ggcgagttgttttgtagaattcgttttttattttaattttcgtaggttttttattttttttagatttttttttttttttacggttttttgatcgttcgcggatgacgtttgattagtttgtaacgttttatcgattttttcgagtttttattttttattttagttttttatttataattttagtttcgtttttcgtttttcgtttcgtttcgtaattagagtttcggggaatatttagttaggttcggaaggtttcgatttggggcggcgtagtagttgcgcggggaagcggttttgggtggttcggagagcgcgcggttacggggtttacgttaggttaggcgggtcgggggtaggggtttaggcgggaatgaggaagttacgcgattttagtcgggggtagaaatttcgaaatttgagcgtgcgattgagtttggaggtttcgtagttcgagttcgtttcgttttcgttcgattttcgagattcgggattttcgcgcgttttttttcggtttttttattttggtagacggagttagcgttcgcgggggtttcggagttaagagagtagatcggagttgtagtcggagtttacgtttcggtcgaggcggggtcggtcgaggcggggtcggggtttagggtttgttttcgggggcggggcggttttcggttttattttcgcgggattttcgtttgttttgtttcgttttcgttgttttcggttcgtttcgtcgtttagtgcgttatcgagagtttcgggtagggggtcgttttgtgttttgtagggtcgcggggtcgcgtagttttttcggtgcggcgggtaagtgttgttcggcgtcggggcgtttcgcgtcgtcggttttagcgtgttcggtcgttgtttttcggggtatttcgcgttgcgcgtatttttcgggttcggcgttcgtttcgggtttttttagtcgcgggcgttgtttcggcgttcgggggacgcgttttcgttgcgggagttgtcggtaggtgtttcgttttcg

SEQ ID NO: 15868 - DNA, 1015 bp, Artificial Sequence
  chemically treated genomic DNA (Homo sapiens) CpG-island No: 15868
cgaaaacgaaacacctaccgacaactcccgcaacgaaaacgcgtcccccgaacgccgaaacaacgcccgcgactaaaaaaacccgaaacgaacgccgaacccgaaaaatacgcgcaacgcgaaataccccgaaaaacaacgaccgaacacgctaaaaccgacgacgcgaaacgccccgacgccgaacaacacttacccgccgcaccgaaaaaactacgcgaccccgcgaccctacaaaacacaaaacgaccccctacccgaaactctcgataacgcactaaacgacgaaacgaaccgaaaacaacgaaaacgaaacaaaacaaacgaaaatcccgcgaaaataaaaccgaaaaccgccccgcccccgaaaacaaaccctaaaccccgaccccgcctcgaccgaccccgcctcgaccgaaacgtaaactccgactacaactccgatctactctcttaactccgaaacccccgcgaacgctaactccgtctaccaaaataaaaaaaccgaaaaaaaacgcgcgaaaatcccgaatctcgaaaatcgaacgaaaacgaaacgaactcgaactacgaaacctccaaactcaatcgcacgctcaaatttcgaaatttctacccccgactaaaatcgcgtaacttcctcattcccgcctaaacccctacccccgacccgcctaacctaacgtaaaccccgtaaccgcgcgctctccgaaccacccaaaaccgcttccccgcgcaactactacgccgccccaaatcgaaaccttccgaacctaactaaatattccccgaaactctaattacgaaacgaaacgaaaaacgaaaaacgaaactaaaattataaataaaaaactaaaataaaaaataaaaactcgaaaaaatcgataaaacgttacaaactaatcaaacgtcatccgcgaacgatcaaaaaaccgtaaaaaaaaaaaaaaatctaaaaaaaataaaaaacctacgaaaattaaaataaaaaacgaattctacaaaacaactcgcc

SEQ ID NO: 15869 - DNA, 1102 bp, Artificial Sequence
  chemically treated genomic DNA (Homo sapiens) CpG-island No: 15869
aaggagttcggtcgtcgtttttagtttgttagcgtagtttcgggtgagggggcgttttcgggtttcggttttttcgttcgttcggtagtcgtattttcggcgttcgttgtttagtatatttgcgggttcggtttttagtgttttagtttcgcgttgcggtgttttcgcggtcggttatttcgtttcggtgtagggattagggtatcggtcgttattggtttttatcgtaatgttttgaaagacgttttcggtcgtggttgtttagacgtatttggcgtcgtagtagtcgataatggcggttttttggtagtagttatcgtatattaggttatttacgtagttttgttaatcggttattttcgagtttttcgtattgtagcgcggacggcgaggagtagtaggcgtagcggcggcggcggcggtagcgggcggcggcggcgcggggggaggcggggcgggggcggggaggaggcggttttgcgtaggtatcgatcgttttttttttcgaggagttgcggcgggaggacgcgggtttagcgatgagggacgaattttagagcgcgttcggtcgttcggtcgttcgtagtcgcggggttgataaattagcggcgggaggttgcgaagcggttgtgtttgtggcggttgttttttatcgtagcgtttttcgtttttcgcggatacggttgggcgtgcgcgcgcgcgtgcgtgcgattttttcgcggcgttcgggtacggagggtttcgggaagggcggggggagattgaggcgggggcgcggagggatatcgtttcgggataattacggtcgttacgtgcgggaggcgtcggtcgggagcggtggcgggtcgagtttcggatttcgggtcggcggagagggtggatttcgcgtcgttttcggtattttaggaatagcggcggtacggacgttttggagtttcgcggtcgggtcgcgatgtgttttttttttgtgttcgttgttcgggatgcggaattttgagtttcggtgtcgggttatagagttgttttggtgacgggatgcggagcgtttttttttttttgttgtgggggcggttggtggtaggggtagttggtggtagggttg

SEQ ID NO: 15870 - DNA, 1102 bp, Artificial Sequence
  chemically treated genomic DNA (Homo sapiens) CpG-island No: 15870
caaccctaccaccaactacccctaccaccaaccgcccccacaacaaaaaaaaaaaaacgctccgcatcccgtcaccaaaacaactctataacccgacaccgaaactcaaaattccgcatcccgaacaacgaacacaaaaaaaaaacacatcgcgacccgaccgcgaaactccaaaacgtccgtaccgccgctattcctaaaataccgaaaacgacgcgaaatccaccctctccgccgacccgaaatccgaaactcgacccgccaccgctcccgaccgacgcctcccgcacgtaacgaccgtaattatcccgaaacgatatccctccgcgcccccgcctcaatctccccccgcccttcccgaaaccctccgtacccgaacgccgcgaaaaaatcgcacgcacgcgcgcgcgcacgcccaaccgtatccgcgaaaaacgaaaaacgctacgataaaaaacaaccgccacaaacacaaccgcttcgcaacctcccgccgctaatttatcaaccccgcgactacgaacgaccgaacgaccgaacgcgctctaaaattcgtccctcatcgctaaacccgcgtcctcccgccgcaactcctcgaaaaaaaaaacgatcgatacctacgcaaaaccgcctcctccccgcccccgccccgcctccccccgcgccgccgccgcccgctaccgccgccgccgccgctacgcctactactcctcgccgtccgcgctacaatacgaaaaactcgaaaataaccgattaacaaaactacgtaaataacctaatatacgataactactaccaaaaaaccgccattatcgactactacgacgccaaatacgtctaaacaaccacgaccgaaaacgtctttcaaaacattacgataaaaaccaataacgaccgataccctaatccctacaccgaaacgaaataaccgaccgcgaaaacaccgcaacgcgaaactaaaacactaaaaaccgaacccgcaaatatactaaacaacgaacgccgaaaatacgactaccgaacgaacgaaaaaaccgaaacccgaaaacgccccctcacccgaaactacgctaacaaactaaaaacgacgaccgaactcctt

SEQ ID NO: 15871 - DNA, 1102 bp, Artificial Sequence
  chemically treated genomic DNA (Homo sapiens) CpG-island No: 15871
taattttgttattagttgtttttgttattagtcgtttttataataaaaaggaggaaacgtttcgtatttcgttattaggataattttgtaattcgatatcgaggtttaagatttcgtatttcgggtagcgaatataggagaaaagtatatcgcggttcggtcgcggggttttaaggcgttcgtgtcgtcgttgtttttggggtgtcgagagcgacgcggggtttatttttttcgtcggttcgaggttcgaagttcggttcgttatcgttttcggtcggcgtttttcgtacgtggcggtcgtgattgtttcggggcggtattttttcgcgttttcgttttagttttttttcgtttttttcgggatttttcgtgttcgggcgtcgcggaaggatcgtacgtacgcgcgcgcgtacgtttagtcgtgttcgcggaaaacggagggcgttgcggtaaggagtagtcgttataggtatagtcgtttcgtagtttttcgtcgttggtttgttagtttcgcggttgcgggcggtcgggcggtcgagcgcgttttgaggttcgttttttatcgttgaattcgcgttttttcgtcgtagtttttcggggaggggggcggtcggtgtttgcgtagagtcgtttttttttcgttttcgtttcgttttttttcgcgtcgtcgtcgttcgttatcgtcgtcgtcgtcgttgcgtttgttgtttttcgtcgttcgcgttgtagtgcgaagggttcgaagatggtcggttggtagagttacgtggataatttgatgtgcgatggttgttgttaggaggtcgttattgtcggttattgcgacgttaaatacgtttgggtagttacggtcgggggcgttttttagagtattacggtgaggattagtggcggtcggtattttggtttttgtatcggagcggggtggtcggtcgcgggggtatcgtagcgcggggttggaatattgagggtcgagttcgtaggtgtgttaggtagcgggcgtcgaggatgcggttgtcgggcgggcggggaggtcgaggttcggggacgtttttttattcggggttgcgttgataggttgggggcggcggtcggatttttt

SEQ ID NO: 15872 - DNA, 1102 bp, Artificial Sequence
  chemically treated genomic DNA (Homo sapiens) CpG-island No: 15872
aaaaaatccgaccgccgcccccaacctatcaacgcaaccccgaataaaaaaacgtccccgaacctcgacctccccgcccgcccgacaaccgcatcctcgacgcccgctacctaacacacctacgaactcgaccctcaatattccaaccccgcgctacgatacccccgcgaccgaccaccccgctccgatacaaaaaccaaaataccgaccgccactaatcctcaccgtaatactctaaaaaacgcccccgaccgtaactacccaaacgtatttaacgtcgcaataaccgacaataacgacctcctaacaacaaccatcgcacatcaaattatccacgtaactctaccaaccgaccatcttcgaacccttcgcactacaacgcgaacgacgaaaaacaacaaacgcaacgacgacgacgacgataacgaacgacgacgacgcgaaaaaaaacgaaacgaaaacgaaaaaaaaacgactctacgcaaacaccgaccgcccccctccccgaaaaactacgacgaaaaaacgcgaattcaacgataaaaaacgaacctcaaaacgcgctcgaccgcccgaccgcccgcaaccgcgaaactaacaaaccaacgacgaaaaactacgaaacgactatacctataacgactactccttaccgcaacgccctccgttttccgcgaacacgactaaacgtacgcgcgcgcgtacgtacgatccttccgcgacgcccgaacacgaaaaatcccgaaaaaaacgaaaaaaaactaaaacgaaaacgcgaaaaaataccgccccgaaacaatcacgaccgccacgtacgaaaaacgccgaccgaaaacgataacgaaccgaacttcgaacctcgaaccgacgaaaaaaataaaccccgcgtcgctctcgacaccccaaaaacaacgacgacacgaacgccttaaaaccccgcgaccgaaccgcgatatacttttctcctatattcgctacccgaaatacgaaatcttaaacctcgatatcgaattacaaaattatcctaataacgaaatacgaaacgtttcctcctttttattataaaaacgactaataacaaaaacaactaataacaaaatta

SEQ ID NO: 15873 - DNA, 543 bp, Artificial Sequence
  chemically treated genomic DNA (Homo sapiens) CpG-island No: 15873
tttttgcgtttcgtaggcggtcgtagttcgcgggtcgattcgggggaatggtaggaatgcgcgggcgtcgggcggaagaggtcgcggcggtcgggttagttggggagggagggtcgggtcggcgggcgcggcgtggggcgtgggggcggtcggggttcgggagcgcgagggcgtagggttcgcggaagttaggttagttgacgcgggcgggcgagtcgggtaggggagcggggtttcgagtttatttttcgtattcggtttgcggcgcgttcggggttcggttttgggttttgttacgtggttttattttttttttttttcgcgggaggtttagggtcgtttttattttttttcggtttagaattagtttcgtagtttttttattttcgtttttttcggattttttatttttagttcgttttttttcgtgggttgcgtcgcgcgttgtagagttcggggagcgttagtttgggttatttcggtttttttttttttacgagagtttttgatttttgttgagttttttttgggttttttttagtt

SEQ ID NO: 15874 - DNA, 543 bp, Artificial Sequence
  chemically treated genomic DNA (Homo sapiens) CpG-island No: 15874
aactaaaaaaaacccaaaaaaaactcaacaaaaatcaaaaactctcgtaaaaaaaaaaaaaccgaaataacccaaactaacgctccccgaactctacaacgcgcgacgcaacccacgaaaaaaaacgaactaaaaataaaaaatccgaaaaaaacgaaaataaaaaaactacgaaactaattctaaaccgaaaaaaaataaaaacgaccctaaacctcccgcgaaaaaaaaaaaaaataaaaccacgtaacaaaacccaaaaccgaaccccgaacgcgccgcaaaccgaatacgaaaaataaactcgaaaccccgctcccctacccgactcgcccgcccgcgtcaactaacctaacttccgcgaaccctacgccctcgcgctcccgaaccccgaccgcccccacgccccacgccgcgcccgccgacccgaccctccctccccaactaacccgaccgccgcgacctcttccgcccgacgcccgcgcattcctaccattcccccgaatcgacccgcgaactacgaccgcctacgaaacgcaaaaa

SEQ ID NO: 15875 - DNA, 543 bp, Artificial Sequence
  chemically treated genomic DNA (Homo sapiens) CpG-island No: 15875
aattaagggaagtttagggaaaatttagtagaaattaaggattttcgtgagaaaaaaggaatcgaaatagtttagattggcgtttttcggattttgtagcgcgcggcgtaatttacggaggggggcgggttgggagtgggggattcgggggagacgaaggtgaaggagttgcggggttagttttgagtcgggaaaaggtgagggcggttttgggtttttcgcgggggaaggaagagatgaagttacgtgatagggtttaaagtcgggtttcgagcgcgtcgtagatcggatgcgggaagtgggttcggggtttcgtttttttgttcggttcgttcgttcgcgttagttgatttggttttcgcgggttttgcgttttcgcgttttcgggtttcggtcgtttttacgttttacgtcgcgttcgtcggttcggttttttttttttagttggttcggtcgtcgcggtttttttcgttcggcgttcgcgtatttttgttattttttcgagtcggttcgcgggttacggtcgtttgcggagcgtaggaa

SEQ ID NO: 15876 - DNA, 543 bp, Artificial Sequence
  chemically treated genomic DNA (Homo sapiens) CpG-island No: 15876
ttcctacgctccgcaaacgaccgtaacccgcgaaccgactcgaaaaaataacaaaaatacgcgaacgccgaacgaaaaaaaccgcgacgaccgaaccaactaaaaaaaaaaaaccgaaccgacgaacgcgacgtaaaacgtaaaaacgaccgaaacccgaaaacgcgaaaacgcaaaacccgcgaaaaccaaatcaactaacgcgaacgaacgaaccgaacaaaaaaacgaaaccccgaacccacttcccgcatccgatctacgacgcgctcgaaacccgactttaaaccctatcacgtaacttcatctcttccttcccccgcgaaaaacccaaaaccgccctcaccttttcccgactcaaaactaaccccgcaactccttcaccttcgtctcccccgaatcccccactcccaacccgcccccctccgtaaattacgccgcgcgctacaaaatccgaaaaacgccaatctaaactatttcgattccttttttctcacgaaaatccttaatttctactaaattttccctaaacttcccttaatt

SEQ ID NO: 15877 - DNA, 502 bp, Artificial Sequence
  chemically treated genomic DNA (Homo sapiens) CpG-island No: 15877
gaaggtaatatttgcggtattatttgtattagacgtttattagtaatacgatgtatttttttcggcgttatcgggttagcgtcgttacgatttgttttttatagtagtagtagataacgtaaacgttgtttttttgtagtcggacgcgtttgaattatagtataagcgcgttgggtatcgagttttacggaagagataatcgcgatcggatagtttttcgggaaacgatcgtttagatcggaagttattagtatattattaatacgaatattcgtattcgtcggtagatgtttaagttgtaaattattcgtataatcgttatcggttgtaattacgcggatatcgttgcgtagtatttggattggtagcgcgtgggtcgtattataaattagtagtacgcgattggttagtttagcgacggttattatttgattaataatatttttgtcgttgatgatcggttggtttttataaacgttattaacgttatttttatcgataa

SEQ ID NO: 15878 - DNA, 502 bp, Artificial Sequence
  chemically treated genomic DNA (Homo sapiens) CpG-island No: 15878
ttatcgataaaaataacgttaataacgtttataaaaaccaaccgatcatcaacgacaaaaatattattaatcaaataataaccgtcgctaaactaaccaatcgcgtactactaatttataatacgacccacgcgctaccaatccaaatactacgcaacgatatccgcgtaattacaaccgataacgattatacgaataatttacaacttaaacatctaccgacgaatacgaatattcgtattaataatatactaataacttccgatctaaacgatcgtttcccgaaaaactatccgatcgcgattatctcttccgtaaaactcgatacccaacgcgcttatactataattcaaacgcgtccgactacaaaaaaacaacgtttacgttatctactactactataaaaaacaaatcgtaacgacgctaacccgataacgccgaaaaaaatacatcgtattactaataaacgtctaatacaaataataccgcaaatattaccttc

SEQ ID NO: 15879 - DNA, 502 bp, Artificial Sequence
  chemically treated genomic DNA (Homo sapiens) CpG-island No: 15879
ttatcgataaaggtagcgttaatggcgtttatgaaggttagtcggttattagcgataaaggtgttgttggttaggtggtggtcgtcgttaaattgattagtcgcgtgttgttgatttgtgatgcgatttacgcgttgttaatttaggtgttgcgtaacgatattcgcgtaattgtagtcggtaacggttgtacggatgatttgtagtttgagtatttgtcggcgaatacggatattcgtgttggtgatgtgttggtgattttcggtttgggcggtcgtttttcggaaggttattcggtcgcggttgtttttttcgtaaaattcgatatttagcgcgtttatattgtgatttaggcgcgttcgattgtaggaaagtaacgtttgcgttatttgttgttgttgtggggggtagatcgtaacggcgttaattcgatgacgtcggaagaggtgtatcgtgttgttaatgaacgtttgatgtagatgatgtcgtaggtattgttttt

SEQ ID NO: 15880 - DNA, 502 bp, Artificial Sequence
  chemically treated genomic DNA (Homo sapiens) CpG-island No: 15880
aaaaacaatacctacgacatcatctacatcaaacgttcattaacaacacgatacacctcttccgacgtcatcgaattaacgccgttacgatctaccccccacaacaacaacaaataacgcaaacgttactttcctacaatcgaacgcgcctaaatcacaatataaacgcgctaaatatcgaattttacgaaaaaaacaaccgcgaccgaataaccttccgaaaaacgaccgcccaaaccgaaaatcaccaacacatcaccaacacgaatatccgtattcgccgacaaatactcaaactacaaatcatccgtacaaccgttaccgactacaattacgcgaatatcgttacgcaacacctaaattaacaacgcgtaaatcgcatcacaaatcaacaacacgcgactaatcaatttaacgacgaccaccacctaaccaacaacacctttatcgctaataaccgactaaccttcataaacgccattaacgctacctttatcgataa

SEQ ID NO: 15881 - DNA, 513 bp, Artificial Sequence
  chemically treated genomic DNA (Homo sapiens) CpG-island No: 15881
gcgttttcgtttgcgtatgtgtagttaattttatttttcggtttttttttgttagtgtttgttggtgtagagggttcgtagtttaggtgagagcgtcgggtttttacgcggattgcggatttgtagggagggatgtgttagtgtttagggggcgggaacgcgacgtttcgggaatttttttaaagtaggtcgtcgttttttgtgtttcggtcggttcgggattttagtttgagaagggtcggtgggggcgggtttcgggggcgttaggtggggttgagttttagttggaagatgttcggtgcgggtcgaggtatgggcgttagaatgtagttaggcgtcggaaaacgcggtgttggttttaggaggggaatgcgcgtttattgtattgattatgaatttgttataaagcgcgtatagttcgtgggtttgcggtgagaggtcgagtttaggagttagaaggatttcgtgaattttggttttgttatttgagcgtttgaaaatgaggatattagt

SEQ ID NO: 15882 - DNA, 513 bp, Artificial Sequence
  chemically treated genomic DNA (Homo sapiens) CpG-island No: 15882
actaatatcctcattttcaaacgctcaaataacaaaaccaaaattcacgaaatccttctaactcctaaactcgacctctcaccgcaaacccacgaactatacgcgctttataacaaattcataatcaatacaataaacgcgcattcccctcctaaaaccaacaccgcgttttccgacgcctaactacattctaacgcccatacctcgacccgcaccgaacatcttccaactaaaactcaaccccacctaacgcccccgaaacccgcccccaccgacccttctcaaactaaaatcccgaaccgaccgaaacacaaaaaacgacgacctactttaaaaaaattcccgaaacgtcgcgttcccgccccctaaacactaacacatccctccctacaaatccgcaatccgcgtaaaaacccgacgctctcacctaaactacgaaccctctacaccaacaaacactaacaaaaaaaaaccgaaaaataaaattaactacacatacgcaaacgaaaacgc

SEQ ID NO: 15883 - DNA, 513 bp, Artificial Sequence
  chemically treated genomic DNA (Homo sapiens) CpG-island No: 15883
attaatatttttatttttaaacgtttaagtgatagagttaaaatttacgaggtttttttagtttttaggttcggttttttatcgtagatttacgggttgtacgcgttttgtggtaggtttatggttaatataataaacgcgtattttttttttgaagttagtatcgcgtttttcgacgtttggttgtattttggcgtttatatttcggttcgtatcgagtattttttaattaggatttagttttatttaacgttttcggagttcgtttttatcggttttttttaggttgaggtttcgggtcggtcgaggtatagggagcgacggtttgttttgggggagttttcgggacgtcgcgttttcgttttttggatattagtatatttttttttgtaggttcgtaattcgcgtggaggttcggcgtttttatttgagttgcgaattttttgtattagtaaatattaatagggagaagtcggaaagtggggttgattgtatatgcgtagacgaaaacgt

SEQ ID NO: 15884 - DNA, 513 bp, Artificial Sequence
  chemically treated genomic DNA (Homo sapiens) CpG-island No: 15884
acgttttcgtctacgcatatacaatcaaccccactttccgacttctccctattaatatttactaatacaaaaaattcgcaactcaaataaaaacgccgaacctccacgcgaattacgaacctacaaaaaaaaatatactaatatccaaaaaacgaaaacgcgacgtcccgaaaactcccccaaaacaaaccgtcgctccctatacctcgaccgacccgaaacctcaacctaaaaaaaaccgataaaaacgaactccgaaaacgttaaataaaactaaatcctaattaaaaaatactcgatacgaaccgaaatataaacgccaaaatacaaccaaacgtcgaaaaacgcgatactaacttcaaaaaaaaaatacgcgtttattatattaaccataaacctaccacaaaacgcgtacaacccgtaaatctacgataaaaaaccgaacctaaaaactaaaaaaacctcgtaaattttaactctatcacttaaacgtttaaaaataaaaatattaat

SEQ ID NO: 15885 - DNA, 792 bp, Artificial Sequence
  chemically treated genomic DNA (Homo sapiens) CpG-island No: 15885
gcgcgggcggtttttttttttaataatgtttgttcgtcgtggacggattttattttttttttttgttttttattttgagagttgagttagaatcgttcgtggggtttatttcgatagtttttaggttcgcgtcgcgtcgcggaaatcgtgatttgttaggttttatttttgtacgtttcgtttcgtttttcgcgtttaatttttgcgcgtttcgtttcggttcgcgttgatagagcggatttaggttttcggtcgtttcgcgttatggtcgcgtcggtttcggttacgcggtaggttagcggcgtcgtcgttttggtttcggtttcgagcggtttcgatagcgggtagtttttggcggtcgtcgtggtcgagttgtcggtgttggacgttcgcgggtagcgggtatcgttcggcgcgttgtttcgggagcgtcgcgtcgtggtggtgttcgtgcgggtgagcgggcggcggggttggaagggaagcgcggtttagggtttcgggtaggttgtcgggatgcgagtcgcgttttttgttttttaggacggaaacgggaaggtagtttgtttagtcgcggtcgttttttaattagggcggggtagggagagggcgagggcgaggttcgttttttacgcgtcgggcgttcgagtcgtcggtttcggtttcgcgggcgtcgtttttgttcgcgttacgtacggcgaagtatagggatttttcggggttcgagggtgttgttttattaatttgttttttttgtcgttttggtttttagtattttttgtgttatatttg

SEQ ID NO: 15886 - DNA, 792 bp, Artificial Sequence
  chemically treated genomic DNA (Homo sapiens) CpG-island No: 15886
caaatataacacaaaaaatactaaaaaccaaaacgacaaaaaaaacaaattaataaaacaacaccctcgaaccccgaaaaatccctatacttcgccgtacgtaacgcgaacaaaaacgacgcccgcgaaaccgaaaccgacgactcgaacgcccgacgcgtaaaaaacgaacctcgccctcgccctctccctaccccgccctaattaaaaaacgaccgcgactaaacaaactaccttcccgtttccgtcctaaaaaacaaaaaacgcgactcgcatcccgacaacctacccgaaaccctaaaccgcgcttcccttccaaccccgccgcccgctcacccgcacgaacaccaccacgacgcgacgctcccgaaacaacgcgccgaacgatacccgctacccgcgaacgtccaacaccgacaactcgaccacgacgaccgccaaaaactacccgctatcgaaaccgctcgaaaccgaaaccaaaacgacgacgccgctaacctaccgcgtaaccgaaaccgacgcgaccataacgcgaaacgaccgaaaacctaaatccgctctatcaacgcgaaccgaaacgaaacgcgcaaaaattaaacgcgaaaaacgaaacgaaacgtacaaaaataaaacctaacaaatcacgatttccgcgacgcgacgcgaacctaaaaactatcgaaataaaccccacgaacgattctaactcaactctcaaaataaaaaacaaaaaaaaaaaataaaatccgtccacgacgaacaaacattattaaaaaaaaaaaccgcccgcgc

SEQ ID NO: 15887 - DNA, 792 bp, Artificial Sequence
  chemically treated genomic DNA (Homo sapiens) CpG-island No: 15887
tagatgtaatataggaaatgttgaaagttaaaacggtagaaagggtaagttagtaaagtagtattttcgggtttcgaaggatttttgtatttcgtcgtgcgtgacgcgagtaaaggcgacgttcgcggggtcgggatcggcggttcgggcgttcggcgcgtgggaagcgggtttcgttttcgttttttttttgtttcgttttagttgggaagcggtcgcgattgggtaggttgttttttcgttttcgttttaagaagtaggaggcgcggttcgtatttcggtagtttgttcgggattttgggtcgcgttttttttttagtttcgtcgttcgtttattcgtacgaatattattacggcgcggcgttttcggaatagcgcgtcgaacggtattcgttgttcgcgggcgtttagtatcggtagttcggttacggcggtcgttaggggttgttcgttgtcggggtcgttcggggtcgggattagggcggcggcgtcgttaatttgtcgcgtgatcggggtcggcgcggttatgacgcggggcggtcgagggtttgggttcgttttgttagcgcggatcggggcggggcgcgtagaggttgggcgcggggggcggggcggggcgtgtagaggtggggtttggtaagttacggttttcgcggcgcggcgcgggtttgggagttgtcggagtgaattttacgggcggttttgatttagtttttagggtaggggatagagagagaaagtaaggttcgtttacggcgagtaagtattattgaggaagaaagtcgttcgcgt

SEQ ID NO: 15888 - DNA, 792 bp, Artificial Sequence
  chemically treated genomic DNA (Homo sapiens) CpG-island No: 15888
acgcgaacgactttcttcctcaataatacttactcgccgtaaacgaaccttactttctctctctatcccctaccctaaaaactaaatcaaaaccgcccgtaaaattcactccgacaactcccaaacccgcgccgcgccgcgaaaaccgtaacttaccaaaccccacctctacacgccccgccccgccccccgcgcccaacctctacgcgccccgccccgatccgcgctaacaaaacgaacccaaaccctcgaccgccccgcgtcataaccgcgccgaccccgatcacgcgacaaattaacgacgccgccgccctaatcccgaccccgaacgaccccgacaacgaacaacccctaacgaccgccgtaaccgaactaccgatactaaacgcccgcgaacaacgaataccgttcgacgcgctattccgaaaacgccgcgccgtaataatattcgtacgaataaacgaacgacgaaactaaaaaaaaaacgcgacccaaaatcccgaacaaactaccgaaatacgaaccgcgcctcctacttcttaaaacgaaaacgaaaaaacaacctacccaatcgcgaccgcttcccaactaaaacgaaacaaaaaaaaaacgaaaacgaaacccgcttcccacgcgccgaacgcccgaaccgccgatcccgaccccgcgaacgtcgcctttactcgcgtcacgcacgacgaaatacaaaaatccttcgaaacccgaaaatactactttactaacttaccctttctaccgttttaactttcaacatttcctatattacatcta

SEQ ID NO: 15889 - DNA, 601 bp, Artificial Sequence
  chemically treated genomic DNA (Homo sapiens) CpG-island No: 15889
cggcgagcgtgatagcgttcggttcgattttgtttagatgtttatagaagatggagttgacgaggttgattagaaagattattaattgcgtaagaaattgcggaggcgcggaaagtaaggcgcgtttatagtcgtttttttttttggaagttcgcgtttatttttgcgcggcggtcgtttcggaggcgtcgggttgggcgtgaggacgtcgtatttattattgggttcgcgagcgtcgttagtttagtcgttttttttcgtaggttcgggggtagcgtatttcgtaggttttataagtcgttacgttattcgagggttcggagtcgttatgggggtcggtttttggcggcggcggggagttcggcggggatcggggcgtcggcggtcgtaggggtttttatgcggaggttgggagcggttggcggcggcgcgggcgcgggatcgtagcgcggtgtgggggtgaggggggcgattcgattttatttagtttcgttttttttcgtttcggatcggttttagacgtttagggtaatggtcgtcgttcgtagaattttgggggagggtatcgggagggtttttgggggtttatgaagggggttcg

SEQ ID NO: 15890 - DNA, 601 bp, Artificial Sequence
  chemically treated genomic DNA (Homo sapiens) CpG-island No: 15890
cgaacccccttcataaacccccaaaaaccctcccgataccctcccccaaaattctacgaacgacgaccattaccctaaacgtctaaaaccgatccgaaacgaaaaaaaacgaaactaaataaaatcgaatcgcccccctcacccccacaccgcgctacgatcccgcgcccgcgccgccgccaaccgctcccaacctccgcataaaaacccctacgaccgccgacgccccgatccccgccgaactccccgccgccgccaaaaaccgacccccataacgactccgaaccctcgaataacgtaacgacttataaaacctacgaaatacgctacccccgaacctacgaaaaaaaacgactaaactaacgacgctcgcgaacccaataataaatacgacgtcctcacgcccaacccgacgcctccgaaacgaccgccgcgcaaaaataaacgcgaacttccaaaaaaaaaaacgactataaacgcgccttactttccgcgcctccgcaatttcttacgcaattaataatctttctaatcaacctcgtcaactccatcttctataaacatctaaacaaaatcgaaccgaacgctatcacgctcgccg

SEQ ID NO: 15891 - DNA, 601 bp, Artificial Sequence
  chemically treated genomic DNA (Homo sapiens) CpG-island No: 15891
cgagttttttttataagtttttaagggttttttcggtgtttttttttagagttttgcgggcggcgattattgttttgggcgtttggagtcggttcgggacggggaggggcggggttgggtgggatcgggtcgttttttttatttttatatcgcgttgcggtttcgcgttcgcgtcgtcgttagtcgtttttagttttcgtatggaggtttttgcggtcgtcgacgtttcggttttcgtcgagtttttcgtcgtcgttaaggatcggtttttatagcggtttcgggttttcggatggcgtgacggtttgtggggtttgcggggtgcgttgttttcggatttgcggggggaggcggttgagttggcggcgttcgcgggtttagtggtgagtgcggcgtttttacgtttagttcgacgttttcggagcggtcgtcgcgtaggggtgggcgcgggtttttaggagggagggcggttgtgaacgcgttttgtttttcgcgttttcgtagttttttgcgtagttgatgatttttttaattagtttcgttagttttattttttgtggatatttgggtaaggtcgagtcggacgttgttacgttcgtcg

SEQ ID NO: 15892 - DNA, 601 bp, Artificial Sequence
  chemically treated genomic DNA (Homo sapiens) CpG-island No: 15892
cgacgaacgtaacaacgtccgactcgaccttacccaaatatccacaaaaaataaaactaacgaaactaattaaaaaaatcatcaactacgcaaaaaactacgaaaacgcgaaaaacaaaacgcgttcacaaccgccctccctcctaaaaacccgcgcccacccctacgcgacgaccgctccgaaaacgtcgaactaaacgtaaaaacgccgcactcaccactaaacccgcgaacgccgccaactcaaccgcctccccccgcaaatccgaaaacaacgcaccccgcaaaccccacaaaccgtcacgccatccgaaaacccgaaaccgctataaaaaccgatccttaacgacgacgaaaaactcgacgaaaaccgaaacgtcgacgaccgcaaaaacctccatacgaaaactaaaaacgactaacgacgacgcgaacgcgaaaccgcaacgcgatataaaaataaaaaaaacgacccgatcccacccaaccccgcccctccccgtcccgaaccgactccaaacgcccaaaacaataatcgccgcccgcaaaactctaaaaaaaaacaccgaaaaaacccttaaaaacttataaaaaaaactcg

SEQ ID NO: 15893 - DNA, 666 bp, Artificial Sequence
  chemically treated genomic DNA (Homo sapiens) CpG-island No: 15893
tggttgcgcgtttagtcgggttttcgggcgttaggcgcggggcgggttttgggcgggcggtcggggcggggattgtagagtaggttgtattgcgcggtatttattgtcggtttgcgcggtatttattgtcggttttcgcggtatttattgtcggttttcgcgttattcggtcgtagcgcgcgagttatatggaagtttttgaggagttcgcgttagtgcgcggaggttcggaggttatttttgaggttcgtgggtcgcgttgtttgcggttgttcgtttttcgagaagagttgcgggcgtttttggttttggttggtttcgcggtgagtaaggtggttttagtggtaggtcggtatcggcgggttggggatttggtgatttttgttttcgcgggtgattttggcgggttttggggatcgagcgagttgttcgtcggcgggtttcggggagtatcgtgttaggagtcgggcgggtattttagtttttttgtttgcgtttcggtcgtttttcgtttcgtattattcgattgggggtttcgcggggtattgcgggaacggttggtacgcgttcgggcgtatgttggttcggagaggtcggcggttttagttttttgcgttaggagatatcggagagttgggatttttgtttttaacggggttttattag

SEQ ID NO: 15894 - DNA, 666 bp, Artificial Sequence
  chemically treated genomic DNA (Homo sapiens) CpG-island No: 15894
ctaataaaaccccgttaaaaacaaaaatcccaactctccgatatctcctaacgcaaaaaactaaaaccgccgacctctccgaaccaacatacgcccgaacgcgtaccaaccgttcccgcaataccccgcgaaacccccaatcgaataatacgaaacgaaaaacgaccgaaacgcaaacaaaaaaactaaaatacccgcccgactcctaacacgatactccccgaaacccgccgacgaacaactcgctcgatccccaaaacccgccaaaatcacccgcgaaaacaaaaatcaccaaatccccaacccgccgataccgacctaccactaaaaccaccttactcaccgcgaaaccaaccaaaaccaaaaacgcccgcaactcttctcgaaaaacgaacaaccgcaaacaacgcgacccacgaacctcaaaaataacctccgaacctccgcgcactaacgcgaactcctcaaaaacttccatataactcgcgcgctacgaccgaataacgcgaaaaccgacaataaataccgcgaaaaccgacaataaataccgcgcaaaccgacaataaataccgcgcaatacaacctactctacaatccccgccccgaccgcccgcccaaaacccgccccgcgcctaacgcccgaaaacccgactaaacgcgcaacca

SEQ ID NO: 15895 - DNA, 666 bp, Artificial Sequence
  chemically treated genomic DNA (Homo sapiens) CpG-island No: 15895
ttggtagagtttcgttaggggtaaaggttttagtttttcggtgttttttggcgtaggaggttggagtcgtcggttttttcgagttaatatgcgttcgggcgcgtattagtcgttttcgtagtgtttcgcggggtttttagtcgggtggtgcggagcggaaagcggtcgggacgtaggtagaggagttggggtgttcgttcggtttttggtacgatgtttttcggagttcgtcggcggatagttcgttcggtttttaaagttcgttaaagttattcgcggaggtagaaattattaggtttttagttcgtcggtatcggtttgttattgaggttattttatttatcgcggggttagttaggattaagagcgttcgtagtttttttcggaaggcggatagtcgtaagtagcgcgatttacggattttaagggtggttttcgggttttcgcgtattggcgcgggttttttaggagtttttatgtgattcgcgcgttgcggtcgggtagcgcggaggtcggtagtgggtatcgcggaggtcggtagtgggtatcgcgtaggtcggtagtgggtatcgcgtagtgtagtttgttttgtagttttcgtttcggtcgttcgtttagagttcgtttcgcgtttggcgttcgggggttcgattgagcgcgtagtta

SEQ ID NO: 15896 - DNA, 666 bp, Artificial Sequence
  chemically treated genomic DNA (Homo sapiens) CpG-island No: 15896
taactacgcgctcaatcgaacccccgaacgccaaacgcgaaacgaactctaaacgaacgaccgaaacgaaaactacaaaacaaactacactacgcgatacccactaccgacctacgcgatacccactaccgacctccgcgatacccactaccgacctccgcgctacccgaccgcaacgcgcgaatcacataaaaactcctaaaaaacccgcgccaatacgcgaaaacccgaaaaccacccttaaaatccgtaaatcgcgctacttacgactatccgccttccgaaaaaaactacgaacgctcttaatcctaactaaccccgcgataaataaaataacctcaataacaaaccgataccgacgaactaaaaacctaataatttctacctccgcgaataactttaacgaactttaaaaaccgaacgaactatccgccgacgaactccgaaaaacatcgtaccaaaaaccgaacgaacaccccaactcctctacctacgtcccgaccgctttccgctccgcaccacccgactaaaaaccccgcgaaacactacgaaaacgactaatacgcgcccgaacgcatattaactcgaaaaaaccgacgactccaacctcctacgccaaaaaacaccgaaaaactaaaacctttacccctaacgaaactctaccaa

SEQ ID NO: 15897 - DNA, 859 bp, Artificial Sequence
  chemically treated genomic DNA (Homo sapiens) CpG-island No: 15897
ttcggcggagcgcgtagaagataattttgggttcgttaaattaatttaggatatttaggtaaggcgagaatttacggcgtcgttagcggttcgtttaaattgaggcgcggttggcgggggattttcgttcgaaaattagtttggaagaatgaattgttcggagcgaagtttgcgtttattcggggtttagattttacgcgggtgatttttacgcgcgtcgcgttttcgtcgcgtttcggattattcgagagagcggcgaggattcgatcgcggaaagttggcgttcgcgtcgtttttcgcgcgttttggggcgttttttttttattcgagcgttacgtgtcgcgcgtttttcgttttcgggtcgcggcgggacgttttcgtttttatcgtagcgcgtagtgcgtaggcgttttttcgcgggtcgcggcggcgggagcgggaggcggcggcggcggcggtagcggcgggagcggtttttgtttcggttggagattgaggcgaaggcggtagcggcggaggaggtggaggagaggcgagggtgaaggcgatggcgacgcggggtatatgaggtcgcgatcggcgggacgggtcgaggttcggcggaggaggcggtttcgggggaattcgtcgtcgggtgaggggcggtcgtagggtcggttgaggagaagcgggttaggggcggggttttagggggaggcgggagaatttttggggagttcggggaggggtcgaggagaattttcggaggttcggggaggagcgcggtcggagcggagagggaaggggggagtttattgatggattaggagaaattaagaatttaaattttgtaattcgaattggagggttgttgtttgtt

SEQ ID NO: 15898 - DNA, 859 bp, Artificial Sequence
  chemically treated genomic DNA (Homo sapiens) CpG-island No: 15898
aacaaacaacaaccctccaattcgaattacaaaatttaaattcttaatttctcctaatccatcaataaactccccccttccctctccgctccgaccgcgctcctccccgaacctccgaaaattctcctcgacccctccccgaactccccaaaaattctcccgcctccccctaaaaccccgcccctaacccgcttctcctcaaccgaccctacgaccgcccctcacccgacgacgaattcccccgaaaccgcctcctccgccgaacctcgacccgtcccgccgatcgcgacctcatataccccgcgtcgccatcgccttcaccctcgcctctcctccacctcctccgccgctaccgccttcgcctcaatctccaaccgaaacaaaaaccgctcccgccgctaccgccgccgccgccgcctcccgctcccgccgccgcgacccgcgaaaaaacgcctacgcactacgcgctacgataaaaacgaaaacgtcccgccgcgacccgaaaacgaaaaacgcgcgacacgtaacgctcgaataaaaaaaaaacgccccaaaacgcgcgaaaaacgacgcgaacgccaactttccgcgatcgaatcctcgccgctctctcgaataatccgaaacgcgacgaaaacgcgacgcgcgtaaaaatcacccgcgtaaaatctaaaccccgaataaacgcaaacttcgctccgaacaattcattcttccaaactaattttcgaacgaaaatcccccgccaaccgcgcctcaatttaaacgaaccgctaacgacgccgtaaattctcgccttacctaaatatcctaaattaatttaacgaacccaaaattatcttctacgcgctccgccgaa

SEQ ID NO: 15899 - DNA, 859 bp, Artificial Sequence
  chemically treated genomic DNA (Homo sapiens) CpG-island No: 15899
agtaagtagtagttttttaattcgaattatagaatttgaatttttaattttttttaatttattagtgagtttttttttttttttttcgtttcggtcgcgttttttttcggattttcggaggtttttttcggttttttttcgggttttttaagagttttttcgtttttttttgggatttcgtttttggttcgtttttttttagtcggttttgcggtcgttttttattcggcggcgggttttttcggagtcgtttttttcgtcgggtttcggttcgtttcgtcggtcgcggttttatgtgtttcgcgtcgttatcgtttttattttcgttttttttttatttttttcgtcgttgtcgttttcgttttagtttttagtcgaggtagaagtcgttttcgtcgttgtcgtcgtcgtcgtcgtttttcgttttcgtcgtcgcgattcgcgggaaggcgtttgcgtattgcgcgttgcggtgggggcgggggcgtttcgtcgcggttcgggagcggggggcgcgcggtacgtggcgttcgagtgggaggggggcgttttagaacgcgcgggaagcgacgcgagcgttaatttttcgcggtcgagttttcgtcgttttttcggatagttcgggacgcggcggaggcgcggcgcgcgtgggagttattcgcgtggagtttggatttcgggtgggcgtagatttcgtttcggatagtttatttttttaagttgattttcgggcgagagtttttcgttagtcgcgttttagtttgagcgggtcgttaacggcgtcgtgggttttcgttttatttgggtattttgggttggtttagcgggtttagagttgttttttgcgcgtttcgtcgag

SEQ ID NO: 15900 - DNA, 859 bp, Artificial Sequence
  chemically treated genomic DNA (Homo sapiens) CpG-island No: 15900
ctcgacgaaacgcgcaaaaaacaactctaaacccgctaaaccaacccaaaatacccaaataaaacgaaaacccacgacgccgttaacgacccgctcaaactaaaacgcgactaacgaaaaactctcgcccgaaaatcaacttaaaaaaataaactatccgaaacgaaatctacgcccacccgaaatccaaactccacgcgaataactcccacgcgcgccgcgcctccgccgcgtcccgaactatccgaaaaaacgacgaaaactcgaccgcgaaaaattaacgctcgcgtcgcttcccgcgcgttctaaaacgcccccctcccactcgaacgccacgtaccgcgcgccccccgctcccgaaccgcgacgaaacgcccccgcccccaccgcaacgcgcaatacgcaaacgccttcccgcgaatcgcgacgacgaaaacgaaaaacgacgacgacgacgacaacgacgaaaacgacttctacctcgactaaaaactaaaacgaaaacgacaacgacgaaaaaaataaaaaaaaaacgaaaataaaaacgataacgacgcgaaacacataaaaccgcgaccgacgaaacgaaccgaaacccgacgaaaaaaacgactccgaaaaaacccgccgccgaataaaaaacgaccgcaaaaccgactaaaaaaaaacgaaccaaaaacgaaatcccaaaaaaaaacgaaaaaactcttaaaaaacccgaaaaaaaaccgaaaaaaacctccgaaaatccgaaaaaaaacgcgaccgaaacgaaaaaaaaaaaaaaaaactcactaataaattaaaaaaaattaaaaattcaaattctataattcgaattaaaaaactactacttact

SEQ ID NO: 15901 - DNA, 727 bp, Artificial Sequence
  chemically treated genomic DNA (Homo sapiens) CpG-island No: 15901
  unsure (659)
ggtggtatcggttgtggcggcggtggtggtggtatcggttgtggcggcggtggtggtggtatcggttgtggcggcggtggtggtggtatcggttgtggcggcggtggtggtggtatcggttgtggcggcggtggtggtggtatcggttgtggcggcggtggtggtggtatcggttgtggcggcggtggtggtggtatcggttgtggcggcggtggtggtggtatcggttgtggcggcggaggtggtggtatcggttgtggcggcggtggtggtggtatcggttgtggcggcggaggtggtggtatcggttgtggcggcggaggtggtggtatcggttgtggcggcggtggtggtggtatcggttgtggcggcggaggtggtggtatcggttgtggcggcggaggtggtggtatcggttgtggcggcggaggtggtggtatcggttgtggcggcggtggtggtggtatcggttgtgtcggcggtggtggtggtatcggttgtgtcggcggtggtggtggtatcggttgtggcggcggtggtggtggtatcggttgtggcggcggaggtggtggtatcggttgtgtcggcggtggtggtggtatcggttgtggcggcggaggtggtggtatcggttgtggcggcggaggtggtggtatttnttgtggcggcggaggtggtggtatcggttgtggcggcggaggtggtggtataaaaaattagtcgggta

SEQ ID NO: 15902 - DNA, 727 bp, Artificial Sequence
  chemically treated genomic DNA (Homo sapiens) CpG-island No: 15902
  unsure (69)
tacccgactaattttttataccaccacctccgccgccacaaccgataccaccacctccgccgccacaanaaataccaccacctccgccgccacaaccgataccaccacctccgccgccacaaccgataccaccaccaccgccgacacaaccgataccaccacctccgccgccacaaccgataccaccaccaccgccgccacaaccgataccaccaccaccgccgacacaaccgataccaccaccaccgccgacacaaccgataccaccaccaccgccgccacaaccgataccaccacctccgccgccacaaccgataccaccacctccgccgccacaaccgataccaccacctccgccgccacaaccgataccaccaccaccgccgccacaaccgataccaccacctccgccgccacaaccgataccaccacctccgccgccacaaccgataccaccaccaccgccgccacaaccgataccaccacctccgccgccacaaccgataccaccaccaccgccgccacaaccgataccaccaccaccgccgccacaaccgataccaccaccaccgccgccacaaccgataccaccaccaccgccgccacaaccgataccaccaccaccgccgccacaaccgataccaccaccaccgccgccacaaccgataccaccaccaccgccgccacaaccgataccaccaccaccgccgccacaaccgataccacc

SEQ ID NO: 15903 - DNA, 727 bp, Artificial Sequence
  chemically treated genomic DNA (Homo sapiens) CpG-island No: 15903
  unsure (69)
tgttcggttaattttttgtattattattttcgtcgttataatcgatattattattttcgtcgttataanagatattattattttcgtcgttataatcgatattattattttcgtcgttataatcgatattattattatcgtcggtataatcgatattattattttcgtcgttataatcgatattattattatcgtcgttataatcgatattattattatcgtcggtataatcgatattattattatcgtcggtataatcgatattattattatcgtcgttataatcgatattattattttcgtcgttataatcgatattattattttcgtcgttataatcgatattattattttcgtcgttataatcgatattattattatcgtcgttataatcgatattattattttcgtcgttataatcgatattattattttcgtcgttataatcgatattattattatcgtcgttataatcgatattattattttcgtcgttataatcgatattattattatcgtcgttatagtcgatattattattatcgtcgttatagtcgatattattattatcgtcgttatagtcgatattattattatcgtcgttatagtcgatattattattatcgtcgttatagtcgatattattattatcgtcgttatagtcgatattattattatcgtcgttatagtcgatattattattatcgtcgttatagtcgatattatt

SEQ ID NO: 15904 - DNA, 727 bp, Artificial Sequence
  chemically treated genomic DNA (Homo sapiens) CpG-island No: 15904
  unsure (659)
aataatatcgactataacgacgataataataatatcgactataacgacgataataataatatcgactataacgacgataataataatatcgactataacgacgataataataatatcgactataacgacgataataataatatcgactataacgacgataataataatatcgactataacgacgataataataatatcgactataacgacgataataataatatcgattataacgacgaaaataataatatcgattataacgacgataataataatatcgattataacgacgaaaataataatatcgattataacgacgaaaataataatatcgattataacgacgataataataatatcgattataacgacgaaaataataatatcgattataacgacgaaaataataatatcgattataacgacgaaaataataatatcgattataacgacgataataataatatcgattataccgacgataataataatatcgattataccgacgataataataatatcgattataacgacgataataataatatcgattataacgacgaaaataataatatcgattataccgacgataataataatatcgattataacgacgaaaataataatatcgattataacgacgaaaataataatatctnttataacgacgaaaataataatatcgattataacgacgaaaataataatacaaaaaattaaccgaaca

SEQ ID NO: 15905 - DNA, 570 bp, Artificial Sequence
  chemically treated genomic DNA (Homo sapiens) CpG-island No: 15905
  unsure (441)
ttagttttcgaacgaatttttttttaattttcgggaggtaggagttttagcggggagatgcgggaagttttagacgagttcgtacgtcgtcggagacgtagggatcgaggtcggggagataaagagtagttcgcgaagagttcgggcggcgaggggcggttcggtttcgttttgcgtttttaatcgttcgggtagttgtcggtatcgtcggggcgtcgtcgagtgcgcgtcgtttttgttcgggtttttcgatcgtcgttcgatattttcgcggtttaggatattttcgagtcgtttttttttcgatttgggagtcgcgcgtttggggataaagagggagggtgcgtcggggatagtggtaggacgcgggttcggcgacgttttttcggattcggcgggaatttttcggcggcgtttttttttttttttcgtttcggtcgngttttttttcggaatttcggaagtttttttcggttttttttcgggttttttaagaatttttcgtttttttttgggatttcgtttttaatttgaaatgttaaatttaatataattaaagttttatagaaa

SEQ ID NO: 15906 - DNA, 570 bp, Artificial Sequence
  chemically treated genomic DNA (Homo sapiens) CpG-island No: 15906
  unsure (130)
tttctataaaactttaattatattaaatttaacatttcaaattaaaaacgaaatcccaaaaaaaaacgaaaaattcttaaaaaacccgaaaaaaaaccgaaaaaaacttccgaaattccgaaaaaaaacncgaccgaaacgaaaaaaaaaaaaaaacgccgccgaaaaattcccgccgaatccgaaaaaacgtcgccgaacccgcgtcctaccactatccccgacgcaccctccctctttatccccaaacgcgcgactcccaaatcgaaaaaaaaacgactcgaaaatatcctaaaccgcgaaaatatcgaacgacgatcgaaaaacccgaacaaaaacgacgcgcactcgacgacgccccgacgataccgacaactacccgaacgattaaaaacgcaaaacgaaaccgaaccgcccctcgccgcccgaactcttcgcgaactactctttatctccccgacctcgatccctacgtctccgacgacgtacgaactcgtctaaaacttcccgcatctccccgctaaaactcctacctcccgaaaattaaaaaaaaattcgttcgaaaactaa

SEQ ID NO: 15907 - DNA, 570 bp, Artificial Sequence
  chemically treated genomic DNA (Homo sapiens) CpG-island No: 15907
  unsure (130)
tttttatgagattttagttatgttaaatttggtattttaaattgggggcggggttttaggggagggcggaaaatttttggggagttcgggaaggggtcgaggagaattttcgaagtttcggggaggagtncggtcggagcggaaaaagaaggggggcgtcgtcgaggggttttcgtcgagttcggaggggcgtcgtcgggttcgcgttttgttattgttttcggcgtattttttttttttgtttttaggcgcgcggtttttaaatcgggagggaaacggttcgggggtgttttgggtcgcggaggtgtcgggcgacggtcggggagttcggatagaagcggcgcgtattcggcggcgtttcggcggtgtcgataattattcgggcggttaggggcgtagggcggagtcgggtcgtttttcgtcgttcgggtttttcgcgggttgttttttgttttttcgatttcgatttttgcgttttcggcggcgtgcgggttcgtttgaggtttttcgtattttttcgttggaatttttgtttttcgggggttagaggagggttcgttcgagggttgg

SEQ ID NO: 15908 - DNA, 570 bp, Artificial Sequence
  chemically treated genomic DNA (Homo sapiens) CpG-island No: 15908
  unsure (441)
ccaaccctcgaacgaaccctcctctaacccccgaaaaacaaaaattccaacgaaaaaatacgaaaaacctcaaacgaacccgcacgccgccgaaaacgcaaaaatcgaaatcgaaaaaacaaaaaacaacccgcgaaaaacccgaacgacgaaaaacgacccgactccgccctacgcccctaaccgcccgaataattatcgacaccgccgaaacgccgccgaatacgcgccgcttctatccgaactccccgaccgtcgcccgacacctccgcgacccaaaacacccccgaaccgtttccctcccgatttaaaaaccgcgcgcctaaaaacaaaaaaaaaaaatacgccgaaaacaataacaaaacgcgaacccgacgacgcccctccgaactcgacgaaaacccctcgacgacgccccccttctttttccgctccgaccgnactcctccccgaaacttcgaaaattctcctcgaccccttcccgaactccccaaaaattttccgccctcccctaaaaccccgcccccaatttaaaataccaaatttaacataactaaaatctcataaaaa

SEQ ID NO: 15909 - DNA, 585 bp, Artificial Sequence
  chemically treated genomic DNA (Homo sapiens) CpG-island No: 15909
gtttttcgtttagtttaaaggggtttatgtagatagagtttgtcggggcggtagtaaagttcgtttttcgcgtcgtattttgacgtttagtataaaagaggtttggtataggtttttcgttcggagtagttgggtttgcgcgttcgagatttgagagtaggcgttcgcgcggtcggtttcgtcgtgggttaggatttatttttcgtcggtttttcgtcgttggcgtcgttgtttgtttacgggttttatagttatattatagatagtagtatttatatcgggagagagcgttttatatttttttttattcgcgttaatttttattcggcgttttgcgtttaaattagtcgggcgggtcggatcgtgttttttattggttagcgttcgtatcgttgattggttgttttttaagtaataaagtgttgcgagagtcgtttatagtgggtttgtttattttttttttttgtcggttgtagttttttaggcggtgttttcggggttgggtatacgagagtagcgggtagaagttaacgtagggttgggatacgtggggttatagttagtttttgtggttttcgggtttag

SEQ ID NO: 15910 - DNA, 585 bp, Artificial Sequence
  chemically treated genomic DNA (Homo sapiens) CpG-island No: 15910
ctaaacccgaaaaccacaaaaactaactataaccccacgtatcccaaccctacgttaacttctacccgctactctcgtatacccaaccccgaaaacaccgcctaaaaaactacaaccgacaaaaaaaaaaaataaacaaacccactataaacgactctcgcaacactttattacttaaaaaacaaccaatcaacgatacgaacgctaaccaataaaaaacacgatccgacccgcccgactaatttaaacgcaaaacgccgaataaaaattaacgcgaataaaaaaaaatataaaacgctctctcccgatataaatactactatctataatataactataaaacccgtaaacaaacaacgacgccaacgacgaaaaaccgacgaaaaataaatcctaacccacgacgaaaccgaccgcgcgaacgcctactctcaaatctcgaacgcgcaaacccaactactccgaacgaaaaacctataccaaacctcttttatactaaacgtcaaaatacgacgcgaaaaacgaactttactaccgccccgacaaactctatctacataaacccctttaaactaaacgaaaaac

SEQ ID NO: 15911 - DNA, 585 bp, Artificial Sequence
  chemically treated genomic DNA (Homo sapiens) CpG-island No: 15911
ttagattcggggattatagagattggttgtggttttacgtattttaattttgcgttggtttttgttcgttattttcgtgtgtttaatttcggagatatcgtttgggaaattgtagtcgataggaagaggaagtgagtaagtttattgtgaacggttttcgtaatattttgttatttaggaaatagttaattagcgatacggacgttgattaataggaagtacggttcggttcgttcggttaatttgaacgtaaggcgtcgggtggaggttggcgcgggtaggggagggtgtggggcgttttttttcggtgtgggtattgttgtttgtggtgtggttgtgggattcgtgagtaagtagcgacgttagcggcggagaatcgacgaaaggtaagttttggtttacggcggaatcgatcgcgcgaacgtttgtttttaggtttcggacgcgtagatttagttgtttcgggcgggaggtttgtgttaggttttttttgtgttggacgttaaggtgcggcgcggagaacgagttttgttgtcgtttcggtaggttttgtttgtatggatttttttaaattgggcgggaagt

SEQ ID NO: 15912 - DNA, 585 bp, Artificial Sequence
  chemically treated genomic DNA (Homo sapiens) CpG-island No: 15912
acttcccgcccaatttaaaaaaatccatacaaacaaaacctaccgaaacgacaacaaaactcgttctccgcgccgcaccttaacgtccaacacaaaaaaaacctaacacaaacctcccgcccgaaacaactaaatctacgcgtccgaaacctaaaaacaaacgttcgcgcgatcgattccgccgtaaaccaaaacttacctttcgtcgattctccgccgctaacgtcgctacttactcacgaatcccacaaccacaccacaaacaacaatacccacaccgaaaaaaaacgccccacaccctcccctacccgcgccaacctccacccgacgccttacgttcaaattaaccgaacgaaccgaaccgtacttcctattaatcaacgtccgtatcgctaattaactatttcctaaataacaaaatattacgaaaaccgttcacaataaacttactcacttcctcttcctatcgactacaatttcccaaacgatatctccgaaattaaacacacgaaaataacgaacaaaaaccaacgcaaaattaaaatacgtaaaaccacaaccaatctctataatccccgaatctaa

SEQ ID NO: 15913 - DNA, 505 bp, Artificial Sequence
  chemically treated genomic DNA (Homo sapiens) CpG-island No: 15913
ataaatatatagcgcgggttgggcgggggcggttaatttcggttttttggtacggggatagggcgcgttgggttcggttttgtagcgagtcggtgggagggtttagttgtggtttaggcggtgttgagtacgggtcgggggcgttatagtcggggagggtcgggtagcgagcgggtgggcgaggggcgagttatcgtttgtttcgttcggaggggatttcggcgggtgagggacgtgggtggagggagacgtggggagtttagtcggagtagatgatgaagttagagaacgtgttgtatttgttgttgttgtcgtcgtgtgttttgtttttatttagtttgatgaagatttcgtcgtcggcgtttaggtgtaggattacgttgttgttggcgtagtcgtagttttggttcgcgttttgggtaatagtattggttcgtatttgcgggtgggggatacgggagggagggcgagaggagagagaggatgagaagggagggaggtgagg

SEQ ID NO: 15914 - DNA, 505 bp, Artificial Sequence
  chemically treated genomic DNA (Homo sapiens) CpG-island No: 15914
cctcacctccctcccttctcatcctctctctcctctcgccctccctcccgtatcccccacccgcaaatacgaaccaatactattacccaaaacgcgaaccaaaactacgactacgccaacaacaacgtaatcctacacctaaacgccgacgacgaaatcttcatcaaactaaataaaaacaaaacacacgacgacaacaacaacaaatacaacacgttctctaacttcatcatctactccgactaaactccccacgtctccctccacccacgtccctcacccgccgaaatcccctccgaacgaaacaaacgataactcgcccctcgcccacccgctcgctacccgaccctccccgactataacgcccccgacccgtactcaacaccgcctaaaccacaactaaaccctcccaccgactcgctacaaaaccgaacccaacgcgccctatccccgtaccaaaaaaccgaaattaaccgcccccgcccaacccgcgctatatatttat

SEQ ID NO: 15915 - DNA, 505 bp, Artificial Sequence
  chemically treated genomic DNA (Homo sapiens) CpG-island No: 15915
ttttatttttttttttttttatttttttttttttttcgttttttttttcgtgttttttattcgtaggtgcgggttagtgttattgtttaggacgcggattagaattacgattacgttagtaatagcgtgattttgtatttggacgtcggcgacgaggtttttattaagttggatggaggtaaagtatacggcggtaatagtaataaatatagtacgttttttggttttattatttatttcgattgagttttttacgtttttttttatttacgttttttattcgtcggggtttttttcgggcggggtagacgatgattcgtttttcgtttattcgttcgttgttcggtttttttcggttatgacgttttcggttcgtgtttaatatcgtttgggttatagttaggtttttttatcggttcgttgtagagtcgggtttagcgcgttttgttttcgtgttagggaatcggggttgatcgttttcgtttagttcgcgttatatatttgt

SEQ ID NO: 15916 - DNA, 505 bp, Artificial Sequence
  chemically treated genomic DNA (Homo sapiens) CpG-island No: 15916
acaaatatataacgcgaactaaacgaaaacgatcaaccccgattccctaacacgaaaacaaaacgcgctaaacccgactctacaacgaaccgataaaaaaacctaactataacccaaacgatattaaacacgaaccgaaaacgtcataaccgaaaaaaaccgaacaacgaacgaataaacgaaaaacgaatcatcgtctaccccgcccgaaaaaaaccccgacgaataaaaaacgtaaataaaaaaaaacgtaaaaaactcaatcgaaataaataataaaaccaaaaaacgtactatatttattactattaccgccgtatactttacctccatccaacttaataaaaacctcgtcgccgacgtccaaatacaaaatcacgctattactaacgtaatcgtaattctaatccgcgtcctaaacaataacactaacccgcacctacgaataaaaaacacgaaaaaaaaaacgaaaaaaaaaaaaaaataaaaaaaaaaaaaaataaaa

SEQ ID NO: 15917 - DNA, 629 bp, Artificial Sequence
  chemically treated genomic DNA (Homo sapiens) CpG-island No: 15917
gcggcggtcgttagtagcgtttttcggttcgcgcggagtttggggagcgtcgggtcgttcggtcgcgtcgtcggggtaatggtgtcggcgggtagggggcgcgggttaggcgttcgcgtttaaggacggttcggcggggttgcgggtatggggtcgggttcggggcgtcgcgttgcgttggttgcgttgcggagtttagtcgtcggtttttgtttcgcgttttttttttgttgcgttgtcggattgagcgtcgcggtcgtcgtttttcgtttttcgtttttcgtttgtagtttttcgtttgatttttttcgtttttttgagtcgggttatcgttttttcggtcgggtttcgtttcgttagtttcgcgcggttttgggttttttaggggtggggttgcgggcggggtcggcgtttaattgggtcgcgggcgtttcgaggtgggcggggtataagggggcggggtcgcggagatttcgggcggggagtagggagaggaaagaagagattgagtacgcggagatcgagattcggaaatggggtgggggtcggggttcgagagattcgagaggcgttttaagggaaggggagagtagggattaaaatgcgaaagggagagagggttataggga

SEQ ID NO: 15918 - DNA, 629 bp, Artificial Sequence
  chemically treated genomic DNA (Homo sapiens) CpG-island No: 15918
tccctataaccctctctccctttcgcattttaatccctactctccccttcccttaaaacgcctctcgaatctctcgaaccccgacccccaccccatttccgaatctcgatctccgcgtactcaatctcttctttcctctccctactccccgcccgaaatctccgcgaccccgcccccttataccccgcccacctcgaaacgcccgcgacccaattaaacgccgaccccgcccgcaaccccacccctaaaaaacccaaaaccgcgcgaaactaacgaaacgaaacccgaccgaaaaaacgataacccgactcaaaaaaacgaaaaaaatcaaacgaaaaactacaaacgaaaaacgaaaaacgaaaaacgacgaccgcgacgctcaatccgacaacgcaacaaaaaaaaaacgcgaaacaaaaaccgacgactaaactccgcaacgcaaccaacgcaacgcgacgccccgaacccgaccccatacccgcaaccccgccgaaccgtccttaaacgcgaacgcctaacccgcgccccctacccgccgacaccattaccccgacgacgcgaccgaacgacccgacgctccccaaactccgcgcgaaccgaaaaacgctactaacgaccgccgc

SEQ ID NO: 15919 - DNA, 629 bp, Artificial Sequence
  chemically treated genomic DNA (Homo sapiens) CpG-island No: 15919
tttttgtggttttttttttttttcgtattttggtttttatttttttttttttttggagcgtttttcgggtttttcggatttcggtttttattttattttcgaatttcggttttcgcgtatttagtttttttttttttttttttgtttttcgttcggggttttcgcggtttcgtttttttatgtttcgtttatttcgaggcgttcgcggtttaattaggcgtcggtttcgttcgtagttttatttttagagagtttagagtcgcgcggagttggcggggcggggttcggtcgagggggcggtggttcggtttaaggaggcgggaggagttaggcgggaggttgtaggcgggaggcgggaggcgggaggcggcggtcgcggcgtttagttcggtagcgtagtaggagggaggcgcgaggtaggagtcggcggttgggtttcgtagcgtagttagcgtagcgcggcgtttcgggttcggttttatgttcgtagtttcgtcggatcgtttttgagcgcgggcgtttagttcgcgttttttgttcgtcggtattattgtttcgacggcgcggtcgggcggttcggcgttttttaggtttcgcgcgggtcgaaagacgttgttagcggtcgtcgt

SEQ ID NO: 15920 - DNA, 629 bp, Artificial Sequence
  chemically treated genomic DNA (Homo sapiens) CpG-island No: 15920
acgacgaccgctaacaacgtctttcgacccgcgcgaaacctaaaaaacgccgaaccgcccgaccgcgccgtcgaaacaataataccgacgaacaaaaaacgcgaactaaacgcccgcgctcaaaaacgatccgacgaaactacgaacataaaaccgaacccgaaacgccgcgctacgctaactacgctacgaaacccaaccgccgactcctacctcgcgcctccctcctactacgctaccgaactaaacgccgcgaccgccgcctcccgcctcccgcctcccgcctacaacctcccgcctaactcctcccgcctccttaaaccgaaccaccgccccctcgaccgaaccccgccccgccaactccgcgcgactctaaactctctaaaaataaaactacgaacgaaaccgacgcctaattaaaccgcgaacgcctcgaaataaacgaaacataaaaaaacgaaaccgcgaaaaccccgaacgaaaaacaaaaaaaaaaaaaaaaaaactaaatacgcgaaaaccgaaattcgaaaataaaataaaaaccgaaatccgaaaaacccgaaaaacgctccaaaaaaaaaaaaaaataaaaaccaaaatacgaaaaaaaaaaaaaaccacaaaaa

SEQ ID NO: 15921 - DNA, 530 bp, Artificial Sequence
  chemically treated genomic DNA (Homo sapiens) CpG-island No: 15921
taagttcgcgcggcggagtgggaggcgtagagatcgaaagtattgtagcgttagagcgcgggttgattaggttggcgtgatcgttttttcgacgtttgttacgtttcgcggcggtttttttaagtagcggagtcgcgggcggggtcggttggcgtttacgtgattcggcgttattggttcgttcgcggaagtagttttatattcgcggttagcgcggggttttcgggcgttttgtagggcgggtaggttgtgttatttcgtcggacgtcgggatggtgtagttgtataatttgtattcgttcgggtcgtagtaggtggtgttttgtaagttggagtcggatcggttttgtggcggggggcgtgacgcgtttttcgtggcggcgggttgtaaggtggaggcgttcgcggtggtcggttaggagttgtgttagtcgcggtgcgttttttttacgttgggtcgggtgttgcgtttggtttatagcgaggttggtgagtaatttagagagttaggggtcgtttggggtttagtt

SEQ ID NO: 15922 - DNA, 530 bp, Artificial Sequence
  chemically treated genomic DNA (Homo sapiens) CpG-island No: 15922
aactaaaccccaaacgacccctaactctctaaattactcaccaacctcgctataaaccaaacgcaacacccgacccaacgtaaaaaaaacgcaccgcgactaacacaactcctaaccgaccaccgcgaacgcctccaccttacaacccgccgccacgaaaaacgcgtcacgccccccgccacaaaaccgatccgactccaacttacaaaacaccacctactacgacccgaacgaatacaaattatacaactacaccatcccgacgtccgacgaaataacacaacctacccgccctacaaaacgcccgaaaaccccgcgctaaccgcgaatataaaactacttccgcgaacgaaccaataacgccgaatcacgtaaacgccaaccgaccccgcccgcgactccgctacttaaaaaaaccgccgcgaaacgtaacaaacgtcgaaaaaacgatcacgccaacctaatcaacccgcgctctaacgctacaatactttcgatctctacgcctcccactccgccgcgcgaactta

SEQ ID NO: 15923 - DNA, 530 bp, Artificial Sequence
  chemically treated genomic DNA (Homo sapiens) CpG-island No: 15923
agttggattttaggcggtttttggttttttagattatttattagtttcgttgtaggttaggcgtaatattcggtttagcgtggagaaggcgtatcgcggttggtatagtttttggtcggttatcgcgaacgtttttattttgtagttcgtcgttacgaaaagcgcgttacgtttttcgttatagaatcggttcggttttagtttgtagggtattatttgttgcgattcgaacgggtgtaggttgtatagttgtattatttcgacgttcggcgggatggtatagtttgttcgttttgtagggcgttcggagatttcgcgttgatcgcgaatgtaggattattttcgcgagcgagttaatgacgtcgggttacgtgaacgttagtcggtttcgttcgcggtttcgttatttaaagaggtcgtcgcggggcgtggtaggcgtcgggaaagcggttacgttagtttggttagttcgcgttttggcgttgtagtgttttcggtttttgcgttttttatttcgtcgcgcgagtttg

SEQ ID NO: 15924 - DNA, 530 bp, Artificial Sequence
  chemically treated genomic DNA (Homo sapiens) CpG-island No: 15924
caaactcgcgcgacgaaataaaaaacgcaaaaaccgaaaacactacaacgccaaaacgcgaactaaccaaactaacgtaaccgctttcccgacgcctaccacgccccgcgacgacctctttaaataacgaaaccgcgaacgaaaccgactaacgttcacgtaacccgacgtcattaactcgctcgcgaaaataatcctacattcgcgatcaacgcgaaatctccgaacgccctacaaaacgaacaaactataccatcccgccgaacgtcgaaataatacaactatacaacctacacccgttcgaatcgcaacaaataataccctacaaactaaaaccgaaccgattctataacgaaaaacgtaacgcgcttttcgtaacgacgaactacaaaataaaaacgttcgcgataaccgaccaaaaactataccaaccgcgatacgccttctccacgctaaaccgaatattacgcctaacctacaacgaaactaataaataatctaaaaaaccaaaaaccgcctaaaatccaact

SEQ ID NO: 15925 - DNA, 790 bp, Artificial Sequence
  chemically treated genomic DNA (Homo sapiens) CpG-island No: 15925
gtcgagtttcggtgttattaagaggcgtaagagcggtttcgggttttttagttttcgtttcgtttcgtttcgttacgttacgtcggatttattttcgggttgtttttcgtaggaggtcgagtatcgattttcgttcgtttttcgaaggaatttgtgggagaataaggagcgtattgggcgtaggagtagcgatttcgggggatttcggagggcggtttcggaggacgcggagtagtagggagcggggggcgcgcggcggggcgggcgcgggaagagggaggcgggggtcgaggggcggggttgagattttcgcggtgggttcggtgggtcgcgaggttgttcgggagtacgggaggagggtttcggttcggtttttcgtttttttcgtcgcggcgtttagttttttcgttcgtttttttcgcggttttttatttcgtcgcgtcgggatgtgtgtttcgcgaacgggagtcgcgcgagtgtttagagtttgggtcgtcgttggtttcgttttttcggatttttttttgcggttgtcgcgtcgggcgggggtggcggagtttgaggaggcgcggcgcggggaggaggcgcggcgcggggaggaggcgggggaggagcggaggtcgtttttcgcgtttggtatcgtcgtatttttcgggtcgggtttcgttagtcggcgtcgtattcgttttcgttttttcgttttttgagttttttgtttgtgttttttcgtattttggtatatagttagatttttttttcgttcgcgtaatttatttttcgcgagtggagg

SEQ ID NO: 15926 - DNA, 790 bp, Artificial Sequence
  chemically treated genomic DNA (Homo sapiens) CpG-island No: 15926
cctccactcgcgaaaaataaattacgcgaacgaaaaaaaaatctaactatataccaaaatacgaaaaaacacaaacaaaaaactcaaaaaacgaaaaaacgaaaacgaatacgacgccgactaacgaaacccgacccgaaaaatacgacgataccaaacgcgaaaaacgacctccgctcctcccccgcctcctccccgcgccgcgcctcctccccgcgccgcgcctcctcaaactccgccacccccgcccgacgcgacaaccgcaaaaaaaaatccgaaaaaacgaaaccaacgacgacccaaactctaaacactcgcgcgactcccgttcgcgaaacacacatcccgacgcgacgaaataaaaaaccgcgaaaaaaacgaacgaaaaaactaaacgccgcgacgaaaaaaacgaaaaaccgaaccgaaaccctcctcccgtactcccgaacaacctcgcgacccaccgaacccaccgcgaaaatctcaaccccgcccctcgacccccgcctccctcttcccgcgcccgccccgccgcgcgccccccgctccctactactccgcgtcctccgaaaccgccctccgaaatcccccgaaatcgctactcctacgcccaatacgctccttattctcccacaaattccttcgaaaaacgaacgaaaatcgatactcgacctcctacgaaaaacaacccgaaaataaatccgacgtaacgtaacgaaacgaaacgaaacgaaaactaaaaaacccgaaaccgctcttacgcctcttaataacaccgaaactcgac

SEQ ID NO: 15927 - DNA, 790 bp, Artificial Sequence
  chemically treated genomic DNA (Homo sapiens) CpG-island No: 15927
tttttattcgcggagggtgggttgcgcgggcggaagggaagtttggttgtgtgttagggtgcggggggatataggtaggggatttagggagcgggagagcgggagcgggtacgacgtcggttagcggagttcggttcggagggtgcggcggtgttagacgcggagggcggttttcgtttttttttcgtttttttttcgcgtcgcgtttttttttcgcgtcgcgtttttttaggtttcgttattttcgttcggcgcggtagtcgtagggaggggttcgggaaggcggagttagcggcggtttaggttttgggtattcgcgcggttttcgttcgcggagtatatatttcggcgcgacgaggtaggaggtcgcgaggggaacggacgagggagttgggcgtcgcggcgggaggggcgggaggtcgggtcgagatttttttttcgtgttttcggatagtttcgcggtttatcgagtttatcgcgggagttttaatttcgtttttcggttttcgttttttttttttcgcgttcgtttcgtcgcgcgtttttcgttttttgttgtttcgcgtttttcgggatcgtttttcgaggtttttcggggtcgttgtttttgcgtttagtgcgttttttgtttttttataggttttttcggagagcgagcgggagtcggtgttcggttttttgcggggagtagttcgagggtgagttcggcgtggcgtggcggggcggggcggggcggaggttggagggttcggggtcgtttttacgttttttagtggtatcggggttcggt

SEQ ID NO: 15928 - DNA, 790 bp, Artificial Sequence
  chemically treated genomic DNA (Homo sapiens) CpG-island No: 15928
accgaaccccgataccactaaaaaacgtaaaaacgaccccgaaccctccaacctccgccccgccccgccccgccacgccacgccgaactcaccctcgaactactccccgcaaaaaaccgaacaccgactcccgctcgctctccgaaaaaacctataaaaaaacaaaaaacgcactaaacgcaaaaacaacgaccccgaaaaacctcgaaaaacgatcccgaaaaacgcgaaacaacaaaaaacgaaaaacgcgcgacgaaacgaacgcgaaaaaaaaaaaacgaaaaccgaaaaacgaaattaaaactcccgcgataaactcgataaaccgcgaaactatccgaaaacacgaaaaaaaaatctcgacccgacctcccgcccctcccgccgcgacgcccaactccctcgtccgttcccctcgcgacctcctacctcgtcgcgccgaaatatatactccgcgaacgaaaaccgcgcgaatacccaaaacctaaaccgccgctaactccgccttcccgaacccctccctacgactaccgcgccgaacgaaaataacgaaacctaaaaaaacgcgacgcgaaaaaaaaacgcgacgcgaaaaaaaaacgaaaaaaaaacgaaaaccgccctccgcgtctaacaccgccgcaccctccgaaccgaactccgctaaccgacgtcgtacccgctcccgctctcccgctccctaaatcccctacctatatccccccgcaccctaacacacaaccaaacttcccttccgcccgcgcaacccaccctccgcgaataaaaa

SEQ ID NO: 15929 - DNA, 559 bp, Artificial Sequence
  chemically treated genomic DNA (Homo sapiens) CpG-island No: 15929
gtttttttatgtttttttacgtttttttttacgtttttttacgtttttttttacgtttttttacgtttttttttacgtttttttacgtttttttacgtttttttttacgtttttttacgtttttttacgttttttttcgtttttttttacgtttttttacgtttttttttacgtttttttatttttttttttacgtttttttacgtttttttttacgtttttttacgtttttttttacgtttttttacgtttttttttacgtttttttacgtttttttacgtttttttttacgtttttttacgtttttttttacgttttttttcgtttttttttacgtttttttacgtttttttttacgtttttttacgtttttttttacgtttttttttacgtttttttacgtttttttttacgtttttttacgtttttttttacgtttttttacgtttttttttacgtttttttacgtttttttttatatttttttacgtttttttttatgtttttgttgatttgattgatgaatgttgaaggaggaataaggcgtgtgtaattcgg

SEQ ID NO: 15930 - DNA, 559 bp, Artificial Sequence
  chemically treated genomic DNA (Homo sapiens) CpG-island No: 15930
ccgaattacacacgccttattcctccttcaacattcatcaatcaaatcaacaaaaacataaaaaaaaacgtaaaaaaatataaaaaaaaacgtaaaaaaacgtaaaaaaaaacgtaaaaaaacgtaaaaaaaaacgtaaaaaaacgtaaaaaaaaacgtaaaaaaacgtaaaaaaaaacgtaaaaaaaaacgtaaaaaaacgtaaaaaaaaacgtaaaaaaacgtaaaaaaaaacgaaaaaaaacgtaaaaaaaaacgtaaaaaaacgtaaaaaaaaacgtaaaaaaacgtaaaaaaacgtaaaaaaaaacgtaaaaaaacgtaaaaaaaaacgtaaaaaaacgtaaaaaaaaacgtaaaaaaacgtaaaaaaaaaaataaaaaaacgtaaaaaaaaacgtaaaaaaacgtaaaaaaaaacgaaaaaaaacgtaaaaaaacgtaaaaaaacgtaaaaaaaaacgtaaaaaaacgtaaaaaaacgtaaaaaaaaacgtaaaaaaacgtaaaaaaaaacgtaaaaaaacgtaaaaaaaaacgtaaaaaaacataaaaaaac

SEQ ID NO: 15931 - DNA, 559 bp, Artificial Sequence
  chemically treated genomic DNA (Homo sapiens) CpG-island No: 15931
tcgggttatatacgttttgttttttttttaatatttattaattaaattagtagaggtatggagaaaggcgtggagaggtgtagagagaggcgtggagaggcgtggagagaggcgtggagaggcgtggagagaggcgtggagaggcgtggagagaggcgtggagaggcgtggagagaggcgtggagagaggcgtggagaggcgtggagagaggcgtggagaggcgtggagagaggcggggagaggcgtggagagaggcgtggagaggcgtggagagaggcgtggagaggcgtggagaggcgtggagagaggcgtggagaggcgtggagagaggcgtggagaggcgtggagagaggcgtggagaggcgtggagagaggggtggagaggcgtagagagaggcgtggagaggcgtggagagaggcggggagaggcgtggagaggcgtggagaggcgtggagagaggcgtggagaggcgtggagaggcgtagagagaggcgtggagaggcgtggagagaggcgtggagaggcgtggagagaggcgtggagaggtatggagaggt

SEQ ID NO: 15932 - DNA, 559 bp, Artificial Sequence
  chemically treated genomic DNA (Homo sapiens) CpG-island No: 15932
acctctccatacctctccacgcctctctccacgcctctccacgcctctctccacgcctctccacgcctctctctacgcctctccacgcctctccacgcctctctccacgcctctccacgcctctccacgcctctccccgcctctctccacgcctctccacgcctctctctacgcctctccacccctctctccacgcctctccacgcctctctccacgcctctccacgcctctctccacgcctctccacgcctctctccacgcctctccacgcctctccacgcctctctccacgcctctccacgcctctctccacgcctctccccgcctctctccacgcctctccacgcctctctccacgcctctccacgcctctctccacgcctctctccacgcctctccacgcctctctccacgcctctccacgcctctctccacgcctctccacgcctctctccacgcctctccacgcctctctctacacctctccacgcctttctccatacctctactaatttaattaataaatattaaaaaaaaaacaaaacgtatataacccga

SEQ ID NO: 15933 - DNA, 539 bp, Artificial Sequence
  chemically treated genomic DNA (Homo sapiens) CpG-island No: 15933
ttcggcgcgtttaacgtggttaaaggtaaagtagttcgttcggttcgggttagcgtcgcgggaatggagcgcggcgaggtcgagaggcgaggcgaggcggatataaaggagaggcgagggaggcgagcgcgcggcgtcggcgttttggttaaggcgtatcggataattttcgggttaattcgtgttagggtcggttttttatttttcgttcggtttttcggtcgttgataaaattgaagtggaaatgaagttggatgttttggagtattcgcgcggttgtgggggtggcgggggtttcgttcggggtagttgcgtttttcgcgggcgtttttggcgttgtttttggttaggtcgcggggatggagcgggagagtcgggcggggaggggaggacgtcgtcgcgtagattttttgttcggcggttttcgattttgttttcgtttagatgaatatttatttagtagtgggagcggggtggaaatgcggggagcggttcgaatgcgggagacggtaaggtaaggatattttcgtttaatgagt

SEQ ID NO: 15934 - DNA, 539 bp, Artificial Sequence
  chemically treated genomic DNA (Homo sapiens) CpG-island No: 15934
actcattaaacgaaaatatccttaccttaccgtctcccgcattcgaaccgctccccgcatttccaccccgctcccactactaaataaatattcatctaaacgaaaacaaaatcgaaaaccgccgaacaaaaaatctacgcgacgacgtcctcccctccccgcccgactctcccgctccatccccgcgacctaaccaaaaacaacgccaaaaacgcccgcgaaaaacgcaactaccccgaacgaaacccccgccacccccacaaccgcgcgaatactccaaaacatccaacttcatttccacttcaattttatcaacgaccgaaaaaccgaacgaaaaataaaaaaccgaccctaacacgaattaacccgaaaattatccgatacgccttaaccaaaacgccgacgccgcgcgctcgcctccctcgcctctcctttatatccgcctcgcctcgcctctcgacctcgccgcgctccattcccgcgacgctaacccgaaccgaacgaactactttacctttaaccacgttaaacgcgccgaa

SEQ ID NO: 15935 - DNA, 539 bp, Artificial Sequence
  chemically treated genomic DNA (Homo sapiens) CpG-island No: 15935
gtttattaaacgagggtgtttttgttttgtcgtttttcgtattcgggtcgtttttcgtatttttatttcgtttttattgttgggtaaatgtttatttggacggggataggatcgggaatcgtcgggtagggggtttgcgcggcggcgttttttttttttcgttcggttttttcgttttattttcgcggtttggttaagggtagcgttaagggcgttcgcggagggcgtagttgtttcggacggagttttcgttatttttatagtcgcgcgggtgttttagagtatttaattttatttttattttaattttattagcggtcggggagtcgggcgggagataggaggtcggttttgatacgaattagttcggagattgttcgatacgttttggttagggcgtcggcgtcgcgcgttcgtttttttcgttttttttttgtgttcgtttcgtttcgtttttcggtttcgtcgcgttttattttcgcggcgttggttcgggtcgagcgaattgttttgtttttggttacgttgagcgcgtcgag

SEQ ID NO: 15936 - DNA, 539 bp, Artificial Sequence
  chemically treated genomic DNA (Homo sapiens) CpG-island No: 15936
ctcgacgcgctcaacgtaaccaaaaacaaaacaattcgctcgacccgaaccaacgccgcgaaaataaaacgcgacgaaaccgaaaaacgaaacgaaacgaacacaaaaaaaaaacgaaaaaaacgaacgcgcgacgccgacgccctaaccaaaacgtatcgaacaatctccgaactaattcgtatcaaaaccgacctcctatctcccgcccgactccccgaccgctaataaaattaaaataaaaataaaattaaatactctaaaacacccgcgcgactataaaaataacgaaaactccgtccgaaacaactacgccctccgcgaacgcccttaacgctacccttaaccaaaccgcgaaaataaaacgaaaaaaccgaacgaaaaaaaaaaaacgccgccgcgcaaaccccctacccgacgattcccgatcctatccccgtccaaataaacatttacccaacaataaaaacgaaataaaaatacgaaaaacgacccgaatacgaaaaacgacaaaacaaaaacaccctcgtttaataaac

SEQ ID NO: 15937 - DNA, 534 bp, Artificial Sequence
  chemically treated genomic DNA (Homo sapiens) CpG-island No: 15937
gtacggcgtggttattttttagttataaaagtggtcgttgtcggggttcggcgattcggggtgttaggcggagttttggtgaggtaggcgcgcgttcggtcgttttcgggtagagacgtttaaagagtatgtgagcgtgataagtgtttgttcgtaacgtgttagatttcgaaattgttttgtaatttagttcggaattcgtagttttagttcgggggaatagacgttcgtttaggttgtgttttattattttttttcgttttattttcgtcgattttttattgtcgttgttggaggaagagtttcgggaggagaagggtgcgtcgcgtcgcgttcgcgtgttaatggtagtcgcgtattttggaagaagttggtttttgtttcgaatattttttttttcgtgtttcgttttttgaattagaggcggttgtttcgtgcggttagagtagggttagtagagttcggggtagttgttaaaaacgagacggggaggttttttttttcgggggtggaggagggaaggagggaggtgtt

SEQ ID NO: 15938 - DNA, 534 bp, Artificial Sequence
  chemically treated genomic DNA (Homo sapiens) CpG-island No: 15938
aacacctccctccttccctcctccacccccgaaaaaaaaaacctccccgtctcgtttttaacaactaccccgaactctactaaccctactctaaccgcacgaaacaaccgcctctaattcaaaaaacgaaacacgaaaaaaaaaatattcgaaacaaaaaccaacttcttccaaaatacgcgactaccattaacacgcgaacgcgacgcgacgcacccttctcctcccgaaactcttcctccaacaacgacaataaaaaatcgacgaaaataaaacgaaaaaaaataataaaacacaacctaaacgaacgtctattcccccgaactaaaactacgaattccgaactaaattacaaaacaatttcgaaatctaacacgttacgaacaaacacttatcacgctcacatactctttaaacgtctctacccgaaaacgaccgaacgcgcgcctacctcaccaaaactccgcctaacaccccgaatcgccgaaccccgacaacgaccacttttataactaaaaaataaccacgccgtac

SEQ ID NO: 15939 - DNA, 534 bp, Artificial Sequence
  chemically treated genomic DNA (Homo sapiens) CpG-island No: 15939
gatattttttttttttttttttttattttcgggaagaaaagttttttcgtttcgtttttgatagttgtttcgaattttattggttttgttttagtcgtacgagatagtcgtttttgatttaaggggcggggtacgggaggaaaagtattcgagataagaattaattttttttagaatgcgcggttgttattgatacgcgggcgcggcgcggcgtattttttttttttcggggttttttttttagtagcgatagtgggaggtcggcgggggtggggcgggggggaatgatgagatatagtttaaacgaacgtttgttttttcgggttaaagttgcgagtttcggattggattgtaaggtagtttcgaaatttgatacgttgcggatagatatttgttacgtttatatgttttttaaacgtttttgttcggggacggtcgggcgcgcgtttgttttattaagatttcgtttgatatttcgagtcgtcgaatttcggtagcggttatttttatagttaaggggtgattacgtcgtgt

SEQ ID NO: 15940 - DNA, 534 bp, Artificial Sequence
  chemically treated genomic DNA (Homo sapiens) CpG-island No: 15940
acacgacgtaatcaccccttaactataaaaataaccgctaccgaaattcgacgactcgaaatatcaaacgaaatcttaataaaacaaacgcgcgcccgaccgtccccgaacaaaaacgtttaaaaaacatataaacgtaacaaatatctatccgcaacgtatcaaatttcgaaactaccttacaatccaatccgaaactcgcaactttaacccgaaaaaacaaacgttcgtttaaactatatctcatcattcccccccgccccacccccgccgacctcccactatcgctactaaaaaaaaaaccccgaaaaaaaaaaaatacgccgcgccgcgcccgcgtatcaataacaaccgcgcattctaaaaaaaattaattcttatctcgaatacttttcctcccgtaccccgccccttaaatcaaaaacgactatctcgtacgactaaaacaaaaccaataaaattcgaaacaactatcaaaaacgaaacgaaaaaacttttcttcccgaaaataaaaaaaaaaaaaaaaaaaatatc

SEQ ID NO: 15941 - DNA, 512 bp, Artificial Sequence
  chemically treated genomic DNA (Homo sapiens) CpG-island No: 15941
gcgggttgcgcgtattagaagacgcgagttcggggaaacgtgttggtcgggtcgcgtcgcgcggagttatttggtggattttttcgtttaggggtttttatgttggagtggcggtcgtgttttttgttgaggttgcgtttgaaacggtagcggttgtttttttgttagatataatacgaggggttgttgtggggcgagtttttttacgttgttggtacgttgttaagaaatacgtttagcgttttgtttgtgcgtttgtaagttttattgttttcgtcgatattttacgttcggtttagtcgtcgcgtggtttttcgttttttttcgcgtgttggggatatggggttcgagtagggaggatttagtttttcgtttttttcgattcggatttaggcggtcggggtcgcgggatcgtcgcggttttgtttgaaagttttatttttaggtttttttcgttttcgttttcgtcgtttttttatttttagtcgggttttagtattgttttttaggga

SEQ ID NO: 15942 - DNA, 512 bp, Artificial Sequence
  chemically treated genomic DNA (Homo sapiens) CpG-island No: 15942
tccctaaaaaacaatactaaaacccgactaaaaataaaaaaacgacgaaaacgaaaacgaaaaaaacctaaaaataaaactttcaaacaaaaccgcgacgatcccgcgaccccgaccgcctaaatccgaatcgaaaaaaacgaaaaactaaatcctccctactcgaaccccatatccccaacacgcgaaaaaaaacgaaaaaccacgcgacgactaaaccgaacgtaaaatatcgacgaaaacaataaaacttacaaacgcacaaacaaaacgctaaacgtatttcttaacaacgtaccaacaacgtaaaaaaactcgccccacaacaacccctcgtattatatctaacaaaaaaacaaccgctaccgtttcaaacgcaacctcaacaaaaaacacgaccgccactccaacataaaaacccctaaacgaaaaaatccaccaaataactccgcgcgacgcgacccgaccaacacgtttccccgaactcgcgtcttctaatacgcgcaacccgc

SEQ ID NO: 15943 - DNA, 512 bp, Artificial Sequence
  chemically treated genomic DNA (Homo sapiens) CpG-island No: 15943
tttttaaagaatagtgttagggttcggttgggagtaggggggcggcgggggcgggggcggggggagtttaggagtggaatttttagataaagtcgcggcggtttcgcggtttcggtcgtttgggttcggatcgggaaaaacgaggggttgggttttttttattcggattttatatttttagtacgcgagaaagagcgagaagttacgcggcggttgggtcgagcgtggggtgtcggcggagataatgaaatttgtaggcgtataaataaggcgttgagcgtgttttttgataacgtgttagtagcgtggagaggttcgttttataatagtttttcgtgttgtgtttagtaggaaaatagtcgttgtcgttttagacgtagttttaataaagagtacggtcgttattttagtatgagagtttttgggcggaaaagtttattaagtgatttcgcgcggcgcggttcggttagtacgttttttcggattcgcgttttttggtgcgcgtagttcgt

SEQ ID NO: 15944 - DNA, 512 bp, Artificial Sequence
  chemically treated genomic DNA (Homo sapiens) CpG-island No: 15944
acgaactacgcgcaccaaaaaacgcgaatccgaaaaaacgtactaaccgaaccgcgccgcgcgaaatcacttaataaacttttccgcccaaaaactctcatactaaaataacgaccgtactctttattaaaactacgtctaaaacgacaacgactattttcctactaaacacaacacgaaaaactattataaaacgaacctctccacgctactaacacgttatcaaaaaacacgctcaacgccttatttatacgcctacaaatttcattatctccgccgacaccccacgctcgacccaaccgccgcgtaacttctcgctctttctcgcgtactaaaaatataaaatccgaataaaaaaaacccaacccctcgtttttcccgatccgaacccaaacgaccgaaaccgcgaaaccgccgcgactttatctaaaaattccactcctaaactccccccgcccccgcccccgccgcccccctactcccaaccgaaccctaacactattctttaaaaa

SEQ ID NO: 15945 - DNA, 558 bp, Artificial Sequence
  chemically treated genomic DNA (Homo sapiens) CpG-island No: 15945
agcgagagtgaaattaaatttgaaattcggattaattggtagtcgttgttggtagaacgttttaaggattttttttcgcgggacggagggaggattcgggatagggaattggttttgggagaaaacgcgcggggggcgttcgagacgtttcgtgaaagtcgtgtcgatttttgggaggattgataggtttagagatacgcgttgtttgttgtggtgggtttttcgggaataagtgaggggttttgtgtttcgaggatggttttagcgtagagtcgggtgtttgtcggggtgggtttttcgtattgttcgggtttcggcgggggcggttttgatttttttttatggttcgttttttatttcgggaatttttagtgttttttttttacggtttttttggcgttttttcgattttttcgcggtattttggtttatttttttttagcgtcgtggttttttttggcgattttttttgcgtttttggggtttttttgcgtttttttttttttatcggcgcgttgtttatagtcgcgtgtttttttttcggagttggggattaag

SEQ ID NO: 15946 - DNA, 558 bp, Artificial Sequence
  chemically treated genomic DNA (Homo sapiens) CpG-island No: 15946
cttaatccccaactccgaaaaaaaaacacgcgactataaacaacgcgccgataaaaaaaaaaaaacgcaaaaaaaccccaaaaacgcaaaaaaaatcgccaaaaaaaaccacgacgctaaaaaaaaataaaccaaaataccgcgaaaaaatcgaaaaaacgccaaaaaaaccgtaaaaaaaaaacactaaaaattcccgaaataaaaaacgaaccataaaaaaaaatcaaaaccgcccccgccgaaacccgaacaatacgaaaaacccaccccgacaaacacccgactctacgctaaaaccatcctcgaaacacaaaacccctcacttattcccgaaaaacccaccacaacaaacaacgcgtatctctaaacctatcaatcctcccaaaaatcgacacgactttcacgaaacgtctcgaacgccccccgcgcgttttctcccaaaaccaattccctatcccgaatcctccctccgtcccgcgaaaaaaaatccttaaaacgttctaccaacaacgactaccaattaatccgaatttcaaatttaatttcactctcgct

SEQ ID NO: 15947 - DNA, 558 bp, Artificial Sequence
  chemically treated genomic DNA (Homo sapiens) CpG-island No: 15947
tttggtttttagtttcggggagagggtacgcggttgtgggtagcgcgtcggtggaggagggggggcgtaggaggattttaggagcgtagagggggtcgttagggaggattacggcgttgggggaaggtaggttaaagtgtcgcgggagagtcggggggacgttagaaaagtcgtggaaaaggagtattggggattttcggggtgggaggcgggttatggaaaggaattagagtcgttttcgtcggagttcgaataatgcggggagtttatttcggtagatattcggttttgcgttagaattattttcgaaatatagagttttttatttattttcgggaggtttattataatagatagcgcgtgtttttagatttgttagtttttttaagggtcggtacggtttttacggggcgtttcggacgtttttcgcgcgtttttttttagggttaattttttgtttcgagtttttttttcgtttcgcggggaggggtttttagggcgttttattaataacgattgttagttgattcgagttttaagtttaattttattttcgtt

SEQ ID NO: 15948 - DNA, 558 bp, Artificial Sequence
  chemically treated genomic DNA (Homo sapiens) CpG-island No: 15948
aacgaaaataaaattaaacttaaaactcgaatcaactaacaatcgttattaataaaacgccctaaaaacccctccccgcgaaacgaaaaaaaaactcgaaacaaaaaattaaccctaaaaaaaaacgcgcgaaaaacgtccgaaacgccccgtaaaaaccgtaccgacccttaaaaaaactaacaaatctaaaaacacgcgctatctattataataaacctcccgaaaataaataaaaaactctatatttcgaaaataattctaacgcaaaaccgaatatctaccgaaataaactccccgcattattcgaactccgacgaaaacgactctaattcctttccataacccgcctcccaccccgaaaatccccaatactccttttccacgacttttctaacgtccccccgactctcccgcgacactttaacctaccttcccccaacgccgtaatcctccctaacgaccccctctacgctcctaaaatcctcctacgccccccctcctccaccgacgcgctacccacaaccgcgtaccctctccccgaaactaaaaaccaaa

SEQ ID NO: 15949 - DNA, 661 bp, Artificial Sequence
  chemically treated genomic DNA (Homo sapiens) CpG-island No: 15949
cgcgttttttgtacggttcgggagggttgtaattcggttgttttcgttcgttttttttttttttttcgcgtcggttgtaaaggaaaattgtttttaatttattggggtttaggtcggtttttttttttttgtgtttgttgtcggcgagcgcgttcgtttcgggcgagggtagtgtttgcggggcgcggtcgcgtagtttttcgggcgagtcgtatatgtagttcgggtagttgcggtttttttttgggtcgtagttcgcgcggcgttcggggtaggcgttcggtttgagggcgtagtgacggttttcggtcgggaagttggggaaggagacggcgtcggatagcggttcgagttaagttcgtatgtagcgcgtgtcggcgtcgaggtggggttgggggtcgtacgggtgatatattacggacgattgagagggtacgggcgtttacgacgtgttgaatattgtcggtttgggcgcgaagttataggacggaaaatcgttatagttcggtattaaatcgttgggtttggcggcggcgggatgagtttcggtggtcggaaatttggacgttaggaggtttttattgtcgtgagagatgagcgagtttacgtaatagttattgatgggtttcgtcgtcgatatcgtaacggggttttatatata

SEQ ID NO: 15950 - DNA, 661 bp, Artificial Sequence
  chemically treated genomic DNA (Homo sapiens) CpG-island No: 15950
tatatataaaaccccgttacgatatcgacgacgaaacccatcaataactattacgtaaactcgctcatctctcacgacaataaaaacctcctaacgtccaaatttccgaccaccgaaactcatcccgccgccgccaaacccaacgatttaataccgaactataacgattttccgtcctataacttcgcgcccaaaccgacaatattcaacacgtcgtaaacgcccgtaccctctcaatcgtccgtaatatatcacccgtacgacccccaaccccacctcgacgccgacacgcgctacatacgaacttaactcgaaccgctatccgacgccgtctccttccccaacttcccgaccgaaaaccgtcactacgccctcaaaccgaacgcctaccccgaacgccgcgcgaactacgacccaaaaaaaaaccgcaactacccgaactacatatacgactcgcccgaaaaactacgcgaccgcgccccgcaaacactaccctcgcccgaaacgaacgcgctcgccgacaacaaacacaaaaaaaaaaaaaccgacctaaaccccaataaattaaaaacaattttcctttacaaccgacgcgaaaaaaaaaaaaaaaacgaacgaaaacaaccgaattacaaccctcccgaaccgtacaaaaaacgcg

SEQ ID NO: 15951 - DNA, 661 bp, Artificial Sequence
  chemically treated genomic DNA (Homo sapiens) CpG-island No: 15951
tgtatgtaaaatttcgttacgatgtcggcgacggggtttattagtaattattacgtggattcgtttattttttacgataatgaagattttttagcgtttaggttttcggttatcggggtttatttcgtcgtcgttagatttagcggtttggtgtcggattgtagcgatttttcgttttgtagtttcgcgtttaagtcggtagtgtttagtacgtcgtgggcgttcgtgtttttttagtcgttcgtggtatattattcgtacggtttttagttttatttcggcgtcgatacgcgttatatgcggatttggttcgagtcgttgttcggcgtcgtttttttttttagtttttcggtcgggggtcgttattacgtttttaagtcggacgtttatttcgggcgtcgcgcggattgcggtttaggggagggtcgtagttattcggattatatgtacggttcgttcggggagttgcgcgatcgcgtttcgtagatattgttttcgttcgaggcggacgcgttcgtcggtagtaagtataaagaggagaaggtcgatttggattttagtaagttgggagtaatttttttttataatcggcgcgggaggggaggggaggacgggcgggggtagtcgaattatagttttttcgaatcgtgtagggagcgcg

SEQ ID NO: 15952 - DNA, 661 bp, Artificial Sequence
  chemically treated genomic DNA (Homo sapiens) CpG-island No: 15952
cgcgctccctacacgattcgaaaaaactataattcgactacccccgcccgtcctcccctcccctcccgcgccgattataaaaaaaaattactcccaacttactaaaatccaaatcgaccttctcctctttatacttactaccgacgaacgcgtccgcctcgaacgaaaacaatatctacgaaacgcgatcgcgcaactccccgaacgaaccgtacatataatccgaataactacgaccctcccctaaaccgcaatccgcgcgacgcccgaaataaacgtccgacttaaaaacgtaataacgacccccgaccgaaaaactaaaaaaaaaaacgacgccgaacaacgactcgaaccaaatccgcatataacgcgtatcgacgccgaaataaaactaaaaaccgtacgaataatataccacgaacgactaaaaaaacacgaacgcccacgacgtactaaacactaccgacttaaacgcgaaactacaaaacgaaaaatcgctacaatccgacaccaaaccgctaaatctaacgacgacgaaataaaccccgataaccgaaaacctaaacgctaaaaaatcttcattatcgtaaaaaataaacgaatccacgtaataattactaataaaccccgtcgccgacatcgtaacgaaattttacataca

SEQ ID NO: 15953 - DNA, 560 bp, Artificial Sequence
  chemically treated genomic DNA (Homo sapiens) CpG-island No: 15953
tttcgtttcggtttacggtttgatttcggttcggagatgtagtttttttcgagaataggtgaagaagacggcggtagcggggattgggggtttcgggtgggaacgttagggtttagggttttgtgtgggtcgtgtagggggcgaggttcgaagttttgggttggatcgtagtacgagtgtggttcggacggttgcgtggttagaaggggtgttcgggtagggtgcgagagtatcggtaaggtggattgtgtatggattttggtcgtagatagagtagagcgggttttcgggttgtggtcggcggcgaggcgggtaatcgtatgttgagtttatagaaaggattttgaggtttgttgggtgtttgggttgttttgggggcggcggtttagagtgtggagtaagcggcgcgcggggcgcggcggttagcgtgggagaggttgtaggttttgtacgtttttgtagttgtcgggtcgtgttcgggacgtttgaattgaggtcgattaatggttatagtatgaaaaataaatgtaatggaaggtttttttgttttttttttttcg

SEQ ID NO: 15954 - DNA, 560 bp, Artificial Sequence
  chemically treated genomic DNA (Homo sapiens) CpG-island No: 15954
cgaaaaaaaaaaaacaaaaaaaccttccattacatttatttttcatactataaccattaatcgacctcaattcaaacgtcccgaacacgacccgacaactacaaaaacgtacaaaacctacaacctctcccacgctaaccgccgcgccccgcgcgccgcttactccacactctaaaccgccgcccccaaaacaacccaaacacccaacaaacctcaaaatcctttctataaactcaacatacgattacccgcctcgccgccgaccacaacccgaaaacccgctctactctatctacgaccaaaatccatacacaatccaccttaccgatactctcgcaccctacccgaacaccccttctaaccacgcaaccgtccgaaccacactcgtactacgatccaacccaaaacttcgaacctcgccccctacacgacccacacaaaaccctaaaccctaacgttcccacccgaaacccccaatccccgctaccgccgtcttcttcacctattctcgaaaaaaactacatctccgaaccgaaatcaaaccgtaaaccgaaacgaaa

SEQ ID NO: 15955 - DNA, 560 bp, Artificial Sequence
  chemically treated genomic DNA (Homo sapiens) CpG-island No: 15955
cggaaaagaaaagatagaaagattttttattgtatttattttttatgttgtgattattggtcggttttagtttagacgtttcggatacggttcggtagttgtagaggcgtgtagggtttgtagttttttttacgttgatcgtcgcgtttcgcgcgtcgtttgttttatattttgggtcgtcgtttttagggtagtttaaatatttagtagattttaaggttttttttatagatttaatatgcggttgttcgtttcgtcgtcggttatagttcgggagttcgttttgttttgtttgcggttaaagtttatatataatttattttgtcggtgttttcgtattttgttcgaatattttttttggttacgtagtcgttcgggttatattcgtgttgcggtttagtttaggatttcgaatttcgttttttgtacgatttatataaagttttgagttttggcgtttttattcgaagtttttagttttcgttgtcgtcgttttttttatttgttttcgggaagggttgtattttcgagtcgaagttaggtcgtgggtcggggcgagg

SEQ ID NO: 15956 - DNA, 560 bp, Artificial Sequence
  chemically treated genomic DNA (Homo sapiens) CpG-island No: 15956
cctcgccccgacccacgacctaacttcgactcgaaaatacaacccttcccgaaaacaaataaaaaaaacgacgacaacgaaaactaaaaacttcgaataaaaacgccaaaactcaaaactttatataaatcgtacaaaaaacgaaattcgaaatcctaaactaaaccgcaacacgaatataacccgaacgactacgtaaccaaaaaaaatattcgaacaaaatacgaaaacaccgacaaaataaattatatataaactttaaccgcaaacaaaacaaaacgaactcccgaactataaccgacgacgaaacgaacaaccgcatattaaatctataaaaaaaaccttaaaatctactaaatatttaaactaccctaaaaacgacgacccaaaatataaaacaaacgacgcgcgaaacgcgacgatcaacgtaaaaaaaactacaaaccctacacgcctctacaactaccgaaccgtatccgaaacgtctaaactaaaaccgaccaataatcacaacataaaaaataaatacaataaaaaatctttctatcttttcttttccg

SEQ ID NO: 15957 - DNA, 690 bp, Artificial Sequence
  chemically treated genomic DNA (Homo sapiens) CpG-island No: 15957
atttacgttggtcggagagttttatgtacgtttatgaggatagcgcggcggagagcggtatcggcggcggcggcggaggaggaggcggcggtacgggcggagcggggggtggttgtagcggagcgagtttcggtaaagtttcgagtatggatggtttgggtagtagttgttcggttagttattgtcgcgatttgttttcgtatttcgtgttgggtcgttcgtcggtttttttgggcgtttttttagggcgtcgtttatacggatatttcggtttcggagcggggcgcgttagtgtgtttcgtcgtcgggtattttttatttcgtttagcgttattttgggttacggttattttttcgggggtagttattacggttgtcgtttgtcgtataacgtgaatttgtagtagaagttttgcgtttattattcgggcgataaatattcggagtcgtcgggcgttttgttcggtgacgatttgttttttagggttaaggagttcgttttttattttagtttcgttagtttttattaggcgatgttcggttatttggacgtgtcggtggtgttcgggattagcgggtattcggagtcgcgttacgacgtttttattttcgtcgaaggttattagtattgggttttttttaatggttgggatagttaggtgtattgttttaaggagtagtcgtagttcg

SEQ ID NO: 15958 - DNA, 690 bp, Artificial Sequence
  chemically treated genomic DNA (Homo sapiens) CpG-island No: 15958
cgaactacgactactccttaaaacaatacacctaactatcccaaccattaaaaaaaacccaatactaataaccttcgacgaaaataaaaacgtcgtaacgcgactccgaatacccgctaatcccgaacaccaccgacacgtccaaataaccgaacatcgcctaataaaaactaacgaaactaaaataaaaaacgaactccttaaccctaaaaaacaaatcgtcaccgaacaaaacgcccgacgactccgaatatttatcgcccgaataataaacgcaaaacttctactacaaattcacgttatacgacaaacgacaaccgtaataactacccccgaaaaaataaccgtaacccaaaataacgctaaacgaaataaaaaatacccgacgacgaaacacactaacgcgccccgctccgaaaccgaaatatccgtataaacgacgccctaaaaaaacgcccaaaaaaaccgacgaacgacccaacacgaaatacgaaaacaaatcgcgacaataactaaccgaacaactactacccaaaccatccatactcgaaactttaccgaaactcgctccgctacaaccaccccccgctccgcccgtaccgccgcctcctcctccgccgccgccgccgataccgctctccgccgcgctatcctcataaacgtacataaaactctccgaccaacgtaaat

SEQ ID NO: 15959 - DNA, 690 bp, Artificial Sequence
  chemically treated genomic DNA (Homo sapiens) CpG-island No: 15959
cggattgcgattgttttttggagtagtatatttgattgttttagttattggagagagtttagtgttggtagttttcgacggggatgagggcgtcgtgacgcggtttcgggtgttcgttgatttcgggtattatcgatacgtttaggtagtcgggtatcgtttggtaggagttggcgaagttggggtagaaggcgaattttttggttttagaggataggtcgttatcgggtagggcgttcgacggtttcgggtatttatcgttcgggtggtaggcgtaaggtttttgttgtaggtttacgttgtgcgataggcggtagtcgtagtagttgttttcgaaggggtagtcgtagtttagggtggcgttggacgaggtggggggtgttcggcggcggggtatattggcgcgtttcgtttcggggtcgggatgttcgtatagacggcgttttgggggggcgtttaggggagtcggcgggcggtttagtacggggtgcggaagtaggtcgcggtagtggttggtcgggtagttgttgtttagattatttatgttcggggttttgtcggggttcgtttcgttgtagttatttttcgtttcgttcgtgtcgtcgttttttttttcgtcgtcgtcgtcgatgtcgtttttcgtcgcgttgtttttatagacgtatataaggtttttcggttagcgtggat

SEQ ID NO: 15960 - DNA, 690 bp, Artificial Sequence
  chemically treated genomic DNA (Homo sapiens) CpG-island No: 15960
atccacgctaaccgaaaaaccttatatacgtctataaaaacaacgcgacgaaaaacgacatcgacgacgacgacgaaaaaaaaaacgacgacacgaacgaaacgaaaaataactacaacgaaacgaaccccgacaaaaccccgaacataaataatctaaacaacaactacccgaccaaccactaccgcgacctacttccgcaccccgtactaaaccgcccgccgactcccctaaacgcccccccaaaacgccgtctatacgaacatcccgaccccgaaacgaaacgcgccaatataccccgccgccgaacaccccccacctcgtccaacgccaccctaaactacgactaccccttcgaaaacaactactacgactaccgcctatcgcacaacgtaaacctacaacaaaaaccttacgcctaccacccgaacgataaatacccgaaaccgtcgaacgccctacccgataacgacctatcctctaaaaccaaaaaattcgccttctaccccaacttcgccaactcctaccaaacgatacccgactacctaaacgtatcgataatacccgaaatcaacgaacacccgaaaccgcgtcacgacgccctcatccccgtcgaaaactaccaacactaaactctctccaataactaaaacaatcaaatatactactccaaaaaacaatcgcaatccg

SEQ ID NO: 15961 - DNA, 761 bp, Artificial Sequence
  chemically treated genomic DNA (Homo sapiens) CpG-island No: 15961
ttttaacgtttagggtgtttagggacgagcgattggatagattcgggtttcggcgaggtaatttttatagtttcggttagtaggggttatttcgtttttcgcgggggtatagtagttttttcggaggagattagagttgtcggcgttgtcgggcgcgggagttgttcgagttagtcggggttgtgggcgcgtcgggttttttttttttggattttggagaggatcgtagtcgggattacgacggtcggggaattggattaaggttttataattttcgttatagggtcgggatgttgagtattttaggcgcgagttagggagtgttttaggcgttcgggtcgtttattagtgttcggcgcgtttttgtttcgaggtttcggttagagtggtaatcgagagtatcgcgtagggttgtagcgcggagcggagggcgaagttggggagttttgtagcggcggacgcgggttacggtttttttttggaaaatcggtagcgtcgtttggatcgaggtatacgtaggagggcggtcgttcggattaaaggttgagtataggcgcgttgtgggatcggggtttgttttttatttttcgttgaattatatcggaatttttcgcgtttttaggtgttatgtagagaggattggcggttttagagtgcgtttttcgcgcggtttggggtcgaaaaatcgtttttgtttttttggatatagtagggagggtgggtaggggtttcggtttggtcggaattttaagttttcggag

SEQ ID NO: 15962 - DNA, 761 bp, Artificial Sequence
  chemically treated genomic DNA (Homo sapiens) CpG-island No: 15962
ctccgaaaacttaaaattccgaccaaaccgaaacccctacccaccctccctactatatccaaaaaaacaaaaacgatttttcgaccccaaaccgcgcgaaaaacgcactctaaaaccgccaatcctctctacataacacctaaaaacgcgaaaaattccgatataattcaacgaaaaataaaaaacaaaccccgatcccacaacgcgcctatactcaacctttaatccgaacgaccgccctcctacgtatacctcgatccaaacgacgctaccgattttccaaaaaaaaaccgtaacccgcgtccgccgctacaaaactccccaacttcgccctccgctccgcgctacaaccctacgcgatactctcgattaccactctaaccgaaacctcgaaacaaaaacgcgccgaacactaataaacgacccgaacgcctaaaacactccctaactcgcgcctaaaatactcaacatcccgaccctataacgaaaattataaaaccttaatccaattccccgaccgtcgtaatcccgactacgatcctctccaaaatccaaaaaaaaaaaacccgacgcgcccacaaccccgactaactcgaacaactcccgcgcccgacaacgccgacaactctaatctcctccgaaaaaactactatacccccgcgaaaaacgaaataacccctactaaccgaaactataaaaattacctcgccgaaacccgaatctatccaatcgctcgtccctaaacaccctaaacgttaaaa

SEQ ID NO: 15963 - DNA, 761 bp, Artificial Sequence
  chemically treated genomic DNA (Homo sapiens) CpG-island No: 15963
tttcggggatttggggtttcggttaggtcggagtttttgtttattttttttgttatatttaggaaagtagaagcggtttttcggttttaggtcgcgcgagaaacgtattttggagtcgttaattttttttgtatggtatttggaggcgcggaaggtttcggtgtaatttagcgggaggtggaaggtaggtttcgattttatagcgcgtttatgtttagtttttggttcgagcggtcgtttttttgcgtgtgtttcggtttagacggcgttgtcgattttttaaggagaggtcgtggttcgcgttcgtcgttgtaggattttttagtttcgtttttcgtttcgcgttgtagttttgcgcggtgttttcggttgttattttagtcgaggtttcgagataaagacgcgtcgggtattggtggacgattcgggcgtttgggatattttttgattcgcgtttggagtgtttagtatttcggttttgtggcgaaggttgtgagattttggtttaatttttcgatcgtcgtggtttcggttgcggttttttttagggtttagggagaggaaattcggcgcgtttatagtttcggttgattcgagtagttttcgcgttcgatagcgtcggtagttttggtttttttcggaggggttgttgtgttttcgcgaaggacgagatgatttttgttggtcggagttgtggaggttgtttcgtcgagattcggatttgtttagtcgttcgtttttgagtattttaggcgttgggg

SEQ ID NO: 15964 - DNA, 761 bp, Artificial Sequence
  chemically treated genomic DNA (Homo sapiens) CpG-island No: 15964
ccccaacgcctaaaatactcaaaaacgaacgactaaacaaatccgaatctcgacgaaacaacctccacaactccgaccaacaaaaatcatctcgtccttcgcgaaaacacaacaacccctccgaaaaaaaccaaaactaccgacgctatcgaacgcgaaaactactcgaatcaaccgaaactataaacgcgccgaatttcctctccctaaaccctaaaaaaaaccgcaaccgaaaccacgacgatcgaaaaattaaaccaaaatctcacaaccttcgccacaaaaccgaaatactaaacactccaaacgcgaatcaaaaaatatcccaaacgcccgaatcgtccaccaatacccgacgcgtctttatctcgaaacctcgactaaaataacaaccgaaaacaccgcgcaaaactacaacgcgaaacgaaaaacgaaactaaaaaatcctacaacgacgaacgcgaaccacgacctctccttaaaaaatcgacaacgccgtctaaaccgaaacacacgcaaaaaaacgaccgctcgaaccaaaaactaaacataaacgcgctataaaatcgaaacctaccttccacctcccgctaaattacaccgaaaccttccgcgcctccaaataccatacaaaaaaaattaacgactccaaaatacgtttctcgcgcgacctaaaaccgaaaaaccgcttctactttcctaaatataacaaaaaaaataaacaaaaactccgacctaaccgaaaccccaaatccccgaaa

SEQ ID NO: 15965 - DNA, 649 bp, Artificial Sequence
  chemically treated genomic DNA (Homo sapiens) CpG-island No: 15965
  unsure (249)
tttgaattcgtcgtttgagtggtcggggtttttatcgttggtcgagagttcgtcgtcggggtttaacggcgatattaagttgtcggggtcgtttgcgtcggcgtttttgttgttttcgttgagtagggacgaattggagtcggattttagcgattggtaggagggcgggtcgtgtcggaggttttgcgtcgtcgtcgtcgtcgttatcgtcgtcgttcggcggtgtagtcgatttgaagtcgagcgtangcggtttttcgaacgttttagcgggagtagcgttgtttcgggttcggttttcgggtcgcgttcgcgttttttacgttttaggttttcgtcgttattttcggcgtacggttcgcggtagtaatttttgtcgttttttacgcgcgttagttcgtacgtgcggtcgaagggagggttgagagatattgggttgtcgaggtagggttgcgggtagttattgtacggtttcgtcgacggttaggatagggagtatacgttgtcgcggcgtgggtaggatagcgaaggtagttcgggaagttgcgtttcggacgcgcggaagttggggaagtagaaggtgtttttcggatttttggtaaaattaatttttaatattttttttttttttaattattttttatttttg

SEQ ID NO: 15966 - DNA, 649 bp, Artificial Sequence
  chemically treated genomic DNA (Homo sapiens) CpG-island No: 15966
  unsure (401)
caaaaataaaaaataattaaaaaaaaaaaaaatattaaaaattaattttaccaaaaatccgaaaaacaccttctacttccccaacttccgcgcgtccgaaacgcaacttcccgaactaccttcgctatcctacccacgccgcgacaacgtatactccctatcctaaccgtcgacgaaaccgtacaataactacccgcaaccctacctcgacaacccaatatctctcaaccctcccttcgaccgcacgtacgaactaacgcgcgtaaaaaacgacaaaaattactaccgcgaaccgtacgccgaaaataacgacgaaaacctaaaacgtaaaaaacgcgaacgcgacccgaaaaccgaacccgaaacaacgctactcccgctaaaacgttcgaaaaaccgcntacgctcgacttcaaatcgactacaccgccgaacgacgacgataacgacgacgacgacgacgcaaaacctccgacacgacccgccctcctaccaatcgctaaaatccgactccaattcgtccctactcaacgaaaacaacaaaaacgccgacgcaaacgaccccgacaacttaatatcgccgttaaaccccgacgacgaactctcgaccaacgataaaaaccccgaccactcaaacgacgaattcaaa

SEQ ID NO: 15967 - DNA, 649 bp, Artificial Sequence
  chemically treated genomic DNA (Homo sapiens) CpG-island No: 15967
  unsure (401)
taggaatgaaaggtaattgggggggggggaggtgttgaaaattaattttgttaaaggttcgggagatattttttatttttttaattttcgcgcgttcggggcgtagtttttcgggttgttttcgttgttttatttacgtcgcgataacgtgtgttttttgttttggtcgtcggcggagtcgtgtaatggttattcgtagttttatttcggtagtttagtgttttttaatttttttttcggtcgtacgtgcgagttggcgcgcgtggaggacggtaagggttattatcgcgagtcgtgcgtcgagggtggcggcgggggtttgaagcgtgaggagcgcgggcgcgattcgggagtcgggttcggggtagcgttgttttcgttggagcgttcggggggtcgtntgcgttcggttttaagtcgattatatcgtcgggcggcggcggtggcgacggcggcggcggcgtaggattttcggtacgattcgtttttttgttagtcgttggaattcgattttagttcgtttttgtttaacgagggtaataagggcgtcggcgtaggcgatttcggtagtttggtatcgtcgttgaatttcggcggcgggttttcggttagcggtaaggatttcggttatttaagcggcggatttaaa

SEQ ID NO: 15968 - DNA, 649 bp, Artificial Sequence
  chemically treated genomic DNA (Homo sapiens) CpG-island No: 15968
  unsure (249)
tttaaatccgccgcttaaataaccgaaatccttaccgctaaccgaaaacccgccgccgaaattcaacgacgataccaaactaccgaaatcgcctacgccgacgcccttattaccctcgttaaacaaaaacgaactaaaatcgaattccaacgactaacaaaaaaacgaatcgtaccgaaaatcctacgccgccgccgccgtcgccaccgccgccgcccgacgatataatcgacttaaaaccgaacgcanacgaccccccgaacgctccaacgaaaacaacgctaccccgaacccgactcccgaatcgcgcccgcgctcctcacgcttcaaacccccgccgccaccctcgacgcacgactcgcgataataacccttaccgtcctccacgcgcgccaactcgcacgtacgaccgaaaaaaaaattaaaaaacactaaactaccgaaataaaactacgaataaccattacacgactccgccgacgaccaaaacaaaaaacacacgttatcgcgacgtaaataaaacaacgaaaacaacccgaaaaactacgccccgaacgcgcgaaaattaaaaaaataaaaaatatctcccgaacctttaacaaaattaattttcaacacctcccccccccccaattacctttcattccta

SEQ ID NO: 15969 - DNA, 536 bp, Artificial Sequence
  chemically treated genomic DNA (Homo sapiens) CpG-island No: 15969
gttttggagcgttttttcgcgttttggacgcgtttcgttcgcggggtcggtttatttggggttataggtgcgtagtcgcggggcgtagtggggttgcgcgcgggcgttcgcggtcggttggaggtgttcggcgatcggtttcgttcgagcgggggatatttatcgagcggttggagagtttttttcgggagtttcggttgaatatggtcggacgttttttgttcgtagcgtcgttcgtcggttcgttcgcgtcgcggtcgggagggcgggtagtttgggcgggtattttcggcggtcgttggtttggttgttttcgttttgtagttttcggttcgtttcggagcgtacgtttatttttttttttttttttttgtttttttttttacgttcgtaggtttttttttttttttcggtattttttcgttttttcgggttcgtttcgcggtttatcggttttttttatttttttttcgtattcggttggggttattttttttttttttttggtttttaggtttattgggtataattttcgg

SEQ ID NO: 15970 - DNA, 536 bp, Artificial Sequence
  chemically treated genomic DNA (Homo sapiens) CpG-island No: 15970
ccgaaaattatacccaataaacctaaaaaccaaaaaaaaaaaaaaaataaccccaaccgaatacgaaaaaaaaataaaaaaaaccgataaaccgcgaaacgaacccgaaaaaacgaaaaaataccgaaaaaaaaaaaaaaacctacgaacgtaaaaaaaaaaacaaaaaaaaaaaaaaaaaaataaacgtacgctccgaaacgaaccgaaaactacaaaacgaaaacaaccaaaccaacgaccgccgaaaatacccgcccaaactacccgccctcccgaccgcgacgcgaacgaaccgacgaacgacgctacgaacaaaaaacgtccgaccatattcaaccgaaactcccgaaaaaaactctccaaccgctcgataaatatcccccgctcgaacgaaaccgatcgccgaacacctccaaccgaccgcgaacgcccgcgcgcaaccccactacgccccgcgactacgcacctataaccccaaataaaccgaccccgcgaacgaaacgcgtccaaaacgcgaaaaaacgctccaaaac

SEQ ID NO: 15971 - DNA, 536 bp, Artificial Sequence
  chemically treated genomic DNA (Homo sapiens) CpG-island No: 15971
tcgggagttgtgtttagtgggtttagaagttagggaaagggagaaagtggttttagtcgggtgcgggggagggatgggaagagtcggtggatcgcggggcgaattcgggagggcggggggatgtcgggagagagggagggatttgcgggcgtggagggagaggtagagggaagggaggaggggtaggcgtgcgtttcggagcgagtcggggattgtaaggcggagatagttaggttagcggtcgtcgagggtgttcgtttaggttattcgttttttcggtcgcggcgcggacggatcgacggacggcgttgcgagtaggaggcgttcggttatgtttagtcggagttttcggaaaagattttttagtcgttcggtgagtgtttttcgttcgagcggggtcgatcgtcgggtatttttagtcggtcgcgagcgttcgcgcgtagttttattgcgtttcgcggttgcgtatttgtggttttaggtaagtcggtttcgcgggcggggcgcgtttagggcgcgagagagcgttttaaggt

SEQ ID NO: 15972 - DNA, 536 bp, Artificial Sequence
  chemically treated genomic DNA (Homo sapiens) CpG-island No: 15972
accttaaaacgctctctcgcgccctaaacgcgccccgcccgcgaaaccgacttacctaaaaccacaaatacgcaaccgcgaaacgcaataaaactacgcgcgaacgctcgcgaccgactaaaaatacccgacgatcgaccccgctcgaacgaaaaacactcaccgaacgactaaaaaatcttttccgaaaactccgactaaacataaccgaacgcctcctactcgcaacgccgtccgtcgatccgtccgcgccgcgaccgaaaaaacgaataacctaaacgaacaccctcgacgaccgctaacctaactatctccgccttacaatccccgactcgctccgaaacgcacgcctacccctcctcccttccctctacctctccctccacgcccgcaaatccctccctctctcccgacatccccccgccctcccgaattcgccccgcgatccaccgactcttcccatccctcccccgcacccgactaaaaccactttctccctttccctaacttctaaacccactaaacacaactcccga

SEQ ID NO: 15973 - DNA, 549 bp, Artificial Sequence
  chemically treated genomic DNA (Homo sapiens) CpG-island No: 15973
ttcgtcgcggagttaggcggtagtatcgacgtcgtcgtagtttttgttcgtatcgcgttaattcgcgttttcggtttatacgtagtcggagcgattgagtcggtagtttcgggtttacgttgcgtatcgtgtgtacggcggggttggttgagttgatttgcgttgggtttcggcgtcgtaggcggttggggagggcggcgtgggagaggacgttgagacgtaggggcggtcgcgtcgaggtgataagttgcgtatttggaaagttattcggttgtttggtgaggttcgtgggtcgggggttttgggcgtcggggtgtgagggcgcgcggggagggacggggtcggggtgcgcgcgtgtgtatgttgtgaatgcgttgcgcgatgtgcgtttttattttatatttagtcggttttttgtttgtgttgttcgagtgtggacgtgtgtacgcgttgtattcgttcggtgtggtagcgtttcgtgagtttttggaggtagggaaaggttatttgtgtttagaggttttgttgagggcgggaggggtttagttt

SEQ ID NO: 15974 - DNA, 549 bp, Artificial Sequence
  chemically treated genomic DNA (Homo sapiens) CpG-island No: 15974
aaactaaacccctcccgccctcaacaaaacctctaaacacaaataacctttccctacctccaaaaactcacgaaacgctaccacaccgaacgaatacaacgcgtacacacgtccacactcgaacaacacaaacaaaaaaccgactaaatataaaataaaaacgcacatcgcgcaacgcattcacaacatacacacgcgcgcaccccgaccccgtccctccccgcgcgccctcacaccccgacgcccaaaacccccgacccacgaacctcaccaaacaaccgaataactttccaaatacgcaacttatcacctcgacgcgaccgcccctacgtctcaacgtcctctcccacgccgccctccccaaccgcctacgacgccgaaacccaacgcaaatcaactcaaccaaccccgccgtacacacgatacgcaacgtaaacccgaaactaccgactcaatcgctccgactacgtataaaccgaaaacgcgaattaacgcgatacgaacaaaaactacgacgacgtcgatactaccgcctaactccgcgacgaa

SEQ ID NO: 15975 - DNA, 549 bp, Artificial Sequence
  chemically treated genomic DNA (Homo sapiens) CpG-island No: 15975
gggttgagtttttttcgtttttaatagaatttttaaatataagtagtttttttttgtttttaggagtttacgaaacgttgttatatcgagcgaatgtaacgcgtatatacgtttatattcgaatagtataagtaagagatcggttgggtgtggaatagaggcgtatatcgcgtaacgtatttatagtatgtatacgcgcgtatttcgatttcgttttttttcgcgcgtttttatatttcggcgtttaagattttcggtttacgaattttattagatagtcgggtaattttttaggtgcgtagtttgttatttcggcgcggtcgtttttgcgttttagcgtttttttttacgtcgttttttttagtcgtttgcggcgtcggagtttagcgtaggttagtttagttagtttcgtcgtgtatacggtgcgtagcgtgggttcggggttgtcggtttagtcgtttcggttacgtgtgagtcgggggcgcgggttagcgcgatgcgggtaggagttgcggcggcgtcggtgttgtcgtttggtttcgcggcggg

SEQ ID NO: 15976 - DNA, 549 bp, Artificial Sequence
  chemically treated genomic DNA (Homo sapiens) CpG-island No: 15976
cccgccgcgaaaccaaacgacaacaccgacgccgccgcaactcctacccgcatcgcgctaacccgcgcccccgactcacacgtaaccgaaacgactaaaccgacaaccccgaacccacgctacgcaccgtatacacgacgaaactaactaaactaacctacgctaaactccgacgccgcaaacgactaaaaaaaacgacgtaaaaaaaaacgctaaaacgcaaaaacgaccgcgccgaaataacaaactacgcacctaaaaaattacccgactatctaataaaattcgtaaaccgaaaatcttaaacgccgaaatataaaaacgcgcgaaaaaaaacgaaatcgaaatacgcgcgtatacatactataaatacgttacgcgatatacgcctctattccacacccaaccgatctcttacttatactattcgaatataaacgtatatacgcgttacattcgctcgatataacaacgtttcgtaaactcctaaaaacaaaaaaaaactacttatatttaaaaattctattaaaaacgaaaaaaactcaaccc

SEQ ID NO: 15977 - DNA, 800 bp, Artificial Sequence
  chemically treated genomic DNA (Homo sapiens) CpG-island No: 15977
ttttcgtcgtgttttacgtattgtgcgttggggtcgatttttaggttgaggggcgtgaggaggttttcgttgatcgatacggtggcgatgtatggggggttgggttcgtatacgttttcggagcggtagtcgaagttgcgttcgtaggagtcggcgcggaagttttcgtatacgttgtggttgtcgaagttttcggtgaggtcgcggtagtaggagacgtcgcggtagggggcggcggtgatgtagtagcggtcgggtcggggtttataagtcgagatgtagttgaaggcgcggatttcgtagggggcgttgaggcgggagtagaggtaggatatggtgcggtggcggtaggggcgggcggttggattttaagtcggcgttgcgttttatatgacggttcgcgggttcggggagggagttcgcggtaaaggcgtttacgagtttggagggttcggttttcgcgtttcgcggagtcgggaatgaaagcgagttaggtcgttcggtcgtttgtataaaacggcgttcgtttttcgttcgagttttatggggtcgggaagcgtttggttagtttcgttgttcgtgcgttgcggttagtgcgagtggaatttttttatttgttcgttttttcgtcgggatttcgagttttgttttgttggattcggtttttatttcggttttagttttatagtttcggtttttcgtagcgggtatcgtgtgtggggcgagtgtgtgcgtgtgtcgagagtgtggggtttttgaagttagtttcgtaggtttatgttatgattttgggtagttga

SEQ ID NO: 15978 - DNA, 800 bp, Artificial Sequence
  chemically treated genomic DNA (Homo sapiens) CpG-island No: 15978
tcaactacccaaaatcataacataaacctacgaaactaacttcaaaaaccccacactctcgacacacgcacacactcgccccacacacgatacccgctacgaaaaaccgaaactataaaactaaaaccgaaataaaaaccgaatccaacaaaacaaaactcgaaatcccgacgaaaaaacgaacaaataaaaaaattccactcgcactaaccgcaacgcacgaacaacgaaactaaccaaacgcttcccgaccccataaaactcgaacgaaaaacgaacgccgttttatacaaacgaccgaacgacctaactcgctttcattcccgactccgcgaaacgcgaaaaccgaaccctccaaactcgtaaacgcctttaccgcgaactccctccccgaacccgcgaaccgtcatataaaacgcaacgccgacttaaaatccaaccgcccgcccctaccgccaccgcaccatatcctacctctactcccgcctcaacgccccctacgaaatccgcgccttcaactacatctcgacttataaaccccgacccgaccgctactacatcaccgccgccccctaccgcgacgtctcctactaccgcgacctcaccgaaaacttcgacaaccacaacgtatacgaaaacttccgcgccgactcctacgaacgcaacttcgactaccgctccgaaaacgtatacgaacccaaccccccatacatcgccaccgtatcgatcaacgaaaacctcctcacgcccctcaacctaaaaatcgaccccaacgcacaatacgtaaaacacgacgaaaa

SEQ ID NO: 15979 - DNA, 800 bp, Artificial Sequence
  chemically treated genomic DNA (Homo sapiens) CpG-island No: 15979
ttagttgtttaaggttatgatatgaatttgcgggattgattttagaggttttatattttcgatatacgtatatattcgttttatatacggtgttcgttgcgggggatcggggttatgggattgggatcgaagtggaggtcggatttaataaggtaaagttcggagtttcggcggaggggcggataggtggaggggttttattcgtattgatcgtagcgtacgggtagcggggttgattaggcgtttttcggttttataaaattcgggcgggaggcgaacgtcgttttatgtaggcggtcgggcggtttggttcgtttttattttcggtttcgcgaggcgcgagggtcgagttttttaagttcgtaaacgtttttgtcgcgagtttttttttcgggttcgcgggtcgttatataaggcgtagcgtcggtttggggtttagtcgttcgtttttgtcgttatcgtattatgttttgtttttattttcgttttagcgttttttgcggggttcgcgtttttagttgtatttcggtttgtgggtttcggttcggtcgttgttgtattatcgtcgttttttatcgcggcgttttttgttatcgcggttttatcggaggtttcggtagttatagcgtgtgcgggggttttcgcgtcggtttttgcggacgtagtttcggttatcgtttcgggggcgtgtgcggatttagttttttatgtatcgttatcgtgtcggttaacgagagtttttttacgttttttaatttggagatcgattttaacgtatagtgcgtgaagtacgacgagaa

SEQ ID NO: 15980 - DNA, 800 bp, Artificial Sequence
  chemically treated genomic DNA (Homo sapiens) CpG-island No: 15980
ttctcgtcgtacttcacgcactatacgttaaaatcgatctccaaattaaaaaacgtaaaaaaactctcgttaaccgacacgataacgatacataaaaaactaaatccgcacacgcccccgaaacgataaccgaaactacgtccgcaaaaaccgacgcgaaaacccccgcacacgctataactaccgaaacctccgataaaaccgcgataacaaaaaacgccgcgataaaaaacgacgataatacaacaacgaccgaaccgaaacccacaaaccgaaatacaactaaaaacgcgaaccccgcaaaaaacgctaaaacgaaaataaaaacaaaacataatacgataacgacaaaaacgaacgactaaaccccaaaccgacgctacgccttatataacgacccgcgaacccgaaaaaaaaactcgcgacaaaaacgtttacgaacttaaaaaactcgaccctcgcgcctcgcgaaaccgaaaataaaaacgaaccaaaccgcccgaccgcctacataaaacgacgttcgcctcccgcccgaattttataaaaccgaaaaacgcctaatcaaccccgctacccgtacgctacgatcaatacgaataaaacccctccacctatccgcccctccgccgaaactccgaactttaccttattaaatccgacctccacttcgatcccaatcccataaccccgatcccccgcaacgaacaccgtatataaaacgaatatatacgtatatcgaaaatataaaacctctaaaatcaatcccgcaaattcatatcataaccttaaacaactaa

SEQ ID NO: 15981 - DNA, 946 bp, Artificial Sequence
  chemically treated genomic DNA (Homo sapiens) CpG-island No: 15981
gtttttgtagagcggtgttagggtttcgaaggcgtcggacgtttcgcgaggtagaggtcggtagcggtgtgggggatcgggtattcggaattatttttatttcggttcggtcgacgcgggttgcggaggacgcgggtcggtttagagatggtttggattaaagcggcgtagagatgttgttggttttcggcgttcggtttgtgcgttcgcgtttagtatttttattttgtttttcgcgtagtcgggtttaggtttttttcggttttcgcgaagttcgtcgcggtttcgggtttttagagggtcgagttcggcgttcggtttttttttaattaagaggttaagaggttgtataattttttagtcgtttttatttattatgcgttacggtttcgcgaagtcgtttatttttagattttcgtcgggtcggtcgagttcggggcgcgttgcggcggttttgagtgcgaggttaggtcgcgtttttcgtcgtttttttagcgtagcgttcgcgagtttcgggtattttaaagagataggttcgttcgtcgtttttttttcggttttttgtttttcgtttttgttttttttttttttttcgttttcgttggggtttatagtcgttagttttcgttaggaggcgttttttattttttcggcgtttttgttagcgcgtacgttttttatttcggtttcgtttatttttttcgttttttttaacgttacgtttttttcgcgttattcggtttcgtttttttttcgtgttacgtttttatcgtaggttttcgttcgttcgtcggttcgtaggttacgtttttaggcgtatttattttagttgtttaacgcgattttttttcgcgttttttcgtatcgggatttttagttttttaggtttcgatagatttttttgttaggtttatttttcgggtttttttagttgtagtgttaagat

SEQ ID NO: 15982 - DNA, 946 bp, Artificial Sequence
  chemically treated genomic DNA (Homo sapiens) CpG-island No: 15982
atcttaacactacaactaaaaaaacccgaaaaataaacctaacaaaaaaatctatcgaaacctaaaaaactaaaaatcccgatacgaaaaaacgcgaaaaaaaatcgcgttaaacaactaaaataaatacgcctaaaaacgtaacctacgaaccgacgaacgaacgaaaacctacgataaaaacgtaacacgaaaaaaaaacgaaaccgaataacgcgaaaaaaacgtaacgttaaaaaaaacgaaaaaaataaacgaaaccgaaataaaaaacgtacgcgctaacaaaaacgccgaaaaaataaaaaacgcctcctaacgaaaactaacgactataaaccccaacgaaaacgaaaaaaaaaaaaaaaacaaaaacgaaaaacaaaaaaccgaaaaaaaaacgacgaacgaacctatctctttaaaatacccgaaactcgcgaacgctacgctaaaaaaacgacgaaaaacgcgacctaacctcgcactcaaaaccgccgcaacgcgccccgaactcgaccgacccgacgaaaatctaaaaataaacgacttcgcgaaaccgtaacgcataataaataaaaacgactaaaaaattatacaacctcttaacctcttaattaaaaaaaaaccgaacgccgaactcgaccctctaaaaacccgaaaccgcgacgaacttcgcgaaaaccgaaaaaaacctaaacccgactacgcgaaaaacaaaataaaaatactaaacgcgaacgcacaaaccgaacgccgaaaaccaacaacatctctacgccgctttaatccaaaccatctctaaaccgacccgcgtcctccgcaacccgcgtcgaccgaaccgaaataaaaataattccgaatacccgatcccccacaccgctaccgacctctacctcgcgaaacgtccgacgccttcgaaaccctaacaccgctctacaaaaac

SEQ ID NO: 15983 - DNA, 946 bp, Artificial Sequence
  chemically treated genomic DNA (Homo sapiens) CpG-island No: 15983
attttaatattgtaattgagggggttcggagaatgggtttgataggagggtttgtcggaatttgagggattggggatttcggtgcggagaagcgcgaagggaaatcgcgttgagtagttggggtgggtgcgtttgggggcgtggtttgcgggtcggcgggcgggcgggagtttgcggtggaggcgtggtacgagggaggggcgaaatcgggtggcgcggagggggcgtggcgttgggaggggcggggggagtgggcggggtcgagatggggggcgtgcgcgttgataggagcgtcgggggagtgagagacgttttttggcgggagttggcggttgtggattttagcgggggcggaggggaagaggggagtaggggcggggagtaaggagtcgggaggagggcggcgggcgggtttgtttttttaaggtgttcgaggttcgcgggcgttgcgttgaggggacggcgggaggcgcggtttggtttcgtatttaaagtcgtcgtagcgcgtttcgggttcggtcgattcggcggggatttaggggtgggcgatttcgcgggatcgtggcgtatggtgagtgggagcggttggggggttgtgtagttttttggttttttggttgggaaggggtcgggcgtcgagttcggttttttagaggttcggggtcgcggcgagtttcgcgggggtcgggagaagtttgggttcggttgcgcggaggataaagtgggggtgttgggcgcgggcgtataggtcggacgtcgggagttagtagtatttttgcgtcgttttggtttagattatttttgggtcggttcgcgtttttcgtagttcgcgtcggtcgagtcggggtgggggtggtttcgggtgttcggttttttatatcgttatcggtttttgtttcgcggggcgttcggcgttttcggggttttggtatcgttttatagaggt

SEQ ID NO: 15984 - DNA, 946 bp, Artificial Sequence
  chemically treated genomic DNA (Homo sapiens) CpG-island No: 15984
acctctataaaacgataccaaaaccccgaaaacgccgaacgccccgcgaaacaaaaaccgataacgatataaaaaaccgaacacccgaaaccacccccaccccgactcgaccgacgcgaactacgaaaaacgcgaaccgacccaaaaataatctaaaccaaaacgacgcaaaaatactactaactcccgacgtccgacctatacgcccgcgcccaacacccccactttatcctccgcgcaaccgaacccaaacttctcccgacccccgcgaaactcgccgcgaccccgaacctctaaaaaaccgaactcgacgcccgaccccttcccaaccaaaaaaccaaaaaactacacaaccccccaaccgctcccactcaccatacgccacgatcccgcgaaatcgcccacccctaaatccccgccgaatcgaccgaacccgaaacgcgctacgacgactttaaatacgaaaccaaaccgcgcctcccgccgtcccctcaacgcaacgcccgcgaacctcgaacaccttaaaaaaacaaacccgcccgccgccctcctcccgactccttactccccgcccctactcccctcttcccctccgcccccgctaaaatccacaaccgccaactcccgccaaaaaacgtctctcactcccccgacgctcctatcaacgcgcacgccccccatctcgaccccgcccactccccccgcccctcccaacgccacgccccctccgcgccacccgatttcgcccctccctcgtaccacgcctccaccgcaaactcccgcccgcccgccgacccgcaaaccacgcccccaaacgcacccaccccaactactcaacgcgatttcccttcgcgcttctccgcaccgaaatccccaatccctcaaattccgacaaaccctcctatcaaacccattctccgaaccccctcaattacaatattaaaat

SEQ ID NO: 15985 - DNA, 538 bp, Artificial Sequence
  chemically treated genomic DNA (Homo sapiens) CpG-island No: 15985
atttagtcgttttttttattttcgggaatttaattattcgagaagttttatggattttagttcgattttttataattagtcgtatcggcgggcgttatttattagaatgggtttttttttttcgttttttttatttgcgatcggaatattattttatttttttcgtttttattttattttatttttttttaatagtagagcgattcggatacgtagttcgtattcgatttttttttcgaaacgtattttaatcggtatcgattcgttttttttttcgatatcgttcggatcgggtttcgttcgaattcgatttgcgtcgattcggttcgattttaacgtttttttaattattcgtgttcgtatttaaatgtttttagtttattttatttatttcgatcgttattaaattttttttttttttcggtttacgttaatcggtattatttatttgattaaattgatttttttttttcgttttttttgttgcgattgttatcgttttatcgtttgtatcgttcgttttgattttatttcgttt

SEQ ID NO: 15986 - DNA, 538 bp, Artificial Sequence
  chemically treated genomic DNA (Homo sapiens) CpG-island No: 15986
aaacgaaataaaatcaaaacgaacgatacaaacgataaaacgataacaatcgcaacaaaaaaaacgaaaaaaaaaaatcaatttaatcaaataaataataccgattaacgtaaaccgaaaaaaaaaaaaaatttaataacgatcgaaataaataaaataaactaaaaacatttaaatacgaacacgaataattaaaaaaacgttaaaatcgaaccgaatcgacgcaaatcgaattcgaacgaaacccgatccgaacgatatcgaaaaaaaaaacgaatcgataccgattaaaatacgtttcgaaaaaaaaatcgaatacgaactacgtatccgaatcgctctactattaaaaaaaaataaaataaaataaaaacgaaaaaaataaaataatattccgatcgcaaataaaaaaaacgaaaaaaaaaaacccattctaataaataacgcccgccgatacgactaattataaaaaatcgaactaaaatccataaaacttctcgaataattaaattcccgaaaataaaaaaaacgactaaat

SEQ ID NO: 15987 - DNA, 538 bp, Artificial Sequence
  chemically treated genomic DNA (Homo sapiens) CpG-island No: 15987
ggacgggatggagttagagcgggcggtataggcggtggggcggtggtaatcgtagtaggggaggcggagggggggggttaatttgattaggtgggtggtgtcgattgacgtaggtcgggaaggggggagggtttggtggcggtcggggtgggtggggtggattggaagtatttggatgcgagtacgagtagttgggaaagcgttgaggtcggatcgggtcgacgtaaatcgagttcgaacggagttcggttcgagcggtgtcgggagggagggcgaatcgatgtcggttggagtgcgtttcgggggagagatcgggtacggattacgtgttcggatcgttttgttattgggagaaggtgaagtgaggtgagggcggagagagtggaatggtgtttcggtcgtagataggggaggcggaggagggaagtttattttgataggtggcgttcgtcgatacgattggttgtgagaggtcgggttggggtttatgaggtttttcggatagttgggttttcgaaggtggaagaggcggttaggt

SEQ ID NO: 15988 - DNA, 538 bp, Artificial Sequence
  chemically treated genomic DNA (Homo sapiens) CpG-island No: 15988
acctaaccgcctcttccaccttcgaaaacccaactatccgaaaaacctcataaaccccaacccgacctctcacaaccaatcgtatcgacgaacgccacctatcaaaataaacttccctcctccgcctcccctatctacgaccgaaacaccattccactctctccgccctcacctcacttcaccttctcccaataacaaaacgatccgaacacgtaatccgtacccgatctctcccccgaaacgcactccaaccgacatcgattcgccctccctcccgacaccgctcgaaccgaactccgttcgaactcgatttacgtcgacccgatccgacctcaacgctttcccaactactcgtactcgcatccaaatacttccaatccaccccacccaccccgaccgccaccaaaccctccccccttcccgacctacgtcaatcgacaccacccacctaatcaaattaaccccccccctccgcctcccctactacgattaccaccgccccaccgcctataccgcccgctctaactccatcccgtcc

SEQ ID NO: 15989 - DNA, 1201 bp, Artificial Sequence
  chemically treated genomic DNA (Homo sapiens) CpG-island No: 15989
ggtttcgacgatttcggagtcgttttcggtttcggatcgtcgacgacgtacgtgtaggtttggggatggggcgttggttgcgagcggcgcgttcgtcgagatggttgcggttggtagggcggtgggcgaggtcggtgatttaataaagcggtcgggtcgcgggaggtttcgttcggtcgggtttcggtattcgtcgtagggtttcggtcggcggtaggttgcgcgttttcgttcgtagcgttcggcgtgagggcggttcgggaggagggtgtgagcgcgcgtcgtcgggtcgggattcggtaagtagcgggaaaggcgggaggcgggagcgtcggtcgttcgggagtcgcgcggaggggtaggcggggcggggcggggcgcggttgggggttcgggcggtcgggagtcgcgtcgttcgcggtaggttcgggttttcggttcgtttcgcgcgcgcgttttcgttagttcggtttttttttttttcgtcgtttttttcgcgcgcgtttatcggtttttcggttcgcgtcgttttatgtagtttcggtttttcgggcggtcgcggaggagggggcgattataagatggcgggtacgtggttttttgtttttcgggcggcggcggtttttcgagtttattcgtttttcgtcgtagttttgagtggttgtcgggtcggggtcggcgtggggtttcggcgcgggaaggcgttttcggggcgggggggaggcgggcggggggggggcgtcgcgtcgggtttcggggcgttgatcgggtttttttttttttttttcggcgtagatttttcgttgttttaggaggatttgtaggaggacgtagacggatgtgagtggttcggtttcgcggtggtttggtagttcgcggggagcggtcggggagggcgggcggcggcgaggtttgggtcgggttttggttggttgaggggacggtgggcgagggcggttttaggcgggttggggtggcgatcgggggggaaaatttcgcgttcgtgaggaaacggcgcgtttaggtttcgttgggggagggagacgttcggagtaacgtttaagttcgtttttcgtttttcgtttttttttttcggcgttttcgaatcgtttgcgggtttagtagtggcgcggttgttttggaaggagaagcggtggggtaggatttgaagtggggtttgggtgtgtttttgtttttggtg

SEQ ID NO: 15990 - DNA, 1201 bp, Artificial Sequence
  chemically treated genomic DNA (Homo sapiens) CpG-island No: 15990
caccaaaaacaaaaacacacccaaaccccacttcaaatcctaccccaccgcttctccttccaaaacaaccgcgccactactaaacccgcaaacgattcgaaaacgccgaaaaaaaaaaacgaaaaacgaaaaacgaacttaaacgttactccgaacgtctccctcccccaacgaaacctaaacgcgccgtttcctcacgaacgcgaaattttcccccccgatcgccaccccaacccgcctaaaaccgccctcgcccaccgtcccctcaaccaaccaaaacccgacccaaacctcgccgccgcccgccctccccgaccgctccccgcgaactaccaaaccaccgcgaaaccgaaccactcacatccgtctacgtcctcctacaaatcctcctaaaacaacgaaaaatctacgccgaaaaaaaaaaaaaaaaacccgatcaacgccccgaaacccgacgcgacgccccccccccgcccgcctcccccccgccccgaaaacgccttcccgcgccgaaaccccacgccgaccccgacccgacaaccactcaaaactacgacgaaaaacgaataaactcgaaaaaccgccgccgcccgaaaaacaaaaaaccacgtacccgccatcttataatcgccccctcctccgcgaccgcccgaaaaaccgaaactacataaaacgacgcgaaccgaaaaaccgataaacgcgcgcgaaaaaaacgacgaaaaaaaaaaaaaccgaactaacgaaaacgcgcgcgcgaaacgaaccgaaaacccgaacctaccgcgaacgacgcgactcccgaccgcccgaacccccaaccgcgccccgccccgccccgcctacccctccgcgcgactcccgaacgaccgacgctcccgcctcccgcctttcccgctacttaccgaatcccgacccgacgacgcgcgctcacaccctcctcccgaaccgccctcacgccgaacgctacgaacgaaaacgcgcaacctaccgccgaccgaaaccctacgacgaataccgaaacccgaccgaacgaaacctcccgcgacccgaccgctttattaaatcaccgacctcgcccaccgccctaccaaccgcaaccatctcgacgaacgcgccgctcgcaaccaacgccccatccccaaacctacacgtacgtcgtcgacgatccgaaaccgaaaacgactccgaaatcgtcgaaacc

SEQ ID NO: 15991 - DNA, 1201 bp, Artificial Sequence
  chemically treated genomic DNA (Homo sapiens) CpG-island No: 15991
tattaggggtagaaatatatttaaattttattttaaattttgttttatcgtttttttttttaaaatagtcgcgttattgttgagttcgtaggcgattcgggggcgtcgggagaagagagcgaagggcggaaagcgaatttgggcgttatttcgggcgttttttttttttagcggaatttgggcgcgtcgtttttttacggacgcgagattttttttttcgatcgttattttagttcgtttggggtcgttttcgtttatcgtttttttagttagttagggttcggtttaggtttcgtcgtcgttcgtttttttcggtcgtttttcgcggattgttaggttatcgcgaggtcgggttatttatattcgtttgcgtttttttgtaggtttttttgaagtagcgagaggtttgcgtcgaggggagagaagaaaggttcggttagcgtttcggggttcggcgcgacgtttttttttcgttcgtttttttttcgtttcgggggcgttttttcgcgtcgggattttacgtcggtttcggttcggtagttatttagggttgcggcggagggcgggtgggttcgaggagtcgtcgtcgttcggagaatagggggttacgtattcgttattttgtggtcgttttttttttcgcggtcgttcggggagtcggggttatatggagcggcgcgagtcggggagtcggtggacgcgcgcgggaggggcggcggggaggaggagggtcgggttggcgggggcgcgcgcgcggggcgggtcgagggttcgggtttgtcgcgggcggcgcggttttcggtcgttcgggtttttagtcgcgtttcgtttcgtttcgtttgttttttcgcgcggttttcgggcgatcggcgttttcgtttttcgtttttttcgttgtttgtcgggtttcggttcggcgacgcgcgtttatatttttttttcgagtcgtttttacgtcgagcgttgcggacgggggcgcgtaatttgtcgtcggtcgggattttgcggcgagtgtcggaattcggtcgggcggggtttttcgcggttcggtcgttttattgggttatcggtttcgtttatcgttttgttagtcgtagttatttcggcgggcgcgtcgttcgtagttagcgttttatttttaggtttgtacgtacgtcgtcggcgattcggggtcgggggcggtttcgaggtcgtcggggtt

SEQ ID NO: 15992 - DNA, 1201 bp, Artificial Sequence
  chemically treated genomic DNA (Homo sapiens) CpG-island No: 15992
aaccccgacgacctcgaaaccgcccccgaccccgaatcgccgacgacgtacgtacaaacctaaaaataaaacgctaactacgaacgacgcgcccgccgaaataactacgactaacaaaacgataaacgaaaccgataacccaataaaacgaccgaaccgcgaaaaaccccgcccgaccgaattccgacactcgccgcaaaatcccgaccgacgacaaattacgcgcccccgtccgcaacgctcgacgtaaaaacgactcgaaaaaaaaatataaacgcgcgtcgccgaaccgaaacccgacaaacaacgaaaaaaacgaaaaacgaaaacgccgatcgcccgaaaaccgcgcgaaaaaacaaacgaaacgaaacgaaacgcgactaaaaacccgaacgaccgaaaaccgcgccgcccgcgacaaacccgaaccctcgacccgccccgcgcgcgcgcccccgccaacccgaccctcctcctccccgccgcccctcccgcgcgcgtccaccgactccccgactcgcgccgctccatataaccccgactccccgaacgaccgcgaaaaaaaaaacgaccacaaaataacgaatacgtaaccccctattctccgaacgacgacgactcctcgaacccacccgccctccgccgcaaccctaaataactaccgaaccgaaaccgacgtaaaatcccgacgcgaaaaaacgcccccgaaacgaaaaaaaaacgaacgaaaaaaaaacgtcgcgccgaaccccgaaacgctaaccgaacctttcttctctcccctcgacgcaaacctctcgctacttcaaaaaaacctacaaaaaaacgcaaacgaatataaataacccgacctcgcgataacctaacaatccgcgaaaaacgaccgaaaaaaacgaacgacgacgaaacctaaaccgaaccctaactaactaaaaaaacgataaacgaaaacgaccccaaacgaactaaaataacgatcgaaaaaaaaaatctcgcgtccgtaaaaaaacgacgcgcccaaattccgctaaaaaaaaaaaacgcccgaaataacgcccaaattcgctttccgcccttcgctctcttctcccgacgcccccgaatcgcctacgaactcaacaataacgcgactattttaaaaaaaaaaacgataaaacaaaatttaaaataaaatttaaatatatttctacccctaata

SEQ ID NO: 15993 - DNA, 738 bp, Artificial Sequence
  chemically treated genomic DNA (Homo sapiens) CpG-island No: 15993
aaattcgagcgttgcgagtatcgagttttatacgttgtttgatagacgcgggcgcgaggtcggcgcgggagagggtttttcgggtattttaggggtatcgtcgcgattttagtacgcgatcgttttttgcgattgatttgtgtttgtcgtcgcgcgatcgttcgtttcgtcgtagttttcgttttttcgcgtttacgttgtcgtcgtagttatcggagtcgttttttgcgttgcgttttaggtcggtttcgggcgttttatttttatttcgtttagtttttgtttgtttataatgattgggacggaacgggacgaggcggtttagcgcgtacgcgtatttttttttttcgtcgtagtcggtttttcggattttttttttcgtttagacggttgaagtcgttaagggtaggcgatttgggttttcgcgcggggcgcgttgggaggcgtagtttttaaggtttcggcgtttagttagttcgaaggtttttcgttaaggaagtaaattataatatttaggaggtatcgcgtttttttcgtttttaggttcgttgaggagattgaagaagagcgcgagagaacgcgtcgagggttagtgttttgtaggcgtttgcgtagtcggtggttttgcgggtttcggggacggacggtttatttcggtgtggtgttggcgaaggtggtttacgggtattttttgtaacggttttgaggatggaaagggtttttttttttacgttttgg

SEQ ID NO: 15994 - DNA, 738 bp, Artificial Sequence
  chemically treated genomic DNA (Homo sapiens) CpG-island No: 15994
ccaaaacgtaaaaaaaaaaaccctttccatcctcaaaaccgttacaaaaaatacccgtaaaccaccttcgccaacaccacaccgaaataaaccgtccgtccccgaaacccgcaaaaccaccgactacgcaaacgcctacaaaacactaaccctcgacgcgttctctcgcgctcttcttcaatctcctcaacgaacctaaaaacgaaaaaaacgcgatacctcctaaatattataatttacttccttaacgaaaaaccttcgaactaactaaacgccgaaaccttaaaaactacgcctcccaacgcgccccgcgcgaaaacccaaatcgcctacccttaacgacttcaaccgtctaaacgaaaaaaaaaatccgaaaaaccgactacgacgaaaaaaaaaaatacgcgtacgcgctaaaccgcctcgtcccgttccgtcccaatcattataaacaaacaaaaactaaacgaaataaaaataaaacgcccgaaaccgacctaaaacgcaacgcaaaaaacgactccgataactacgacgacaacgtaaacgcgaaaaaacgaaaactacgacgaaacgaacgatcgcgcgacgacaaacacaaatcaatcgcaaaaaacgatcgcgtactaaaatcgcgacgatacccctaaaatacccgaaaaaccctctcccgcgccgacctcgcgcccgcgtctatcaaacaacgtataaaactcgatactcgcaacgctcgaattt

SEQ ID NO: 15995 - DNA, 738 bp, Artificial Sequence
  chemically treated genomic DNA (Homo sapiens) CpG-island No: 15995
ttagagcgtggagaggaaagttttttttatttttaaggtcgttgtaggagatgttcgtgagttattttcgttagtattatatcggggtaagtcgttcgttttcgaaattcgtaaggttatcgattgcgtaggcgtttgtagagtattggttttcggcgcgttttttcgcgtttttttttagtttttttagcgagtttggggacgaagggggcgcggtgttttttgggtgttgtagtttgtttttttggcgagaggttttcgggttggttggacgtcggggttttgggaattacgttttttagcgcgtttcgcgcgagagtttaggtcgtttgtttttgacggttttagtcgtttgagcggagaggaggattcgggaagtcggttgcggcgggaggagggaatgcgcgtgcgcgttggatcgtttcgtttcgtttcgttttaattattgtaaataggtagaggttgggcggggtgggaatggggcgttcgaggtcggtttggggcgtagcgtaggaggcggtttcggtggttgcggcggtagcgtgagcgcgaggaggcggaggttgcggcggggcggacggtcgcgcggcggtaggtataggttagtcgtagggagcggtcgcgtgttagggtcgcggcgatatttttggagtgttcgaggaattttttttcgcgtcggtttcgcgttcgcgtttgttaggtagcgtgtggggttcggtgttcgtagcgttcgggttt

SEQ ID NO: 15996 - DNA, 738 bp, Artificial Sequence
  chemically treated genomic DNA (Homo sapiens) CpG-island No: 15996
aaacccgaacgctacgaacaccgaaccccacacgctacctaacaaacgcgaacgcgaaaccgacgcgaaaaaaaattcctcgaacactccaaaaatatcgccgcgaccctaacacgcgaccgctccctacgactaacctatacctaccgccgcgcgaccgtccgccccgccgcaacctccgcctcctcgcgctcacgctaccgccgcaaccaccgaaaccgcctcctacgctacgccccaaaccgacctcgaacgccccattcccaccccgcccaacctctacctatttacaataattaaaacgaaacgaaacgaaacgatccaacgcgcacgcgcattccctcctcccgccgcaaccgacttcccgaatcctcctctccgctcaaacgactaaaaccgtcaaaaacaaacgacctaaactctcgcgcgaaacgcgctaaaaaacgtaattcccaaaaccccgacgtccaaccaacccgaaaacctctcgccaaaaaaacaaactacaacacccaaaaaacaccgcgcccccttcgtccccaaactcgctaaaaaaactaaaaaaaaacgcgaaaaaacgcgccgaaaaccaatactctacaaacgcctacgcaatcgataaccttacgaatttcgaaaacgaacgacttaccccgatataatactaacgaaaataactcacgaacatctcctacaacgaccttaaaaataaaaaaaactttcctctccacgctctaa

SEQ ID NO: 15997 - DNA, 969 bp, Artificial Sequence
  chemically treated genomic DNA (Homo sapiens) CpG-island No: 15997
tagagacggtgcgggggtcggtggttttaggttttttttagttatttgcgacgtattcgcggttttcgcgtgttgtgaaatcgggaattgttggatgtcggagttaagagtgaggtcggtttggaaagtgtagtcgtttgcgtcggagaggttggaaacgtttcggtttcgggtaggggttttcggcggcgttcgggtggttcgcggcgttttcggaagatgcgggcggacgttcgtgtgtttcgttggtttgacgtcgtaggggtggtcgtagagtttttacggggatttcgttcgtcgggatttatggaggggattttgacggggtagttagggttgaggttttttaatttcgtgtgttttttttttttcgacgttcggtagaggcgttttcgttttcgtcgttcgtagaggtttcgaaggagtcgttgtagttcgagttcgtttcgtcgaggtttagcggtttcgtaatcgtagaggattttgggcgacggttcgttttgttttagcggtttttcgaggagaggtcgttttagtcgttaggttttatcggggttatcgcggagacgggttaggtcgggtttttcgtaggcgtaggcgtgtttgggcggggtttgtcgcggggcgtggacggttagatcgggagcggtatcgttttcggcgtagaaggtttcgcgggcgtattaggtgaggttcggggttgcgcggggaggagcgcggggttttttcggaattttcgtttgagtttcggggtttgttgaggggcgtggcggttcggggtttagttttcgggggggtaagtttcgaaatgtagttttggaaggatgtcgaggttcgagggatcgtttatgttagtttagtatacggaggtcggggtattttagggatagtgtagtcgtttgtatttagatatattgagtggtttcgtcggttggagtacgagtgttatacgggtagtttattgatttt

SEQ ID NO: 15998 - DNA, 969 bp, Artificial Sequence
  chemically treated genomic DNA (Homo sapiens) CpG-island No: 15998
aaaatcaataaactacccgtataacactcgtactccaaccgacgaaaccactcaatatatctaaatacaaacgactacactatccctaaaataccccgacctccgtatactaaactaacataaacgatccctcgaacctcgacatccttccaaaactacatttcgaaacttacccccccgaaaactaaaccccgaaccgccacgcccctcaacaaaccccgaaactcaaacgaaaattccgaaaaaaccccgcgctcctccccgcgcaaccccgaacctcacctaatacgcccgcgaaaccttctacgccgaaaacgataccgctcccgatctaaccgtccacgccccgcgacaaaccccgcccaaacacgcctacgcctacgaaaaacccgacctaacccgtctccgcgataaccccgataaaacctaacgactaaaacgacctctcctcgaaaaaccgctaaaacaaaacgaaccgtcgcccaaaatcctctacgattacgaaaccgctaaacctcgacgaaacgaactcgaactacaacgactccttcgaaacctctacgaacgacgaaaacgaaaacgcctctaccgaacgtcgaaaaaaaaaaaacacacgaaattaaaaaacctcaaccctaactaccccgtcaaaatcccctccataaatcccgacgaacgaaatccccgtaaaaactctacgaccacccctacgacgtcaaaccaacgaaacacacgaacgtccgcccgcatcttccgaaaacgccgcgaaccacccgaacgccgccgaaaacccctacccgaaaccgaaacgtttccaacctctccgacgcaaacgactacactttccaaaccgacctcactcttaactccgacatccaacaattcccgatttcacaacacgcgaaaaccgcgaatacgtcgcaaataactaaaaaaaacctaaaaccaccgacccccgcaccgtctcta

SEQ ID NO: 15999 - DNA, 969 bp, Artificial Sequence
  chemically treated genomic DNA (Homo sapiens) CpG-island No: 15999
ggaattaatgagttgttcgtgtggtattcgtattttaatcggcggggttatttagtatgtttaagtatagacgattgtattgtttttgaggtgtttcggttttcgtgtgttggattagtatgagcggtttttcgggtttcggtatttttttaaagttgtatttcggaatttgttttttcgaaggttggatttcgaatcgttacgttttttagtagatttcgaggtttaggcggaagtttcgggagagtttcgcgttttttttcgcgtagtttcgggttttatttggtgcgttcgcgaagttttttgcgtcggggacggtgtcgttttcggtttggtcgtttacgtttcgcggtagatttcgtttagatacgtttgcgtttgcggggggttcggtttggttcgttttcgcgatgatttcggtggagtttggcggttggggcggttttttttcggggggtcgttggggtaggacgggtcgtcgtttagggttttttgcggttgcggggtcgttgggtttcggcggggcgggttcgggttgtagcggttttttcggggtttttgcgggcggcgggggcgagggcgtttttgtcgggcgtcggggagaaagaaatatacgggattaggaaattttagttttgattgtttcgttagggttttttttatgagtttcggcgagcggggttttcgtgaggattttgcggttatttttgcgacgttaggttagcgggatatacgggcgttcgttcgtatttttcgaggacgtcgcgggttattcggacgtcgtcggggatttttgttcggggtcggggcgtttttagttttttcggcgtagacggttgtattttttaaatcggttttatttttggtttcggtatttaataattttcgattttatagtacgcggaaatcgcgggtgcgtcgtaagtgattgaaagggatttgaggttatcgattttcgtatcgtttttg

SEQ ID NO: 16000 - DNA, 969 bp, Artificial Sequence
  chemically treated genomic DNA (Homo sapiens) CpG-island No: 16000
caaaaacgatacgaaaatcgataacctcaaatccctttcaatcacttacgacgcacccgcgatttccgcgtactataaaatcgaaaattattaaataccgaaaccaaaaataaaaccgatttaaaaaatacaaccgtctacgccgaaaaaactaaaaacgccccgaccccgaacaaaaatccccgacgacgtccgaataacccgcgacgtcctcgaaaaatacgaacgaacgcccgtatatcccgctaacctaacgtcgcaaaaataaccgcaaaatcctcacgaaaaccccgctcgccgaaactcataaaaaaaaccctaacgaaacaatcaaaactaaaatttcctaatcccgtatatttctttctccccgacgcccgacaaaaacgccctcgcccccgccgcccgcaaaaaccccgaaaaaaccgctacaacccgaacccgccccgccgaaacccaacgaccccgcaaccgcaaaaaaccctaaacgacgacccgtcctaccccaacgaccccccgaaaaaaaaccgccccaaccgccaaactccaccgaaatcatcgcgaaaacgaaccaaaccgaaccccccgcaaacgcaaacgtatctaaacgaaatctaccgcgaaacgtaaacgaccaaaccgaaaacgacaccgtccccgacgcaaaaaacttcgcgaacgcaccaaataaaacccgaaactacgcgaaaaaaaacgcgaaactctcccgaaacttccgcctaaacctcgaaatctactaaaaaacgtaacgattcgaaatccaaccttcgaaaaaacaaattccgaaatacaactttaaaaaaataccgaaacccgaaaaaccgctcatactaatccaacacacgaaaaccgaaacacctcaaaaacaatacaatcgtctatacttaaacatactaaataaccccgccgattaaaatacgaataccacacgaacaactcattaattcc

SEQ ID NO: 16001 - DNA, 756 bp, Artificial Sequence
  chemically treated genomic DNA (Homo sapiens) CpG-island No: 16001
gcggagcgcgcgaggtttagcggttttttcgttaagtttttgttatcggcgcgcggtcgttcgcgttgcggtagcggcggcggcgcggttgattgcggcggtagcgcggtagcggtgattgggtatcgcgcggtgcgggtgttttcgtcgtcgtcgttttcggagcgggaggtggggatgtgcgagtcgaggcgcggagggagggacgggcgtatcgaggaagggcgggggttttttaggttagggtttcgcggtcgtttcgggggatagagttgttttttgtttcgagtttcgtattattttttttttcgggtcgtcgtagttcgggtcgtttcgttaatgattgatgcgggggtcgtaggttggtcggcgacgcggcggcgcgcgcgtcgagtattagagtcggttttggggttcgaaattcgatagttacgcgggcgttttggaggatattggggagtcgcgttcgcggggggcggggagttgcggttgcggggggaggggagggcgtcggagtcgggtagggcggagagatgcgttagcggtaattttcggaggtcgtcggggaggggggtatttcggaagtcggggggttttaagttcgcgttcggatcggggtcgtgttattgttagttatttggggatgcgtttttcgtttttttattgtttttgcgtgtgtgttagtgtgtgtgtgtgtgtgtgtgtgtgtgtgtcggtttgtttacgtattatacgaaggtttagttggtttttttt

SEQ ID NO: 16002 - DNA, 756 bp, Artificial Sequence
  chemically treated genomic DNA (Homo sapiens) CpG-island No: 16002
aaaaaaaaccaactaaaccttcgtataatacgtaaacaaaccgacacacacacacacacacacacacacacactaacacacacgcaaaaacaataaaaaaacgaaaaacgcatccccaaataactaacaataacacgaccccgatccgaacgcgaacttaaaaccccccgacttccgaaatacccccctccccgacgacctccgaaaattaccgctaacgcatctctccgccctacccgactccgacgccctcccctccccccgcaaccgcaactccccgccccccgcgaacgcgactccccaatatcctccaaaacgcccgcgtaactatcgaatttcgaaccccaaaaccgactctaatactcgacgcgcgcgccgccgcgtcgccgaccaacctacgacccccgcatcaatcattaacgaaacgacccgaactacgacgacccgaaaaaaaaaataatacgaaactcgaaacaaaaaacaactctatcccccgaaacgaccgcgaaaccctaacctaaaaaacccccgcccttcctcgatacgcccgtccctccctccgcgcctcgactcgcacatccccacctcccgctccgaaaacgacgacgacgaaaacacccgcaccgcgcgatacccaatcaccgctaccgcgctaccgccgcaatcaaccgcgccgccgccgctaccgcaacgcgaacgaccgcgcgccgataacaaaaacttaacgaaaaaaccgctaaacctcgcgcgctccgc

SEQ ID NO: 16003 - DNA, 756 bp, Artificial Sequence
  chemically treated genomic DNA (Homo sapiens) CpG-island No: 16003
aaagaagattaattaagttttcgtgtagtgcgtagataggtcgatatatatatatatatatatatatatatattaatatatacgtaaagatagtgagggagcgagaggcgtatttttaggtagttgataatgatacggtttcgattcggacgcgggtttaaagtttttcgattttcggagtgttttttttttcggcgattttcggagattatcgttggcgtattttttcgttttgttcggtttcggcgttttttttttttttcgtagtcgtagtttttcgtttttcgcgaacgcggttttttagtgttttttagaacgttcgcgtggttgtcgggtttcgaattttagggtcgattttagtattcggcgcgcgcgtcgtcgcgtcgtcgattagtttgcggttttcgtattaattattaacggggcggttcgggttgcggcggttcgaggagggggatggtacggaattcgagataggggataattttatttttcgaagcggtcgcgaaattttagtttgggaggttttcgttttttttcggtgcgttcgttttttttttcgcgtttcggttcgtatatttttatttttcgtttcgggggcggcggcggcggaggtattcgtatcgcgcgatgtttagttatcgttgtcgcgttgtcgtcgtagttagtcgcgtcgtcgtcgttgtcgtagcgcgggcggtcgcgcgtcggtagtaggggtttggcgaggaagtcgttgagtttcgcgcgtttcgt

SEQ ID NO: 16004 - DNA, 756 bp, Artificial Sequence
  chemically treated genomic DNA (Homo sapiens) CpG-island No: 16004
acgaaacgcgcgaaactcaacgacttcctcgccaaacccctactaccgacgcgcgaccgcccgcgctacgacaacgacgacgacgcgactaactacgacgacaacgcgacaacgataactaaacatcgcgcgatacgaatacctccgccgccgccgcccccgaaacgaaaaataaaaatatacgaaccgaaacgcgaaaaaaaaaacgaacgcaccgaaaaaaaacgaaaacctcccaaactaaaatttcgcgaccgcttcgaaaaataaaattatcccctatctcgaattccgtaccatccccctcctcgaaccgccgcaacccgaaccgccccgttaataattaatacgaaaaccgcaaactaatcgacgacgcgacgacgcgcgcgccgaatactaaaatcgaccctaaaattcgaaacccgacaaccacgcgaacgttctaaaaaacactaaaaaaccgcgttcgcgaaaaacgaaaaactacgactacgaaaaaaaaaaaaaacgccgaaaccgaacaaaacgaaaaaatacgccaacgataatctccgaaaatcgccgaaaaaaaaaacactccgaaaatcgaaaaactttaaacccgcgtccgaatcgaaaccgtatcattatcaactacctaaaaatacgcctctcgctccctcactatctttacgtatatattaatatatatatatatatatatatatatatatcgacctatctacgcactacacgaaaacttaattaatcttcttt

SEQ ID NO: 16005 - DNA, 517 bp, Artificial Sequence
  chemically treated genomic DNA (Homo sapiens) CpG-island No: 16005
gcggtgagagcgtttcgttaattatttcgataattagttttgttattcgtcgggttatttgtattagttgcgcgtcggttagcgatacgggacgttaggtgtttttgtaattcggaagtaattttatttataattatttgtttcggtttatgagcgtaaattacgcgttcgtggttgtcggtttttagtaggcgattatcgacgttgaggtaggtagtgtcgttgattttttcggtatcgaatagggcgtagttcgcggtgttatcgtcgatgtcgatatttagtattcgatatagtcgttgtttagaaagggtttgtgtttcggtttcgtgatcggcgattacggattcgaggtgcggttcggcgttggtaacgataaaatcgtttagcgattgagagagcgttattatcgtcgggcgagtattgcgggttttcgcgtttttatcggtgatgatgatggtattagaattaacgtttttcggtttaatattcgtagtatgatattgttcgagtatta

SEQ ID NO: 16006 - DNA, 517 bp, Artificial Sequence
  chemically treated genomic DNA (Homo sapiens) CpG-island No: 16006
taatactcgaacaatatcatactacgaatattaaaccgaaaaacgttaattctaataccatcatcatcaccgataaaaacgcgaaaacccgcaatactcgcccgacgataataacgctctctcaatcgctaaacgattttatcgttaccaacgccgaaccgcacctcgaatccgtaatcgccgatcacgaaaccgaaacacaaaccctttctaaacaacgactatatcgaatactaaatatcgacatcgacgataacaccgcgaactacgccctattcgataccgaaaaaatcaacgacactacctacctcaacgtcgataatcgcctactaaaaaccgacaaccacgaacgcgtaatttacgctcataaaccgaaacaaataattataaataaaattacttccgaattacaaaaacacctaacgtcccgtatcgctaaccgacgcgcaactaatacaaataacccgacgaataacaaaactaattatcgaaataattaacgaaacgctctcaccgc

SEQ ID NO: 16007 - DNA, 517 bp, Artificial Sequence
  chemically treated genomic DNA (Homo sapiens) CpG-island No: 16007
taatattcgagtaatattatgttgcgggtattgagtcggaaagcgttgattttggtgttattattattatcggtgaaagcgcgaaaattcgtaatgttcgttcggcggtgatggcgtttttttagtcgttgggcgattttgtcgttgttagcgtcgggtcgtatttcgaattcgtgatcgtcggttacggagtcggggtataaattttttttgaataacggttgtgtcgggtattgaatatcgatatcggcggtggtatcgcgaattacgttttgttcgatgtcggaaaaattagcggtattgtttgttttaacgtcggtggtcgtttgttggaaatcgatagttacgggcgcgtggtttacgtttataaatcggggtagatgattgtggatgaggttgttttcgagttgtagggatatttgacgtttcgtatcgttgatcggcgcgtagttggtgtaggtgattcggcggatggtagaattgattgtcgaagtgattgacggaacgtttttatcgt

SEQ ID NO: 16008 - DNA, 517 bp, Artificial Sequence
  chemically treated genomic DNA (Homo sapiens) CpG-island No: 16008
acgataaaaacgttccgtcaatcacttcgacaatcaattctaccatccgccgaatcacctacaccaactacgcgccgatcaacgatacgaaacgtcaaatatccctacaactcgaaaacaacctcatccacaatcatctaccccgatttataaacgtaaaccacgcgcccgtaactatcgatttccaacaaacgaccaccgacgttaaaacaaacaataccgctaatttttccgacatcgaacaaaacgtaattcgcgataccaccgccgatatcgatattcaatacccgacacaaccgttattcaaaaaaaatttataccccgactccgtaaccgacgatcacgaattcgaaatacgacccgacgctaacaacgacaaaatcgcccaacgactaaaaaaacgccatcaccgccgaacgaacattacgaattttcgcgctttcaccgataataataataacaccaaaatcaacgctttccgactcaatacccgcaacataatattactcgaatatta

SEQ ID NO: 16009 - DNA, 595 bp, Artificial Sequence
  chemically treated genomic DNA (Homo sapiens) CpG-island No: 16009
gaagtacgtattttttttttttcgatagcgtgtttaacgttcgtgaagagcgtatggtattgcgttaggagtaggaatagttgtagtttcgtatttagagtttgatgtagcgtgcgtcggtttggttggtagcgtaaaatagttttaattagttgagcgaatagtgcggcgaagagtttatttttagttaggacgttatcgaatatttgtaatagttgttggagcgtgagcgagaggcgattgttgaacgcgatgaagtgggcgcgcgtaaaaacgtcgtcgatgaagagatcgaacgtttaagttagtttggcggttttgaagattagcgtttgaacgcgttggcggagcgttttggtggtgtgttgttgttagaaatttatgacgacgttagtttggaagatgcgtcgtattttttagcgttgtatggttcgttacgttacgttatcgtggtgttagatttgttataggtaattgaatatttggaaggtttgatcgattgttcggaagatttttatttgatcgaaggagattcgtagttattcgatgatagcgtgtttagcgttgatgagttggaaaaagcggtagtggtgaa

SEQ ID NO: 16010 - DNA, 595 bp, Artificial Sequence
  chemically treated genomic DNA (Homo sapiens) CpG-island No: 16010
ttcaccactaccgctttttccaactcatcaacgctaaacacgctatcatcgaataactacgaatctccttcgatcaaataaaaatcttccgaacaatcgatcaaaccttccaaatattcaattacctataacaaatctaacaccacgataacgtaacgtaacgaaccatacaacgctaaaaaatacgacgcatcttccaaactaacgtcgtcataaatttctaacaacaacacaccaccaaaacgctccgccaacgcgttcaaacgctaatcttcaaaaccgccaaactaacttaaacgttcgatctcttcatcgacgacgtttttacgcgcgcccacttcatcgcgttcaacaatcgcctctcgctcacgctccaacaactattacaaatattcgataacgtcctaactaaaaataaactcttcgccgcactattcgctcaactaattaaaactattttacgctaccaaccaaaccgacgcacgctacatcaaactctaaatacgaaactacaactattcctactcctaacgcaataccatacgctcttcacgaacgttaaacacgctatcgaaaaaaaaaaaatacgtacttc

SEQ ID NO: 16011 - DNA, 595 bp, Artificial Sequence
  chemically treated genomic DNA (Homo sapiens) CpG-island No: 16011
tttattattatcgttttttttagtttattaacgttgaatacgttgttatcgaatgattgcggatttttttcgattagatagagatttttcgggtaatcggttaagttttttaggtgtttagttatttgtgatagatttggtattacgatggcgtggcgtgacgggttatatagcgttgagaagtacggcgtattttttaggttaacgtcgttataaatttttgatagtagtatattattaaaacgtttcgttagcgcgtttagacgttgatttttagagtcgttaggttggtttaaacgttcgatttttttatcgacggcgtttttgcgcgcgtttattttatcgcgtttaataatcgtttttcgtttacgttttagtaattgttgtagatattcggtgacgttttggttggaggtaaatttttcgtcgtattgttcgtttaattggttgagattgttttgcgttgttagttaaatcggcgtacgttgtattaaattttgaatgcgagattgtagttgtttttgtttttggcgtagtgttatgcgttttttacgggcgttagatacgttatcggaaagagagggatgcgtgtttt

SEQ ID NO: 16012 - DNA, 595 bp, Artificial Sequence
  chemically treated genomic DNA (Homo sapiens) CpG-island No: 16012
aaaacacgcatccctctctttccgataacgtatctaacgcccgtaaaaaacgcataacactacgccaaaaacaaaaacaactacaatctcgcattcaaaatttaatacaacgtacgccgatttaactaacaacgcaaaacaatctcaaccaattaaacgaacaatacgacgaaaaatttacctccaaccaaaacgtcaccgaatatctacaacaattactaaaacgtaaacgaaaaacgattattaaacgcgataaaataaacgcgcgcaaaaacgccgtcgataaaaaaatcgaacgtttaaaccaacctaacgactctaaaaatcaacgtctaaacgcgctaacgaaacgttttaataatatactactatcaaaaatttataacgacgttaacctaaaaaatacgccgtacttctcaacgctatataacccgtcacgccacgccatcgtaataccaaatctatcacaaataactaaacacctaaaaaacttaaccgattacccgaaaaatctctatctaatcgaaaaaaatccgcaatcattcgataacaacgtattcaacgttaataaactaaaaaaaacgataataataaa

SEQ ID NO: 16013 - DNA, 726 bp, Artificial Sequence
  chemically treated genomic DNA (Homo sapiens) CpG-island No: 16013
ttagtggcgttatttacgtttttcggaagtgtcgttgtttggtcgtgttgcgcgtgaaagtcgtattgaaagtttttatgtcgagcgtgaagtgtttttcgaacgtttcgcgtacgttatttttttgatgtatagaatatttagcgtttgtattaggcgtttagtcgttttatcggtagttatttggcggttgcgtttgagtttgattcggaagtagaaattcgttaattgaatagtcgtcgcgtcgaattggagcgggcgttaagtaattatgaatatgattattagtagtagcgtatttagtttgagtaagcgaaagagggcgttacggcgtatgaatttgttttttgtcgcgtttttaatttgttggttgatgataggtttggcggatcgcgtcgatgaaattcgcgaacgtttggatgaagtttaggaagtcgcgcgtcgtgtttagtaagtttggttattaattggcgaaattggaatcgatggtttcggtattgtcgaacgattcggaatagttcgaattagttagagagaagattacgcgtatttttaggtagatgcgcggcgatgcgcgtagagtaggcgtgtgttttgacggtaattgtgtagtagcgtgcggatttaaggtaagatgggtcggagttatatgttatcggatagcgggaattcgcggatgttttcggtgaattttggaatcggcggcgcggtaggtattcggcgttt

SEQ ID NO: 16014 - DNA, 726 bp, Artificial Sequence
  chemically treated genomic DNA (Homo sapiens) CpG-island No: 16014
aaacgccgaatacctaccgcgccgccgattccaaaattcaccgaaaacatccgcgaattcccgctatccgataacatataactccgacccatcttaccttaaatccgcacgctactacacaattaccgtcaaaacacacgcctactctacgcgcatcgccgcgcatctacctaaaaatacgcgtaatcttctctctaactaattcgaactattccgaatcgttcgacaataccgaaaccatcgattccaatttcgccaattaataaccaaacttactaaacacgacgcgcgacttcctaaacttcatccaaacgttcgcgaatttcatcgacgcgatccgccaaacctatcatcaaccaacaaattaaaaacgcgacaaaaaacaaattcatacgccgtaacgccctctttcgcttactcaaactaaatacgctactactaataatcatattcataattacttaacgcccgctccaattcgacgcgacgactattcaattaacgaatttctacttccgaatcaaactcaaacgcaaccgccaaataactaccgataaaacgactaaacgcctaatacaaacgctaaatattctatacatcaaaaaaataacgtacgcgaaacgttcgaaaaacacttcacgctcgacataaaaactttcaatacgactttcacgcgcaacacgaccaaacaacgacacttccgaaaaacgtaaataacgccactaa

SEQ ID NO: 16015 - DNA, 726 bp, Artificial Sequence
  chemically treated genomic DNA (Homo sapiens) CpG-island No: 16015
gagcgtcgggtatttatcgcgtcgtcggttttagagtttatcgagggtattcgcgaattttcgttgttcggtagtatgtggtttcgatttattttattttaagttcgtacgttgttgtataattgtcgttagggtatacgtttgttttacgcgtatcgtcgcgtatttgtttgagagtacgcgtaattttttttttgattggttcgaattgtttcgggtcgttcggtaatatcgaaattatcggttttagtttcgttagttgatggttaagtttgttgaatacgacgcgcggttttttgggttttatttagacgttcgcggattttatcgacgcgattcgttaggtttgttattagttaataggttgagagcgcggtagaaggtaggtttatgcgtcgtaacgttttttttcgtttgtttaaattgaatacgttgttgttggtgattatgtttatgattatttaacgttcgttttagttcgacgcgacggttgtttagttgacggatttttgttttcgggttagatttaaacgtaatcgttagatgattgtcgataaagcggttgaacgtttgatgtagacgttgagtgttttgtatattaaaggagtagcgtgcgcgaagcgttcggaaagtattttacgttcggtatggaggtttttaatacggtttttacgcgtagtacgattaaatagcggtattttcgggaaacgtgaataacgttattga

SEQ ID NO: 16016 - DNA, 726 bp, Artificial Sequence
  chemically treated genomic DNA (Homo sapiens) CpG-island No: 16016
tcaataacgttattcacgtttcccgaaaataccgctatttaatcgtactacgcgtaaaaaccgtattaaaaacctccataccgaacgtaaaatactttccgaacgcttcgcgcacgctactcctttaatatacaaaacactcaacgtctacatcaaacgttcaaccgctttatcgacaatcatctaacgattacgtttaaatctaacccgaaaacaaaaatccgtcaactaaacaaccgtcgcgtcgaactaaaacgaacgttaaataatcataaacataatcaccaacaacaacgtattcaatttaaacaaacgaaaaaaaacgttacgacgcataaacctaccttctaccgcgctctcaacctattaactaataacaaacctaacgaatcgcgtcgataaaatccgcgaacgtctaaataaaacccaaaaaaccgcgcgtcgtattcaacaaacttaaccatcaactaacgaaactaaaaccgataatttcgatattaccgaacgacccgaaacaattcgaaccaatcaaaaaaaaaattacgcgtactctcaaacaaatacgcgacgatacgcgtaaaacaaacgtataccctaacgacaattatacaacaacgtacgaacttaaaataaaataaatcgaaaccacatactaccgaacaacgaaaattcgcgaataccctcgataaactctaaaaccgacgacgcgataaatacccgacgctc

SEQ ID NO: 16017 - DNA, 503 bp, Artificial Sequence
  chemically treated genomic DNA (Homo sapiens) CpG-island No: 16017
  unsure (74, 121, 386, 493)
tttgcgttagttgaaacgtaaaggttttgtcgatgcgcgtttggtaatatattgggttggggtcgttatcgcgnaaaagcggaaattcgtaagttgcgtgattagtatgatttgtattcgngtttataagcgcgtggatatttgtgcggtagagttcgttatcgatatcgtttatatgtattttatttatgaagaagagtgcgaagcgaattcgtttatcgatcgtgaaaaaattatggtgtttggcggcggttcgaatcgtatcggttagggtatcgaattcgattattgttgcgtatacgtttcgttggcgttgcgcgaagacggttacgaaattattatggttaattgtaattcggaaatcgtttttatcggattacgatatntttcgaatcgtttttatttcgagtcggtaattttggaagatgtgttggaaatcgtgcgtatcgagaagtcgaaaggcgttatcgtttagtacggcggttagattttngttgaaattt

SEQ ID NO: 16018 - DNA, 503 bp, Artificial Sequence
  chemically treated genomic DNA (Homo sapiens) CpG-island No: 16018
  unsure (11, 118, 383, 430)
aaatttcaacnaaaatctaaccgccgtactaaacgataacgcctttcgacttctcgatacgcacgatttccaacacatcttccaaaattaccgactcgaaataaaaacgattcgaaanatatcgtaatccgataaaaacgatttccgaattacaattaaccataataatttcgtaaccgtcttcgcgcaacgccaacgaaacgtatacgcaacaataatcgaattcgataccctaaccgatacgattcgaaccgccgccaaacaccataattttttcacgatcgataaacgaattcgcttcgcactcttcttcataaataaaatacatataaacgatatcgataacgaactctaccgcacaaatatccacgcgcttataaacncgaatacaaatcatactaatcacgcaacttacgaatttccgcttttncgcgataacgaccccaacccaatatattaccaaacgcgcatcgacaaaacctttacgtttcaactaacgcaaa

SEQ ID NO: 16019 - DNA, 503 bp, Artificial Sequence
  chemically treated genomic DNA (Homo sapiens) CpG-island No: 16019
  unsure (11, 118, 383, 430)
aagttttagtnggggtttgatcgtcgtattggacgataacgtttttcggtttttcgatacgtacgatttttagtatattttttagagttatcggttcgaagtagaggcggttcggaangtgtcgtagttcggtggagacggttttcgggttatagttaattataatggtttcgtaatcgttttcgcgtagcgttagcgaggcgtgtacgtaatagtagtcgaattcgatattttgatcgatacggttcgggtcgtcgttaagtattatgatttttttacggtcggtagacggattcgtttcgtatttttttttataagtggagtatatgtaagcggtgtcggtggcgaattttgtcgtataggtatttacgcgtttataaatncgggtgtaggttatattggttacgtagtttacggattttcgtttttncgcggtagcggttttagtttagtgtgttgttaagcgcgtatcggtaaagtttttgcgttttagttggcgtagg

SEQ ID NO: 16020 - DNA, 503 bp, Artificial Sequence
  chemically treated genomic DNA (Homo sapiens) CpG-island No: 16020
  unsure (74, 121, 386, 493)
cctacgccaactaaaacgcaaaaactttaccgatacgcgcttaacaacacactaaactaaaaccgctaccgcgnaaaaacgaaaatccgtaaactacgtaaccaatataacctacacccgnatttataaacgcgtaaatacctatacgacaaaattcgccaccgacaccgcttacatatactccacttataaaaaaaaatacgaaacgaatccgtctaccgaccgtaaaaaaatcataatacttaacgacgacccgaaccgtatcgatcaaaatatcgaattcgactactattacgtacacgcctcgctaacgctacgcgaaaacgattacgaaaccattataattaactataacccgaaaaccgtctccaccgaactacgacacnttccgaaccgcctctacttcgaaccgataactctaaaaaatatactaaaaatcgtacgtatcgaaaaaccgaaaaacgttatcgtccaatacgacgatcaaaccccnactaaaactt

SEQ ID NO: 16021 - DNA, 504 bp, Artificial Sequence
  chemically treated genomic DNA (Homo sapiens) CpG-island No: 16021
gcggcggcgtaatgtaggtatttcggatttatcgtagatatatagttgatacgcgtaatttttcggtattattagcgaatcgcgcggatttgttatcgtaagtttatcgttcggttgcgtttgtatcgtttagtcgttggcgattttatcgtcgtgaataaagaaattaatcgttagtttatggcgtagttcgttatatagcggcgtatagttacgcgacggtgggcgtggttttttcggttagacgatgttttttttcgttatcgttggcggtataaagtgagcgttaggttgaggaaagaagagtttgttgtgatcgttaaagttacgcgatgtaaaatcgtttagcgtttcgtcgtcgaggataatgcgttgaaaatcggcgttgatgcgtttaacgcgtaatatagttagtttacggaagcgtagattattgcgaacgcgttgcgggtagcggggggtgttatttattgttatcgttttcgtgatggttattagatatat

SEQ ID NO: 16022 - DNA, 504 bp, Artificial Sequence
  chemically treated genomic DNA (Homo sapiens) CpG-island No: 16022
atatatctaataaccatcacgaaaacgataacaataaataacaccccccgctacccgcaacgcgttcgcaataatctacgcttccgtaaactaactatattacgcgttaaacgcatcaacgccgattttcaacgcattatcctcgacgacgaaacgctaaacgattttacatcgcgtaactttaacgatcacaacaaactcttctttcctcaacctaacgctcactttataccgccaacgataacgaaaaaaaacatcgtctaaccgaaaaaaccacgcccaccgtcgcgtaactatacgccgctatataacgaactacgccataaactaacgattaatttctttattcacgacgataaaatcgccaacgactaaacgatacaaacgcaaccgaacgataaacttacgataacaaatccgcgcgattcgctaataataccgaaaaattacgcgtatcaactatatatctacgataaatccgaaatacctacattacgccgccgc

SEQ ID NO: 16023 - DNA, 504 bp, Artificial Sequence
  chemically treated genomic DNA (Homo sapiens) CpG-island No: 16023
atatatttgatgattattacgaaggcgataataatgaataatatttttcgttattcgtagcgcgttcgtaatgatttgcgttttcgtgaattgattgtgttacgcgttgagcgtattagcgtcggtttttagcgtattgttttcggcggcgaggcgttggacggttttatatcgcgtggttttgacgattatagtaaatttttttttttttaatttgacgtttattttgtgtcgttaacggtaacggaagagggtatcgtttggtcggaaggattacgtttatcgtcgcgtgattatacgtcgttgtatgacgaattacgttatgaattggcgattgatttttttatttacgacggtggggtcgttagcggttgggcgatgtaggcgtaatcgggcgataaatttacggtggtaggttcgcgcggttcgttggtggtgtcggaagattacgcgtattagttgtatgtttgcgatgaattcggaatgtttgtattgcgtcgtcgt

SEQ ID NO: 16024 - DNA, 504 bp, Artificial Sequence
  chemically treated genomic DNA (Homo sapiens) CpG-island No: 16024
acgacgacgcaatacaaacattccgaattcatcgcaaacatacaactaatacgcgtaatcttccgacaccaccaacgaaccgcgcgaacctaccaccgtaaatttatcgcccgattacgcctacatcgcccaaccgctaacgaccccaccgtcgtaaataaaaaaatcaatcgccaattcataacgtaattcgtcatacaacgacgtataatcacgcgacgataaacgtaatccttccgaccaaacgataccctcttccgttaccgttaacgacacaaaataaacgtcaaattaaaaaaaaaaaaatttactataatcgtcaaaaccacgcgatataaaaccgtccaacgcctcgccgccgaaaacaatacgctaaaaaccgacgctaatacgctcaacgcgtaacacaatcaattcacgaaaacgcaaatcattacgaacgcgctacgaataacgaaaaatattattcattattatcgccttcgtaataatcatcaaatatat

SEQ ID NO: 16025 - DNA, 1070 bp, Artificial Sequence
  chemically treated genomic DNA (Homo sapiens) CpG-island No: 16025
tgtcgtcgtgtttatggtttatatgttttcgtcggtggtttagtaacgtttttagcgttatagtcgttagggtaaatttttcggtttattcgggagattatcgagttgattttcgtatttgggttaatgttggttaacgtattgtagcgtgtattaagtttttcgatagttagcgttttttttgtaatatttaggttttcgttatttgttagtttattttgattgattttatttttatttatcgttagcgttttttttttgaataaaatagtcgaatttatttgttcggtgaatgtttttatcgtttgcgtcgatttattaagatcgacgatggtcgcgttgttgatgtttagttttcgggtgttgttaagtgtattattcgtatcggtacgtaatgtttttatttgaacgtaggttgttttttgatagtcgttttgatcgttggaaagcgaaatttgtcgtatcgtattgattgttagattttttttattatcgatttttgtcgatatatcggtcgttgcgttataggtttcgttatgttcggttaacgttagtttttgtttattatggatgtttagcgtttttagtttatagttaacgtataaattattatttggtgcggtcgtgaggcggaatttataattattttcggcgattatcgtttcgttttgcgtaatgtgtaacgttttgttcgtttttatttcgtcgttttgtaaattacgtaacgttaatgagttattcgatttaataatcgtttgcgtttttattagttgaacgtcgatatggttatcgtcgtgttttagtaaattgagcgtcgttagagggttattcgttatgggattattttacggtttaggtacgtcgataagtacgtcgttcgtttcgtttatttgatagttacggtttttttaggtgtagttattcgcgtcgataattagcgtatcgacgttgatatattttttcgcgagcgtcgtagtaagaatattcgtatcgaatatgatggtatttttttttatgggtagtttatttatggattgttttttatttttatcgattggtattttttgtcg

SEQ ID NO: 16026 - DNA, 1070 bp, Artificial Sequence
  chemically treated genomic DNA (Homo sapiens) CpG-island No: 16026
cgacaaaaaataccaatcgataaaaataaaaaacaatccataaataaactacccataaaaaaaaataccatcatattcgatacgaatattcttactacgacgctcgcgaaaaaatatatcaacgtcgatacgctaattatcgacgcgaataactacacctaaaaaaaccgtaactatcaaataaacgaaacgaacgacgtacttatcgacgtacctaaaccgtaaaataatcccataacgaataaccctctaacgacgctcaatttactaaaacacgacgataaccatatcgacgttcaactaataaaaacgcaaacgattattaaatcgaataactcattaacgttacgtaatttacaaaacgacgaaataaaaacgaacaaaacgttacacattacgcaaaacgaaacgataatcgccgaaaataattataaattccgcctcacgaccgcaccaaataataatttatacgttaactataaactaaaaacgctaaacatccataataaacaaaaactaacgttaaccgaacataacgaaacctataacgcaacgaccgatatatcgacaaaaatcgataataaaaaaaatctaacaatcaatacgatacgacaaatttcgctttccaacgatcaaaacgactatcaaaaaacaacctacgttcaaataaaaacattacgtaccgatacgaataatacacttaacaacacccgaaaactaaacatcaacaacgcgaccatcgtcgatcttaataaatcgacgcaaacgataaaaacattcaccgaacaaataaattcgactattttattcaaaaaaaaaacgctaacgataaataaaaataaaatcaatcaaaataaactaacaaataacgaaaacctaaatattacaaaaaaaacgctaactatcgaaaaacttaatacacgctacaatacgttaaccaacattaacccaaatacgaaaatcaactcgataatctcccgaataaaccgaaaaatttaccctaacgactataacgctaaaaacgttactaaaccaccgacgaaaacatataaaccataaacacgacgaca

SEQ ID NO: 16027 - DNA, 1070 bp, Artificial Sequence
  chemically treated genomic DNA (Homo sapiens) CpG-island No: 16027
cgatagggaatattaatcggtaaaagtgggagataatttatgggtggattgtttatgaaggggggtattattatgttcgatacggatatttttgttgcgacgttcgcggaggaatatattagcgtcgatacgttggttgtcggcgcgggtgattatatttggaaaggtcgtaattattaggtaaacgggacgggcgacgtgtttatcgacgtgtttaaatcgtggaatgattttatggcgaataattttttgacgacgtttaatttgttggaatacgacgatagttatgtcggcgtttaattggtgaaggcgtaaacggttattgggtcgggtggtttattaacgttacgtgatttatagggcgacgaggtggaagcggataaaacgttatatattgcgtaaaacggaacggtggtcgtcgagggtgattatggatttcgttttacgatcgtattaggtaatggtttgtacgttaattatgggttgaaagcgttgaatatttatggtgggtaaaagttgacgttagtcgaatatggcggagtttatggcgtaacggtcgatatgtcggtaaaaatcggtggtgaaggggatttggtaattaatacggtgcgataggtttcgttttttaacggttagaacgattattagggggtaatttacgtttagatggggatattacgtatcgatgcggatggtgtatttggtaatattcgggaattgaatattagtaacgcggttatcgtcgattttaatggatcgacgtagacggtagagatatttatcgggtagatgggttcgattgttttgtttaaagagggggcgttgacggtaaataaaggtgggattagttagggtgaattgataggtggcggaaatttgaatgttatagggggaacgttggttatcgaggggtttaatgtacgttataatgcgttaattagtattagtttaaatgcggaagttagttcgataatttttcgggtaagtcgaggaatttgttttgacggttgtaacgttaaaaacgttgttgggttatcggcgggaatatataggttataaatacggcggta

SEQ ID NO: 16028 - DNA, 1070 bp, Artificial Sequence
  chemically treated genomic DNA (Homo sapiens) CpG-island No: 16028
taccgccgtatttataacctatatattcccgccgataacccaacaacgtttttaacgttacaaccgtcaaaacaaattcctcgacttacccgaaaaattatcgaactaacttccgcatttaaactaatactaattaacgcattataacgtacattaaacccctcgataaccaacgttccccctataacattcaaatttccgccacctatcaattcaccctaactaatcccacctttatttaccgtcaacgccccctctttaaacaaaacaatcgaacccatctacccgataaatatctctaccgtctacgtcgatccattaaaatcgacgataaccgcgttactaatattcaattcccgaatattaccaaatacaccatccgcatcgatacgtaatatccccatctaaacgtaaattaccccctaataatcgttctaaccgttaaaaaacgaaacctatcgcaccgtattaattaccaaatccccttcaccaccgatttttaccgacatatcgaccgttacgccataaactccgccatattcgactaacgtcaacttttacccaccataaatattcaacgctttcaacccataattaacgtacaaaccattacctaatacgatcgtaaaacgaaatccataatcaccctcgacgaccaccgttccgttttacgcaatatataacgttttatccgcttccacctcgtcgccctataaatcacgtaacgttaataaaccacccgacccaataaccgtttacgccttcaccaattaaacgccgacataactatcgtcgtattccaacaaattaaacgtcgtcaaaaaattattcgccataaaatcattccacgatttaaacacgtcgataaacacgtcgcccgtcccgtttacctaataattacgacctttccaaatataatcacccgcgccgacaaccaacgtatcgacgctaatatattcctccgcgaacgtcgcaacaaaaatatccgtatcgaacataataataccccccttcataaacaatccacccataaattatctcccacttttaccgattaatattccctatcg

SEQ ID NO: 16029 - DNA, 954 bp, Artificial Sequence
  chemically treated genomic DNA (Homo sapiens) CpG-island No: 16029
tcgtttatagtcgggtgtcgttcggtaaaaagtcgtgggcgtgtaggttcgggtgcgtttgtcgtcgcgttagttcgcgcgcgttttttttcggcgttagcgggttgttcgcggtgtcgatgaagtttacgttgttagttaacgttagacgatttacggtaatttcgatgatgtcgttatcgcgtagtttgttaatcggttcgttcgttagcgttttcggcgatacgtggtcgaagtaggcgttcgtcgatacgttcgagaagcgcgtatcggtgatgagcgatatcgttttgttttacgagatatgttttagcgcggaggtgagttggtaggttttttttatgtcggtgtcggacggttcgtcgtcgattattattatgatatcgttttgtataattttttttcgtttgatcgttttgatcgtttgcgttttcgagataaatattcgtattcggtcggtgtggtggtatacgttattttcgtttattatcgacgggtcgatcgtcgtggttttgattatcgaatttttcggcgcgatgttgttcgtcgggaagtagatcgtcgaggttagttttttcgtttttgtttttttcggcggtaggattacgttattcggttttacgtcgttttgttcgcgtaggtattggcggaagcgcgttcggcgttcggacgtttgttattatttaaggttttcgtttatcgtttggtcggttacggttatggcgtttagatgtagtaggtcgaggtcgcgtaggttgagtattattttcggtacgtcgttcgcgatgaaagcgcgttcgtcgggtgatagtttcggtcgtggtgcgtatcgtattagagcgggggatttcgggggtggtcgtttcgggtacgattcgggtgttgtgtttttcgtttggaatgcggaaggttgcggttttggtggcgggttatcgcggttattttacgttttgg

SEQ ID NO: 16030 - DNA, 954 bp, Artificial Sequence
  chemically treated genomic DNA (Homo sapiens) CpG-island No: 16030
ccaaaacgtaaaataaccgcgataacccgccaccaaaaccgcaaccttccgcattccaaacgaaaaacacaacacccgaatcgtacccgaaacgaccacccccgaaatcccccgctctaatacgatacgcaccacgaccgaaactatcacccgacgaacgcgctttcatcgcgaacgacgtaccgaaaataatactcaacctacgcgacctcgacctactacatctaaacgccataaccgtaaccgaccaaacgataaacgaaaaccttaaataataacaaacgtccgaacgccgaacgcgcttccgccaatacctacgcgaacaaaacgacgtaaaaccgaataacgtaatcctaccgccgaaaaaaacaaaaacgaaaaaactaacctcgacgatctacttcccgacgaacaacatcgcgccgaaaaattcgataatcaaaaccacgacgatcgacccgtcgataataaacgaaaataacgtataccaccacaccgaccgaatacgaatatttatctcgaaaacgcaaacgatcaaaacgatcaaacgaaaaaaaattatacaaaacgatatcataataataatcgacgacgaaccgtccgacaccgacataaaaaaaacctaccaactcacctccgcgctaaaacatatctcgtaaaacaaaacgatatcgctcatcaccgatacgcgcttctcgaacgtatcgacgaacgcctacttcgaccacgtatcgccgaaaacgctaacgaacgaaccgattaacaaactacgcgataacgacatcatcgaaattaccgtaaatcgtctaacgttaactaacaacgtaaacttcatcgacaccgcgaacaacccgctaacgccgaaaaaaaacgcgcgcgaactaacgcgacgacaaacgcacccgaacctacacgcccacgactttttaccgaacgacacccgactataaacga

SEQ ID NO: 16031 - DNA, 954 bp, Artificial Sequence
  chemically treated genomic DNA (Homo sapiens) CpG-island No: 16031
ttaaagcgtggagtaatcgcggtggttcgttattaaggtcgtaatttttcgtattttaaacggggggtataatattcgggtcgtgttcgggacggttattttcgaaatttttcgttttggtgcggtgcgtattacggtcggaattattattcgacgggcgcgtttttatcgcgggcggcgtgtcggaggtgatgtttaatttgcgcgatttcggtttgttgtatttggacgttatgatcgtgatcggttagacggtgggcgagaattttgaatggtggtaggcgttcgagcgtcgggcgcgttttcgttagtgtttgcgcgagtaggacggcgtagagtcggatgacgtgattttgtcgtcggagaaggtaaaagcgaaagggttgatttcgacggtttgtttttcgacgggtaatatcgcgtcggaaggttcggtgattaaggttacggcgatcgattcgtcggtggtgggcgaagatggcgtatattattatatcggtcgggtgcgggtgtttgtttcggaagcgtaggcgattaaggcgattaagcgggaagagattgtgtagggcgatattatggtggtgatcggcggcgggtcgttcggtatcggtatggaagagatttattagtttattttcgcgttaaagtatatttcgtggggtaagacggtgtcgtttattatcgatgcgcgtttttcgggcgtgtcgacgggcgtttgtttcggttacgtgtcgtcggaggcgttggcgggcgggtcgattggtaagttgcgcgataacgatattatcgagattgtcgtggatcgtttgacgttaattggtagcgtgaattttatcggtatcgcggataattcgttgacgtcggaagagggcgcgcgcgagttggcgcggcggtagacgtattcggatttgtacgtttacgattttttgtcggacgatattcggttgtgggcgg

SEQ ID NO: 16032 - DNA, 954 bp, Artificial Sequence
  chemically treated genomic DNA (Homo sapiens) CpG-island No: 16032
ccgcccacaaccgaatatcgtccgacaaaaaatcgtaaacgtacaaatccgaatacgtctaccgccgcgccaactcgcgcgcgccctcttccgacgtcaacgaattatccgcgataccgataaaattcacgctaccaattaacgtcaaacgatccacgacaatctcgataatatcgttatcgcgcaacttaccaatcgacccgcccgccaacgcctccgacgacacgtaaccgaaacaaacgcccgtcgacacgcccgaaaaacgcgcatcgataataaacgacaccgtcttaccccacgaaatatactttaacgcgaaaataaactaataaatctcttccataccgataccgaacgacccgccgccgatcaccaccataatatcgccctacacaatctcttcccgcttaatcgccttaatcgcctacgcttccgaaacaaacacccgcacccgaccgatataataatatacgccatcttcgcccaccaccgacgaatcgatcgccgtaaccttaatcaccgaaccttccgacgcgatattacccgtcgaaaaacaaaccgtcgaaatcaaccctttcgcttttaccttctccgacgacaaaatcacgtcatccgactctacgccgtcctactcgcgcaaacactaacgaaaacgcgcccgacgctcgaacgcctaccaccattcaaaattctcgcccaccgtctaaccgatcacgatcataacgtccaaatacaacaaaccgaaatcgcgcaaattaaacatcacctccgacacgccgcccgcgataaaaacgcgcccgtcgaataataattccgaccgtaatacgcaccgcaccaaaacgaaaaatttcgaaaataaccgtcccgaacacgacccgaatattataccccccgtttaaaatacgaaaaattacgaccttaataacgaaccaccgcgattactccacgctttaa

SEQ ID NO: 16033 - DNA, 623 bp, Artificial Sequence
  chemically treated genomic DNA (Homo sapiens) CpG-island No: 16033
ggtatcgttttgggtaatgttaagtttattcgttagcgatttttcgatttttataaattgttttggttgtaaaatcgcgtttaatagcgcgtgtttggtttagtagtggaagtgttcggttagacgataggtggtttcgatatacgggaatttatcggttttatttaatgtttcggcgtcgtttttaaagatacgtgtagtcgggttcgagataacgtttggatgtagcgggttagtttttagcggcgttttaaacggttcgtagtgtttcgggaacggatttttcgttattttatcgagggtaaatagacgttttatgtttttttgttgtatgataaacggttcgacgtcgttattcggaggcgttgcgttgtagttcggaatattttagtcggtttatttagtgtcgttttattttagtaattgacgtttcggattttacgggttattttgcggatttgcggaggcgcggttatatagaatgcggcggttaagcggttatgtttatgtttagtttagcgtgttatcgaggttagacggatcggcgttattacggcgtgttatttggttgtttttcggcgtttagttatcggcgaaaatttagtagatataggaggttgtat

SEQ ID NO: 16034 - DNA, 623 bp, Artificial Sequence
  chemically treated genomic DNA (Homo sapiens) CpG-island No: 16034
atacaacctcctatatctactaaattttcgccgataactaaacgccgaaaaacaaccaaataacacgccgtaataacgccgatccgtctaacctcgataacacgctaaactaaacataaacataaccgcttaaccgccgcattctatataaccgcgcctccgcaaatccgcaaaataacccgtaaaatccgaaacgtcaattactaaaataaaacgacactaaataaaccgactaaaatattccgaactacaacgcaacgcctccgaataacgacgtcgaaccgtttatcatacaacaaaaaaacataaaacgtctatttaccctcgataaaataacgaaaaatccgttcccgaaacactacgaaccgtttaaaacgccgctaaaaactaacccgctacatccaaacgttatctcgaacccgactacacgtatctttaaaaacgacgccgaaacattaaataaaaccgataaattcccgtatatcgaaaccacctatcgtctaaccgaacacttccactactaaaccaaacacgcgctattaaacgcgattttacaaccaaaacaatttataaaaatcgaaaaatcgctaacgaataaacttaacattacccaaaacgatacc

SEQ ID NO: 16035 - DNA, 623 bp, Artificial Sequence
  chemically treated genomic DNA (Homo sapiens) CpG-island No: 16035
gtataattttttgtgtttgttggattttcgtcggtagttggacgtcggaaggtaattagatggtacgtcgtgataacgtcgattcgtttggtttcggtaatacgttgggttgggtatgggtatggtcgtttaatcgtcgtattttgtataatcgcgttttcgtagattcgtagggtaattcgtgggattcgaagcgttagttgttgaaatgggacggtattaagtggatcggttgggatatttcggattatagcgtagcgttttcgggtagcggcgtcgggtcgtttattatgtagtaggaaggtatggggcgtttgtttgttttcgataagatggcggaaggttcgttttcggaatattacgagtcgtttgaaacgtcgttgggaattaattcgttgtatttaaacgttatttcgaattcggttgtacgtatttttaaagacgacgtcgaagtattgggtaaagtcgataagttttcgtatgtcggaattatttatcgtttgatcgagtatttttattattggattaaatacgcgttgttgaacgcgattttgtagttagagtagtttgtggaaatcggggagtcgttggcgaataaatttggtattgtttagggcgatatt

SEQ ID NO: 16036 - DNA, 623 bp, Artificial Sequence
  chemically treated genomic DNA (Homo sapiens) CpG-island No: 16036
aatatcgccctaaacaataccaaatttattcgccaacgactccccgatttccacaaactactctaactacaaaatcgcgttcaacaacgcgtatttaatccaataataaaaatactcgatcaaacgataaataattccgacatacgaaaacttatcgactttacccaatacttcgacgtcgtctttaaaaatacgtacaaccgaattcgaaataacgtttaaatacaacgaattaattcccaacgacgtttcaaacgactcgtaatattccgaaaacgaaccttccgccatcttatcgaaaacaaacaaacgccccataccttcctactacataataaacgacccgacgccgctacccgaaaacgctacgctataatccgaaatatcccaaccgatccacttaataccgtcccatttcaacaactaacgcttcgaatcccacgaattaccctacgaatctacgaaaacgcgattatacaaaatacgacgattaaacgaccatacccatacccaacccaacgtattaccgaaaccaaacgaatcgacgttatcacgacgtaccatctaattaccttccgacgtccaactaccgacgaaaatccaacaaacacaaaaaattatac

SEQ ID NO: 16037 - DNA, 856 bp, Artificial Sequence
  chemically treated genomic DNA (Homo sapiens) CpG-island No: 16037
gtggttagcgtgggaataatcgatagattgatattcgcggtatgggttcggaaaatacgttgattttgattgacggtaagtcggtaagtagtcgtaattcggtgcgttagggttggcgtggcgagcgcgatattcgtggtgatattttttgggtgttatttgaaatgattgaacgtattgaagttttgcgtggttcggtagttgcgcgttatggtaacggcgcggcgggcggcgtggttaatattattattaaaaaaggtagcggcgagtggtacggtttttgggacgtatattttaatgcgttagaatataaagaggaaggtgttattaaacgtattaattttagtttgatcggttcgttgggcgacgaatttagttttcgtttgtatggtaatttcgataaaatttaggttgacgcgtgggatattaattagggttattagttcgcgcgtgtcggaacgtatgttacgacgttattagtcgggcgcgaaggggtaattaataaagatattaatggcgtggtgcgttgggatttcgcgttattgtaatcgttggaattggaagtaggttatagtcgttagggtaatttgtatgcgggcgatatttagaatattaatttcgatttttatattcgttcgaaatatggcgatgaaattaagcgtttgtatcgttagaattacgcgttgattggaacggtggtgcgatacggcgtgataataatattggtgcgaagaaaattcgtagtgcgatttcggaggcgcggcggattaaggaattacgaaatttatcggttgtgataagtttaacgatttttttaagaattcgaagatttttttaatttcgtttgcggtttatt

SEQ ID NO: 16038 - DNA, 856 bp, Artificial Sequence
  chemically treated genomic DNA (Homo sapiens) CpG-island No: 16038
aataaaccgcaaacgaaattaaaaaaatcttcgaattcttaaaaaaatcgttaaacttatcacaaccgataaatttcgtaattccttaatccgccgcgcctccgaaatcgcactacgaattttcttcgcaccaatattattatcacgccgtatcgcaccaccgttccaatcaacgcgtaattctaacgatacaaacgcttaatttcatcgccatatttcgaacgaatataaaaatcgaaattaatattctaaatatcgcccgcatacaaattaccctaacgactataacctacttccaattccaacgattacaataacgcgaaatcccaacgcaccacgccattaatatctttattaattaccccttcgcgcccgactaataacgtcgtaacatacgttccgacacgcgcgaactaataaccctaattaatatcccacgcgtcaacctaaattttatcgaaattaccatacaaacgaaaactaaattcgtcgcccaacgaaccgatcaaactaaaattaatacgtttaataacaccttcctctttatattctaacgcattaaaatatacgtcccaaaaaccgtaccactcgccgctaccttttttaataataatattaaccacgccgcccgccgcgccgttaccataacgcgcaactaccgaaccacgcaaaacttcaatacgttcaatcatttcaaataacacccaaaaaatatcaccacgaatatcgcgctcgccacgccaaccctaacgcaccgaattacgactacttaccgacttaccgtcaatcaaaatcaacgtattttccgaacccataccgcgaatatcaatctatcgattattcccacgctaaccac

SEQ ID NO: 16039 - DNA, 856 bp, Artificial Sequence
  chemically treated genomic DNA (Homo sapiens) CpG-island No: 16039
ggtgaatcgtagacggggttgaagagattttcgaatttttgggaagatcgttaagtttattataatcggtgggtttcgtaattttttggttcgtcgcgttttcggaatcgtattacgggtttttttcgtattagtgttgttgttacgtcgtatcgtattatcgttttagttagcgcgtagttttggcgatatagacgtttggttttatcgttatatttcgagcgggtataggaatcggagttggtattttgggtgtcgttcgtatataggttattttggcggttgtaatttgtttttagttttagcgattgtaatggcgcgaaattttagcgtattacgttattaatatttttgttgattattttttcgcgttcggttggtaacgtcgtggtatacgtttcggtacgcgcggattgatggttttggttgatattttacgcgttagtttgggttttgtcgaggttgttatataaacggaagttgaattcgtcgtttagcggatcggttaggttaaagttagtgcgtttggtggtatttttttttttatgttttggcgtattgaaatatgcgttttaggagtcgtgttattcgtcgttgttttttttggtaatgatgttaattacgtcgttcgtcgcgtcgttgttataacgcgtagttgtcggattacgtagaattttaatacgtttaattattttaggtggtatttaggaagtattattacgggtatcgcgttcgttacgttagttttgacgtatcgagttacggttgtttatcggtttgtcgttaattaaaattagcgtgtttttcggatttatatcgcgaatattaatttgtcggttatttttacgttgattat

SEQ ID NO: 16040 - DNA, 856 bp, Artificial Sequence
  chemically treated genomic DNA (Homo sapiens) CpG-island No: 16040
ataatcaacgtaaaaataaccgacaaattaatattcgcgatataaatccgaaaaacacgctaattttaattaacgacaaaccgataaacaaccgtaactcgatacgtcaaaactaacgtaacgaacgcgatacccgtaataatacttcctaaataccacctaaaataattaaacgtattaaaattctacgtaatccgacaactacgcgttataacaacgacgcgacgaacgacgtaattaacatcattaccaaaaaaaacaacgacgaataacacgactcctaaaacgcatatttcaatacgccaaaacataaaaaaaaaaataccaccaaacgcactaactttaacctaaccgatccgctaaacgacgaattcaacttccgtttatataacaacctcgacaaaacccaaactaacgcgtaaaatatcaaccaaaaccatcaatccgcgcgtaccgaaacgtataccacgacgttaccaaccgaacgcgaaaaaataatcaacaaaaatattaataacgtaatacgctaaaatttcgcgccattacaatcgctaaaactaaaaacaaattacaaccgccaaaataacctatatacgaacgacacccaaaataccaactccgattcctatacccgctcgaaatataacgataaaaccaaacgtctatatcgccaaaactacgcgctaactaaaacgataatacgatacgacgtaacaacaacactaatacgaaaaaaacccgtaatacgattccgaaaacgcgacgaaccaaaaaattacgaaacccaccgattataataaacttaacgatcttcccaaaaattcgaaaatctcttcaaccccgtctacgattcacc

SEQ ID NO: 16041 - DNA, 682 bp, Artificial Sequence
  chemically treated genomic DNA (Homo sapiens) CpG-island No: 16041
  unsure (366, 368, 372, 570, 620..621, 624, 637, 653)
ttttcgagcgtacgttttcgagtgattcgtgcgcggtgtgtagggattttagggtcgtgtgtattaagggcgttcgtgttcgtttttttgtattaaggaacgtatttttatatgtttgagtgtacgtttttttttatgtgtgtacgtttcgtgtttacgtcgtttatgtttgtgtaggggcgttttacgcgcgtttttttcgtcgcgggcggatagggattcgcgttgggttttacgttttcgtggggttgatttttttttcgcgtttcgtagcgggtcgtatcgattggtcgtcggtttttttttagtcgttattttttttttttttcgttattcgcgcgtttttttttttcggtagttggggtngntttngcgaggtttaataaaaataattttcgttgggattggttgcgcgcgtttttgtgtggcggtagttgcggttttagcgtttttgaatgtcgagaggggtcgggaagggagtttttttatgggttatttgttttttcgttagtcgtcgttttatcgtcgttcgcgtttcgcgtttcgtttttcgtttcggcggttttcgtngtttcgtcgtcgttcgcgttcgcgttttttttttttgcggggggggtgtnnntnttttttttttttnttttaaaaattttttnttttgggggggagggtttttttttttttg

SEQ ID NO: 16042 - DNA, 682 bp, Artificial Sequence
  chemically treated genomic DNA (Homo sapiens) CpG-island No: 16042
  unsure (30, 46, 59, 61..62, 113, 311, 315, 317)
caaaaaaaaaaaaaccctcccccccaaaanaaaaaatttttaaaanaaaaaaaaaaaanannnacaccccccccgcaaaaaaaaaaaacgcgaacgcgaacgacgacgaaacnacgaaaaccgccgaaacgaaaaacgaaacgcgaaacgcgaacgacgataaaacgacgactaacgaaaaaacaaataacccataaaaaaactcccttcccgacccctctcgacattcaaaaacgctaaaaccgcaactaccgccacacaaaaacgcgcgcaaccaatcccaacgaaaattatttttattaaacctcgcnaaancnaccccaactaccgaaaaaaaaaaacgcgcgaataacgaaaaaaaaaaaaaataacgactaaaaaaaaaccgacgaccaatcgatacgacccgctacgaaacgcgaaaaaaaaatcaaccccacgaaaacgtaaaacccaacgcgaatccctatccgcccgcgacgaaaaaaacgcgcgtaaaacgcccctacacaaacataaacgacgtaaacacgaaacgtacacacataaaaaaaaacgtacactcaaacatataaaaatacgttccttaatacaaaaaaacgaacacgaacgcccttaatacacacgaccctaaaatccctacacaccgcgcacgaatcactcgaaaacgtacgctcgaaaa

SEQ ID NO: 16043 - DNA, 682 bp, Artificial Sequence
  chemically treated genomic DNA (Homo sapiens) CpG-island No: 16043
  unsure (30, 46, 59, 61..62, 113, 311, 315, 317)
taaaaaaaaaggggtttttttttttaaggnggggggtttttaaagnagaaaaagggggngnnngtatttttttcgtaaaaaaaaaaagcgcgggcgcgggcggcggcggggtngcgggagtcgtcggggcgggaggcggagcgcggggcgcgggcggcggtggggcggcggttggcggggagatagatggtttatggaaaggtttttttttcggtttttttcgatatttaaaggcgttggggtcgtagttgtcgttatataaaagcgcgcgtagttaattttagcggagattatttttgttaggtttcgtnggantngttttaattatcgaaaaaaaagggcgcgcgggtggcggagggagggaggggtgacggttggaagggggtcggcggttaatcgatacggttcgttgcggggcgcgagggaggggttagttttacggaagcgtggagtttagcgcgggtttttgttcgttcgcggcggagagggcgcgcgtgaagcgtttttgtatagatatgggcggcgtgaatacggaacgtgtatatatggagagggacgtgtatttagatatgtggaggtgcgttttttagtgtagagagacgggtacgagcgtttttagtgtatacgattttgaggtttttgtatatcgcgtacgggttattcggggacgtgcgttcggagg

SEQ ID NO: 16044 - DNA, 682 bp, Artificial Sequence
  chemically treated genomic DNA (Homo sapiens) CpG-island No: 16044
  unsure (366, 368, 372, 570, 620..621, 624, 637, 653)
cctccgaacgcacgtccccgaataacccgtacgcgatatacaaaaacctcaaaatcgtatacactaaaaacgctcgtacccgtctctctacactaaaaaacgcacctccacatatctaaatacacgtccctctccatatatacacgttccgtattcacgccgcccatatctatacaaaaacgcttcacgcgcgccctctccgccgcgaacgaacaaaaacccgcgctaaactccacgcttccgtaaaactaacccctccctcgcgccccgcaacgaaccgtatcgattaaccgccgacccccttccaaccgtcacccctccctccctccgccacccgcgcgcccttttttttcgataattaaaacnantccnacgaaacctaacaaaaataatctccgctaaaattaactacgcgcgcttttatataacgacaactacgaccccaacgcctttaaatatcgaaaaaaaccgaaaaaaaaacctttccataaaccatctatctccccgccaaccgccgccccaccgccgcccgcgccccgcgctccgcctcccgccccgacgactcccgcnaccccgccgccgcccgcgcccgcgctttttttttttacgaaaaaaatacnnncnccccctttttctnctttaaaaaccccccnccttaaaaaaaaaaaccccttttttttta

SEQ ID NO: 16045 - DNA, 550 bp, Artificial Sequence
  chemically treated genomic DNA (Homo sapiens) CpG-island No: 16045
gaggcgagtaataggtaatatttgttgagtcgtcgtcgatcggaagtggaagagagttcgggacgggggtgaggataggtcgcggtacgtttgcgtagttagtaggagttgtagcgtttatgcgtagttgggcggtgatagggtgacgttcggagcgtgggtcgcgatttttacggattcggtttcgttttttcgttgtcgatttttcggagcgagcgttcgagattttttttttagagtgttttgcgtcgtgaagaagcggttttcggggattgggggtattttgtgttggttggagttggagtaataagatggcgtcgttcgcggagtgataggggtttttttgggtcggagtcggcggtagtggtggtagcggtatcgtcgttttagtttatcgcgttttttttttagttcgcgacgtcgtcgcgtaagcgaggtagcggcggtcgtcgagaaataagtggtttagtttggtaatcgtcgagaagttttttataaattgcggtttggtaaaaagaaatttgattgagcggcggtgattaggtttttt

SEQ ID NO: 16046 - DNA, 550 bp, Artificial Sequence
  chemically treated genomic DNA (Homo sapiens) CpG-island No: 16046
aaaaaacctaatcaccgccgctcaatcaaatttctttttaccaaaccgcaatttataaaaaacttctcgacgattaccaaactaaaccacttatttctcgacgaccgccgctacctcgcttacgcgacgacgtcgcgaactaaaaaaaaaacgcgataaactaaaacgacgataccgctaccaccactaccgccgactccgacccaaaaaaacccctatcactccgcgaacgacgccatcttattactccaactccaaccaacacaaaatacccccaatccccgaaaaccgcttcttcacgacgcaaaacactctaaaaaaaaaatctcgaacgctcgctccgaaaaatcgacaacgaaaaaacgaaaccgaatccgtaaaaatcgcgacccacgctccgaacgtcaccctatcaccgcccaactacgcataaacgctacaactcctactaactacgcaaacgtaccgcgacctatcctcacccccgtcccgaactctcttccacttccgatcgacgacgactcaacaaatattacctattactcgcctc

SEQ ID NO: 16047 - DNA, 550 bp, Artificial Sequence
  chemically treated genomic DNA (Homo sapiens) CpG-island No: 16047
ggggaatttgattatcgtcgtttagttaggtttttttttgttaggtcgtagtttgtgaagggtttttcggcggttattaggttgggttatttgtttttcggcggtcgtcgttgtttcgtttgcgcggcgacgtcgcgggttggaaaaggggcgcggtgagttagggcggcgatatcgttgttattattgtcgtcggtttcggtttagagggatttttgttatttcgcggacgacgttattttgttattttagttttagttaatataaaatgtttttagttttcgggagtcgtttttttacggcgtagagtattttgggaaagggatttcgggcgttcgtttcgaaggatcggtagcgagagggcggaatcggattcgtgagagtcgcggtttacgtttcgagcgttattttgttatcgtttagttgcgtatgagcgttgtaatttttgttgattgcgtaggcgtgtcgcggtttgtttttattttcgtttcgggtttttttttattttcggtcggcggcggtttagtaggtgttatttgttattcgtttt

SEQ ID NO: 16048 - DNA, 550 bp, Artificial Sequence
  chemically treated genomic DNA (Homo sapiens) CpG-island No: 16048
aaaacgaataacaaataacacctactaaaccgccgccgaccgaaaataaaaaaaaacccgaaacgaaaataaaaacaaaccgcgacacgcctacgcaatcaacaaaaattacaacgctcatacgcaactaaacgataacaaaataacgctcgaaacgtaaaccgcgactctcacgaatccgattccgccctctcgctaccgatccttcgaaacgaacgcccgaaatccctttcccaaaatactctacgccgtaaaaaaacgactcccgaaaactaaaaacattttatattaactaaaactaaaataacaaaataacgtcgtccgcgaaataacaaaaatccctctaaaccgaaaccgacgacaataataacaacgatatcgccgccctaactcaccgcgccccttttccaacccgcgacgtcgccgcgcaaacgaaacaacgacgaccgccgaaaaacaaataacccaacctaataaccgccgaaaaacccttcacaaactacgacctaacaaaaaaaaacctaactaaacgacgataatcaaattcccc

SEQ ID NO: 16049 - DNA, 861 bp, Artificial Sequence
  chemically treated genomic DNA (Homo sapiens) CpG-island No: 16049
tgtggaataggtgttggttgatgtattttacgtataggttgcggcgttggtgtagggcgcggggattggcgcgattcgcgtcgggttggcggttttgtttaaatcggggtagcgttttttggtgtatgacgcgtttgtttattcgacgatacgggttattattgagtagatggggttgacgtttattattgttgattttaatgatttgtcggtattgaagtaggtcgtcgacgagtaataatcggatgcggcgttggtgtagtatacgcgttagtagtcgtaggatagttacgtgttggtagatgtgttggtaacgttgcgcgcggtaggtgttttagcgttaatcgatgataattatgcggtgattgataggtgcgttcgaatcggttgtgaatgcggcgcgaatgtttcgatatttttttgttttaagttatttgggttagagggtgttggtgtagtgggtcgggcgatgttgatgttattaatcgtattcgcgttacgttttatttcggcggtagttagattttagggcgtataggcgttggaagtattgcgtggtttggtgtttgcgttagtgatgtacgcggtgtaggtaggggtatttgaacggttgttggttttgtttaacggtggtgcggtgtcggaagtgaaaagcgcggtgattgttaatgcgtagtcgaaggtgttgattgtcgagttttattagtcgattgtcgttagagtgttggaagaggcgtaaaagcgcggtgttttgttttattcggtgggtgtagagtcgaaatatgaaatttcgtcgtttttttatcgttttttcggaacgtttcgttaggcgaatttataattagaatattgtgcgattcg

SEQ ID NO: 16050 - DNA, 861 bp, Artificial Sequence
  chemically treated genomic DNA (Homo sapiens) CpG-island No: 16050
cgaatcgcacaatattctaattataaattcgcctaacgaaacgttccgaaaaaacgataaaaaaacgacgaaatttcatatttcgactctacacccaccgaataaaacaaaacaccgcgcttttacgcctcttccaacactctaacgacaatcgactaataaaactcgacaatcaacaccttcgactacgcattaacaatcaccgcgcttttcacttccgacaccgcaccaccgttaaacaaaaccaacaaccgttcaaatacccctacctacaccgcgtacatcactaacgcaaacaccaaaccacgcaatacttccaacgcctatacgccctaaaatctaactaccgccgaaataaaacgtaacgcgaatacgattaataacatcaacatcgcccgacccactacaccaacaccctctaacccaaataacttaaaacaaaaaaatatcgaaacattcgcgccgcattcacaaccgattcgaacgcacctatcaatcaccgcataattatcatcgattaacgctaaaacacctaccgcgcgcaacgttaccaacacatctaccaacacgtaactatcctacgactactaacgcgtatactacaccaacgccgcatccgattattactcgtcgacgacctacttcaataccgacaaatcattaaaatcaacaataataaacgtcaaccccatctactcaataataacccgtatcgtcgaataaacaaacgcgtcatacaccaaaaaacgctaccccgatttaaacaaaaccgccaacccgacgcgaatcgcgccaatccccgcgccctacaccaacgccgcaacctatacgtaaaatacatcaaccaacacctattccaca

SEQ ID NO: 16051 - DNA, 861 bp, Artificial Sequence
  chemically treated genomic DNA (Homo sapiens) CpG-island No: 16051
cgaatcgtataatgttttgattgtggattcgtttggcgaaacgtttcggaaaggcgataaaagagcggcgggattttatatttcgattttgtatttatcgggtaaggtaaggtatcgcgtttttgcgttttttttagtattttggcggtaatcggttgatgaaattcgataattaatattttcgattgcgtattagtaattatcgcgttttttattttcggtatcgtattatcgttaagtaaagttagtaatcgtttagatatttttgtttgtatcgcgtgtattattggcgtaaatattagattacgtaatatttttagcgtttgtgcgttttgggatttggttatcgtcggagtaaagcgtggcgcgaatacggttgataatattagtatcgttcggtttattgtattaatattttttggtttaaatagtttgaagtaggaaaatgtcgagatattcgcgtcgtatttatagtcgattcgagcgtatttgttagttatcgtatagttgttatcggttaacgttggaatatttgtcgcgcgtaacgttgttagtatatttgttagtacgtagttgttttgcggttgttggcgcgtatgttgtattagcgtcgtattcggttgttgttcgtcgacgatttgttttagtgtcgataggttattgaaattaatagtaataagcgttagttttatttgtttaataataattcgtgtcgtcgggtaaataggcgcgttatgtattagaagacgttgtttcggtttgagtaaagtcgttagttcggcgcgaatcgcgttagttttcgcgttttgtattagcgtcgtagtttgtgcgtgaaatgtattagttagtatttgttttata

SEQ ID NO: 16052 - DNA, 861 bp, Artificial Sequence
  chemically treated genomic DNA (Homo sapiens) CpG-island No: 16052
tataaaacaaatactaactaatacatttcacgcacaaactacgacgctaatacaaaacgcgaaaactaacgcgattcgcgccgaactaacgactttactcaaaccgaaacaacgtcttctaatacataacgcgcctatttacccgacgacacgaattattattaaacaaataaaactaacgcttattactattaatttcaataacctatcgacactaaaacaaatcgtcgacgaacaacaaccgaatacgacgctaatacaacatacgcgccaacaaccgcaaaacaactacgtactaacaaatatactaacaacgttacgcgcgacaaatattccaacgttaaccgataacaactatacgataactaacaaatacgctcgaatcgactataaatacgacgcgaatatctcgacattttcctacttcaaactatttaaaccaaaaaatattaatacaataaaccgaacgatactaatattatcaaccgtattcgcgccacgctttactccgacgataaccaaatcccaaaacgcacaaacgctaaaaatattacgtaatctaatatttacgccaataatacacgcgatacaaacaaaaatatctaaacgattactaactttacttaacgataatacgataccgaaaataaaaaacgcgataattactaatacgcaatcgaaaatattaattatcgaatttcatcaaccgattaccgccaaaatactaaaaaaaacgcaaaaacgcgataccttaccttacccgataaatacaaaatcgaaatataaaatcccgccgctcttttatcgcctttccgaaacgtttcgccaaacgaatccacaatcaaaacattatacgattcg

SEQ ID NO: 16053 - DNA, 598 bp, Artificial Sequence
  chemically treated genomic DNA (Homo sapiens) CpG-island No: 16053
tattatcggataggttttcgggtgaacggtagacgcgtttagcgggttattatcgtggttaatgcgtaagaagttcgcgtattgttcgaaggttttcggttttagacggtttatttttaatagttgttgacggttttggaattgatcgtttttatcgcgttaggtaacgatgttttgcgttattatgcgcgttaggttcgttacgcgggttaatagcggaatagaagtagtgttgagatcgacgttaacggcgtttacgtagttttttattattgcgtttagtttgcgggttagttgcgtttggttgacgttatgttgatattgatttacgtcgatagatttcggatcgatttttattagtttcgttagcggattttgtaaacggcgggcgatagatatcgcgttacgtagcgaaacgtcgagattcgggaatttttgtgtagttagttcggaagtcgagtaaatcgacgcgtttgtttcgttgacgattattttttgcgcggttattttcgggaattgtttttgtatatcgagatagaaacgtttagtttcgcgggaagttgtatcgttatcgatcgttattagttttacgttatgt

SEQ ID NO: 16054 - DNA, 598 bp, Artificial Sequence
  chemically treated genomic DNA (Homo sapiens) CpG-island No: 16054
acataacgtaaaactaataacgatcgataacgatacaacttcccgcgaaactaaacgtttctatctcgatatacaaaaacaattcccgaaaataaccgcgcaaaaaataatcgtcaacgaaacaaacgcgtcgatttactcgacttccgaactaactacacaaaaattcccgaatctcgacgtttcgctacgtaacgcgatatctatcgcccgccgtttacaaaatccgctaacgaaactaataaaaatcgatccgaaatctatcgacgtaaatcaatatcaacataacgtcaaccaaacgcaactaacccgcaaactaaacgcaataataaaaaactacgtaaacgccgttaacgtcgatctcaacactacttctattccgctattaacccgcgtaacgaacctaacgcgcataataacgcaaaacatcgttacctaacgcgataaaaacgatcaattccaaaaccgtcaacaactattaaaaataaaccgtctaaaaccgaaaaccttcgaacaatacgcgaacttcttacgcattaaccacgataataacccgctaaacgcgtctaccgttcacccgaaaacctatccgataata

SEQ ID NO: 16055 - DNA, 598 bp, Artificial Sequence
  chemically treated genomic DNA (Homo sapiens) CpG-island No: 16055
atataacgtggaattggtagcgatcggtaacggtatagtttttcgcgaaattgagcgtttttatttcgatgtgtagaagtagttttcgaaagtgatcgcgtagaaagtaatcgttagcgaagtaggcgcgtcggtttattcggttttcgagttggttgtataggagttttcggatttcgacgtttcgttgcgtggcgcggtgtttatcgttcgtcgtttgtaggattcgttggcggagttggtgaaaatcgattcgaaatttatcggcgtaggttagtattagtatgacgttagttagacgtaattggttcgtaaattggacgtagtagtagaagattgcgtaaacgtcgttggcgtcgattttaatattgtttttgtttcgttgttaattcgcgtggcgggtttgacgcgtatgatggcgtaaaatatcgttgtttggcgcgatgagaacggttagttttagaatcgttagtaattgttaaaagtgagtcgtttggggtcgaaagttttcgagtagtgcgcgggttttttgcgtattaattacggtgataattcgttggacgcgtttatcgtttattcggaagtttattcggtggtg

SEQ ID NO: 16056 - DNA, 598 bp, Artificial Sequence
  chemically treated genomic DNA (Homo sapiens) CpG-island No: 16056
caccaccgaataaacttccgaataaacgataaacgcgtccaacgaattatcaccgtaattaatacgcaaaaaacccgcgcactactcgaaaactttcgaccccaaacgactcacttttaacaattactaacgattctaaaactaaccgttctcatcgcgccaaacaacgatattttacgccatcatacgcgtcaaacccgccacgcgaattaacaacgaaacaaaaacaatattaaaatcgacgccaacgacgtttacgcaatcttctactactacgtccaatttacgaaccaattacgtctaactaacgtcatactaatactaacctacgccgataaatttcgaatcgattttcaccaactccgccaacgaatcctacaaacgacgaacgataaacaccgcgccacgcaacgaaacgtcgaaatccgaaaactcctatacaaccaactcgaaaaccgaataaaccgacgcgcctacttcgctaacgattactttctacgcgatcactttcgaaaactacttctacacatcgaaataaaaacgctcaatttcgcgaaaaactataccgttaccgatcgctaccaattccacgttatat

SEQ ID NO: 16057 - DNA, 809 bp, Artificial Sequence
  chemically treated genomic DNA (Homo sapiens) CpG-island No: 16057
attagtttagtcgggaatattacgtcgtggtcgtttttattttttttttgttggagcgtttttgttaggttgcgtcgttgcgttttttttcgttcgtcgttttttgtttcgattcggatgagcggcgtgaagtttttcggttcgtatatcgtttggatacgtgtggtgttagtttgtatcgtcgttagtttgttttcgttttagttatattacgttattttcggtttacgcgatagcgatatttatttcgttaggttacgttttcgtcgttagattcgttttgttattcgtcgttttagcgggtcgtagaggtagcggttttcgattagtggttcgttatgttgtattcgcgtgtagaatattaggcggtgttggttgtcgtagtggtagtggtgggttcgttcgtcgttcgttcgtattatattcgtcgggatgcggttcgtttttttcgttagtttgtcgtatttatcgtggcggtagatatagtgcgtatttttcgcgatgcggttattcggttatattgtgagtgtattgttcgggtgtagtttcgggttcggtagtcggttgttcgtcgggttcgtggtatacgggatgcggatgtttaggtttggtgcgagggtgcgtatattttttagtttgttcgtggcgttgtagtcgtattttcgcgtttgtcgcgggtcgttgatgcgtattaggtcgtcgttgttattttattcgtagttacggttatatattaggttgtttaggtgttggttttgtaattggtttgcgggggtgtatgtgttggttagttcgtatgcggtattatt

SEQ ID NO: 16058 - DNA, 809 bp, Artificial Sequence
  chemically treated genomic DNA (Homo sapiens) CpG-island No: 16058
aataataccgcatacgaactaaccaacacatacacccccgcaaaccaattacaaaaccaacacctaaacaacctaatatataaccgtaactacgaataaaataacaacgacgacctaatacgcatcaacgacccgcgacaaacgcgaaaatacgactacaacgccacgaacaaactaaaaaatatacgcaccctcgcaccaaacctaaacatccgcatcccgtataccacgaacccgacgaacaaccgactaccgaacccgaaactacacccgaacaatacactcacaatataaccgaataaccgcatcgcgaaaaatacgcactatatctaccgccacgataaatacgacaaactaacgaaaaaaacgaaccgcatcccgacgaatataatacgaacgaacgacgaacgaacccaccactaccactacgacaaccaacaccgcctaatattctacacgcgaatacaacataacgaaccactaatcgaaaaccgctacctctacgacccgctaaaacgacgaataacaaaacgaatctaacgacgaaaacgtaacctaacgaaataaatatcgctatcgcgtaaaccgaaaataacgtaatataactaaaacgaaaacaaactaacgacgatacaaactaacaccacacgtatccaaacgatatacgaaccgaaaaacttcacgccgctcatccgaatcgaaacaaaaaacgacgaacgaaaaaaaacgcaacgacgcaacctaacaaaaacgctccaacaaaaaaaaaataaaaacgaccacgacgtaatattcccgactaaactaat

SEQ ID NO: 16059 - DNA, 809 bp, Artificial Sequence
  chemically treated genomic DNA (Homo sapiens) CpG-island No: 16059
agtaatgtcgtatacgaattgattagtatatatattttcgtaggttagttatagagttagtatttgaatagtttggtatatgatcgtgattacgggtggagtgataacggcgatttggtgcgtattagcggttcgcgatagacgcgggaatacggttatagcgttacgggtaggttggagagtgtgcgtattttcgtattagatttggatattcgtatttcgtatgttacggattcggcgggtaatcggttgtcggattcggagttgtattcggatagtatatttatagtgtggtcggataatcgtatcgcggaggatgcgtattatgtttatcgttacgatgaatacggtaggttgacggagaagacggatcgtatttcggcgggtgtgatacggacggacgacgagcggatttattattattattacgatagttagtatcgtttggtgttttatacgcggatatagtatggcgagttattggtcgagagtcgttatttttacgattcgttgggacggcgaatggtaaaacgggtttggcggcgggagcgtgatttgacggggtggatgtcgttgtcgcgtaaatcggaggtgacgtggtatggttgggacggagataggttgacgacggtgtagattgatattatacgtatttagacggtatacgagtcgggaagttttacgtcgtttattcgggtcgagatagagaacggcgagcgggaaaaagcgtagcggcgtagtttggtagagacgttttagtaggaagggagtgagaacggttacggcgtggtgttttcggttgaattggt

SEQ ID NO: 16060 - DNA, 809 bp, Artificial Sequence
  chemically treated genomic DNA (Homo sapiens) CpG-island No: 16060
accaattcaaccgaaaacaccacgccgtaaccgttctcactcccttcctactaaaacgtctctaccaaactacgccgctacgctttttcccgctcgccgttctctatctcgacccgaataaacgacgtaaaacttcccgactcgtataccgtctaaatacgtataatatcaatctacaccgtcgtcaacctatctccgtcccaaccataccacgtcacctccgatttacgcgacaacgacatccaccccgtcaaatcacgctcccgccgccaaacccgttttaccattcgccgtcccaacgaatcgtaaaaataacgactctcgaccaataactcgccatactatatccgcgtataaaacaccaaacgatactaactatcgtaataataataataaatccgctcgtcgtccgtccgtatcacacccgccgaaatacgatccgtcttctccgtcaacctaccgtattcatcgtaacgataaacataatacgcatcctccgcgatacgattatccgaccacactataaatatactatccgaatacaactccgaatccgacaaccgattacccgccgaatccgtaacatacgaaatacgaatatccaaatctaatacgaaaatacgcacactctccaacctacccgtaacgctataaccgtattcccgcgtctatcgcgaaccgctaatacgcaccaaatcgccgttatcactccacccgtaatcacgatcatataccaaactattcaaatactaactctataactaacctacgaaaatatatatactaatcaattcgtatacgacattact

SEQ ID NO: 16061 - DNA, 725 bp, Artificial Sequence
  chemically treated genomic DNA (Homo sapiens) CpG-island No: 16061
agatcggtcgttagtagtaatagcgtttcgtatagcgtcgtttgggttagtttttagcgagcggtgtcgttaatgcgtcgggtaatgtgcggtgcgattaaagtaataaaggaaatcggttcggtaagcgttgttgtcgtagcggtaagtattattgtaattagtattattaatagacgcgaacgttcgacgttgacgtttagcgtatacgcggtattatcgtttatttttagtaagtcgtattcggcgtattagtaaggcggcggtaatgagtattaatataatgatgggtgcggaaggcgaggtttttgtttacgttaggtcgttgagcgattcggtattttataaatttgttgttagcgtcgtttttaaaagacgtttttagtaattagttaggtattaacggttattagtatggcgcgaacgtcgatatcgataataattaatcgttcggtgtcgatgtcgtagcgttaggcgagtagttagataggagcgaagtgataaagacgattattattgttgaagcgcgatagtcggtaggtttgattaaaagattatcgtattatacgcggttaagttcggtgtaacgtttacgttaggatgcgaaggttttataggattaaatcgtttgagtatggtgtataagtcgtacggtgaagtatcgattttgaagtggtatatacggggaaagaataaaattcgttattatgttagatagaggtacg

SEQ ID NO: 16062 - DNA, 725 bp, Artificial Sequence
  chemically treated genomic DNA (Homo sapiens) CpG-island No: 16062
cgtacctctatctaacataataacgaattttattctttccccgtatataccacttcaaaatcgatacttcaccgtacgacttatacaccatactcaaacgatttaatcctataaaaccttcgcatcctaacgtaaacgttacaccgaacttaaccgcgtataatacgataatcttttaatcaaacctaccgactatcgcgcttcaacaataataatcgtctttatcacttcgctcctatctaactactcgcctaacgctacgacatcgacaccgaacgattaattattatcgatatcgacgttcgcgccatactaataaccgttaatacctaactaattactaaaaacgtcttttaaaaacgacgctaacaacaaatttataaaataccgaatcgctcaacgacctaacgtaaacaaaaacctcgccttccgcacccatcattatattaatactcattaccgccgccttactaatacgccgaatacgacttactaaaaataaacgataataccgcgtatacgctaaacgtcaacgtcgaacgttcgcgtctattaataatactaattacaataatacttaccgctacgacaacaacgcttaccgaaccgatttcctttattactttaatcgcaccgcacattacccgacgcattaacgacaccgctcgctaaaaactaacccaaacgacgctatacgaaacgctattactactaacgaccgatct

SEQ ID NO: 16063 - DNA, 725 bp, Artificial Sequence
  chemically treated genomic DNA (Homo sapiens) CpG-island No: 16063
cgtatttttgtttggtatggtaacgggttttatttttttttcgtgtatgttattttagggtcgatgttttatcgtgcggtttatgtattatgtttaggcgatttagttttatggaattttcgtattttgacgtaggcgttatatcgggtttgatcgcgtgtggtgcgatggttttttggttagatttgtcggttatcgcgttttagtaatggtggtcgtttttgttatttcgtttttgtttggttgttcgtttggcgttacggtatcgatatcgggcggttgattattatcggtatcggcgttcgcgttatgttggtggtcgttaatatttggttggttgttgaaagcgttttttagaaacggcgttaatagtaggtttgtggaatgtcggatcgtttaacggtttgacgtgggtagaaatttcgtttttcgtatttattattatattgatgtttattgtcgtcgttttattggtacgtcggatgcggtttgttggaaatgggcgatgatatcgcgtgtgcgttgggcgttagcgtcgaacgttcgcgtttgttaatgatgttggttgtagtggtgtttatcgttgcggtaatagcgtttgtcgggtcgattttttttattgttttagtcgtatcgtatattgttcgacgtattagcggtatcgttcgttgggggttaatttaggcggcgttatgcggggcgttgttattgttggcggtcgattt

SEQ ID NO: 16064 - DNA, 725 bp, Artificial Sequence
  chemically treated genomic DNA (Homo sapiens) CpG-island No: 16064
aaatcgaccgccaacaataacaacgccccgcataacgccgcctaaattaacccccaacgaacgataccgctaatacgtcgaacaatatacgatacgactaaaacaataaaaaaaatcgacccgacaaacgctattaccgcaacgataaacaccactacaaccaacatcattaacaaacgcgaacgttcgacgctaacgcccaacgcacacgcgatatcatcgcccatttccaacaaaccgcatccgacgtaccaataaaacgacgacaataaacatcaatataataataaatacgaaaaacgaaatttctacccacgtcaaaccgttaaacgatccgacattccacaaacctactattaacgccgtttctaaaaaacgctttcaacaaccaaccaaatattaacgaccaccaacataacgcgaacgccgataccgataataatcaaccgcccgatatcgataccgtaacgccaaacgaacaaccaaacaaaaacgaaataacaaaaacgaccaccattactaaaacgcgataaccgacaaatctaaccaaaaaaccatcgcaccacacgcgatcaaacccgatataacgcctacgtcaaaatacgaaaattccataaaactaaatcgcctaaacataatacataaaccgcacgataaaacatcgaccctaaaataacatacacgaaaaaaaaataaaacccgttaccataccaaacaaaaatacg

SEQ ID NO: 16065 - DNA, 537 bp, Artificial Sequence
  chemically treated genomic DNA (Homo sapiens) CpG-island No: 16065
gtcggttaatataagttttcgttatattgcggaatgggcgggaattatgtaatacggattcgttagtttatgtttcgaattggttcggatttaggtgttattaggtaattagttagtattagcgttcgtttttggggcgtaatatagttacgggttatgtagtatagatttagtataacgttttgagacggaacgatgattgtttcgtcgttcgtcggggataggatgttgttggtagatattattagcgtacgcgtttttagttgggtttttagcgttagcggtacgtgaatagttatttggttattatcgaagtcggcgttatatgtcgtataaattagcgggtgtagttggatagttttattttcgattagtatcggtttaaatgtttggatatttagacggtgtagagtcggtgtacggtttagtagtatcgggtgttcgcggataatttcgtttaggatattttaaacgatagttttttcgcgtttaattatttttttcgtagttttaatggtggtagtaagattacgtagt

SEQ ID NO: 16066 - DNA, 537 bp, Artificial Sequence
  chemically treated genomic DNA (Homo sapiens) CpG-island No: 16066
actacgtaatcttactaccaccattaaaactacgaaaaaaataattaaacgcgaaaaaactatcgtttaaaatatcctaaacgaaattatccgcgaacacccgatactactaaaccgtacaccgactctacaccgtctaaatatccaaacatttaaaccgatactaatcgaaaataaaactatccaactacacccgctaatttatacgacatataacgccgacttcgataataaccaaataactattcacgtaccgctaacgctaaaaacccaactaaaaacgcgtacgctaataatatctaccaacaacatcctatccccgacgaacgacgaaacaatcatcgttccgtctcaaaacgttatactaaatctatactacataacccgtaactatattacgccccaaaaacgaacgctaatactaactaattacctaataacacctaaatccgaaccaattcgaaacataaactaacgaatccgtattacataattcccgcccattccgcaatataacgaaaacttatattaaccgac

SEQ ID NO: 16067 - DNA, 537 bp, Artificial Sequence
  chemically treated genomic DNA (Homo sapiens) CpG-island No: 16067
attgcgtggttttgttattattattaaagttgcgaagaaaatggttgagcgcgaagaagttgtcgtttgggatattttggacgaagttattcgcgaatattcggtattgttgaatcgtgtatcgattttgtatcgtttgggtatttaggtatttgaatcggtattgatcgaaggtaaagttatttagttgtattcgttggtttgtgcggtatataacgtcgatttcgatggtgattagatggttgtttacgtatcgttgacgttggaagtttagttggaagcgcgtgcgttgatgatgtttattaataatattttgttttcggcgaacggcgaaataattatcgtttcgttttaggacgttgtattgggtttgtattatatgattcgtgattgtgttacgttttaagggcgaacgttggtgttgattggttatttggtggtatttgggttcgggttaattcggaatatgggttaacgggttcgtgttatatggttttcgtttatttcgtaatatggcgggaatttatgttaatcggt

SEQ ID NO: 16068 - DNA, 537 bp, Artificial Sequence
  chemically treated genomic DNA (Homo sapiens) CpG-island No: 16068
accgattaacataaattcccgccatattacgaaataaacgaaaaccatataacacgaacccgttaacccatattccgaattaacccgaacccaaataccaccaaataaccaatcaacaccaacgttcgcccttaaaacgtaacacaatcacgaatcatataatacaaacccaatacaacgtcctaaaacgaaacgataattatttcgccgttcgccgaaaacaaaatattattaataaacatcatcaacgcacgcgcttccaactaaacttccaacgtcaacgatacgtaaacaaccatctaatcaccatcgaaatcgacgttatataccgcacaaaccaacgaatacaactaaataactttaccttcgatcaataccgattcaaatacctaaatacccaaacgatacaaaatcgatacacgattcaacaataccgaatattcgcgaataacttcgtccaaaatatcccaaacgacaacttcttcgcgctcaaccattttcttcgcaactttaataataataacaaaaccacgcaat

SEQ ID NO: 16069 - DNA, 521 bp, Artificial Sequence
  chemically treated genomic DNA (Homo sapiens) CpG-island No: 16069
gtatgcggtgtgtgtggcgtgtgtgtgtgcgtgtgtggtgtgtgtggtgtatggtgtgtgtgtggtgtgtgcggtgtgtgtgtgtggtgtgtgtggtgtgtgtgtgtggtgtgtgtggtgtgtgggtgtgtggtgtgtggtgtgtatttgtgcgtgtgtggtgtgtgttgtgtgtgagtgtggggtgtgtgtgtgtgtgtgtgtgtgtgtgtgtgtgtgtgtgtgtgtcgggggaggtatatacgtagttttcgtgcggaaagatggtgttttttttttatagggttgcgcgggtatttattttcgttgtaaagcgttcgggttaggcgcggtttgtttcgggtcggggcgagttcgttgttttttgcggtagatagcgatgcgcgtttttcgttttagttttcggttcgttcgcggttcgcgcgttttttcggtgtagtatgcgggcgttgtgacgttttcggataaatgtcgtgtaattgtgtaggcgaatgagagttaaaaataagaacggaaaattt

SEQ ID NO: 16070 - DNA, 521 bp, Artificial Sequence
  chemically treated genomic DNA (Homo sapiens) CpG-island No: 16070
aaattttccgttcttatttttaactctcattcgcctacacaattacacgacatttatccgaaaacgtcacaacgcccgcatactacaccgaaaaaacgcgcgaaccgcgaacgaaccgaaaactaaaacgaaaaacgcgcatcgctatctaccgcaaaaaacaacgaactcgccccgacccgaaacaaaccgcgcctaacccgaacgctttacaacgaaaataaatacccgcgcaaccctataaaaaaaaaacaccatctttccgcacgaaaactacgtatatacctcccccgacacacacacacacacacacacacacacacacacacacacacaccccacactcacacacaacacacaccacacacgcacaaatacacaccacacaccacacacccacacaccacacacaccacacacacacaccacacacaccacacacacacaccgcacacaccacacacacaccatacaccacacacaccacacacgcacacacacacgccacacacaccgcatac

SEQ ID NO: 16071 - DNA, 521 bp, Artificial Sequence
  chemically treated genomic DNA (Homo sapiens) CpG-island No: 16071
agatttttcgtttttatttttagtttttattcgtttatatagttatacggtatttattcgagaacgttatagcgttcgtatgttgtatcgggagggcgcgcgggtcgcgggcgagtcgggagttggggcggggagcgcgtatcgttgtttgtcgtagagggtagcgagttcgtttcgattcggagtaagtcgcgtttggttcgggcgttttgtagcggggatgggtgttcgcgtagttttgtgaaggaaagatattattttttcgtacggaaattgcgtatatatttttttcgatatatatatatatatatatatatatatatatatatatatatattttatatttatatatagtatatattatatacgtatagatatatattatatattatatatttatatattatatatattatatatatatattatatatattatatatatatatcgtatatattatatatatattatatattatatatattatatacgtatatatatacgttatatatatcgtatat

SEQ ID NO: 16072 - DNA, 521 bp, Artificial Sequence
  chemically treated genomic DNA (Homo sapiens) CpG-island No: 16072
atatacgatatatataacgtatatatatacgtatataatatatataatatataatatatatataatatatacgatatatatatataatatatataatatatatatataatatatataatatataaatatataatatataatatatatctatacgtatataatatatactatatataaatataaaatatatatatatatatatatatatatatatatatatatatatatcgaaaaaaatatatacgcaatttccgtacgaaaaaataatatctttccttcacaaaactacgcgaacacccatccccgctacaaaacgcccgaaccaaacgcgacttactccgaatcgaaacgaactcgctaccctctacgacaaacaacgatacgcgctccccgccccaactcccgactcgcccgcgacccgcgcgccctcccgatacaacatacgaacgctataacgttctcgaataaataccgtataactatataaacgaataaaaactaaaaataaaaacgaaaaatct

SEQ ID NO: 16073 - DNA, 875 bp, Artificial Sequence
  chemically treated genomic DNA (Homo sapiens) CpG-island No: 16073
tcgaacgttgagtttttagacgcgcggtcggacgtagggaggttaggacgcgacgttcgttttatttgtttttttagcggttttttggcgatagcgtcggtttgggggagggcgcgcggtcgtagacgtagttttttagtaggtaaagtttcgaggcgcgcgagttcgagtcgttttcgaagtagaagagtaggttttgtagtagcgcgaattatttggtttgttattttgtgttgttcgaatttcgtttgtttaggtagtttttgcgcgtgtcgtttttgcgcgttagtagttttagggacgcgacgtggttattatttagtcggatttttttttgtatggtgtttagaggttagcgagattttacgcgtttatatttttttcgcgtagtagtttttcgttcgtgcgcgttgcgttgtttttttttggcgttcgttcgttcgttttttttagtttttttttttttttaaatatttatattttaggatttggcgtcgagtcgcggttttttgaatttagatatattatttttcgttggaatttttttttcgtttcgtagagttttagtattcggaagatgtcgttcgattttttttcggtgtcgggtaaattgagggattggcgatttgcgcgttggcgaggggtaggcggagttatgtgacgtcgatttttcgaagagttcgttttagtagcgcggatagggatatacgtacgtagtttcgtcgagggtagagtcgcgcgtaggttgtaatttggtgttttttttttttttttagatatatatatacgtatacgtatacgtatatatttaaattttgttttttttttttttatttcgttttttttcgttcggatgttaaaaagtaattagatta

SEQ ID NO: 16074 - DNA, 875 bp, Artificial Sequence
  chemically treated genomic DNA (Homo sapiens) CpG-island No: 16074
taatctaattactttttaacatccgaacgaaaaaaaacgaaataaaaaaaaaaaaaacaaaatttaaatatatacgtatacgtatacgtatatatatatctaaaaaaaaaaaaaaaacaccaaattacaacctacgcgcgactctaccctcgacgaaactacgtacgtatatccctatccgcgctactaaaacgaactcttcgaaaaatcgacgtcacataactccgcctacccctcgccaacgcgcaaatcgccaatccctcaatttacccgacaccgaaaaaaaatcgaacgacatcttccgaatactaaaactctacgaaacgaaaaaaaaattccaacgaaaaataatatatctaaattcaaaaaaccgcgactcgacgccaaatcctaaaatataaatatttaaaaaaaaaaaaaaactaaaaaaaacgaacgaacgaacgccaaaaaaaaacaacgcaacgcgcacgaacgaaaaactactacgcgaaaaaaatataaacgcgtaaaatctcgctaacctctaaacaccatacaaaaaaaaatccgactaaataataaccacgtcgcgtccctaaaactactaacgcgcaaaaacgacacgcgcaaaaactacctaaacaaacgaaattcgaacaacacaaaataacaaaccaaataattcgcgctactacaaaacctactcttctacttcgaaaacgactcgaactcgcgcgcctcgaaactttacctactaaaaaactacgtctacgaccgcgcgccctcccccaaaccgacgctatcgccaaaaaaccgctaaaaaaacaaataaaacgaacgtcgcgtcctaacctccctacgtccgaccgcgcgtctaaaaactcaacgttcga

SEQ ID NO: 16075 - DNA, 875 bp, Artificial Sequence
  chemically treated genomic DNA (Homo sapiens) CpG-island No: 16075
tgatttgattgttttttaatattcgagcgagagaaggcgagatgaggggagggagggtagggtttgagtgtgtgcgtgtgcgtgtgcgtgtgtgtgtgtttggggagggggaggaggtattaagttgtagtttgcgcgcggttttgttttcggcggggttgcgtgcgtgtgtttttgttcgcgttgttgaaacgggtttttcgagggatcggcgttatatgatttcgtttgtttttcgttagcgcgtagatcgttagttttttagtttgttcggtatcggaggagggtcgggcggtatttttcgggtattggggttttgcggagcggagaagaggttttagcggggaatggtatatttggatttaagaagtcgcggttcggcgttagattttggagtgtagatatttggggggaggggagagttagagggagcgagcgagcgagcgttagagagaggtagcgtagcgcgtacggacggggggttgttgcgcggagaagatgtaagcgcgtggggtttcgttggtttttgagtattatgtagaaggggattcggttgaatgatggttacgtcgcgtttttgggattgttggcgcgtaaggacggtacgcgtaaaggttatttgagtaagcggagttcggataatataaaatggtaaattaagtggttcgcgttgttgtagaatttgtttttttatttcgagagcgattcgagttcgcgcgtttcggggttttatttgttggagggttgcgtttgcgatcgcgcgtttttttttaagtcggcgttgtcgttaaggagtcgttggagaaataggtgaggcgagcgtcgcgttttgatttttttgcgttcggtcgcgcgtttgggggtttagcgttcgg

SEQ ID NO: 16076 - DNA, 875 bp, Artificial Sequence
  chemically treated genomic DNA (Homo sapiens) CpG-island No: 16076
ccgaacgctaaacccccaaacgcgcgaccgaacgcaaaaaaatcaaaacgcgacgctcgcctcacctatttctccaacgactccttaacgacaacgccgacttaaaaaaaaacgcgcgatcgcaaacgcaaccctccaacaaataaaaccccgaaacgcgcgaactcgaatcgctctcgaaataaaaaaacaaattctacaacaacgcgaaccacttaatttaccattttatattatccgaactccgcttactcaaataacctttacgcgtaccgtccttacgcgccaacaatcccaaaaacgcgacgtaaccatcattcaaccgaatccccttctacataatactcaaaaaccaacgaaaccccacgcgcttacatcttctccgcgcaacaaccccccgtccgtacgcgctacgctacctctctctaacgctcgctcgctcgctccctctaactctcccctccccccaaatatctacactccaaaatctaacgccgaaccgcgacttcttaaatccaaatataccattccccgctaaaacctcttctccgctccgcaaaaccccaatacccgaaaaataccgcccgaccctcctccgataccgaacaaactaaaaaactaacgatctacgcgctaacgaaaaacaaacgaaatcatataacgccgatccctcgaaaaacccgtttcaacaacgcgaacaaaaacacacgcacgcaaccccgccgaaaacaaaaccgcgcgcaaactacaacttaatacctcctccccctccccaaacacacacacacgcacacgcacacgcacacactcaaaccctaccctccctcccctcatctcgccttctctcgctcgaatattaaaaaacaatcaaatca

SEQ ID NO: 16077 - DNA, 548 bp, Artificial Sequence
  chemically treated genomic DNA (Homo sapiens) CpG-island No: 16077
  unsure (484..485, 496, 502..503, 514..515, 517, 525, 533, 539)
tagattggtgcgtcgtcgtcgcggtcgttttttttcgtcgggcggggtggggggtggtgagggacgcgatttaggtcgtggtttggcggcggtttcggttatagttttcgtatttcggtcgcgcgttttcggaggtgacgttttgaggaagttgtatttttttgggggggagtcgtagggaatcgttgggagaggggttttgtgtgtgtttttttaagagtcggagcgttgttttcgtttcgtaggcgttcggagttttataaaagaataggatgtcgttgatttgttattaaattatagagagaaatgatgtaatttttttaatatttttcgcgtttcggtcgttttcgttttcgtttttttcgttttcgttcgttcgtatagcggggttttagcgttttcgcggggcgtttgtttttcggtcgggttacgggtcgagcggtttttgggcgtttgcgggaggagttttcggtttaggtcgttnnggtttttaagnttcgtnnggtttttagtnntngttttgtnttgtttanttacgntttggttaa

SEQ ID NO: 16078 - DNA, 548 bp, Artificial Sequence
  chemically treated genomic DNA (Homo sapiens) CpG-island No: 16078
  unsure (10, 16, 24, 32, 34..35, 46..47, 53, 64..)
ttaaccaaancgtaantaaacaanacaaaacnannactaaaaaccnnacgaancttaaaaaccnnaacgacctaaaccgaaaactcctcccgcaaacgcccaaaaaccgctcgacccgtaacccgaccgaaaaacaaacgccccgcgaaaacgctaaaaccccgctatacgaacgaacgaaaacgaaaaaaacgaaaacgaaaacgaccgaaacgcgaaaaatattaaaaaaattacatcatttctctctataatttaataacaaatcaacgacatcctattcttttataaaactccgaacgcctacgaaacgaaaacaacgctccgactcttaaaaaaacacacacaaaacccctctcccaacgattccctacgactcccccccaaaaaaatacaacttcctcaaaacgtcacctccgaaaacgcgcgaccgaaatacgaaaactataaccgaaaccgccgccaaaccacgacctaaatcgcgtccctcaccaccccccaccccgcccgacgaaaaaaaacgaccgcgacgacgacgcaccaatcta

SEQ ID NO: 16079 - DNA, 548 bp, Artificial Sequence
  chemically treated genomic DNA (Homo sapiens) CpG-island No: 16079
  unsure (10, 16, 24, 32, 34..35, 46..47, 53, 64..)
ttggttaaancgtggntaggtaanataaagtnannattgggaattnngcgagntttgggggttnnagcggtttgggtcgggggtttttttcgtaggcgtttaggagtcgttcggttcgtggttcggtcggggagtaggcgtttcgcgggagcgttgaggtttcgttgtgcgaacgggcgggggcggaggaggcggaagcgggggcggtcggagcgcgggggatgttaaggaaattatattatttttttttgtggtttggtgataaattaacgatattttgtttttttgtgaggtttcgggcgtttgcgaggcggaggtagcgtttcggtttttaaagggatatatatagggttttttttttaacggttttttgcggtttttttttaaaaaaatatagtttttttaaggcgttattttcgggggcgcgcggtcggaatgcgggggttgtggtcggagtcgtcgttaggttacgatttggatcgcgttttttattattttttatttcgttcgacgggaggagacggtcgcggcggcggcgtattaatttg

SEQ ID NO: 16080 - DNA, 548 bp, Artificial Sequence
  chemically treated genomic DNA (Homo sapiens) CpG-island No: 16080
  unsure (484..485, 496, 502..503, 514..515, 517, 525, 533, 539)
caaattaatacgccgccgccgcgaccgtctcctcccgtcgaacgaaataaaaaataataaaaaacgcgatccaaatcgtaacctaacgacgactccgaccacaacccccgcattccgaccgcgcgcccccgaaaataacgccttaaaaaaactatatttttttaaaaaaaaaccgcaaaaaaccgttaaaaaaaaaaccctatatatatccctttaaaaaccgaaacgctacctccgcctcgcaaacgcccgaaacctcacaaaaaaacaaaatatcgttaatttatcaccaaaccacaaaaaaaaataatataatttccttaacatcccccgcgctccgaccgcccccgcttccgcctcctccgcccccgcccgttcgcacaacgaaacctcaacgctcccgcgaaacgcctactccccgaccgaaccacgaaccgaacgactcctaaacgcctacgaaaaaaacccccgacccaaaccgctnnaacccccaaanctcgcnnaattcccaatnntnactttatnttacctanccacgntttaaccaa

SEQ ID NO: 16081 - DNA, 660 bp, Artificial Sequence
  chemically treated genomic DNA (Homo sapiens) CpG-island No: 16081
atattcgacgtataatagaattaagttttggatgaatttcggttattcgtggtaggtttgttcgtgttgtttataaaagcggtatttttttatcggattaatttattcgtaataacgatagtcgagaaacgtaataggggttttcggaggaatattcgttatcgtttttttattaggggattatatgtttttatggattataataattgaggatatttttacgaattatttacgttgggttattttatatcgcggagaatattgtttgcgtcgttaaatttttttatttttggttttcgtttttgattttatattattattttatagtattgatattttaggtttatttatgcgtatatagtaaattcgttggcgcgtaatggtttttatattattatattcgtaaaataagggttcgacgttatgttattagtgttatagatattatcgggaaaatcgatatttttatttttttatatttaagtcgtcgtaattacgcgtattatttggtattaagtaatatttttagatatagatatattataacgtattacgaagtttgattatattatttgataatgtataaatcggttattcgtcgatcgtcgaatttaattacgtcggataaatttagattatatatcgcgtagataaaacgtt

SEQ ID NO: 16082 - DNA, 660 bp, Artificial Sequence
  chemically treated genomic DNA (Homo sapiens) CpG-island No: 16082
aacgttttatctacgcgatatataatctaaatttatccgacgtaattaaattcgacgatcgacgaataaccgatttatacattatcaaataatataatcaaacttcgtaatacgttataatatatctatatctaaaaatattacttaataccaaataatacgcgtaattacgacgacttaaatataaaaaaataaaaatatcgattttcccgataatatctataacactaataacataacgtcgaacccttattttacgaatataataatataaaaaccattacgcgccaacgaatttactatatacgcataaataaacctaaaatatcaatactataaaataataatataaaatcaaaaacgaaaaccaaaaataaaaaaatttaacgacgcaaacaatattctccgcgatataaaataacccaacgtaaataattcgtaaaaatatcctcaattattataatccataaaaacatataatcccctaataaaaaaacgataacgaatattcctccgaaaacccctattacgtttctcgactatcgttattacgaataaattaatccgataaaaaaataccgcttttataaacaacacgaacaaacctaccacgaataaccgaaattcatccaaaacttaattctattatacgtcgaatat

SEQ ID NO: 16083 - DNA, 660 bp, Artificial Sequence
  chemically treated genomic DNA (Homo sapiens) CpG-island No: 16083
ggcgttttgtttgcgcgatgtgtggtttgggtttgttcggcgtggttaggttcgacggtcgacgggtggtcggtttgtgtattgttaggtggtgtggttaggtttcgtggtgcgttgtaatatgtttgtgtttgggggtgttgtttggtattaggtggtgcgcgtgattgcggcggtttgggtatgggggggtaagggtgtcgattttttcggtaatgtttgtggtattagtggtatgacgtcgggtttttgttttgcgagtatggtggtgtagaggttattgcgcgttagcgggtttattgtgtgcgtatgggtgggtttggagtattaatattgtggaatggtaatgtgaggttagagacgggaattaagagtaggggggtttggcggcgtaagtaatgtttttcgcggtgtgaggtggtttagcgtggatggttcgtagaggtatttttagttattgtagtttatgggagtatgtaattttttagtgagaagacgatggcgggtattttttcgagggtttttgttgcgtttttcggttgtcgttgttgcgggtggattgattcggtggagaaatgtcgtttttgtgagtagtacgggtaggtttattacggatgatcggggtttatttaggatttggttttgttatacgtcggatgt

SEQ ID NO: 16084 - DNA, 660 bp, Artificial Sequence
  chemically treated genomic DNA (Homo sapiens) CpG-island No: 16084
acatccgacgtataacaaaaccaaatcctaaataaaccccgatcatccgtaataaacctacccgtactactcacaaaaacgacatttctccaccgaatcaatccacccgcaacaacgacaaccgaaaaacgcaacaaaaaccctcgaaaaaatacccgccatcgtcttctcactaaaaaattacatactcccataaactacaataactaaaaatacctctacgaaccatccacgctaaaccacctcacaccgcgaaaaacattacttacgccgccaaacccccctactcttaattcccgtctctaacctcacattaccattccacaatattaatactccaaacccacccatacgcacacaataaacccgctaacgcgcaataacctctacaccaccatactcgcaaaacaaaaacccgacgtcataccactaataccacaaacattaccgaaaaaatcgacacccttacccccccatacccaaaccgccgcaatcacgcgcaccacctaataccaaacaacacccccaaacacaaacatattacaacgcaccacgaaacctaaccacaccacctaacaatacacaaaccgaccacccgtcgaccgtcgaacctaaccacgccgaacaaacccaaaccacacatcgcgcaaacaaaacgcc

SEQ ID NO: 16085 - DNA, 501 bp, Artificial Sequence
  chemically treated genomic DNA (Homo sapiens) CpG-island No: 16085
  unsure (41, 147, 463)
atcgcgggaggcgatttattatttacgagggcgaagttagntggggaagtcgtcgttttacgatattaatcgtggatgtattcgaatcgagtttacgtttaaaggatatacgatatgataggcgatatcgatataatcgtatcgtangtatttatattacgcgtagtgagggaataagatcgcgagcgaatagtagaatattacgggagttagcgatagataggttttatataggttatagttagcgatagtttattaataacggtggtaatataagatacgcgtattggcgaggtattatattaaacgtacgattatacgtatattagttaatattatatatcgaagatataggcgatcgaatagttacggcgaagtatattcgcgtagtagcggatataatcgttttaacgtatcgtagagtagttatttattacggcgggcgtattattattataggtgnggggttattcgcgggggaataaaattatgacgttttag

SEQ ID NO: 16086 - DNA, 501 bp, Artificial Sequence
  chemically treated genomic DNA (Homo sapiens) CpG-island No: 16086
  unsure (39, 355, 461)
ctaaaacgtcataattttattcccccgcgaataaccccncacctataataataatacgcccgccgtaataaataactactctacgatacgttaaaacgattatatccgctactacgcgaatatacttcgccgtaactattcgatcgcctatatcttcgatatataatattaactaatatacgtataatcgtacgtttaatataatacctcgccaatacgcgtatcttatattaccaccgttattaataaactatcgctaactataacctatataaaacctatctatcgctaactcccgtaatattctactattcgctcgcgatcttattccctcactacgcgtaatataaatacntacgatacgattatatcgatatcgcctatcatatcgtatatcctttaaacgtaaactcgattcgaatacatccacgattaatatcgtaaaacgacgacttccccanctaacttcgccctcgtaaataataaatcgcctcccgcgat

SEQ ID NO: 16087 - DNA, 501 bp, Artificial Sequence
  chemically treated genomic DNA (Homo sapiens) CpG-island No: 16087
  unsure (39, 355, 461)
ttggggcgttatgattttgttttttcgcgggtgattttntatttgtggtggtggtgcgttcgtcgtgatgggtggttgttttgcggtgcgttgaggcggttgtgttcgttgttgcgcgagtgtgtttcgtcgtagttgttcggtcgtttgtgttttcgatgtgtggtgttgattagtgtgcgtgtagtcgtgcgtttagtgtggtatttcgttagtgcgcgtgttttgtgttgttatcgttgttagtagattgtcgttggttgtggtttgtgtggggtttgtttatcgttggttttcgtggtgttttgttattcgttcgcggttttgtttttttattgcgcgtggtgtgagtatntacgatgcggttgtgtcggtgtcgtttattatgtcgtgtgttttttgggcgtgggttcgattcgggtgtatttacgattggtatcgtggagcggcggtttttttanttggtttcgttttcgtgggtagtggatcgtttttcgcggt

SEQ ID NO: 16088 - DNA, 501 bp, Artificial Sequence
  chemically treated genomic DNA (Homo sapiens) CpG-island No: 16088
  unsure (41, 147, 463)
accgcgaaaaacgatccactacccacgaaaacgaaaccaantaaaaaaaccgccgctccacgataccaatcgtaaatacacccgaatcgaacccacgcccaaaaaacacacgacataataaacgacaccgacacaaccgcatcgtanatactcacaccacgcgcaataaaaaaacaaaaccgcgaacgaataacaaaacaccacgaaaaccaacgataaacaaaccccacacaaaccacaaccaacgacaatctactaacaacgataacaacacaaaacacgcgcactaacgaaataccacactaaacgcacgactacacgcacactaatcaacaccacacatcgaaaacacaaacgaccgaacaactacgacgaaacacactcgcgcaacaacgaacacaaccgcctcaacgcaccgcaaaacaaccacccatcacgacgaacgcaccaccaccacaaatanaaaatcacccgcgaaaaaacaaaatcataacgccccaa

SEQ ID NO: 16089 - DNA, 664 bp, Artificial Sequence
  chemically treated genomic DNA (Homo sapiens) CpG-island No: 16089
  unsure (385, 414..415, 448, 453, 456, 509..510, 522, 531, 533, 538)
  unsure (541, 543, 545..546, 592..593, 604, 609, 611, 613..614, 617)
  unsure (619, 621, 625, 627, 629, 631, 633, 635, 639..640, 642, 648)
  unsure (650, 652, 654..655, 659)
ggtgaggacggttatcgtcgttgcgagtttttgtggttggtgcgcggcggtgtggcgaaattggattaaggttatcggttggtcgtattttggtaggcgttgtcggaagaatttcggttaatttcgtatcgttatttggcgataaatagttcgtaggggtcgtggtggttgttcggttggtgtgagcgggtgtcggaagcggatgaggtgttgtttgcgtcgttgtcgtcgtatcgggtattgatcgggttggtggatcgtttcgggcgtatatagacgttttatcgcgaagtcgtcggtgaatttagcggcgaaattatcggcgtgacggatggtgtttggcgttattttcggttggtattgattacgtaggcgtagcgggtangaagaagttcggtagtaggttattttcgnngcgggacggtaatcgttcgttttttttgatatntttgnttncgggtatatacgcgaatatggtcgggataacggtatcgcgtcgtggtcgtggnntcggtgataggntatagaatngnttatngantntnncggaattattcgtgagattttatttgtcgcgtcgttgtgtgcggtnntaattgcggtnttggnantnngtntntntcgntngngntngnatanntnttgggntngngnntggntcgta

SEQ ID NO: 16090 - DNA, 664 bp, Artificial Sequence
  chemically treated genomic DNA (Homo sapiens) CpG-island No: 16090
  unsure (6, 10..11, 13, 15, 17, 23, 25..26, 30, 32, 34, 36, 38, 40)
  unsure (44, 46, 48, 51..52, 54, 56, 61, 72..73, 119..120, 122, 124)
  unsure (127, 132, 134, 143, 155..156, 209, 212, 217, 250..251, 280)
tacganccanncncnancccaananntatncnancncnancganananacnnantnccaanaccgcaattannaccgcacacaacgacgcgacaaataaaatctcacgaataattccgnnanantcnataancnattctatancctatcaccgannccacgaccacgacgcgataccgttatcccgaccatattcgcgtatatacccgnaancaaanatatcaaaaaaaacgaacgattaccgtcccgcnncgaaaataacctactaccgaacttcttcntacccgctacgcctacgtaatcaataccaaccgaaaataacgccaaacaccatccgtcacgccgataatttcgccgctaaattcaccgacgacttcgcgataaaacgtctatatacgcccgaaacgatccaccaacccgatcaatacccgatacgacgacaacgacgcaaacaacacctcatccgcttccgacacccgctcacaccaaccgaacaaccaccacgacccctacgaactatttatcgccaaataacgatacgaaattaaccgaaattcttccgacaacgcctaccaaaatacgaccaaccgataaccttaatccaatttcgccacaccgccgcgcaccaaccacaaaaactcgcaacgacgataaccgtcctcacc

SEQ ID NO: 16091 - DNA, 664 bp, Artificial Sequence
  chemically treated genomic DNA (Homo sapiens) CpG-island No: 16091
  unsure (6, 10..11, 13, 15, 17, 23, 25..26, 30, 32, 34, 36, 38, 40)
  unsure (44, 46, 48, 51..52, 54, 56, 61, 72..73, 119..120, 122, 124)
  unsure (127, 132, 134, 143, 155..156, 209, 212, 217, 250..251, 280)
tacganttanntntngntttaangnntatntngntntngncggngngngtnngntnttaangtcgtaattanngtcgtatatagcggcgcggtaggtaaagttttacgggtagtttcgnngngnttngtggntngttttatgntttattatcggnnttacgattacgacgcgatgtcgttgtttcggttatattcgcgtgtatattcgnagntaggngtattaggaaaagcggacggttatcgtttcgtnncggaaatggtttgttgtcgggtttttttntgttcgttgcgtttgcgtggttagtattagtcggaagtgacgttaggtattattcgttacgtcggtgatttcgtcgttgaatttatcggcggtttcgcggtggaacgtttgtgtgcgttcgaagcggtttattagttcggttagtattcggtacggcggtagcggcgtaggtagtattttattcgttttcggtattcgtttatattaatcgagtagttattacggtttttgcggattgtttgtcgttagataacgatgcggagttaatcggagttttttcgatagcgtttgttagagtgcggttagtcggtgattttgatttagtttcgttatatcgtcgcgtattagttatagagattcgtagcggcggtaatcgtttttatt

SEQ ID NO: 16092 - DNA, 664 bp, Artificial Sequence
  chemically treated genomic DNA (Homo sapiens) CpG-island No: 16092
  unsure (385, 414..415, 448, 453, 456, 509..510, 522, 531, 533, 538)
  unsure (541, 543, 545..546, 592..593, 604, 609, 611, 613..614, 617)
  unsure (619, 621, 625, 627, 629, 631, 633, 635, 639..640, 642, 648)
  unsure (650, 652, 654..655, 659)
aataaaaacgattaccgccgctacgaatctctataactaatacgcgacgatataacgaaactaaatcaaaatcaccgactaaccgcactctaacaaacgctatcgaaaaaactccgattaactccgcatcgttatctaacgacaaacaatccgcaaaaaccgtaataactactcgattaatataaacgaataccgaaaacgaataaaatactacctacgccgctaccgccgtaccgaatactaaccgaactaataaaccgcttcgaacgcacacaaacgttccaccgcgaaaccgccgataaattcaacgacgaaatcaccgacgtaacgaataatacctaacgtcacttccgactaatactaaccacgcaaacgcaacgaacanaaaaaaacccgacaacaaaccatttccgnnacgaaacgataaccgtccgcttttcctaatacncctanctncgaatatacacgcgaatataaccgaaacaacgacatcgcgtcgtaatcgtaannccgataataaancataaaacnanccacnaancncnncgaaactacccgtaaaactttacctaccgcgccgctatatacgacnntaattacgacnttaanancnnacncncnccgncnanancnanatanncnttaaancnananntaantcgta

SEQ ID NO: 16093 - DNA, 741 bp, Artificial Sequence
  chemically treated genomic DNA (Homo sapiens) CpG-island No: 16093
gcgattcggttcgttttaaataacgtttcgggtaggagaaggtttttcgggtggttcgtagtcgggttggaggggtggggtttacgttgggaaaaggtttcgggcgggtcgtattaacgcgcgtagggggaagaggttttcgaggttaggacggtgtcgttgtttacgcgtttagtggcgaggtggagaaattttttatttattttcggttatttgttcgagagttatggtattaggagttttcgcgttttatagtcgatttttaaagatttttttttcggtttttttgtcgagtgggagttttcggaaatgggggtcgggcggtatcgggtaggcggtggggagaagagtgttttgttatttattaattttattacgttttatatagatttattcgtttatttgtcgtcgtcgtagtttttattagttttttgggcggttttttttgggtttttttaaatagttttatgacgaattgaattcgttttgtttttttcggtttttagtttttcgcgtttaggtaggttacgggtagtcgtttgggcggggttcgcggaaaaggaggtagttttaatttttagagtagggagcggcggtattaggggatgttgcgtatgcgttatacgtttgcgtagaatcgagtgagtgggagattagttaaaaaggttgacgttatcgtatatgttttggttatgtttgtgtgggggagattacggattcggtgtttttcgtaaggtgtag

SEQ ID NO: 16094 - DNA, 741 bp, Artificial Sequence
  chemically treated genomic DNA (Homo sapiens) CpG-island No: 16094
ctacaccttacgaaaaacaccgaatccgtaatctcccccacacaaacataaccaaaacatatacgataacgtcaacctttttaactaatctcccactcactcgattctacgcaaacgtataacgcatacgcaacatcccctaataccgccgctccctactctaaaaattaaaactacctccttttccgcgaaccccgcccaaacgactacccgtaacctacctaaacgcgaaaaactaaaaaccgaaaaaaacaaaacgaattcaattcgtcataaaactatttaaaaaaacccaaaaaaaaccgcccaaaaaactaataaaaactacgacgacgacaaataaacgaataaatctatataaaacgtaataaaattaataaataacaaaacactcttctccccaccgcctacccgataccgcccgacccccatttccgaaaactcccactcgacaaaaaaaccgaaaaaaaaatctttaaaaatcgactataaaacgcgaaaactcctaataccataactctcgaacaaataaccgaaaataaataaaaaatttctccacctcgccactaaacgcgtaaacaacgacaccgtcctaacctcgaaaacctcttccccctacgcgcgttaatacgacccgcccgaaaccttttcccaacgtaaaccccacccctccaacccgactacgaaccacccgaaaaaccttctcctacccgaaacgttatttaaaacgaaccgaatcgc

SEQ ID NO: 16095 - DNA, 741 bp, Artificial Sequence
  chemically treated genomic DNA (Homo sapiens) CpG-island No: 16095
ttatattttacgaaaagtatcgaattcgtggttttttttatatagatatgattagaatatgtgcgatgacgttagtttttttgattagttttttatttattcgattttgcgtaggcgtatggcgtatgcgtaatattttttagtgtcgtcgttttttattttgggggttgggattattttttttttcgcgggtttcgtttaggcggttgttcgtgatttgtttgggcgcggggaattgaaagtcggaaggggtaagacgggtttagttcgttatggggttgtttggaaagatttaggagaagtcgtttaaagaattggtaagggttacggcggcggtagataagcgggtggatttgtgtggggcgtagtgaagttggtaaatgataggatatttttttttttatcgtttgttcgatatcgttcggtttttattttcggggatttttattcgataggggggtcggaggaagagtttttaggagtcggttgtgggacgcgagagtttttggtgttatggttttcgaataggtagtcgagggtggatgaagagtttttttatttcgttattgagcgcgtaggtagcgatatcgttttggtttcggaaattttttttttttgcgcgcgttggtacgattcgttcggaatttttttttagcgtaggttttatttttttagttcggttgcggattattcggagaatttttttttgttcgaagcgttgtttggagcgggtcgggtcgt

SEQ ID NO: 16096 - DNA, 741 bp, Artificial Sequence
  chemically treated genomic DNA (Homo sapiens) CpG-island No: 16096
acgacccgacccgctccaaacaacgcttcgaacaaaaaaaaattctccgaataatccgcaaccgaactaaaaaaataaaacctacgctaaaaaaaaattccgaacgaatcgtaccaacgcgcgcaaaaaaaaaaaatttccgaaaccaaaacgatatcgctacctacgcgctcaataacgaaataaaaaaactcttcatccaccctcgactacctattcgaaaaccataacaccaaaaactctcgcgtcccacaaccgactcctaaaaactcttcctccgacccccctatcgaataaaaatccccgaaaataaaaaccgaacgatatcgaacaaacgataaaaaaaaaaatatcctatcatttaccaacttcactacgccccacacaaatccacccgcttatctaccgccgccgtaacccttaccaattctttaaacgacttctcctaaatctttccaaacaaccccataacgaactaaacccgtcttaccccttccgactttcaattccccgcgcccaaacaaatcacgaacaaccgcctaaacgaaacccgcgaaaaaaaaaataatcccaacccccaaaataaaaaacgacgacactaaaaaatattacgcatacgccatacgcctacgcaaaatcgaataaataaaaaactaatcaaaaaaactaacgtcatcgcacatattctaatcatatctatataaaaaaaaccacgaattcgatacttttcgtaaaatataa

SEQ ID NO: 16097 - DNA, 975 bp, Artificial Sequence
  chemically treated genomic DNA (Homo sapiens) CpG-island No: 16097
ggataagcgggtagggagtaggaggtgaggagaagcgggtagggagtaggaggtgaggataagcgggtagggagtaggagtgtgaggataagcgggtagggattaggaggtgaggataagcgggtagggagtaggaggtgaggataagcgggtagggagtaggaggtgaggataagcgggtagggagtaggaggtgaggaaaagcgggtagggagtaggaggtgaggataagcgggtagggagtaggaggtgaggataagcgggtagggagtaggaggtgaggaaaagcgggtagggagtaggaggtgaggaaaagcgggtagggagtaggaggtgaggataagcgggtagggagtaggacgtgaggataagcgggtagggagtaggaggtgaggagaagcgggtagggagtaggaggtgaggagaagcgggtagggagtaggaggtgaggataagcgggtagggagtaggaggtgaggagaagcgggtagggagtaggaggtgaggagaagcgggtagggagtaggaggtgaggataagcgggtagggagtaggaggtgaggagaagcgggtagggagtaggaggtgaggagaagcgggtagggagtaggaggtgaggataagcgggtagggagtaggaggtgaggaaaagcgggtagggagtaggaggtgaggagaagcgggtagggagtaggaggtgaggataagcgggtagggagtaggaggtgaggagaggtgggtagggagtaggaggtgaggagaagcgggtagggagtaggaggtgaggataagcgggtagggagtaggaggtgaggagaagcgggtagggagtaggaggtgaggagaggtgggtagggagtaggaggtgaggatagcgagtagggagtaggaggtgaggaaaagtgggttggggagtaggaggtgaaataggaggtaggagagtgaaggatagtaagaaatagaggatgttgacgt

SEQ ID NO: 16098 - DNA, 975 bp, Artificial Sequence
  chemically treated genomic DNA (Homo sapiens) CpG-island No: 16098
acgtcaacatcctctatttcttactatccttcactctcctacctcctatttcacctcctactccccaacccacttttcctcacctcctactccctactcgctatcctcacctcctactccctacccacctctcctcacctcctactccctacccgcttctcctcacctcctactccctacccgcttatcctcacctcctactccctacccgcttctcctcacctcctactccctacccacctctcctcacctcctactccctacccgcttatcctcacctcctactccctacccgcttctcctcacctcctactccctacccgcttttcctcacctcctactccctacccgcttatcctcacctcctactccctacccgcttctcctcacctcctactccctacccgcttctcctcacctcctactccctacccgcttatcctcacctcctactccctacccgcttctcctcacctcctactccctacccgcttctcctcacctcctactccctacccgcttatcctcacctcctactccctacccgcttctcctcacctcctactccctacccgcttctcctcacctcctactccctacccgcttatcctcacgtcctactccctacccgcttatcctcacctcctactccctacccgcttttcctcacctcctactccctacccgcttttcctcacctcctactccctacccgcttatcctcacctcctactccctacccgcttatcctcacctcctactccctacccgcttttcctcacctcctactccctacccgcttatcctcacctcctactccctacccgcttatcctcacctcctactccctacccgcttatcctcacctcctaatccctacccgcttatcctcacactcctactccctacccgcttatcctcacctcctactccctacccgcttctcctcacctcctactccctacccgcttatcc

SEQ ID NO: 16099 - DNA, 975 bp, Artificial Sequence
  chemically treated genomic DNA (Homo sapiens) CpG-island No: 16099
acgttagtattttttattttttattgttttttatttttttattttttattttattttttattttttaatttatttttttttattttttattttttattcgttgtttttattttttattttttatttatttttttttattttttattttttattcgtttttttttattttttattttttattcgtttgtttttattttttattttttattcgtttttttttattttttattttttatttatttttttttattttttattttttattcgtttgtttttattttttattttttattcgtttttttttattttttattttttattcgtttttttttattttttattttttattcgtttgtttttattttttattttttattcgtttttttttattttttattttttattcgtttttttttattttttattttttattcgtttgtttttattttttattttttattcgtttttttttattttttattttttattcgtttttttttattttttattttttattcgtttgtttttattttttattttttattcgtttttttttattttttattttttattcgtttttttttattttttattttttattcgtttgtttttacgttttattttttattcgtttgtttttattttttattttttattcgtttttttttattttttattttttattcgtttttttttattttttattttttattcgtttgtttttattttttattttttattcgtttgtttttattttttattttttattcgtttttttttattttttattttttattcgtttgtttttattttttattttttattcgtttgtttttattttttattttttattcgtttgtttttattttttagtttttattcgtttgtttttatatttttattttttattcgtttgtttttattttttattttttattcgtttttttttattttttattttttattcgtttgttt

SEQ ID NO: 16100 - DNA, 975 bp, Artificial Sequence
  chemically treated genomic DNA (Homo sapiens) CpG-island No: 16100
aaacaaacgaataaaaaataaaaaataaaaaaaaacgaataaaaaataaaaaataaaaacaaacgaataaaaaataaaaatataaaaacaaacgaataaaaactaaaaaataaaaacaaacgaataaaaaataaaaaataaaaacaaacgaataaaaaataaaaaataaaaacaaacgaataaaaaataaaaaataaaaaaaaacgaataaaaaataaaaaataaaaacaaacgaataaaaaataaaaaataaaaacaaacgaataaaaaataaaaaataaaaaaaaacgaataaaaaataaaaaataaaaaaaaacgaataaaaaataaaaaataaaaacaaacgaataaaaaataaaacgtaaaaacaaacgaataaaaaataaaaaataaaaaaaaacgaataaaaaataaaaaataaaaaaaaacgaataaaaaataaaaaataaaaacaaacgaataaaaaataaaaaataaaaaaaaacgaataaaaaataaaaaataaaaaaaaacgaataaaaaataaaaaataaaaacaaacgaataaaaaataaaaaataaaaaaaaacgaataaaaaataaaaaataaaaaaaaacgaataaaaaataaaaaataaaaacaaacgaataaaaaataaaaaataaaaaaaaacgaataaaaaataaaaaataaaaaaaaacgaataaaaaataaaaaataaaaacaaacgaataaaaaataaaaaataaaaaaaaataaataaaaaataaaaaataaaaaaaaacgaataaaaaataaaaaataaaaacaaacgaataaaaaataaaaaataaaaaaaaacgaataaaaaataaaaaataaaaaaaaataaataaaaaataaaaaataaaaacaacgaataaaaaataaaaaataaaaaaaaataaattaaaaaataaaaaataaaataaaaaataaaaaaataaaaaacaataaaaaataaaaaatactaacgt

SEQ ID NO: 16101 - DNA, 561 bp, Artificial Sequence
  chemically treated genomic DNA (Homo sapiens) CpG-island No: 16101
tgattagtattttggtttgtttttttcgaaaataggattcgatgatgttttttaattgttacggtgtttcgtatttatttacgaaagtttattagattttgagttatagtttgagggtttttgacggattattcgggaaggttatttgtcgtatgaattcggtattggcgttgcggacgggtagttcggggggaacgagttttttgttttgtaaggtgcgttcgtttattttcgtttagtgtatttatttgcgagtgtatagtgtttgcgtttcgtaattcgttgggtgtttggcggtttggatatcggattgcggttgggacggttttggtgtgcgttcgtgggtgtaattttgggggtttcgttaggatataaatatgattagacgggaaacgtttttatagttaagtgcgacgtaaaaagagtagtacgattggggggcggtgttataggtttttcgtttgtttcgcggttaaaaatcggaattaggttaaaagtaggttaaaagtattttagaataaattagcgaatattttagtaatagaggtatttcgataattt

SEQ ID NO: 16102 - DNA, 561 bp, Artificial Sequence
  chemically treated genomic DNA (Homo sapiens) CpG-island No: 16102
aaattatcgaaatacctctattactaaaatattcgctaatttattctaaaatacttttaacctacttttaacctaattccgatttttaaccgcgaaacaaacgaaaaacctataacaccgccccccaatcgtactactctttttacgtcgcacttaactataaaaacgtttcccgtctaatcatatttatatcctaacgaaacccccaaaattacacccacgaacgcacaccaaaaccgtcccaaccgcaatccgatatccaaaccgccaaacacccaacgaattacgaaacgcaaacactatacactcgcaaataaatacactaaacgaaaataaacgaacgcaccttacaaaacaaaaaactcgttccccccgaactacccgtccgcaacgccaataccgaattcatacgacaaataaccttcccgaataatccgtcaaaaaccctcaaactataactcaaaatctaataaactttcgtaaataaatacgaaacaccgtaacaattaaaaaacatcatcgaatcctattttcgaaaaaaacaaaccaaaatactaatca

SEQ ID NO: 16103 - DNA, 561 bp, Artificial Sequence
  chemically treated genomic DNA (Homo sapiens) CpG-island No: 16103
ggattatcggaatatttttgttattggggtattcgttggtttgttttagagtgtttttggtttgtttttggtttggtttcgatttttggtcgcgaagtaggcgaaaaatttatggtatcgttttttagtcgtgttattttttttacgtcgtatttgattgtggaggcgtttttcgtttggttatatttgtattttggcgaaatttttagggttgtatttacgagcgtatattagaatcgttttagtcgtaattcggtatttagatcgttaaatatttaacgggttgcgaggcgtaaatattatgtattcgtagatggatatattgaacggagatggacgaacgtattttgtagggtagagagttcgtttttttcgaattgttcgttcgtagcgttaatatcggatttatacgataagtgattttttcggatagttcgttaaaaatttttaggttgtggtttaggatttggtaagttttcgtggatagatgcggggtatcgtgatagttgaggagtattatcggattttgttttcggaaaggataggttagaatgttgatta

SEQ ID NO: 16104 - DNA, 561 bp, Artificial Sequence
  chemically treated genomic DNA (Homo sapiens) CpG-island No: 16104
taatcaacattctaacctatcctttccgaaaacaaaatccgataatactcctcaactatcacgataccccgcatctatccacgaaaacttaccaaatcctaaaccacaacctaaaaatttttaacgaactatccgaaaaaatcacttatcgtataaatccgatattaacgctacgaacgaacaattcgaaaaaaacgaactctctaccctacaaaatacgttcgtccatctccgttcaatatatccatctacgaatacataatatttacgcctcgcaacccgttaaatatttaacgatctaaataccgaattacgactaaaacgattctaatatacgctcgtaaatacaaccctaaaaatttcgccaaaatacaaatataaccaaacgaaaaacgcctccacaatcaaatacgacgtaaaaaaaataacacgactaaaaaacgataccataaatttttcgcctacttcgcgaccaaaaatcgaaaccaaaccaaaaacaaaccaaaaacactctaaaacaaaccaacgaataccccaataacaaaaatattccgataatcc

SEQ ID NO: 16105 - DNA, 871 bp, Artificial Sequence
  chemically treated genomic DNA (Homo sapiens) CpG-island No: 16105
gatggcgcgttttaaagagattttcgatattaatttcgttggtcgtcgcgcgcgcgtgtagttaggcgtgcgtaatttggcgattttttaggtcgttgtatcgtataatttttattacgtatcggatttttttttataaatcgtttgttttattggcggtaatgtggttgaaaatgtcggcggcgtttattgtttgaaatatggtttgatcgtatataatttgttgaaaattgaagtgtaaacgttggacggcgaggtattgacgtttggatcggacgcgttggatttatttggttttgatttgttggcgttgtttatcggatcggaaggtatgttcggcgtgattatcgaagtgacggtaaaattgttgtcgaagtcgttcgtggcgcgggttttgttagttagttttgattcggtagaaaaagtcggatttgcggttggtgatattatcgttaatggtattattttcggcgggttggagatgatggataatttgtcgattcgcgcggcggaagattttatttatgtcggttatttcgtcgacgtcgaagcgattttgttatgcgagttggacggcgtggagtttgacgtataggaagattgcgagcgggttaacgatattttgttgaaagcgggcgcgattgacgttcgtttggtataggacgaagtagagcgcgtacgtttttgggtcggtcgtaaaaatgcgttttcggcggtaggacgtattttttcggattattattgtatggatggtattatttcgcgtcgcgttttgtttggcgtattggaaggtattgttcgtttatcgtagtaatatgatttacgtgttgttaacgttttttatgtcggagatggtaatatgtattcgtta

SEQ ID NO: 16106 - DNA, 871 bp, Artificial Sequence
  chemically treated genomic DNA (Homo sapiens) CpG-island No: 16106
taacgaatacatattaccatctccgacataaaaaacgttaacaacacgtaaatcatattactacgataaacgaacaataccttccaatacgccaaacaaaacgcgacgcgaaataataccatccatacaataataatccgaaaaaatacgtcctaccgccgaaaacgcatttttacgaccgacccaaaaacgtacgcgctctacttcgtcctataccaaacgaacgtcaatcgcgcccgctttcaacaaaatatcgttaacccgctcgcaatcttcctatacgtcaaactccacgccgtccaactcgcataacaaaatcgcttcgacgtcgacgaaataaccgacataaataaaatcttccgccgcgcgaatcgacaaattatccatcatctccaacccgccgaaaataataccattaacgataatatcaccaaccgcaaatccgactttttctaccgaatcaaaactaactaacaaaacccgcgccacgaacgacttcgacaacaattttaccgtcacttcgataatcacgccgaacataccttccgatccgataaacaacgccaacaaatcaaaaccaaataaatccaacgcgtccgatccaaacgtcaatacctcgccgtccaacgtttacacttcaattttcaacaaattatatacgatcaaaccatatttcaaacaataaacgccgccgacattttcaaccacattaccgccaataaaacaaacgatttataaaaaaaaatccgatacgtaataaaaattatacgatacaacgacctaaaaaatcgccaaattacgcacgcctaactacacgcgcgcgcgacgaccaacgaaattaatatcgaaaatctctttaaaacgcgccatc

SEQ ID NO: 16107 - DNA, 871 bp, Artificial Sequence
  chemically treated genomic DNA (Homo sapiens) CpG-island No: 16107
taacgggtgtatgttgttattttcggtatgaaagacgttggtaatacgtaaattatattgttgcgataaacgggtaatgttttttagtacgttaggtagggcgcgacgcgggatggtgttatttatgtagtagtaattcggggagatacgttttatcgtcgggaacgtatttttgcgatcggtttagaaacgtacgcgttttgtttcgttttgtgttagacggacgttagtcgcgttcgtttttaataagatgtcgttaattcgttcgtagtttttttgtacgttagattttacgtcgtttagttcgtataataaaatcgtttcggcgtcgacgggataatcggtatgaataaaatttttcgtcgcgcggatcgataggttatttattatttttagttcgtcggggataatgttattggcgatgatgttattaatcgtaagttcggttttttttatcgagttaaagttggttaatagaattcgcgttacgggcggtttcggtagtagttttatcgttatttcggtggttacgtcgagtatatttttcgattcggtgaatagcgttagtaggttaaaattaggtgaatttagcgcgttcgatttaagcgttagtgtttcgtcgtttagcgtttgtattttaatttttagtaggttatgtacggttagattatattttaggtagtggacgtcgtcggtatttttagttatattgtcgttaatggaataggcgatttgtgaggaagggttcggtgcgtagtagagattatgcggtgtaacggtttgggagatcgttaggttacgtacgtttggttgtacgcgcgcgcggcgattaacggggttaatgtcgaggatttttttaaagcgcgttatt

SEQ ID NO: 16108 - DNA, 871 bp, Artificial Sequence
  chemically treated genomic DNA (Homo sapiens) CpG-island No: 16108
aataacgcgctttaaaaaaatcctcgacattaaccccgttaatcgccgcgcgcgcgtacaaccaaacgtacgtaacctaacgatctcccaaaccgttacaccgcataatctctactacgcaccgaacccttcctcacaaatcgcctattccattaacgacaatataactaaaaataccgacgacgtccactacctaaaatataatctaaccgtacataacctactaaaaattaaaatacaaacgctaaacgacgaaacactaacgcttaaatcgaacgcgctaaattcacctaattttaacctactaacgctattcaccgaatcgaaaaatatactcgacgtaaccaccgaaataacgataaaactactaccgaaaccgcccgtaacgcgaattctattaaccaactttaactcgataaaaaaaaccgaacttacgattaataacatcatcgccaataacattatccccgacgaactaaaaataataaataacctatcgatccgcgcgacgaaaaattttattcataccgattatcccgtcgacgccgaaacgattttattatacgaactaaacgacgtaaaatctaacgtacaaaaaaactacgaacgaattaacgacatcttattaaaaacgaacgcgactaacgtccgtctaacacaaaacgaaacaaaacgcgtacgtttctaaaccgatcgcaaaaatacgttcccgacgataaaacgtatctccccgaattactactacataaataacaccatcccgcgtcgcgccctacctaacgtactaaaaaacattacccgtttatcgcaacaatataatttacgtattaccaacgtctttcataccgaaaataacaacatacacccgtta

SEQ ID NO: 16109 - DNA, 512 bp, Artificial Sequence
  chemically treated genomic DNA (Homo sapiens) CpG-island No: 16109
tagtttaattagcgtggtcgcgataaacgttagttgttcgaacggatgattgaattgttttagattttagttgattgttattattacgattagcgtaattagcggtagatttttttttaggcgtgatgtttgcggtttttcggcggtttgtttatcgcgtagggaatagtttgttttttgtagcgtagatttaatttgtgtacgaatgttattgtcggtatcgattattagtttttcggtggcgaataatatttgtatttgatttacgtttgtaagttggcgtacggtattttttattttgcgcgtataggcggcgtagtttatgtcgttgattttttagttatagcgggtgtcggagacgtttttagagagagttggcgtgttggaatatgcgtcgtcgtagtaatagtcgttggcgttttgtatcgtggttagcggtttgaacgtagtaaattgaggggtttttttgtcgtgattgttaggagtcgatatggtatttttcggttaagttt

SEQ ID NO: 16110 - DNA, 512 bp, Artificial Sequence
  chemically treated genomic DNA (Homo sapiens) CpG-island No: 16110
aaacttaaccgaaaaataccatatcgactcctaacaatcacgacaaaaaaacccctcaatttactacgttcaaaccgctaaccacgatacaaaacgccaacgactattactacgacgacgcatattccaacacgccaactctctctaaaaacgtctccgacacccgctataactaaaaaatcaacgacataaactacgccgcctatacgcgcaaaataaaaaataccgtacgccaacttacaaacgtaaatcaaatacaaatattattcgccaccgaaaaactaataatcgataccgacaataacattcgtacacaaattaaatctacgctacaaaaaacaaactattccctacgcgataaacaaaccgccgaaaaaccgcaaacatcacgcctaaaaaaaaatctaccgctaattacgctaatcgtaataataacaatcaactaaaatctaaaacaattcaatcatccgttcgaacaactaacgtttatcgcgaccacgctaattaaacta

SEQ ID NO: 16111 - DNA, 512 bp, Artificial Sequence
  chemically treated genomic DNA (Homo sapiens) CpG-island No: 16111
aaatttaatcggaggatgttatgtcgatttttgataattacggtaagaaagttttttaatttgttgcgtttaaatcgttaattacggtatagaacgttaacgattgttgttgcgacggcgtatgttttagtacgttaattttttttgaaaacgttttcggtattcgttatagttggaaagttagcggtatggattgcgtcgtttgtgcgcgtaaggtagaaaatgtcgtgcgttagtttgtaggcgtgaattaggtgtaggtgttgttcgttatcgaaaaattggtggtcgatgtcgataatgatattcgtgtataagttgaatttgcgttgtaaaaagtaggttattttttgcgcgatgaataggtcgtcgaagaatcgtaagtattacgtttgaaagagaatttgtcgttgattacgttaatcgtgatgatggtaattagttggggtttggagtagtttaattattcgttcgggtaattggcgtttatcgcgattacgttggttgggttg

SEQ ID NO: 16112 - DNA, 512 bp, Artificial Sequence
  chemically treated genomic DNA (Homo sapiens) CpG-island No: 16112
caacccaaccaacgtaatcgcgataaacgccaattacccgaacgaataattaaactactccaaaccccaactaattaccatcatcacgattaacgtaatcaacgacaaattctctttcaaacgtaatacttacgattcttcgacgacctattcatcgcgcaaaaaataacctactttttacaacgcaaattcaacttatacacgaatatcattatcgacatcgaccaccaatttttcgataacgaacaacacctacacctaattcacgcctacaaactaacgcacgacattttctaccttacgcgcacaaacgacgcaatccataccgctaactttccaactataacgaataccgaaaacgttttcaaaaaaaattaacgtactaaaacatacgccgtcgcaacaacaatcgttaacgttctataccgtaattaacgatttaaacgcaacaaattaaaaaactttcttaccgtaattatcaaaaatcgacataacatcctccgattaaattt

SEQ ID NO: 16113 - DNA, 706 bp, Artificial Sequence
  chemically treated genomic DNA (Homo sapiens) CpG-island No: 16113
ttttaacgagaaatttcgcggcgtacgtttttatgttagcgaaaattagttgaaaattatcgttaataattcggaataggaagaagcggaagagattttcgacgttatttatagcggtgcggagatggaaatcggttttaacgttagttatgtgttggatgttttgaacgcgttgaaatgcgaaaacgttcgtatgatgttgatcgattcggtttttagcgtgtagattgaagatgcggttagttagagcgcggtttatgttgttatgttaatgagattgtaatgttttttattcgtttgttgattcgcgattttcgtaatattgaaatcgcggatttcgttttatttttcggttttaattttttggtaggtgttaacggtagtggtaaaattagcgtgttggaagttatttatacgttcggttatggtcgggcgtttcgtagtttgtagattggtcgcgttattcgttatgagtaggaggcgtttgttttttacgggcgattatagggcgaagagcgcgagatagcgattggtttaattaaagataaatagggcgatagtaaagttcgtatcgacggtatagacgggtataaggtcgcggaattggcgtatttgatgttaatgtagttgataacgttagaagggtttattttatttaacggcggttttaaatatagaagagtatttttcgattggggatgttttt

SEQ ID NO: 16114 - DNA, 706 bp, Artificial Sequence
  chemically treated genomic DNA (Homo sapiens) CpG-island No: 16114
aaaaacatccccaatcgaaaaatactcttctatatttaaaaccgccgttaaataaaataaacccttctaacgttatcaactacattaacatcaaatacgccaattccgcgaccttatacccgtctataccgtcgatacgaactttactatcgccctatttatctttaattaaaccaatcgctatctcgcgctcttcgccctataatcgcccgtaaaaaacaaacgcctcctactcataacgaataacgcgaccaatctacaaactacgaaacgcccgaccataaccgaacgtataaataacttccaacacgctaattttaccactaccgttaacacctaccaaaaaattaaaaccgaaaaataaaacgaaatccgcgatttcaatattacgaaaatcgcgaatcaacaaacgaataaaaaacattacaatctcattaacataacaacataaaccgcgctctaactaaccgcatcttcaatctacacgctaaaaaccgaatcgatcaacatcatacgaacgttttcgcatttcaacgcgttcaaaacatccaacacataactaacgttaaaaccgatttccatctccgcaccgctataaataacgtcgaaaatctcttccgcttcttcctattccgaattattaacgataattttcaactaattttcgctaacataaaaacgtacgccgcgaaatttctcgttaaaa

SEQ ID NO: 16115 - DNA, 706 bp, Artificial Sequence
  chemically treated genomic DNA (Homo sapiens) CpG-island No: 16115
gaaagtatttttagtcgaggaatgtttttttgtatttggggtcgtcgttgagtaaagtaaatttttttggcgttattaattgtattggtattaggtgcgttagtttcgcgattttatgttcgtttgtatcgtcgatgcggattttgttgtcgttttgtttgtttttggttaagttaatcgttgtttcgcgtttttcgttttgtaatcgttcgtggagaataaacgttttttgtttatggcgaatgacgcgattaatttgtaaattgcgaaacgttcgattatggtcgagcgtatagatggtttttagtacgttggttttgttattgtcgttggtatttattagaaagttaaagtcgggagataaggcgagattcgcggttttaatgttgcggaaatcgcggattaataagcgggtgagggatattatagttttattggtatgataatataagtcgcgttttggttggtcgtatttttaatttgtacgttggaaatcgaatcggttagtattatgcggacgttttcgtattttagcgcgtttagaatatttagtatataattgacgttgaagtcgatttttattttcgtatcgttataggtaacgtcgaggatttttttcgtttttttttgtttcgggttgttggcggtgatttttagttggttttcgttgatataaagacgtacgtcgcggaatttttcgttagag

SEQ ID NO: 16116 - DNA, 706 bp, Artificial Sequence
  chemically treated genomic DNA (Homo sapiens) CpG-island No: 16116
ctctaacgaaaaattccgcgacgtacgtctttatatcaacgaaaaccaactaaaaatcaccgccaacaacccgaaacaaaaaaaaacgaaaaaaatcctcgacgttacctataacgatacgaaaataaaaatcgacttcaacgtcaattatatactaaatattctaaacgcgctaaaatacgaaaacgtccgcataatactaaccgattcgatttccaacgtacaaattaaaaatacgaccaaccaaaacgcgacttatattatcataccaataaaactataatatccctcacccgcttattaatccgcgatttccgcaacattaaaaccgcgaatctcgccttatctcccgactttaactttctaataaataccaacgacaataacaaaaccaacgtactaaaaaccatctatacgctcgaccataatcgaacgtttcgcaatttacaaattaatcgcgtcattcgccataaacaaaaaacgtttattctccacgaacgattacaaaacgaaaaacgcgaaacaacgattaacttaaccaaaaacaaacaaaacgacaacaaaatccgcatcgacgatacaaacgaacataaaatcgcgaaactaacgcacctaataccaatacaattaataacgccaaaaaaatttactttactcaacgacgaccccaaatacaaaaaaacattcctcgactaaaaatactttc

SEQ ID NO: 16117 - DNA, 589 bp, Artificial Sequence
  chemically treated genomic DNA (Homo sapiens) CpG-island No: 16117
gcgtatttttatcggtatattatttttattacgggtttttggcgaatttttattaatatagattaatattataatatacggatcgttttattattgcgagtaggcgaatagagaggatttttaaaataaataaaatattttattttttttttttatcgcgtcgcgattatatatttttcgttcgtgcgtaagatttatttatattttatattttgcggaaggtagatttattaagtataaaatattttttatcgcggtaagaagacggatatttaaattaagagaagttaatattacgtttacggtttggttatatttaggattattgtttaatttataggcgatcgttaatttttaatatttatttatattatattaataattattgtttttcgataaatattaatttttttttatgttcgcggttatagggatttaacgatcgagaatcggaaagtaacgacgtttaaatatatttaggtataaagttttcgattcgtaagaattttatattattagagtcgtatttataaaattatttatttttatatagagcgttataatatagaattatatttattttgtagta

SEQ ID NO: 16118 - DNA, 589 bp, Artificial Sequence
  chemically treated genomic DNA (Homo sapiens) CpG-island No: 16118
tactacaaaataaatataattctatattataacgctctatataaaaataaataattttataaatacgactctaataatataaaattcttacgaatcgaaaactttatacctaaatatatttaaacgtcgttactttccgattctcgatcgttaaatccctataaccgcgaacataaaaaaaaattaatatttatcgaaaaacaataattattaatataatataaataaatattaaaaattaacgatcgcctataaattaaacaataatcctaaatataaccaaaccgtaaacgtaatattaacttctcttaatttaaatatccgtcttcttaccgcgataaaaaatattttatacttaataaatctaccttccgcaaaatataaaatataaataaatcttacgcacgaacgaaaaatatataatcgcgacgcgataaaaaaaaaaaataaaatattttatttattttaaaaatcctctctattcgcctactcgcaataataaaacgatccgtatattataatattaatctatattaataaaaattcgccaaaaacccgtaataaaaataatataccgataaaaatacgc

SEQ ID NO: 16119 - DNA, 589 bp, Artificial Sequence
  chemically treated genomic DNA (Homo sapiens) CpG-island No: 16119
tgttgtagggtgggtgtggttttgtgttgtggcgttttgtgtgggggtgggtggttttgtggatgcgattttggtggtgtgaggtttttgcgggtcgggggttttgtatttgggtgtgtttgggcgtcgttgtttttcggttttcggtcgttgggtttttgtgatcgcgagtatgggggggggttggtgtttgtcgggggatagtggttgttggtgtagtgtgagtgggtattgggggttagcgatcgtttgtgggttgagtagtagttttgagtgtggttaggtcgtgggcgtggtgttggttttttttggtttgggtattcgtttttttgtcgcggtggagggtattttgtgtttgatggatttgtttttcgtagggtgtgggatgtaggtgggttttgcgtacgggcggagggtgtgtggtcgcggcgcggtggggggggggggtggaatgttttgtttgttttaagggttttttttgttcgtttgttcgtagtggtggggcggttcgtgtgttgtagtattggtttgtgttggtgagagttcgttagaaattcgtagtaaaggtggtgtgtcggtgggggtgcgt

SEQ ID NO: 16120 - DNA, 589 bp, Artificial Sequence
  chemically treated genomic DNA (Homo sapiens) CpG-island No: 16120
acgcacccccaccgacacaccacctttactacgaatttctaacgaactctcaccaacacaaaccaatactacaacacacgaaccgccccaccactacgaacaaacgaacaaaaaaaacccttaaaacaaacaaaacattccaccccccccccccaccgcgccgcgaccacacaccctccgcccgtacgcaaaacccacctacatcccacaccctacgaaaaacaaatccatcaaacacaaaataccctccaccgcgacaaaaaaacgaatacccaaaccaaaaaaaaccaacaccacgcccacgacctaaccacactcaaaactactactcaacccacaaacgatcgctaacccccaatacccactcacactacaccaacaaccactatcccccgacaaacaccaacccccccccatactcgcgatcacaaaaacccaacgaccgaaaaccgaaaaacaacgacgcccaaacacacccaaatacaaaacccccgacccgcaaaaacctcacaccaccaaaatcgcatccacaaaaccacccacccccacacaaaacgccacaacacaaaaccacacccaccctacaaca

SEQ ID NO: 16121 - DNA, 604 bp, Artificial Sequence
  chemically treated genomic DNA (Homo sapiens) CpG-island No: 16121
gttattggtcggtaagttgttggcggtgttatttggttcggcggggtttgggttggcggtaaattttcgttagttgattatcgtgttcggcgtgtttgtcggggttggtatttttaacggtgtaattaaatacgttgtttagtattatgataattcgtaatagttgcgtcgcgtggtcggtattttattagcgatggtatttggtttttttacgttgatggcgttggtttttgtgttggtagttgcgttaattagttagggattgtttggtaatatcgattattaggggttggtgcgtttagtggcgttggtgtaaatggggatcgtttggggtaatttgttattggcgttgatgaaaggttttcgcgatgtcgtaggtaatgcgttatcgttgattgtcggtagtttgattggcgttttcgcgtattacgttagttatcgtttgggcggttatgaaggggcgttgttgggtttggcgttgattttcgcgttggtggtaatttttgtcgttattatgttgattaaacgtggtgttatttcgttaagttatttgaaatttagttgggataacggtttggtagggtagttgagtaaatttacgttt

SEQ ID NO: 16122 - DNA, 604 bp, Artificial Sequence
  chemically treated genomic DNA (Homo sapiens) CpG-island No: 16122
aaacgtaaatttactcaactaccctaccaaaccgttatcccaactaaatttcaaataacttaacgaaataacaccacgtttaatcaacataataacgacaaaaattaccaccaacgcgaaaatcaacgccaaacccaacaacgccccttcataaccgcccaaacgataactaacgtaatacgcgaaaacgccaatcaaactaccgacaatcaacgataacgcattacctacgacatcgcgaaaacctttcatcaacgccaataacaaattaccccaaacgatccccatttacaccaacgccactaaacgcaccaacccctaataatcgatattaccaaacaatccctaactaattaacgcaactaccaacacaaaaaccaacgccatcaacgtaaaaaaaccaaataccatcgctaataaaataccgaccacgcgacgcaactattacgaattatcataatactaaacaacgtatttaattacaccgttaaaaataccaaccccgacaaacacgccgaacacgataatcaactaacgaaaatttaccgccaacccaaaccccgccgaaccaaataacaccgccaacaacttaccgaccaataac

SEQ ID NO: 16123 - DNA, 604 bp, Artificial Sequence
  chemically treated genomic DNA (Homo sapiens) CpG-island No: 16123
gagcgtaaatttgtttaattgttttgttagatcgttattttagttgggttttagatagtttaacgggatgatattacgtttgattaatatgatggcggtaggaattattattagcgcgggaattagcgttagatttagtaacgtttttttataatcgtttaaacggtaattgacgtagtacgcgagaacgttaattaagttgtcgataattagcgataacgtattatttgcggtatcgcgaaagttttttattagcgttagtaataggttgttttaggcgatttttatttgtattagcgttattaaacgtattagtttttgatagtcggtattattaaataatttttggttgattggcgtagttgttagtataaaaattagcgttattagcgtagagaaattaagtattatcgttgatgaagtgtcgattacgcggcgtagttgttgcggattattatggtattgggtaacgtatttggttatatcgttaaagatgttagtttcggtaagtacgtcgagtacggtaattaattggcggaaatttgtcgttagtttaagtttcgtcggattaaatgatatcgttagtaatttatcgattagtaat

SEQ ID NO: 16124 - DNA, 604 bp, Artificial Sequence
  chemically treated genomic DNA (Homo sapiens) CpG-island No: 16124
attactaatcgataaattactaacgatatcatttaatccgacgaaacttaaactaacgacaaatttccgccaattaattaccgtactcgacgtacttaccgaaactaacatctttaacgatataaccaaatacgttacccaataccataataatccgcaacaactacgccgcgtaatcgacacttcatcaacgataatacttaatttctctacgctaataacgctaatttttatactaacaactacgccaatcaaccaaaaattatttaataataccgactatcaaaaactaatacgtttaataacgctaatacaaataaaaatcgcctaaaacaacctattactaacgctaataaaaaactttcgcgataccgcaaataatacgttatcgctaattatcgacaacttaattaacgttctcgcgtactacgtcaattaccgtttaaacgattataaaaaaacgttactaaatctaacgctaattcccgcgctaataataattcctaccgccatcatattaatcaaacgtaatatcatcccgttaaactatctaaaacccaactaaaataacgatctaacaaaacaattaaacaaatttacgctc

SEQ ID NO: 16125 - DNA, 561 bp, Artificial Sequence
  chemically treated genomic DNA (Homo sapiens) CpG-island No: 16125
  unsure (221, 236, 279, 384, 436, 482, 535)
ttttttgtcgtcgttattcgggtcgattcgatttgggtgtaatattttgcgtgattattattgtaggtttttttcggatgatcgggtatattaggttgtgttcgtgtatacgttggaatgtttcgtggtagtttagattatagttttttgtttacgggttcgtcgtttttagtcgtgtgtcgtttggttcgtgtgtgtttttgtggtttttggttttggtnaatttgatgcgtcgngttattttacgtagttaaggattttgttattttgtaggagcgntgatattatagtattggttcgggtgtgtgataattatcgttgatatcgacgattggttgtgataggggatgaatatagtatcgcgttattatatggtcgttttantttgcgacgtagtttatacggttatcgtcgttaatttttgttggcgtgatanggcgtagatttcgtgtagtcgtgcgttttgttgtgtcgtttatatnagtcgtattagtttggcgttgaaatagcgcggagaatcgtcgtttcgatatanggtttgatgtaaaagtttagggttat

SEQ ID NO: 16126 - DNA, 561 bp, Artificial Sequence
  chemically treated genomic DNA (Homo sapiens) CpG-island No: 16126
  unsure (27, 80, 126, 178, 283, 326, 341)
ataaccctaaacttttacatcaaaccntatatcgaaacgacgattctccgcgctatttcaacgccaaactaatacgactnatataaacgacacaacaaaacgcacgactacacgaaatctacgccntatcacgccaacaaaaattaacgacgataaccgtataaactacgtcgcaaantaaaacgaccatataataacgcgatactatattcatcccctatcacaaccaatcgtcgatatcaacgataattatcacacacccgaaccaatactataatatcancgctcctacaaaataacaaaatccttaactacgtaaaataacncgacgcatcaaattnaccaaaaccaaaaaccacaaaaacacacacgaaccaaacgacacacgactaaaaacgacgaacccgtaaacaaaaaactataatctaaactaccacgaaacattccaacgtatacacgaacacaacctaatatacccgatcatccgaaaaaaacctacaataataatcacgcaaaatattacacccaaatcgaatcgacccgaataacgacgacaaaaaa

SEQ ID NO: 16127 - DNA, 561 bp, Artificial Sequence
  chemically treated genomic DNA (Homo sapiens) CpG-island No: 16127
  unsure (27, 80, 126, 178, 283, 326, 341)
atagttttaagtttttatattaggttntatgtcgagacgacgatttttcgcgttattttagcgttagattagtacggttnatataagcggtatagtagagcgtacggttatacgggatttgcgttntattacgttaataaaggttagcggcgatgatcgtgtgaattgcgtcgtaaantggggcgattatgtgatgacgcggtattatatttattttttattatagttagtcgtcggtgttagcggtaattattatatattcgggttaatattgtggtgttancgtttttatagagtaataaagtttttggttacgtgggatagtncggcgtattagattnattagagttagaagttataggaatatatacgagttagacgatatacggttaggaacgacgagttcgtggatagggggttatggtttaggttattacgaggtattttagcgtatatacgaatatagtttggtgtattcggttattcgaggaagatttgtaatggtggttacgtagggtattatatttaggtcgagtcgattcggataacggcggtagagga

SEQ ID NO: 16128 - DNA, 561 bp, Artificial Sequence
  chemically treated genomic DNA (Homo sapiens) CpG-island No: 16128
  unsure (221, 236, 279, 384, 436, 482, 535)
tcctctaccgccgttatccgaatcgactcgacctaaatataataccctacgtaaccaccattacaaatcttcctcgaataaccgaatacaccaaactatattcgtatatacgctaaaatacctcgtaataacctaaaccataaccccctatccacgaactcgtcgttcctaaccgtatatcgtctaactcgtatatattcctataacttctaactctaatnaatctaatacgccgnactatcccacgtaaccaaaaactttattactctataaaaacgntaacaccacaatattaacccgaatatataataattaccgctaacaccgacgactaactataataaaaaataaatataataccgcgtcatcacataatcgccccantttacgacgcaattcacacgatcatcgccgctaacctttattaacgtaatanaacgcaaatcccgtataaccgtacgctctactataccgcttatatnaaccgtactaatctaacgctaaaataacgcgaaaaatcgtcgtctcgacatanaacctaatataaaaacttaaaactat

SEQ ID NO: 16129 - DNA, 512 bp, Artificial Sequence
  chemically treated genomic DNA (Homo sapiens) CpG-island No: 16129
cgtggttcgcgttttacggacgagttattgttgtaggaggttcggtggcgcggcgcgttcgtagttgcggtagcggcggattcgcgcggggattttttcgcgcgtattagttttcgtttcgggtagtgttattttgggcgtcgtttcgttatttttacggtgtttcgtcgttttttattattaggatggagggtattttttagtacgagtcgatattttagagggtatcggcgagttttcgaaaaaattagggcggtggggcgaggaagattcgcgtttcggattttagagaaggaaagaaagttagagggagtcggagcggagttgtattttacgtcgaagtttttttttcgaatcgtttggagttgtaagtggtttttgattgaatatagttgtttagttgttggttacggggtgcgcggaggaggcggggttagagggagaaaagggtgggggcgagtagtttggaggtcgagtagaggagatcgtgttgggagagtagagtaggtatt

SEQ ID NO: 16130 - DNA, 512 bp, Artificial Sequence
  chemically treated genomic DNA (Homo sapiens) CpG-island No: 16130
aatacctactctactctcccaacacgatctcctctactcgacctccaaactactcgcccccacccttttctccctctaaccccgcctcctccgcgcaccccgtaaccaacaactaaacaactatattcaatcaaaaaccacttacaactccaaacgattcgaaaaaaaaacttcgacgtaaaatacaactccgctccgactccctctaactttctttccttctctaaaatccgaaacgcgaatcttcctcgccccaccgccctaattttttcgaaaactcgccgataccctctaaaatatcgactcgtactaaaaaataccctccatcctaataataaaaaacgacgaaacaccgtaaaaataacgaaacgacgcccaaaataacactacccgaaacgaaaactaatacgcgcgaaaaaatccccgcgcgaatccgccgctaccgcaactacgaacgcgccgcgccaccgaacctcctacaacaataactcgtccgtaaaacgcgaaccacg

SEQ ID NO: 16131 - DNA, 512 bp, Artificial Sequence
  chemically treated genomic DNA (Homo sapiens) CpG-island No: 16131
gatgtttgttttgtttttttagtacggttttttttgttcggtttttaggttattcgtttttatttttttttttttttagtttcgtttttttcgcgtatttcgtggttagtagttagatagttgtgtttaattagaaattatttataattttagacgattcgaaggggaaatttcggcgtgaagtgtagtttcgtttcggttttttttagttttttttttttttttggaattcgaggcgcggatttttttcgttttatcgttttagttttttcgggagttcgtcggtgttttttagggtgtcggttcgtgttgggaagtgttttttattttggtaatggggggcggcgaggtatcgtaggagtggcgaggcggcgtttagggtggtattgttcggaacgggggttggtgcgcgcgggagggttttcgcgcgggttcgtcgttgtcgtagttgcgagcgcgtcgcgttatcgagttttttgtagtaatggttcgttcgtgaaacgcgagttacg

SEQ ID NO: 16132 - DNA, 512 bp, Artificial Sequence
  chemically treated genomic DNA (Homo sapiens) CpG-island No: 16132
cgtaactcgcgtttcacgaacgaaccattactacaaaaaactcgataacgcgacgcgctcgcaactacgacaacgacgaacccgcgcgaaaaccctcccgcgcgcaccaacccccgttccgaacaataccaccctaaacgccgcctcgccactcctacgatacctcgccgccccccattaccaaaataaaaaacacttcccaacacgaaccgacaccctaaaaaacaccgacgaactcccgaaaaaactaaaacgataaaacgaaaaaaatccgcgcctcgaattccaaaaaaaaaaaaaaaactaaaaaaaaccgaaacgaaactacacttcacgccgaaatttccccttcgaatcgtctaaaattataaataatttctaattaaacacaactatctaactactaaccacgaaatacgcgaaaaaaacgaaactaaaaaaaaaaaaaaataaaaacgaataacctaaaaaccgaacaaaaaaaaccgtactaaaaaaacaaaacaaacatc

SEQ ID NO: 16133 - DNA, 916 bp, Artificial Sequence
  chemically treated genomic DNA (Homo sapiens) CpG-island No: 16133
tttgttttgttcgggttttttcgcggtcgtttttttcgtttttttcgttagtttttttttttttttttcggcgcgtttttttagtttttatttggttgggcgggagggttggcgggaggaggcggtttgcgggcggggggcggggggcgggcgcggggtcggtcgaaggagggcggtgggtggtgttgaagggatagtttcgcggcggcggcggcggcggcggtttcgggcgtttgagcgggtgttcggcgcggagagcggcgagcgtattatgttttaggtcgttttcggggtagtagtagcgggcgttcggggtaaggcgcgggtcgagggcgtcgaggggtcgggcggttcgtgcgggacgatgaagcggtagaacgtgcgtacgttggcgtttatcgtgtgtatttttatttatttgttggtgggcgtcgcggttttcgacgcgttggagtcggagttcgagttgatcgagcggtagcggttggagttgcggagtaggagttgcgggcgcgttataattttagttagggcggttacgaggagttggagcgcgtcgtgttgcgttttaagtcgtataaggtcggcgtgtagtggcgtttcgtcggttttttttatttcgttattatcgttattattattatcggtaacggttcgtcgggcggggggcgggaatttagggttgggcgcggggtttcgggagtcgttcggggtcggttggggttgggggcgggggttttttcgagaggggttgggcgtcgaattttgcgttcgtagaaattcgagtttagtttggcgtgtgtgtttcgcggggacggaattcggggaggcgtcgatttttggtttcggatttgatttttcggtcgggttagttttaatttggttttgttatgttgtataggtttttagggatttt

SEQ ID NO: 16134 - DNA, 916 bp, Artificial Sequence
  chemically treated genomic DNA (Homo sapiens) CpG-island No: 16134
aaaatccctaaaaacctatacaacataacaaaaccaaattaaaactaacccgaccgaaaaatcaaatccgaaaccaaaaatcgacgcctccccgaattccgtccccgcgaaacacacacgccaaactaaactcgaatttctacgaacgcaaaattcgacgcccaacccctctcgaaaaaacccccgcccccaaccccaaccgaccccgaacgactcccgaaaccccgcgcccaaccctaaattcccgccccccgcccgacgaaccgttaccgataataataataacgataataacgaaataaaaaaaaccgacgaaacgccactacacgccgaccttatacgacttaaaacgcaacacgacgcgctccaactcctcgtaaccgccctaactaaaattataacgcgcccgcaactcctactccgcaactccaaccgctaccgctcgatcaactcgaactccgactccaacgcgtcgaaaaccgcgacgcccaccaacaaataaataaaaatacacacgataaacgccaacgtacgcacgttctaccgcttcatcgtcccgcacgaaccgcccgacccctcgacgccctcgacccgcgccttaccccgaacgcccgctactactaccccgaaaacgacctaaaacataatacgctcgccgctctccgcgccgaacacccgctcaaacgcccgaaaccgccgccgccgccgccgccgcgaaactatcccttcaacaccacccaccgccctccttcgaccgaccccgcgcccgccccccgccccccgcccgcaaaccgcctcctcccgccaaccctcccgcccaaccaaataaaaactaaaaaaacgcgccgaaaaaaaaaaaaaaaaactaacgaaaaaaacgaaaaaaacgaccgcgaaaaaacccgaacaaaacaaa

SEQ ID NO: 16135 - DNA, 916 bp, Artificial Sequence
  chemically treated genomic DNA (Homo sapiens) CpG-island No: 16135
ggagtttttgggggtttatgtaatatggtagggttaagttagggttggttcggtcggagagttaggttcggagttaggaatcgacgttttttcgagtttcgttttcgcggagtatatacgttaggttgaattcgggtttttgcgagcgtagggttcggcgtttagtttttttcgggggagttttcgtttttagttttagtcggtttcggacgattttcggagtttcgcgtttagttttgggttttcgtttttcgttcggcgagtcgttatcgatggtggtgatgacggtgatggcgaagtagaaggagtcggcgaagcgttattgtacgtcggttttgtgcggtttgaggcgtagtacgacgcgttttagtttttcgtagtcgttttggttgaggttgtagcgcgttcgtagtttttgtttcgtagttttagtcgttgtcgttcgattagttcgggtttcgattttagcgcgtcgaagatcgcggcgtttattagtaggtaggtgaaggtgtatacgatgagcgttagcgtgcgtacgttttgtcgttttatcgtttcgtacgagtcgttcggtttttcggcgttttcggttcgcgttttgtttcggacgttcgttgttgttgtttcggaggcggtttggggtatggtgcgttcgtcgtttttcgcgtcgggtattcgtttaagcgttcggggtcgtcgtcgtcgtcgtcgtcgcggagttgtttttttagtattatttatcgttttttttcggtcggtttcgcgttcgtttttcgtttttcgttcgtaggtcgttttttttcgttagttttttcgtttagttaaataaggattggggagacgcgtcgaggagggaggaggggggttggcggaggggacgggaggggcggtcgcgagagagttcgggtaggataga

SEQ ID NO: 16136 - DNA, 916 bp, Artificial Sequence
  chemically treated genomic DNA (Homo sapiens) CpG-island No: 16136
tctatcctacccgaactctctcgcgaccgcccctcccgtcccctccgccaacccccctcctccctcctcgacgcgtctccccaatccttatttaactaaacgaaaaaactaacgaaaaaaaacgacctacgaacgaaaaacgaaaaacgaacgcgaaaccgaccgaaaaaaaacgataaataatactaaaaaaacaactccgcgacgacgacgacgacgacgaccccgaacgcttaaacgaatacccgacgcgaaaaacgacgaacgcaccataccccaaaccgcctccgaaacaacaacaacgaacgtccgaaacaaaacgcgaaccgaaaacgccgaaaaaccgaacgactcgtacgaaacgataaaacgacaaaacgtacgcacgctaacgctcatcgtatacaccttcacctacctactaataaacgccgcgatcttcgacgcgctaaaatcgaaacccgaactaatcgaacgacaacgactaaaactacgaaacaaaaactacgaacgcgctacaacctcaaccaaaacgactacgaaaaactaaaacgcgtcgtactacgcctcaaaccgcacaaaaccgacgtacaataacgcttcgccgactccttctacttcgccatcaccgtcatcaccaccatcgataacgactcgccgaacgaaaaacgaaaacccaaaactaaacgcgaaactccgaaaatcgtccgaaaccgactaaaactaaaaacgaaaactcccccgaaaaaaactaaacgccgaaccctacgctcgcaaaaacccgaattcaacctaacgtatatactccgcgaaaacgaaactcgaaaaaacgtcgattcctaactccgaacctaactctccgaccgaaccaaccctaacttaaccctaccatattacataaacccccaaaaactcc

SEQ ID NO: 16137 - DNA, 887 bp, Artificial Sequence
  chemically treated genomic DNA (Homo sapiens) CpG-island No: 16137
tgttttacgcgttgttgggtatatcgtttacgttcgttatgttttagagtttgggcgagcgtattaatattttggtgaggtatttgttgtatcgcgttaagaaggggttgggtatgcggcgcgtcgacgtgtttatggttaatatggtgtttatcggttttttttcgtgtatatatacgttgtggtatcgcgtcgtcgttttttttaattacgagtattggatttttttttaggtttattattattgtttattatttttattattatcggtttcggcgattacgtggcgttgtagaaggattaggttcgtagacgtagtcgtagtacgtggtttttagtttcgtttatattttacgggtttacggttatcggcgttttttttaatttcgtggtgtgcgttttatgattatgaacgtcgaggacgagaagcgcgacgtcgagtatcgcgcgttttacgcgtaacgggtaggcgggcggcggcggagggggtggtagcgcgtatattacggatatcgttttatttacggcggtagcgggcggcggcggtttcgtaacgtttacgcggaggtgttgtatttttagtttatgtgttcgtgtttgtggtataagagtcgcgagaagttgtagtattttatttttatgattatttcgcgggatttttttacgttcgatacgtgcgtggagtagagttattcgtcgtcgggagggggcggtcgttatagcgatacgttttcgcgacgttgtttgtgtagcggggcgttacgtttcgttattagttcggtgtttacgggtttgtatagtttgtttatttttcgcggttttatgaagcgtaggagtttcgtgtgattgtttcgaggggtttggagtatttgggggcgcgggcgggg

SEQ ID NO: 16138 - DNA, 887 bp, Artificial Sequence
  chemically treated genomic DNA (Homo sapiens) CpG-island No: 16138
ccccgcccgcgcccccaaatactccaaacccctcgaaacaatcacacgaaactcctacgcttcataaaaccgcgaaaaataaacaaactatacaaacccgtaaacaccgaactaataacgaaacgtaacgccccgctacacaaacaacgtcgcgaaaacgtatcgctataacgaccgccccctcccgacgacgaataactctactccacgcacgtatcgaacgtaaaaaaatcccgcgaaataatcataaaaataaaatactacaacttctcgcgactcttataccacaaacacgaacacataaactaaaaatacaacacctccgcgtaaacgttacgaaaccgccgccgcccgctaccgccgtaaataaaacgatatccgtaatatacgcgctaccaccccctccgccgccgcccgcctacccgttacgcgtaaaacgcgcgatactcgacgtcgcgcttctcgtcctcgacgttcataatcataaaacgcacaccacgaaattaaaaaaaacgccgataaccgtaaacccgtaaaatataaacgaaactaaaaaccacgtactacgactacgtctacgaacctaatccttctacaacgccacgtaatcgccgaaaccgataataataaaaataataaacaataataataaacctaaaaaaaaatccaatactcgtaattaaaaaaaacgacgacgcgataccacaacgtatatatacacgaaaaaaaaccgataaacaccatattaaccataaacacgtcgacgcgccgcatacccaaccccttcttaacgcgatacaacaaatacctcaccaaaatattaatacgctcgcccaaactctaaaacataacgaacgtaaacgatatacccaacaacgcgtaaaaca

SEQ ID NO: 16139 - DNA, 887 bp, Artificial Sequence
  chemically treated genomic DNA (Homo sapiens) CpG-island No: 16139
tttcgttcgcgtttttaggtgttttaggtttttcggggtagttatacggagtttttgcgttttatgaggtcgcggaaggtggataggttgtgtagattcgtggatatcgagttgatggcggagcgtggcgtttcgttgtataggtagcgtcgcgagggcgtgtcgttgtagcggtcgttttttttcggcgacgagtggttttgttttacgtacgtgtcggacgtggagaggtttcgcgggatgattatggggatggagtattgtagtttttcgcggtttttgtattataggtacgagtatatggattggaagtgtagtattttcgcgtagacgttgcggaatcgtcgtcgttcgttgtcgtcgtggatgaggcggtgttcgtagtgtgcgcgttgttatttttttcgtcgtcgttcgtttgttcgttgcgcgtgaagcgcgcggtgttcggcgtcgcgtttttcgttttcggcgtttatggttatgaagcgtatattacgaggttgaggaaggcgtcgatgatcgtgagttcgtaagatgtagacgaagttgaaggttacgtattgcggttgcgtttgcgggtttggtttttttgtagcgttacgtagtcgtcgaagtcgatggtggtgagggtgatgagtagtagtagtaggtttggaagaaagtttagtgttcgtagttggagaaggcggcggcgcgatgttatagcgtgtgtatgtacgagaagaagtcgatgagtattatgttggttatggatacgtcggcgcgtcgtatgtttagtttttttttggcgcggtgtagtaggtattttattaaggtgttgatgcgttcgtttaggttttggaatatgacgagcgtgagcggtatgtttagtagcgcgtagaata

SEQ ID NO: 16140 - DNA, 887 bp, Artificial Sequence
  chemically treated genomic DNA (Homo sapiens) CpG-island No: 16140
tattctacgcgctactaaacataccgctcacgctcgtcatattccaaaacctaaacgaacgcatcaacaccttaataaaatacctactacaccgcgccaaaaaaaaactaaacatacgacgcgccgacgtatccataaccaacataatactcatcgacttcttctcgtacatacacacgctataacatcgcgccgccgccttctccaactacgaacactaaactttcttccaaacctactactactactcatcaccctcaccaccatcgacttcgacgactacgtaacgctacaaaaaaaccaaacccgcaaacgcaaccgcaatacgtaaccttcaacttcgtctacatcttacgaactcacgatcatcgacgccttcctcaacctcgtaatatacgcttcataaccataaacgccgaaaacgaaaaacgcgacgccgaacaccgcgcgcttcacgcgcaacgaacaaacgaacgacgacgaaaaaaataacaacgcgcacactacgaacaccgcctcatccacgacgacaacgaacgacgacgattccgcaacgtctacgcgaaaatactacacttccaatccatatactcgtacctataatacaaaaaccgcgaaaaactacaatactccatccccataatcatcccgcgaaacctctccacgtccgacacgtacgtaaaacaaaaccactcgtcgccgaaaaaaaacgaccgctacaacgacacgccctcgcgacgctacctatacaacgaaacgccacgctccgccatcaactcgatatccacgaatctacacaacctatccaccttccgcgacctcataaaacgcaaaaactccgtataactaccccgaaaaacctaaaacacctaaaaacgcgaacgaaa

SEQ ID NO: 16141 - DNA, 553 bp, Artificial Sequence
  chemically treated genomic DNA (Homo sapiens) CpG-island No: 16141
cgttttaggacgattcggtagagcgcgggtatcgtggtttaggcgcgtttttcgggggcggggcgagtaggaggggttacgtgacgttcggttcggaatgttcgcgtaggagatttcgggtgacggggttcggcgtcgttaattggagcgaattttagcgttcgtcgatatggtttggattaagtattagttgtttttggtcgggtttatgtttgttatcggttttattaatacgttttcggtaaagtgagtttggcgtgtcgggcgtgcgggttttggcgatttcggcgttcgttttacgttttttttttttttggttttgtttttttggttttttttgtttttttatttgtttcggttagttcgcgcgcgttatgattatttaagggatgcgaggttcggggaaatgcggaggttgcgttcgggcggggggattcgagtttcggttttgatttgttgtatagttttcgtttttgtttttacgttttttaataggagggttggtcgatttttttttacggtttttttagtgttggcgtttaagtttgagtat

SEQ ID NO: 16142 - DNA, 553 bp, Artificial Sequence
  chemically treated genomic DNA (Homo sapiens) CpG-island No: 16142
atactcaaacttaaacgccaacactaaaaaaaccgtaaaaaaaaatcgaccaaccctcctattaaaaaacgtaaaaacaaaaacgaaaactatacaacaaatcaaaaccgaaactcgaatccccccgcccgaacgcaacctccgcatttccccgaacctcgcatcccttaaataatcataacgcgcgcgaactaaccgaaacaaataaaaaaacaaaaaaaaccaaaaaaacaaaaccaaaaaaaaaaaaaacgtaaaacgaacgccgaaatcgccaaaacccgcacgcccgacacgccaaactcactttaccgaaaacgtattaataaaaccgataacaaacataaacccgaccaaaaacaactaatacttaatccaaaccatatcgacgaacgctaaaattcgctccaattaacgacgccgaaccccgtcacccgaaatctcctacgcgaacattccgaaccgaacgtcacgtaacccctcctactcgccccgcccccgaaaaacgcgcctaaaccacgatacccgcgctctaccgaatcgtcctaaaacg

SEQ ID NO: 16143 - DNA, 553 bp, Artificial Sequence
  chemically treated genomic DNA (Homo sapiens) CpG-island No: 16143
gtgtttaggtttggacgttagtattggaagggtcgtggaaaggaatcggttaatttttttgttaaaagacgtggaaataggagcggaggttgtatagtaaattaaagtcggggttcggattttttcgttcgggcgtagttttcgtattttttcgggtttcgtattttttgggtggttataacgcgcgcgaattgatcggagtaagtgggaaagtaggggaagttaggagggtagggttaagaagggggaaggcgtagaacgagcgtcggggtcgttagggttcgtacgttcggtacgttagatttattttgtcgagagcgtgttgatggagtcggtaataagtatgagttcggttaggaatagttggtatttggtttaggttatgtcggcggacgttggggttcgttttagttagcggcgtcgggtttcgttattcggggttttttgcgcgagtatttcgggtcgggcgttacgtgattttttttgttcgtttcgttttcggggagcgcgtttgagttacggtgttcgcgttttgtcgagtcgttttggagcg

SEQ ID NO: 16144 - DNA, 553 bp, Artificial Sequence
  chemically treated genomic DNA (Homo sapiens) CpG-island No: 16144
cgctccaaaacgactcgacaaaacgcgaacaccgtaactcaaacgcgctccccgaaaacgaaacgaacaaaaaaaatcacgtaacgcccgacccgaaatactcgcgcaaaaaaccccgaataacgaaacccgacgccgctaactaaaacgaaccccaacgtccgccgacataacctaaaccaaataccaactattcctaaccgaactcatacttattaccgactccatcaacacgctctcgacaaaataaatctaacgtaccgaacgtacgaaccctaacgaccccgacgctcgttctacgccttcccccttcttaaccctaccctcctaacttcccctactttcccacttactccgatcaattcgcgcgcgttataaccacccaaaaaatacgaaacccgaaaaaatacgaaaactacgcccgaacgaaaaaatccgaaccccgactttaatttactatacaacctccgctcctatttccacgtcttttaacaaaaaaattaaccgattcctttccacgacccttccaatactaacgtccaaacctaaacac

SEQ ID NO: 16145 - DNA, 865 bp, Artificial Sequence
  chemically treated genomic DNA (Homo sapiens) CpG-island No: 16145
tatcgtcggattttgttcgaattagtagcgatatttttttgagtttttttacgtaagtggaggagacgtgttcggtgtttcggtcgttttattgtcggttttcgtttagggtatagatttttattcgtcgtcgcgtattcgatatggtggttgttgtttttatcgttttagtcgtcgttttttcgtttatttcgttcgcgttttttatttttaggagacggtaaaggtagtagtggcggtggcggcggcggcggtttcggagaggttcgaatttattatggttttaaaggtttagtcgcgagaaggggtgataagagttattgaggttttttcgttcggagtttcgttattttttattttattcgcgtatatatttattttttcgtttttttgttttttagggttcgtttgttttttcgtcgtcgcggtaattattatagattcgttattttgtaattcgattttttttgttttttttttttttttttagtaggttcgtacgggttgttttagtaggggttacggcggtcgataagttttatgagtagtattttcgtttttgtacgcgttttttaggtcggaatgttcggcgttttcgcgaggaggggtattcgattggggcgggagtatttcggcgagatttttttttttttcggttcgatttttttttttttcggtttcgttttttggcgcggggtcgtaattgggcgggaggttttcgcgattttttcgtttacgtttgcgtcgcgagaggtcgttaggtggaaggggatttcggtttcgtacgtcgttatgttgttggatggtattagtatgtgacgtttttaggaatttagttttgaggaaaaaataaagtaaatcgggg

SEQ ID NO: 16146 - DNA, 865 bp, Artificial Sequence
  chemically treated genomic DNA (Homo sapiens) CpG-island No: 16146
ccccgatttactttattttttcctcaaaactaaattcctaaaaacgtcacatactaataccatccaacaacataacgacgtacgaaaccgaaatccccttccacctaacgacctctcgcgacgcaaacgtaaacgaaaaaatcgcgaaaacctcccgcccaattacgaccccgcgccaaaaaacgaaaccgaaaaaaaaaaaaatcgaaccgaaaaaaaaaaaaatctcgccgaaatactcccgccccaatcgaatacccctcctcgcgaaaacgccgaacattccgacctaaaaaacgcgtacaaaaacgaaaatactactcataaaacttatcgaccgccgtaacccctactaaaacaacccgtacgaacctactaaaaaaaaaaaaaaaaaacaaaaaaaatcgaattacaaaataacgaatctataataattaccgcgacgacgaaaaaacaaacgaaccctaaaaaacaaaaaaacgaaaaaataaatatatacgcgaataaaataaaaaataacgaaactccgaacgaaaaaacctcaataactcttatcaccccttctcgcgactaaacctttaaaaccataataaattcgaacctctccgaaaccgccgccgccgccaccgccactactacctttaccgtctcctaaaaataaaaaacgcgaacgaaataaacgaaaaaacgacgactaaaacgataaaaacaacaaccaccatatcgaatacgcgacgacgaataaaaatctataccctaaacgaaaaccgacaataaaacgaccgaaacaccgaacacgtctcctccacttacgtaaaaaaactcaaaaaaatatcgctactaattcgaacaaaatccgacgata

SEQ ID NO: 16147 - DNA, 865 bp, Artificial Sequence
  chemically treated genomic DNA (Homo sapiens) CpG-island No: 16147
tttcggtttgttttgttttttttttagagttaagtttttaggaacgttatatattggtgttatttaataatatgacgacgtgcggaatcgaagtttttttttatttagcggtttttcgcggcgtaggcgtggacggggagatcgcgagaatttttcgtttaattgcgatttcgcgttaagaggcggggtcgaaagaggaggaagtcgggtcgaaagaggaggaagtttcgtcgaagtattttcgttttagtcgggtattttttttcgcgagagcgtcgagtatttcggtttgggaagcgcgtgtagaagcggaggtgttgtttatgggatttgtcggtcgtcgtagtttttgttaggatagttcgtgcgagtttgttggaggaggaagagaaaggtagagagagtcgggttataagatggcggatttgtagtagttatcgcggcggcgggagagtaagcgagttttggggggtaaagagacgggagagtgggtgtatgcgcgggtgaagtgagaggtaacggggtttcgggcggagaggttttagtggtttttgttattttttttcgcggttgaatttttggagttatggtgaattcgggttttttcgaagtcgtcgtcgtcgttatcgttattattgtttttatcgttttttaagagtgaggagcgcggacgaggtaagcgaggaggcggcggttagagcggtggagatagtagttattatgtcggatacgcggcggcgagtgaaggtttatattttgaacgaagatcggtaatgggacgatcgaggtatcgggtacgttttttttatttacgtggaggagtttaaggggatgtcgttgttggttcgggtagagttcgacggta

SEQ ID NO: 16148 - DNA, 865 bp, Artificial Sequence
  chemically treated genomic DNA (Homo sapiens) CpG-island No: 16148
taccgtcgaactctacccgaaccaacaacgacatccccttaaactcctccacgtaaataaaaaaaacgtacccgatacctcgatcgtcccattaccgatcttcgttcaaaatataaaccttcactcgccgccgcgtatccgacataataactactatctccaccgctctaaccgccgcctcctcgcttacctcgtccgcgctcctcactcttaaaaaacgataaaaacaataataacgataacgacgacgacgacttcgaaaaaacccgaattcaccataactccaaaaattcaaccgcgaaaaaaaataacaaaaaccactaaaacctctccgcccgaaaccccgttacctctcacttcacccgcgcatacacccactctcccgtctctttaccccccaaaactcgcttactctcccgccgccgcgataactactacaaatccgccatcttataacccgactctctctacctttctcttcctcctccaacaaactcgcacgaactatcctaacaaaaactacgacgaccgacaaatcccataaacaacacctccgcttctacacgcgcttcccaaaccgaaatactcgacgctctcgcgaaaaaaaatacccgactaaaacgaaaatacttcgacgaaacttcctcctctttcgacccgacttcctcctctttcgaccccgcctcttaacgcgaaatcgcaattaaacgaaaaattctcgcgatctccccgtccacgcctacgccgcgaaaaaccgctaaataaaaaaaaacttcgattccgcacgtcgtcatattattaaataacaccaatatataacgttcctaaaaacttaactctaaaaaaaaaacaaaacaaaccgaaa

SEQ ID NO: 16149 - DNA, 852 bp, Artificial Sequence
  chemically treated genomic DNA (Homo sapiens) CpG-island No: 16149
gacgttcgtttttttggaaggtgggattcgggtggtaggtttttgggcggcgatttcggtcgggtttatagcgtcgcgttcgtttcgtttatcggttttatttagcgttttttttagatcgacgatcgtttgggaagtttcgagtttttagttcgttgtatagttcggtttcgttttatagttttttattgttatcggtcggggcgatatcgggcgagttggcgagattcggttttaggatcgaatcgcgtcgatatttgacggcgtttttcgtttttttttgtcgtcgttttcgttttcgttcggtcgtatttcggcgttcgtcgtcgtcgtcgttatcgtcgtcgatttgggaggtttgtttttcgtcgtttatcgtagtttcggcgttcggtcggtcgtcgtttttaagatggtcgcggcgcgtacggtttttgcggcggggtagaggcggaggcggagtcgagttattttcgtatttcggggtttcggtgtttcgcgttaggttgtagtttattgttcgtcgcggttatgcggggtttcgtgtacggatgagagaagtcgttgtcgcgttggttttttttttcgtttttgtcgttacgtttgtcgtcgttatggaggagtcgtcgttatcgtcgtcgtcgttattatcgttatcggaattcgagatcgagttagaattcgagtgttgtttggcggcgaggtgagtgtggcggtcgtagtcggtcgttcgtagaaagcggggcgggttttggttcgaattcggtcgggttcgagggtttttgtttttcgttaggttgggagggaagtatttagtttttgtaggttggggcgggaggggcgcggtgtatt

SEQ ID NO: 16150 - DNA, 852 bp, Artificial Sequence
  chemically treated genomic DNA (Homo sapiens) CpG-island No: 16150
aatacaccgcgcccctcccgccccaacctacaaaaactaaatacttccctcccaacctaacgaaaaacaaaaaccctcgaacccgaccgaattcgaaccaaaacccgccccgctttctacgaacgaccgactacgaccgccacactcacctcgccgccaaacaacactcgaattctaactcgatctcgaattccgataacgataataacgacgacgacgataacgacgactcctccataacgacgacaaacgtaacgacaaaaacgaaaaaaaaaaccaacgcgacaacgacttctctcatccgtacacgaaaccccgcataaccgcgacgaacaataaactacaacctaacgcgaaacaccgaaaccccgaaatacgaaaataactcgactccgcctccgcctctaccccgccgcaaaaaccgtacgcgccgcgaccatcttaaaaacgacgaccgaccgaacgccgaaactacgataaacgacgaaaaacaaacctcccaaatcgacgacgataacgacgacgacgacgaacgccgaaatacgaccgaacgaaaacgaaaacgacgacaaaaaaaaacgaaaaacgccgtcaaatatcgacgcgattcgatcctaaaaccgaatctcgccaactcgcccgatatcgccccgaccgataacaataaaaaactataaaacgaaaccgaactatacaacgaactaaaaactcgaaacttcccaaacgatcgtcgatctaaaaaaaacgctaaataaaaccgataaacgaaacgaacgcgacgctataaacccgaccgaaatcgccgcccaaaaacctaccacccgaatcccaccttccaaaaaaacgaacgtc

SEQ ID NO: 16151 - DNA, 852 bp, Artificial Sequence
  chemically treated genomic DNA (Homo sapiens) CpG-island No: 16151
gatgtatcgcgtttttttcgttttagtttgtagagattggatgttttttttttaatttggcgggaagtagaggttttcgggttcgatcgagttcgggttaggattcgtttcgttttttgcgagcgatcgattgcggtcgttatatttatttcgtcgttaagtagtattcgggttttgattcggtttcgggtttcggtggcggtggtggcggcggcggcggtggcggcggtttttttatggcggcggtaggcgtgacggtaaaggcgggaggagggattagcgcggtagcggttttttttattcgtgtacggagtttcgtatggtcgcggcgggtagtaagttgtagtttggcgcggggtatcggagtttcgaagtgcgggagtgattcgatttcgttttcgtttttatttcgtcgtaggagtcgtgcgcgtcgcggttattttggaaacggcgatcggtcgagcgtcggggttacggtgggcggcgagggataagttttttagatcggcggcggtggcggcggcggcggcgggcgtcggaatgcgatcggacgggggcggagacggcggtagggaggggcggggagcgtcgttaagtgtcggcgcgattcggttttggagtcgggtttcgttagttcgttcggtgtcgtttcggtcggtggtagtgggggattgtggagcggagtcgggttgtgtagcgggttgggagttcgaggttttttaggcggtcgtcggtttgggagggacgttgggtagggtcgatgagcggggcgggcgcgacgttatgagttcggtcggagtcgtcgtttagggatttgttattcggattttattttttaggaggacggacgtt

SEQ ID NO: 16152 - DNA, 852 bp, Artificial Sequence
  chemically treated genomic DNA (Homo sapiens) CpG-island No: 16152
aacgtccgtcctcctaaaaaataaaatccgaataacaaatccctaaacgacgactccgaccgaactcataacgtcgcgcccgccccgctcatcgaccctacccaacgtccctcccaaaccgacgaccgcctaaaaaacctcgaactcccaacccgctacacaacccgactccgctccacaatcccccactaccaccgaccgaaacgacaccgaacgaactaacgaaacccgactccaaaaccgaatcgcgccgacacttaacgacgctccccgcccctccctaccgccgtctccgcccccgtccgatcgcattccgacgcccgccgccgccgccgccaccgccgccgatctaaaaaacttatccctcgccgcccaccgtaaccccgacgctcgaccgatcgccgtttccaaaataaccgcgacgcgcacgactcctacgacgaaataaaaacgaaaacgaaatcgaatcactcccgcacttcgaaactccgataccccgcgccaaactacaacttactacccgccgcgaccatacgaaactccgtacacgaataaaaaaaaccgctaccgcgctaatccctcctcccgcctttaccgtcacgcctaccgccgccataaaaaaaccgccgccaccgccgccgccgccaccaccgccaccgaaacccgaaaccgaatcaaaacccgaatactacttaacgacgaaataaatataacgaccgcaatcgatcgctcgcaaaaaacgaaacgaatcctaacccgaactcgatcgaacccgaaaacctctacttcccgccaaattaaaaaaaaaacatccaatctctacaaactaaaacgaaaaaaacgcgatacatc

SEQ ID NO: 16153 - DNA, 675 bp, Artificial Sequence
  chemically treated genomic DNA (Homo sapiens) CpG-island No: 16153
  unsure (126)
ttcgggttgttgacgtggtaaacgtgtagacggtaattagtaattttcgttagatatagtacgcggcgaattgtttttatttcggtaaatatcggacgcgattatatagttatgagcggttatcgntttttacgtttcgttttttcgtttagttcgttataaattagcgcgttttcgtagtgtattagtatcggttgatttagttcgtttagtttttgcgtatttttgaagaattgttagtcgtttatattacggaagtcgttgtcgatatcgcgatcgttataggtcgtaacgaagtatttgaagtcgataacgtttattttatttagtttatgtagacggtcgatgttgtaagatattaggttatcgagttgtgtcgtattaatagttagtttgtttttagcggtatcgaattttagtttaattgaagcgcggttaatcgttgtaggtagttggttgagcggtatttcgattatggtggtgatattattttttgtcgttgcgcgagtatcggttttataatttttttagtggttacgattcggtttagaaatatgggtgtgcgtattaattatgttcggcgaaattattagattagacgtatttataattttttttgtatcgtttagattttgatcgatagtagtaattttttcgtttttaacggcgatattt

SEQ ID NO: 16154 - DNA, 675 bp, Artificial Sequence
  chemically treated genomic DNA (Homo sapiens) CpG-island No: 16154
  unsure (550)
aaatatcgccgttaaaaacgaaaaaattactactatcgatcaaaatctaaacgatacaaaaaaaattataaatacgtctaatctaataatttcgccgaacataattaatacgcacacccatatttctaaaccgaatcgtaaccactaaaaaaattataaaaccgatactcgcgcaacgacaaaaaataatatcaccaccataatcgaaataccgctcaaccaactacctacaacgattaaccgcgcttcaattaaactaaaattcgataccgctaaaaacaaactaactattaatacgacacaactcgataacctaatatcttacaacatcgaccgtctacataaactaaataaaataaacgttatcgacttcaaatacttcgttacgacctataacgatcgcgatatcgacaacgacttccgtaatataaacgactaacaattcttcaaaaatacgcaaaaactaaacgaactaaatcaaccgatactaatacactacgaaaacgcgctaatttataacgaactaaacgaaaaaacgaaacgtaaaaancgataaccgctcataactatataatcgcgtccgatatttaccgaaataaaaacaattcgccgcgtactatatctaacgaaaattactaattaccgtctacacgtttaccacgtcaacaacccgaa

SEQ ID NO: 16155 - DNA, 675 bp, Artificial Sequence
  chemically treated genomic DNA (Homo sapiens) CpG-island No: 16155
  unsure (550)
agatatcgtcgttaaaggcggaaaaattgttgttatcggttaggatttgggcgatgtaaaagaagttatggatgcgtttggtttggtggtttcgtcgggtatggttgatgcgtatatttatatttttgaatcgggtcgtagttattgggaaggttatgaaatcggtattcgcgtagcggtaaaaggtggtattattattatgatcgaaatgtcgtttaattagttgtttgtaacggttgatcgcgttttaattgaattgaagttcgatgtcgttaaaggtaagttgattattgatgcggtataattcggtggtttggtgttttataatatcgatcgtttgtatgagttggatgaagtgggcgttgtcggttttaaatgtttcgttgcgatttgtggcgatcgcggtatcgataacgattttcgtgatgtaaacgattggtagttttttaaaggtgcgtagaagttgggcgaattgggttagtcggtgttggtgtattgcgaaaacgcgttgatttgtgacgaattgggcgaagaagcgaagcgtgaaggncggtaatcgtttatgattatgtggtcgcgttcggtatttatcgaagtggaagtaattcgtcgcgtattgtatttggcgaaagttgttggttgtcgtttgtacgtttgttacgttagtagttcgga

SEQ ID NO: 16156 - DNA, 675 bp, Artificial Sequence
  chemically treated genomic DNA (Homo sapiens) CpG-island No: 16156
  unsure (126)
tccgaactactaacgtaacaaacgtacaaacgacaaccaacaactttcgccaaatacaatacgcgacgaattacttccacttcgataaataccgaacgcgaccacataatcataaacgattaccgnccttcacgcttcgcttcttcgcccaattcgtcacaaatcaacgcgttttcgcaatacaccaacaccgactaacccaattcgcccaacttctacgcacctttaaaaaactaccaatcgtttacatcacgaaaatcgttatcgataccgcgatcgccacaaatcgcaacgaaacatttaaaaccgacaacgcccacttcatccaactcatacaaacgatcgatattataaaacaccaaaccaccgaattataccgcatcaataatcaacttacctttaacgacatcgaacttcaattcaattaaaacgcgatcaaccgttacaaacaactaattaaacgacatttcgatcataataataataccaccttttaccgctacgcgaataccgatttcataaccttcccaataactacgacccgattcaaaaatataaatatacgcatcaaccatacccgacgaaaccaccaaaccaaacgcatccataacttcttttacatcgcccaaatcctaaccgataacaacaatttttccgcctttaacgacgatatct

SEQ ID NO: 16157 - DNA, 645 bp, Artificial Sequence
  chemically treated genomic DNA (Homo sapiens) CpG-island No: 16157
cggttatcgtttggcggtttgtttaatgttaattggttaatttttgttaagttattcggtgatcgtatcgcgtaaaggcgtgattgaattgatgcgtatgttcgacggcggcgataattcgttgtatatatagattggtagtaataatattcgcgtttacgttggcgattttatttttatttttaaattggtggatggtcgtttttcggattatcgtcgcgttttgtcgaagaattcggataaatatttggaagttggttgcgatttgtttaagtaggcgtttgttcgcgcggcgattttttttaacgagaaatttcgcggcgtacgtttttatgttagcgaaaattagttgaaaattatcgttaataattcggaataggaagaagcggaagagattttcgacgttatttatagcggtgcggagatggaaatcggttttaacgttagttatggtgttggatgttttgaacgcgttgaaatgcgaaaacgttcgtatgatgttgatcgattcggtttttagcgtgtagattgaagatgcggttagttagagcgcggtttattgttgttatgttaatgagattgtaatgtttttatcgtttgttgatcgcgattttcgtaatattgaaatcgcggatttcgttttat

SEQ ID NO: 16158 - DNA, 645 bp, Artificial Sequence
  chemically treated genomic DNA (Homo sapiens) CpG-island No: 16158
ataaaacgaaatccgcgatttcaatattacgaaaatcgcgatcaacaaacgataaaaacattacaatctcattaacataacaacaataaaccgcgctctaactaaccgcatcttcaatctacacgctaaaaaccgaatcgatcaacatcatacgaacgttttcgcatttcaacgcgttcaaaacatccaacaccataactaacgttaaaaccgatttccatctccgcaccgctataaataacgtcgaaaatctcttccgcttcttcctattccgaattattaacgataattttcaactaattttcgctaacataaaaacgtacgccgcgaaatttctcgttaaaaaaaatcgccgcgcgaacaaacgcctacttaaacaaatcgcaaccaacttccaaatatttatccgaattcttcgacaaaacgcgacgataatccgaaaaacgaccatccaccaatttaaaaataaaaataaaatcgccaacgtaaacgcgaatattattactaccaatctatatatacaacgaattatcgccgccgtcgaacatacgcatcaattcaatcacgcctttacgcgatacgatcaccgaataacttaacaaaaattaaccaattaacattaaacaaaccgccaaacgataaccg

SEQ ID NO: 16159 - DNA, 645 bp, Artificial Sequence
  chemically treated genomic DNA (Homo sapiens) CpG-island No: 16159
ataaggcgagattcgcggttttaatgttgcggaaatcgcgattaataagcggtgaggatattatagttttattggtatgataataataagtcgcgttttggttggtcgtatttttaatttgtacgttggaaatcgaatcggttagtattatgcggacgttttcgtattttagcgcgtttagaatatttagtattataattgacgttgaagtcgatttttattttcgtatcgttataggtaacgtcgaggatttttttcgtttttttttgtttcgggttgttggcggtgatttttagttggttttcgttgatataaagacgtacgtcgcggaatttttcgttagagagaatcgtcgcgcgagtaaacgtttgtttgagtagatcgtagttagtttttagatgtttgttcgggtttttcggtagaacgcggcgataattcgggaagcgattatttattagtttggaggtgaagataaagtcgttaacgtgggcgcgaatgttgttgttgttaatttgtatgtgtagcggattgtcgtcgtcgtcgagtatacgtattagtttaattacgtttttacgcggtacgattatcgaatggtttggtaaagattgattaattggtattgaatagatcgttagacggtggtcg

SEQ ID NO: 16160 - DNA, 645 bp, Artificial Sequence
  chemically treated genomic DNA (Homo sapiens) CpG-island No: 16160
cgaccaccgtctaacgatctattcaataccaattaatcaatctttaccaaaccattcgataatcgtaccgcgtaaaaacgtaattaaactaatacgtatactcgacgacgacgacaatccgctacacatacaaattaacaacaacaacattcgcgcccacgttaacgactttatcttcacctccaaactaataaataatcgcttcccgaattatcgccgcgttctaccgaaaaacccgaacaaacatctaaaaactaactacgatctactcaaacaaacgtttactcgcgcgacgattctctctaacgaaaaattccgcgacgtacgtctttatatcaacgaaaaccaactaaaaatcaccgccaacaacccgaaacaaaaaaaaacgaaaaaaatcctcgacgttacctataacgatacgaaaataaaaatcgacttcaacgtcaattataatactaaatattctaaacgcgctaaaatacgaaaacgtccgcataatactaaccgattcgatttccaacgtacaaattaaaaatacgaccaaccaaaacgcgacttattattatcataccaataaaactataatatcctcaccgcttattaatcgcgatttccgcaacattaaaaccgcgaatctcgccttat

SEQ ID NO: 16161 - DNA, 1109 bp, Artificial Sequence
  chemically treated genomic DNA (Homo sapiens) CpG-island No: 16161
  unsure (948, 1010, 1016, 1095)
gcggtttcgtcgttttttcgattcgttattttcgtttgtttttcgcgcgcgtttttattatttttttgttatcgttttttttatttgcgttcgttttatttcgttcgttcggtttttttttttcgtatttttttacgcgtaggtaatttcgcgtagttttcgtcggtttttttttcgtcgcgcgttttattatttttatattgcgtcgttttatgttatcgtgtcgatttgtttttttagcgtcgcggcgttcgttttttcgttttcgttgttcgtattttagtcgtttcgtttcgacgttacgtatcggtcgttaattcgtttcgcgcgatatttttacgtttttttgttacgcgtttagcgttacgacgttatcgcgttgtagtttcgttcgtagtcgcgttttttttcgtatgtgtttttacgtatttttttacgtttttatcgtattatcgtcgttttatcgtcgttcgtatcgttcgtatttcgttcgtttttttttttacggttcgtacgttataggtttgattcgcggttagttttttttatcgtatcgtttagcgttcgtttttatatgtcgtttcgtaatacgttttgtcgttacgtattatagttttgttattatatttttattagtcggtattttttacgttcgtattttttacgatttcgtcggattttcgcgttattcgtttttgtcgtgtattacggatttcgtattatgtatcgatgcgtttcgagtcgttttagtagtagtattttgtacgcggttgttgcgtacgattcgttatacgtattttacgtttacgttttgatacgatttagattcgttattcgtgttgtttgtcgttacgcgttacgattttttgcgtttgtcgtattcgttaatatgtagttatagcgcgcgatattatatcgaacgcgtgttgttttgtagtattgtatttnatagattatgttatcgttatcggttgtagttattcgttatatttcgtgacgtattagttcgnatattnttattgttagttatatcgtcgttgttttgatttgagtatagtatgtgattatatagacgttgtgatatcgtttagttgntaggttatgtatgt

SEQ ID NO: 16162 - DNA, 1109 bp, Artificial Sequence
  chemically treated genomic DNA (Homo sapiens) CpG-island No: 16162
  unsure (15, 94, 100, 162)
acatacataacctancaactaaacgatatcacaacgtctatataatcacatactatactcaaatcaaaacaacgacgatataactaacaataanaatatncgaactaatacgtcacgaaatataacgaataactacaaccgataacgataacataatctatnaaatacaatactacaaaacaacacgcgttcgatataatatcgcgcgctataactacatattaacgaatacgacaaacgcaaaaaatcgtaacgcgtaacgacaaacaacacgaataacgaatctaaatcgtatcaaaacgtaaacgtaaaatacgtataacgaatcgtacgcaacaaccgcgtacaaaatactactactaaaacgactcgaaacgcatcgatacataatacgaaatccgtaatacacgacaaaaacgaataacgcgaaaatccgacgaaatcgtaaaaaatacgaacgtaaaaaataccgactaataaaaatataataacaaaactataatacgtaacgacaaaacgtattacgaaacgacatataaaaacgaacgctaaacgatacgataaaaaaaactaaccgcgaatcaaacctataacgtacgaaccgtaaaaaaaaaaacgaacgaaatacgaacgatacgaacgacgataaaacgacgataatacgataaaaacgtaaaaaaatacgtaaaaacacatacgaaaaaaaacgcgactacgaacgaaactacaacgcgataacgtcgtaacgctaaacgcgtaacaaaaaaacgtaaaaatatcgcgcgaaacgaattaacgaccgatacgtaacgtcgaaacgaaacgactaaaatacgaacaacgaaaacgaaaaaacgaacgccgcgacgctaaaaaaacaaatcgacacgataacataaaacgacgcaatataaaaataataaaacgcgcgacgaaaaaaaaaccgacgaaaactacgcgaaattacctacgcgtaaaaaaatacgaaaaaaaaaaaccgaacgaacgaaataaaacgaacgcaaataaaaaaaacgataacaaaaaaataataaaaacgcgcgcgaaaaacaaacgaaaataacgaatcgaaaaaacgacgaaaccgc

SEQ ID NO: 16163 - DNA, 1109 bp, Artificial Sequence
  chemically treated genomic DNA (Homo sapiens) CpG-island No: 16163
  unsure (15, 94, 100, 162)
gtatatatgatttantagttgagcgatgttatagcgtttgtgtagttatatgttatgtttagattagagtagcggcgatgtggttagtagtgangatgtncgagttgatacgttacgggatgtgacgggtagttatagtcgatggcgatgatatgatttatngagtgtagtgttgtagagtagtacgcgttcggtatgatgtcgcgcgttgtgattgtatgttggcgagtgcgataggcgtagagagtcgtagcgcgtggcgataggtagtacgagtgacgagtttgagtcgtgttagagcgtagacgtggagtgcgtatagcgagtcgtacgtagtagtcgcgtgtagagtattgttgttggagcggttcggagcgtatcggtatatggtgcgaggttcgtgatgtacggtagagacgagtagcgcgagagttcgacgggatcgtgaggagtgcggacgtggagagtgtcggttgatgaggatgtgatgatagagttgtggtgcgtggcgatagagcgtgttacggggcgatatgtgggggcgagcgttgagcggtacggtgggagagattggtcgcggattagatttgtagcgtgcgggtcgtaagagagggggcgggcgaggtgcggacggtgcgaacgacggtgggacggcggtggtgcggtggaggcgtggggggatacgtgagggtatatgcggggagagacgcgattgcgagcggaattgtagcgcggtggcgtcgtagcgttgggcgcgtggtaggggggcgtgggggtgtcgcgcggagcggattgacgatcggtgcgtgacgtcggggcgggacggttggggtgcgagtaacggaggcggagaggcgggcgtcgcggcgttaggagggtaggtcgatacggtggtatgggacggcgtagtgtgggagtgatggggcgcgcggcggggggagagtcggcgaggattgcgcggggttatttgcgcgtgggggaatgcgggagggaggggtcgggcgggcgaggtggggcgggcgtaggtggggggggcggtggtagggaggtagtagggacgcgcgcggggggtaggcgggggtggcgagtcggagggacggcgagatcgt

SEQ ID NO: 16164 - DNA, 1109 bp, Artificial Sequence
  chemically treated genomic DNA (Homo sapiens) CpG-island No: 16164
  unsure (948, 1010, 1016, 1095)
acgatctcgccgtccctccgactcgccacccccgcctaccccccgcgcgcgtccctactacctccctaccaccgccccccccacctacgcccgccccacctcgcccgcccgacccctccctcccgcattcccccacgcgcaaataaccccgcgcaatcctcgccgactctccccccgccgcgcgccccatcactcccacactacgccgtcccataccaccgtatcgacctaccctcctaacgccgcgacgcccgcctctccgcctccgttactcgcaccccaaccgtcccgccccgacgtcacgcaccgatcgtcaatccgctccgcgcgacacccccacgcccccctaccacgcgcccaacgctacgacgccaccgcgctacaattccgctcgcaatcgcgtctctccccgcatataccctcacgtatccccccacgcctccaccgcaccaccgccgtcccaccgtcgttcgcaccgtccgcacctcgcccgccccctctcttacgacccgcacgctacaaatctaatccgcgaccaatctctcccaccgtaccgctcaacgctcgcccccacatatcgccccgtaacacgctctatcgccacgcaccacaactctatcatcacatcctcatcaaccgacactctccacgtccgcactcctcacgatcccgtcgaactctcgcgctactcgtctctaccgtacatcacgaacctcgcaccatataccgatacgctccgaaccgctccaacaacaatactctacacgcgactactacgtacgactcgctatacgcactccacgtctacgctctaacacgactcaaactcgtcactcgtactacctatcgccacgcgctacgactctctacgcctatcgcactcgccaacatacaatcacaacgcgcgacatcataccgaacgcgtactactctacaacactacactcnataaatcatatcatcgccatcgactataactacccgtcacatcccgtaacgtatcaactcgnacatcntcactactaaccacatcgccgctactctaatctaaacataacatataactacacaaacgctataacatcgctcaactantaaatcatatatac

SEQ ID NO: 16165 - DNA, 1333 bp, Artificial Sequence
  chemically treated genomic DNA (Homo sapiens) CpG-island No: 16165
  unsure (832)
gttttacgcgtttcgggtcgatatcgttagtgacgtatttacgttttttgtatatcgattcgacgttttttattattgtgcgcggttattttacgtgtttttttgttacgaagtagtcgtaagtagcgacgttagattgttttgcgacgggtatacgtatggtacggtttataatagattgtattttttacggcgcgcgcgaatttatcgttattacgttgcggttatacgttttttagcggtcgtatttgttagcgttagatttttttcgtcgttttggagttacgtgcgttttgtagttatttatttcgcgttcgtttttatatttggacgttgttatgggcgatagtttggtttttgttagtagttatttcgatatcgattcgtttacgttattcggtatagcgtattttattcgggacgtttatttcgtaacgattttagtttcgatgcgtttatgttacgttttgttcgtcgttttatttgtatacgtttattcgtcgtcgattttagtttgattattggatttagagtattgcgtgttttaattaacgcgatttattatattttttcggtgatggttatacgcgtcggagacgatatcgttttgatacgtttatttatagttatattacgcggtcgagtcgatggttagtgtattacggacgtttacgttggacgttgtttcgacgttcgtatttcgagtttttgcgtagttttttacgattcgttattcgattatagttttgttttagacgttattttaattattagttacgtgttttcgtcgtagcgtaattagtcgtatgcgttattagttttgtatacgtantatacgaagattatacgttagatttgagattttataagttcgtggtgcgttcgcgcgttacgtatagtatacgagtttttacgacgtgtacgacgtagacgtatagataagattgtgttcgttatagatatagttattgagcgtagcgtatttaacgttattgatacgcgcggtttgtacgttacgagacgtgtagttcgttaattcgtcgacgtcgttttttcgatatgttttttacgatttatttagaagtttcgaggcgtagtttttttttttgtgtttattttattttatttttgatttagatatatatttgttatacgtacgtttttttattcgcgttatttttatttttatcgtttaaaatttttatttacgaatttttaatatagagttttatgacgattattatatatttgttaatatatatacgtttagtatatttataatttatttttcgaatatattattttatatagaggaatttttttattaaatatt

SEQ ID NO: 16166 - DNA, 1333 bp, Artificial Sequence
  chemically treated genomic DNA (Homo sapiens) CpG-island No: 16166
  unsure (502)
aatatttaataaaaaaattcctctatataaaataatatattcgaaaaataaattataaatatactaaacgtatatatattaacaaatatataataatcgtcataaaactctatattaaaaattcgtaaataaaaattttaaacgataaaaataaaaataacgcgaataaaaaaacgtacgtataacaaatatatatctaaatcaaaaataaaataaaataaacacaaaaaaaaaaactacgcctcgaaacttctaaataaatcgtaaaaaacatatcgaaaaaacgacgtcgacgaattaacgaactacacgtctcgtaacgtacaaaccgcgcgtatcaataacgttaaatacgctacgctcaataactatatctataacgaacacaatcttatctatacgtctacgtcgtacacgtcgtaaaaactcgtatactatacgtaacgcgcgaacgcaccacgaacttataaaatctcaaatctaacgtataatcttcgtatantacgtatacaaaactaataacgcatacgactaattacgctacgacgaaaacacgtaactaataattaaaataacgtctaaaacaaaactataatcgaataacgaatcgtaaaaaactacgcaaaaactcgaaatacgaacgtcgaaacaacgtccaacgtaaacgtccgtaatacactaaccatcgactcgaccgcgtaatataactataaataaacgtatcaaaacgatatcgtctccgacgcgtataaccatcaccgaaaaaatataataaatcgcgttaattaaaacacgcaatactctaaatccaataatcaaactaaaatcgacgacgaataaacgtatacaaataaaacgacgaacaaaacgtaacataaacgcatcgaaactaaaatcgttacgaaataaacgtcccgaataaaatacgctataccgaataacgtaaacgaatcgatatcgaaataactactaacaaaaaccaaactatcgcccataacaacgtccaaatataaaaacgaacgcgaaataaataactacaaaacgcacgtaactccaaaacgacgaaaaaaatctaacgctaacaaatacgaccgctaaaaaacgtataaccgcaacgtaataacgataaattcgcgcgcgccgtaaaaaatacaatctattataaaccgtaccatacgtatacccgtcgcaaaacaatctaacgtcgctacttacgactacttcgtaacaaaaaaacacgtaaaataaccgcgcacaataataaaaaacgtcgaatcgatatacaaaaaacgtaaatacgtcactaacgatatcgacccgaaacgcgtaaaac

SEQ ID NO: 16167 - DNA, 1333 bp, Artificial Sequence
  chemically treated genomic DNA (Homo sapiens) CpG-island No: 16167
  unsure (502)
ggtgtttggtgggggaatttttttgtgtgaggtgatgtgttcgagaggtgggttgtgggtgtattgggcgtgtgtgtgttggtaggtgtgtggtggtcgttatggagttttatgttgggggttcgtaggtgggggttttgggcgatggaagtggaggtggcgcgggtaggagagcgtacgtgtggtagatgtatgtttgagttagagatagagtgaggtgagtatagagagagaggttgcgtttcgaggtttttagatgagtcgtggagagtatatcggagagacgacgtcgacgagttagcgagttatacgtttcgtggcgtgtagatcgcgcgtgttagtgacgttggatgcgttgcgtttagtgattgtgtttgtggcggatatagttttgtttatgcgtttacgtcgtgtacgtcgtgagaattcgtgtgttgtgcgtgacgcgcgagcgtattacgagtttgtagagttttagatttgacgtgtggttttcgtgtgntgcgtgtgtaggattggtggcgtatgcggttagttgcgttacgacgagagtacgtgattgatagttaaggtagcgtttaaggtaggattgtagtcgggtggcggatcgtgagagattacgtagagattcggggtacgagcgtcgagatagcgtttaacgtgagcgttcgtggtgtattagttatcggttcgatcgcgtagtgtggttatggatgaacgtgttagagcgatgtcgttttcgacgcgtgtgattattatcgagggagtgtgataggtcgcgttggttgggatacgtagtgttttgagtttagtgattaggttgaggtcgacggcgagtaggcgtgtgtaggtggaacggcggataaggcgtgatatggacgtatcgaggttgggatcgttgcgaggtggacgtttcggataagatgcgttgtatcgggtggcgtgggcgagtcgatgtcggagtggttgttagtagagattaggttgtcgtttatgatagcgtttagatgtaggggcggacgcggagtgggtggttatagggcgtacgtaattttaggacggcggaaggagtttgacgttgatagatgcggtcgttaggagacgtgtggtcgtagcgtggtggcggtaggttcgcgcgcgtcgtaggagatgtagtttgttgtgggtcgtgttatgcgtgtattcgtcgtagagtagtttggcgtcgttatttgcgattgtttcgtggtaggggaatacgtgagatggtcgcgtataatagtgagggacgtcgaatcgatgtgtagaggacgtaggtgcgttattggcgatgtcggttcggagcgcgtggggt

SEQ ID NO: 16168 - DNA, 1333 bp, Artificial Sequence
  chemically treated genomic DNA (Homo sapiens) CpG-island No: 16168
  unsure (832)
accccacgcgctccgaaccgacatcgccaataacgcacctacgtcctctacacatcgattcgacgtccctcactattatacgcgaccatctcacgtattcccctaccacgaaacaatcgcaaataacgacgccaaactactctacgacgaatacacgcataacacgacccacaacaaactacatctcctacgacgcgcgcgaacctaccgccaccacgctacgaccacacgtctcctaacgaccgcatctatcaacgtcaaactccttccgccgtcctaaaattacgtacgccctataaccacccactccgcgtccgcccctacatctaaacgctatcataaacgacaacctaatctctactaacaaccactccgacatcgactcgcccacgccacccgatacaacgcatcttatccgaaacgtccacctcgcaacgatcccaacctcgatacgtccatatcacgccttatccgccgttccacctacacacgcctactcgccgtcgacctcaacctaatcactaaactcaaaacactacgtatcccaaccaacgcgacctatcacactccctcgataataatcacacgcgtcgaaaacgacatcgctctaacacgttcatccataaccacactacgcgatcgaaccgataactaatacaccacgaacgctcacgttaaacgctatctcgacgctcgtaccccgaatctctacgtaatctctcacgatccgccacccgactacaatcctaccttaaacgctaccttaactatcaatcacgtactctcgtcgtaacgcaactaaccgcatacgccaccaatcctacacacgcancacacgaaaaccacacgtcaaatctaaaactctacaaactcgtaatacgctcgcgcgtcacgcacaacacacgaattctcacgacgtacacgacgtaaacgcataaacaaaactatatccgccacaaacacaatcactaaacgcaacgcatccaacgtcactaacacgcgcgatctacacgccacgaaacgtataactcgctaactcgtcgacgtcgtctctccgatatactctccacgactcatctaaaaacctcgaaacgcaacctctctctctatactcacctcactctatctctaactcaaacatacatctaccacacgtacgctctcctacccgcgccacctccacttccatcgcccaaaacccccacctacgaacccccaacataaaactccataacgaccaccacacacctaccaacacacacacgcccaatacacccacaacccacctctcgaacacatcacctcacacaaaaaaattcccccaccaaacacc

SEQ ID NO: 16169 - DNA, 1447 bp, Artificial Sequence
  chemically treated genomic DNA (Homo sapiens) CpG-island No: 16169
acgagatcgcgatttttataatagatatttcgtcgtttaattttaattttatatagagtttatatatttgttattcgattcgttgtttaaatcgattagggatacgacgttgtacggttattgggacgtttcgattaattttttaggtgttttagttataagattatatatattaatatttatttcgaatcgtatcgagttatttgatacgtttcgcgatcgattaattggcggttgttataattttagacgcggcgttatttcgtttaagaatagatatgcgtttatagttatattgtgtaatattattcgtttcgaatttatatatatcggtattacgttatattattaggtagacgtgcgtatagttacgtagtcgattatttcgttaatattgtttatagttatttcgtgagagagtatcgagtacgagtattgtacgcgaattcgttgtattttgagtgtagttatagcgcgttgatttttatagtacgcgttacgtgtacgtagatttaattagttgagcgcgattattcgaatcgcgcgacgtatatcgtatagattacgattgtacgttggtatttatacgagtattaatagtcgattttcgttaacgcgtcgtcgtacgttgtgtcgtgacgtggtatatttgtagtagcgatgttgcgaatttaacgattcgtgttagttagatgagtttacgataattacgttttataagcgcgatatcgttatagagatttagattagtagatttgtggttcgcgtatgatttttatattgacgcgattatagtatatatatcgtgcgagaagttattatgcgattttatagtcggacgcgtgttgtagtcgtgtttatcgcgcgacgtgcgagatataaatatagttgagtgtaggttatagtcgttgagtatcgatagcgttgacgatacgtatttcgaacgtgatgcgatgtgtatagtatacgttagttaagcgtttatttcgtcgtaagttagttgtgttacgcgagtagattattatatttatatatttattattgcgatcgtcgtacgtcggattgatattttatagtagtttattagtgtcgttatattttagtagtttacgtagtatatgttttaacgttattatatttttcgtttttacgttgtgtttttgcgtttattttacgacggttttttagttacgatattatatttatagagatggtttttattacgatgggtttcgtttaagaaattacgtttttttgttgtttttattatattttttacgatttttaattattatttttttttttagttcgttttagatcgtttttttttttttcgcggggggggtttttcgaaaaaaaatttttttaaaaatatattgggggcggttttttaaaaaataatttttttttttttttttttatttttcgcgttatatcgttttatacg

SEQ ID NO: 16170 - DNA, 1447 bp, Artificial Sequence
  chemically treated genomic DNA (Homo sapiens) CpG-island No: 16170
cgtataaaacgatataacgcgaaaaataaaaaaaaaaaaaaaaaaattattttttaaaaaaccgcccccaatatatttttaaaaaaattttttttcgaaaaaccccccccgcgaaaaaaaaaaaaacgatctaaaacgaactaaaaaaaaaaataataattaaaaatcgtaaaaaatataataaaaacaacaaaaaaacgtaatttcttaaacgaaacccatcgtaataaaaaccatctctataaatataatatcgtaactaaaaaaccgtcgtaaaataaacgcaaaaacacaacgtaaaaacgaaaaatataataacgttaaaacatatactacgtaaactactaaaatataacgacactaataaactactataaaatatcaatccgacgtacgacgatcgcaataataaatatataaatataataatctactcgcgtaacacaactaacttacgacgaaataaacgcttaactaacgtatactatacacatcgcatcacgttcgaaatacgtatcgtcaacgctatcgatactcaacgactataacctacactcaactatatttatatctcgcacgtcgcgcgataaacacgactacaacacgcgtccgactataaaatcgcataataacttctcgcacgatatatatactataatcgcgtcaatataaaaatcatacgcgaaccacaaatctactaatctaaatctctataacgatatcgcgcttataaaacgtaattatcgtaaactcatctaactaacacgaatcgttaaattcgcaacatcgctactacaaatataccacgtcacgacacaacgtacgacgacgcgttaacgaaaatcgactattaatactcgtataaataccaacgtacaatcgtaatctatacgatatacgtcgcgcgattcgaataatcgcgctcaactaattaaatctacgtacacgtaacgcgtactataaaaatcaacgcgctataactacactcaaaatacaacgaattcgcgtacaatactcgtactcgatactctctcacgaaataactataaacaatattaacgaaataatcgactacgtaactatacgcacgtctacctaataatataacgtaataccgatatatataaattcgaaacgaataatattacacaatataactataaacgcatatctattcttaaacgaaataacgccgcgtctaaaattataacaaccgccaattaatcgatcgcgaaacgtatcaaataactcgatacgattcgaaataaatattaatatatataatcttataactaaaacacctaaaaaattaatcgaaacgtcccaataaccgtacaacgtcgtatccctaatcgatttaaacaacgaatcgaataacaaatatataaactctatataaaattaaaattaaacgacgaaatatctattataaaaatcgcgatctcgt

SEQ ID NO: 16171 - DNA, 1447 bp, Artificial Sequence
  chemically treated genomic DNA (Homo sapiens) CpG-island No: 16171
cgtgtgaggcggtgtggcgcggagggtggggaaaaaaagaggggggttgttttttaaaaaatcgtttttaatatatttttgggggggttttttttcggggggtttttttcgcgggaggggagggggcgatttggggcgggttgaaaaaaagggtagtggttggaggtcgtaaaaaatgtggtggggataataaagaggcgtggttttttggacggggtttatcgtagtgggagttatttttgtgggtgtgatatcgtgattaggggatcgtcgtgaggtgagcgtaagagtatagcgtaggagcgaggggtgtggtagcgttggagtatgtgttgcgtaggttgttagagtgtagcggtattggtgagttgttatgagatattagttcggcgtgcgacggtcgtagtagtggatgtgtgggtgtgatgatttgttcgcgtgatataattggtttgcggcgagatgagcgtttagttagcgtgtgttatgtatatcgtattacgttcggagtacgtgtcgttagcgttgtcgatgtttagcgattgtgatttgtatttagttgtgtttgtgtttcgtacgtcgcgcgatgagtacggttgtagtacgcgttcgattgtgaggtcgtatggtagtttttcgtacgatgtgtgtgttgtgatcgcgttagtgtgaagattatgcgcgagttataggtttgttgatttgagtttttgtggcgatgtcgcgtttgtgaggcgtgattgtcgtgggtttatttggttggtacggatcgttgaattcgtagtatcgttgttgtagatgtgttacgttacgatatagcgtacgacggcgcgttggcgagggtcggttgttgatgttcgtgtgagtattagcgtgtaatcgtgatttgtgcgatgtgcgtcgcgcgattcgagtggtcgcgtttagttggttgagtttacgtgtacgtagcgcgtgttgtggaagttaacgcgttgtagttgtatttagagtgtagcggattcgcgtgtagtgttcgtattcggtgtttttttacggaatggttgtgggtagtgttgacggggtggtcggttgcgtggttgtgcgtacgtttgtttgatggtgtggcgtggtgtcggtatgtgtgggttcggggcgagtggtgttgtatagtgtgattataggcgtatgtttgtttttagacggggtggcgtcgcgtttgggattgtggtagtcgttagttggtcggtcgcgggacgtgttaggtgattcgatgcggttcggggtgggtgttggtgtatgtggttttgtggttggggtatttggagggttgatcgggacgttttagtggtcgtgtagcgtcgtgtttttggtcggtttgggtagcgggtcgggtggtagatgtgtgggttttgtgtggagttggggttgggcggcgggatgtttgttgtggggatcgcggtttcgt

SEQ ID NO: 16172 - DNA, 1447 bp, Artificial Sequence
  chemically treated genomic DNA (Homo sapiens) CpG-island No: 16172
acgaaaccgcgatccccacaacaaacatcccgccgcccaaccccaactccacacaaaacccacacatctaccacccgacccgctacccaaaccgaccaaaaacacgacgctacacgaccactaaaacgtcccgatcaaccctccaaataccccaaccacaaaaccacatacaccaacacccaccccgaaccgcatcgaatcacctaacacgtcccgcgaccgaccaactaacgactaccacaatcccaaacgcgacgccaccccgtctaaaaacaaacatacgcctataatcacactatacaacaccactcgccccgaacccacacataccgacaccacgccacaccatcaaacaaacgtacgcacaaccacgcaaccgaccaccccgtcaacactacccacaaccattccgtaaaaaaacaccgaatacgaacactacacgcgaatccgctacactctaaatacaactacaacgcgttaacttccacaacacgcgctacgtacacgtaaactcaaccaactaaacgcgaccactcgaatcgcgcgacgcacatcgcacaaatcacgattacacgctaatactcacacgaacatcaacaaccgaccctcgccaacgcgccgtcgtacgctatatcgtaacgtaacacatctacaacaacgatactacgaattcaacgatccgtaccaaccaaataaacccacgacaatcacgcctcacaaacgcgacatcgccacaaaaactcaaatcaacaaacctataactcgcgcataatcttcacactaacgcgatcacaacacacacatcgtacgaaaaactaccatacgacctcacaatcgaacgcgtactacaaccgtactcatcgcgcgacgtacgaaacacaaacacaactaaatacaaatcacaatcgctaaacatcgacaacgctaacgacacgtactccgaacgtaatacgatatacataacacacgctaactaaacgctcatctcgccgcaaaccaattatatcacgcgaacaaatcatcacacccacacatccactactacgaccgtcgcacgccgaactaatatctcataacaactcaccaataccgctacactctaacaacctacgcaacacatactccaacgctaccacacccctcgctcctacgctatactcttacgctcacctcacgacgatcccctaatcacgatatcacacccacaaaaataactcccactacgataaaccccgtccaaaaaaccacgcctctttattatccccaccacattttttacgacctccaaccactaccctttttttcaacccgccccaaatcgccccctcccctcccgcgaaaaaaaccccccgaaaaaaaacccccccaaaaatatattaaaaacgattttttaaaaaacaacccccctctttttttccccaccctccgcgccacaccgcctcacacg

SEQ ID NO: 16173 - DNA, 509 bp, Artificial Sequence
  chemically treated genomic DNA (Homo sapiens) CpG-island No: 16173
gtcgtcgtcgtcgcgttttttatatttgtattgttagtagtagtaatagagttaggataagttcgtgttcgtttttcgcgtttttttcgtatttttattattattcgtatttcgcgtattagtagtcggttagcggcggtagtagtttatgttttcggtgtaatagttgcgtttttttcggtgtttcggcggcgggggcgggagataatttgtttttgttgtttcgtattttttcgttcggcggcgtttttcggattcgtattttttcgtcgttgtcgggttcgttttgttgttgttgttgttgttcgtcgcgtcggggtagttagtttaatgtgagcgagttgacgtcgtttagttatgttagtgcgtttcggtagtagtacgcgtagtagttcgcgtagtagtcggcgttcgttttttagtattattagtgttatagtttgtagttcgtcgttagttttacgggtagtttcggtagtttgggtttcgggttttcgttttcgtattat

SEQ ID NO: 16174 - DNA, 509 bp, Artificial Sequence
  chemically treated genomic DNA (Homo sapiens) CpG-island No: 16174
ataatacgaaaacgaaaacccgaaacccaaactaccgaaactacccgtaaaactaacgacgaactacaaactataacactaataatactaaaaaacgaacgccgactactacgcgaactactacgcgtactactaccgaaacgcactaacataactaaacgacgtcaactcgctcacattaaactaactaccccgacgcgacgaacaacaacaacaacaacaaaacgaacccgacaacgacgaaaaaatacgaatccgaaaaacgccgccgaacgaaaaaatacgaaacaacaaaaacaaattatctcccgcccccgccgccgaaacaccgaaaaaaacgcaactattacaccgaaaacataaactactaccgccgctaaccgactactaatacgcgaaatacgaataataataaaaatacgaaaaaaacgcgaaaaacgaacacgaacttatcctaactctattactactactaacaatacaaatataaaaaacgcgacgacgacgac

SEQ ID NO: 16175 - DNA, 509 bp, Artificial Sequence
  chemically treated genomic DNA (Homo sapiens) CpG-island No: 16175
gtggtgcgagagcgggggttcggagtttagattgtcgaggttgttcgtggggttggcggcgggttgtaggttgtggtattggtggtattgggaggcggacgtcgattgttgcgcggattgttgcgcgtattgttgtcggagcgtattggtatggttggacggcgttagttcgtttatattgagttggttgtttcggcgcgacgagtagtagtagtagtagtaggacgagttcgatagcggcgaggaggtgcgggttcggaaggcgtcgtcgggcgaggaggtgcggagtagtagggataggttatttttcgttttcgtcgtcggggtatcggaggaggcgtagttgttgtatcggaggtatgggttgttgtcgtcgttggtcggttgttggtgcgcgaggtgcgggtggtggtgagggtgcgggaggggcgcgaagggcgggtacgggtttgttttggttttgttgttgttgttggtaatgtaggtgtgaggagcgcggcggcggcggt

SEQ ID NO: 16176 - DNA, 509 bp, Artificial Sequence
  chemically treated genomic DNA (Homo sapiens) CpG-island No: 16176
accgccgccgccgcgctcctcacacctacattaccaacaacaacaacaaaaccaaaacaaacccgtacccgcccttcgcgcccctcccgcaccctcaccaccacccgcacctcgcgcaccaacaaccgaccaacgacgacaacaacccatacctccgatacaacaactacgcctcctccgataccccgacgacgaaaacgaaaaataacctatccctactactccgcacctcctcgcccgacgacgccttccgaacccgcacctcctcgccgctatcgaactcgtcctactactactactactactcgtcgcgccgaaacaaccaactcaatataaacgaactaacgccgtccaaccataccaatacgctccgacaacaatacgcgcaacaatccgcgcaacaatcgacgtccgcctcccaataccaccaataccacaacctacaacccgccgccaaccccacgaacaacctcgacaatctaaactccgaacccccgctctcgcaccac

SEQ ID NO: 16177 - DNA, 654 bp, Artificial Sequence
  chemically treated genomic DNA (Homo sapiens) CpG-island No: 16177
tattcgtattcggcgtattattagtattattagttttaggcgcgtcgcgagagtaatttttttatcgaaatagttatgagtagttgtaggtataacgggggcgttatgcggtcgtttagtaatttgagcgcgtttcgtcggaatttttacgagatggatttagaggcgtagtttttgtagtttttcgcgtttgtcggaggaggtggcggcgcgtttttttcgtttgtagtcgttgtcgtcgtcgtcgtcgttgtttcgtttttagttttcgagatcgtggtgtttaagttcgagtataataattttaataatttggcgttttatggaatcggcggcggaggtagtattggaggaggcggcggcggtggcgggagcgggtacggtagtagtagtggtattaagtttagtaaaaagaaaaattagaatatcggttataagttgggttatcggcgcgttttgttcgaaaagcgtaagcggtttagcgattacgcgtttattttcggtatgttcggtatcgtggttatggttatcgagatcgagttgtcgtggggcgtttacgataaggtataggtttgaattttagtttacgttatcggagtcgggtattgggtggttgggatgggtattggcggggattttttgcgtgcggatttt

SEQ ID NO: 16178 - DNA, 654 bp, Artificial Sequence
  chemically treated genomic DNA (Homo sapiens) CpG-island No: 16178
aaaatccgcacgcaaaaaatccccgccaatacccatcccaaccacccaatacccgactccgataacgtaaactaaaattcaaacctataccttatcgtaaacgccccacgacaactcgatctcgataaccataaccacgataccgaacataccgaaaataaacgcgtaatcgctaaaccgcttacgcttttcgaacaaaacgcgccgataacccaacttataaccgatattctaatttttctttttactaaacttaataccactactactaccgtacccgctcccgccaccgccgccgcctcctccaatactacctccgccgccgattccataaaacgccaaattattaaaattattatactcgaacttaaacaccacgatctcgaaaactaaaaacgaaacaacgacgacgacgacgacaacgactacaaacgaaaaaaacgcgccgccacctcctccgacaaacgcgaaaaactacaaaaactacgcctctaaatccatctcgtaaaaattccgacgaaacgcgctcaaattactaaacgaccgcataacgcccccgttatacctacaactactcataactatttcgataaaaaaattactctcgcgacgcgcctaaaactaataatactaataatacgccgaatacgaata

SEQ ID NO: 16179 - DNA, 654 bp, Artificial Sequence
  chemically treated genomic DNA (Homo sapiens) CpG-island No: 16179
gggattcgtacgtaaagggttttcgttagtgtttattttaattatttagtgttcgatttcggtagcgtgggttggggtttaagtttgtattttgtcgtaggcgttttacgatagttcggtttcgatgattatgattacgatgtcgaatatgtcgaagatgagcgcgtagtcgttgagtcgtttgcgtttttcgaatagggcgcgtcggtggtttagtttgtagtcgatgttttggtttttttttttgttggatttggtgttattgttgttgtcgtgttcgttttcgttatcgtcgtcgttttttttagtgttgttttcgtcgtcggttttatagagcgttaggttgttggagttgttgtgttcgggtttagatattacgatttcgggggttgaggacgaaatagcggcggcggcggcggtagcggttgtagacggggaggacgcgtcgttatttttttcgatagacgcggggggttgtaggggttgcgtttttgagtttatttcgtggaggtttcggcgggacgcgtttaagttgttgagcggtcgtatgacgttttcgttgtatttgtagttgtttatggttatttcggtgaaggggttgttttcgcggcgcgtttggggttggtggtgttggtggtgcgtcgggtgcgggtg

SEQ ID NO: 16180 - DNA, 654 bp, Artificial Sequence
  chemically treated genomic DNA (Homo sapiens) CpG-island No: 16180
cacccgcacccgacgcaccaccaacaccaccaaccccaaacgcgccgcgaaaacaaccccttcaccgaaataaccataaacaactacaaatacaacgaaaacgtcatacgaccgctcaacaacttaaacgcgtcccgccgaaacctccacgaaataaactcaaaaacgcaacccctacaaccccccgcgtctatcgaaaaaaataacgacgcgtcctccccgtctacaaccgctaccgccgccgccgccgctatttcgtcctcaacccccgaaatcgtaatatctaaacccgaacacaacaactccaacaacctaacgctctataaaaccgacgacgaaaacaacactaaaaaaaacgacgacgataacgaaaacgaacacgacaacaacaataacaccaaatccaacaaaaaaaaaaaccaaaacatcgactacaaactaaaccaccgacgcgccctattcgaaaaacgcaaacgactcaacgactacgcgctcatcttcgacatattcgacatcgtaatcataatcatcgaaaccgaactatcgtaaaacgcctacgacaaaatacaaacttaaaccccaacccacgctaccgaaatcgaacactaaataattaaaataaacactaacgaaaaccctttacgtacgaatccc

SEQ ID NO: 16181 - DNA, 576 bp, Artificial Sequence
  chemically treated genomic DNA (Homo sapiens) CpG-island No: 16181
tttgacgttatcgaatttgcggcgtttgtaatcggtaaagtatacgttattaaattttattataacgtgggcggtttgtcgaaagagatgaagatgggtttggttgaatcgttgaaagagttgtttaaagacgaagtgcgtaagattggtttggagttgggtttgtcgtacgatatgttgtatcgttattcgttttcgggattaggttttggcgttcgtgttttgggtgaagtgaagaaagagtattgtgatttgttgcgtcgtgttgacgttatttttattgaagaattgcgtaaagcggatttgtacgataaagttagttaggcgtttattgtgtttttgtcggtacgtttcgttggcgtaatgggcgatggtcgtaagtatgattgggttgtttttttgcgtgttgtcgaaattatcgattttatgatcgtatattgggcgtatttgtcgtacgattttttcggtcgcgtttttaatcgtattattaatgaagtgaacggtatttttcgcgtggtgtatgatattagcggtaagtcgttagttattattgagtgggaatgatttgattttgta

SEQ ID NO: 16182 - DNA, 576 bp, Artificial Sequence
  chemically treated genomic DNA (Homo sapiens) CpG-island No: 16182
tacaaaatcaaatcattcccactcaataataactaacgacttaccgctaatatcatacaccacgcgaaaaataccgttcacttcattaataatacgattaaaaacgcgaccgaaaaaatcgtacgacaaatacgcccaatatacgatcataaaatcgataatttcgacaacacgcaaaaaaacaacccaatcatacttacgaccatcgcccattacgccaacgaaacgtaccgacaaaaacacaataaacgcctaactaactttatcgtacaaatccgctttacgcaattcttcaataaaaataacgtcaacacgacgcaacaaatcacaatactctttcttcacttcacccaaaacacgaacgccaaaacctaatcccgaaaacgaataacgatacaacatatcgtacgacaaacccaactccaaaccaatcttacgcacttcgtctttaaacaactctttcaacgattcaaccaaacccatcttcatctctttcgacaaaccgcccacgttataataaaatttaataacgtatactttaccgattacaaacgccgcaaattcgataacgtcaaa

SEQ ID NO: 16183 - DNA, 576 bp, Artificial Sequence
  chemically treated genomic DNA (Homo sapiens) CpG-island No: 16183
tgtagggttaaattatttttatttaatggtagttggcggtttgtcgttgatgttatatattacgcgggaaatatcgtttattttattgataatgcggttggaaacgcgatcgaggaaatcgtacggtagatgcgtttagtgtgcggttataaagtcgatggtttcgatagtacgtagagagataatttagttatatttacgattatcgtttattacgttaacggaacgtatcggtaggaatatagtgaacgtttggttgattttgtcgtataggttcgttttacgtagttttttaatgaagatggcgttagtacggcgtagtaggttatagtattttttttttattttatttagaatacgaacgttaaggtttggtttcgggaacgggtgacggtatagtatgtcgtacggtaggtttagttttagattaattttacgtatttcgtttttgaatagtttttttagcggtttaattaggtttatttttatttttttcggtaggtcgtttacgttgtggtgagatttgatgacgtgtgttttatcggttgtagacgtcgtagattcgataacgttagg

SEQ ID NO: 16184 - DNA, 576 bp, Artificial Sequence
  chemically treated genomic DNA (Homo sapiens) CpG-island No: 16184
cctaacgttatcgaatctacgacgtctacaaccgataaaacacacgtcatcaaatctcaccacaacgtaaacgacctaccgaaaaaaataaaaataaacctaattaaaccgctaaaaaaactattcaaaaacgaaatacgtaaaattaatctaaaactaaacctaccgtacgacatactataccgtcacccgttcccgaaaccaaaccttaacgttcgtattctaaataaaataaaaaaaaaatactataacctactacgccgtactaacgccatcttcattaaaaaactacgtaaaacgaacctatacgacaaaatcaaccaaacgttcactatattcctaccgatacgttccgttaacgtaataaacgataatcgtaaatataactaaattatctctctacgtactatcgaaaccatcgactttataaccgcacactaaacgcatctaccgtacgatttcctcgatcgcgtttccaaccgcattatcaataaaataaacgatatttcccgcgtaatatataacatcaacgacaaaccgccaactaccattaaataaaaataatttaaccctaca

SEQ ID NO: 16185 - DNA, 1437 bp, Artificial Sequence
  chemically treated genomic DNA (Homo sapiens) CpG-island No: 16185
attgtttacgcgtattgcggaaaatgcgtatttatgggttattttcgttttagtttttcggatgttaggagttgttgatagtacggaaaatacgtttcgggtgcggtattataatggtgattcgattatttttagtcgtgattgtcgtaatatcgttcggtgaatcgttcgggttagtcgggtaggttttagtgattttgtcgaagttatcgatatagcgtagtgttattagttttttgttttttagtgtcgttagatgcgtcgtattacgtatttttacgcgttttttattatgagagatagtaatcggtatttgcgagtttaatattttttgtaatagtagagacgggttttgggttattttaattaggttgaaacgcgttttaaagcgatcggaggtattgcgtataaaacgtggttataatttattatttgggattagtttacgtagattagatattatttggtaatcgttatatatttttagcgttagcgtttgcggacggtggaagaaggttgtaaatttatcgcgtatacggttattgaataggattgatttcgtttaatttttatcggtatttagtatattatcgtaggagaaattatcgtacgcgattagggcgtggaaattttttaggttcgtgcgttcggttagtaggttatttatatgtacgtcgatagtattaaagtttgtacggtggaaagttgtcgttattttaatatgcgagtttacgttttgtttacgtagtacggtaattttcggacgtgcgttagtggtaatatacggtgttgttatattttcgttgatatcgaacgatagttttatatttaggttcggatcggcgtcgttagatttcgtttgatgtttttgatcggtatatttcgggttgttacgtaggcgttgtatttgttaggtagtttttgtttattagatacgtaacgtggtgcggttttcgttgaatatagtttgttcgttggcggtaattataaaacggttatcggaaatcgtttgttttatataatggatataattagtaagtttatgttgtgttagtacggattcgatcgttttacggttagcggtacgaatttgaattatcgtatttagtttttcgttaaataacgtcgttaggcgatcgttatttagagtggcgatattcgcgttaatgttataatgattagtaaaggttattttcgttagcgttattagtaggtcgttattagagcggtcgtgatacgttagtagtttacgttgtgtaattagcgtttgaatcgcgttatagaagttttttagttgcgcgatatcgcgtatatttgtcggtttgtcgttaagttgacgataaatttgcgttagcgtcgttgcgtttagcgcgttattgtttttgtttaaattaattagtagtagtgcgtattttcggtagaaagttgcggcgtgat

SEQ ID NO: 16186 - DNA, 1437 bp, Artificial Sequence
  chemically treated genomic DNA (Homo sapiens) CpG-island No: 16186
atcacgccgcaactttctaccgaaaatacgcactactactaattaatttaaacaaaaacaataacgcgctaaacgcaacgacgctaacgcaaatttatcgtcaacttaacgacaaaccgacaaatatacgcgatatcgcgcaactaaaaaacttctataacgcgattcaaacgctaattacacaacgtaaactactaacgtatcacgaccgctctaataacgacctactaataacgctaacgaaaataacctttactaatcattataacattaacgcgaatatcgccactctaaataacgatcgcctaacgacgttatttaacgaaaaactaaatacgataattcaaattcgtaccgctaaccgtaaaacgatcgaatccgtactaacacaacataaacttactaattatatccattatataaaacaaacgatttccgataaccgttttataattaccgccaacgaacaaactatattcaacgaaaaccgcaccacgttacgtatctaataaacaaaaactacctaacaaatacaacgcctacgtaacaacccgaaatataccgatcaaaaacatcaaacgaaatctaacgacgccgatccgaacctaaatataaaactatcgttcgatatcaacgaaaatataacaacaccgtatattaccactaacgcacgtccgaaaattaccgtactacgtaaacaaaacgtaaactcgcatattaaaataacgacaactttccaccgtacaaactttaatactatcgacgtacatataaataacctactaaccgaacgcacgaacctaaaaaatttccacgccctaatcgcgtacgataatttctcctacgataatatactaaataccgataaaaattaaacgaaatcaatcctattcaataaccgtatacgcgataaatttacaaccttcttccaccgtccgcaaacgctaacgctaaaaatatataacgattaccaaataatatctaatctacgtaaactaatcccaaataataaattataaccacgttttatacgcaatacctccgatcgctttaaaacgcgtttcaacctaattaaaataacccaaaacccgtctctactattacaaaaaatattaaactcgcaaataccgattactatctctcataataaaaaacgcgtaaaaatacgtaatacgacgcatctaacgacactaaaaaacaaaaaactaataacactacgctatatcgataacttcgacaaaatcactaaaacctacccgactaacccgaacgattcaccgaacgatattacgacaatcacgactaaaaataatcgaatcaccattataataccgcacccgaaacgtattttccgtactatcaacaactcctaacatccgaaaaactaaaacgaaaataacccataaatacgcattttccgcaatacgcgtaaacaat

SEQ ID NO: 16187 - DNA, 1437 bp, Artificial Sequence
  chemically treated genomic DNA (Homo sapiens) CpG-island No: 16187
attacgtcgtagttttttatcgaagatacgtattgttgttgattgatttgggtaaaggtaataacgcgttgggcgtaacggcgttggcgtaggtttatcgttagtttggcgataaatcggtagatgtacgcgatgtcgcgtaattgaaaggtttttatgacgcgatttaggcgttggttgtatagcgtaagttgttggcgtattacgatcgttttgatggcggtttgttggtaacgttggcggaaatggtttttgttggttattgtggtattgacgcggatatcgttattttgggtgacgatcgtttggcggcgttgtttaacgaagaattgggtgcggtgatttaggttcgtgtcgttgatcgtgaagcggtcgagttcgtattggtatagtatgggtttgttgattgtgtttattatgtagggtaggcggttttcggtgatcgttttgtgattatcgttaacgggtagattgtatttagcgaaagtcgtattacgttgcgtgtttggtgggtagaaattatttggtagatgtagcgtttgcgtgataattcggagtgtgtcgattaggagtattaggcgaaatttaacgacgtcgattcgggtttgaatgtaaaattgtcgttcgatattaacgaagatgtggtagtatcgtatattgttattggcgtacgttcgaaagttgtcgtattgcgtgagtagggcgtgaattcgtatgttgaaatggcggtagttttttatcgtgtaggttttgatgttatcgacgtgtatatgagtgatttgttgatcggacgtacgggtttggaagatttttacgttttggtcgcgtgcggtggttttttttacggtgatgtgttgggtgtcggtgaaggttgggcgaagttaattttgtttaatgatcgtgtacgcgatgagtttgtaatttttttttatcgttcgtaaacgttggcgttgggggtatgtaacggttgttagatgatgtttaatttgcgtgaattgattttaggtagtgagttgtggttacgttttgtgcgtaatattttcgatcgttttgaagcgcgttttagtttggttgaagtaatttaaagttcgtttttgttgttgtaggggatgttgggttcgtaaatgtcgattgttgttttttatggtgaagggcgcgtggaagtgcgtgatgcggcgtatttggcggtattggaaagtaaagggttggtggtattgcgttatgtcgataatttcggtaaagttattgaaatttattcggttaattcgaacggtttatcgaacggtattacggtagttacgattgaaagtggtcgagttattattatgatgtcgtattcggaacgtgtttttcgtattgttagtaatttttggtattcggaaaattggggcgaggatggtttatggatgcgtatttttcgtaatgcgcgtaagtagt

SEQ ID NO: 16188 - DNA, 1437 bp, Artificial Sequence
  chemically treated genomic DNA (Homo sapiens) CpG-island No: 16188
actacttacgcgcattacgaaaaatacgcatccataaaccatcctcgccccaattttccgaataccaaaaattactaacaatacgaaaaacacgttccgaatacgacatcataataataactcgaccactttcaatcgtaactaccgtaataccgttcgataaaccgttcgaattaaccgaataaatttcaataactttaccgaaattatcgacataacgcaataccaccaaccctttactttccaataccgccaaatacgccgcatcacgcacttccacgcgcccttcaccataaaaaacaacaatcgacatttacgaacccaacatcccctacaacaacaaaaacgaactttaaattacttcaaccaaactaaaacgcgcttcaaaacgatcgaaaatattacgcacaaaacgtaaccacaactcactacctaaaatcaattcacgcaaattaaacatcatctaacaaccgttacatacccccaacgccaacgtttacgaacgataaaaaaaaattacaaactcatcgcgtacacgatcattaaacaaaattaacttcgcccaaccttcaccgacacccaacacatcaccgtaaaaaaaaccaccgcacgcgaccaaaacgtaaaaatcttccaaacccgtacgtccgatcaacaaatcactcatatacacgtcgataacatcaaaacctacacgataaaaaactaccgccatttcaacatacgaattcacgccctactcacgcaatacgacaactttcgaacgtacgccaataacaatatacgatactaccacatcttcgttaatatcgaacgacaattttacattcaaacccgaatcgacgtcgttaaatttcgcctaatactcctaatcgacacactccgaattatcacgcaaacgctacatctaccaaataatttctacccaccaaacacgcaacgtaatacgactttcgctaaatacaatctacccgttaacgataatcacaaaacgatcaccgaaaaccgcctaccctacataataaacacaatcaacaaacccatactataccaatacgaactcgaccgcttcacgatcaacgacacgaacctaaatcaccgcacccaattcttcgttaaacaacgccgccaaacgatcgtcacccaaaataacgatatccgcgtcaataccacaataaccaacaaaaaccatttccgccaacgttaccaacaaaccgccatcaaaacgatcgtaatacgccaacaacttacgctatacaaccaacgcctaaatcgcgtcataaaaacctttcaattacgcgacatcgcgtacatctaccgatttatcgccaaactaacgataaacctacgccaacgccgttacgcccaacgcgttattacctttacccaaatcaatcaacaacaatacgtatcttcgataaaaaactacgacgtaat

SEQ ID NO: 16189 - DNA, 884 bp, Artificial Sequence
  chemically treated genomic DNA (Homo sapiens) CpG-island No: 16189
atcgtgcggaatatgtagcgtcgcgttcggttgatgcgttatcgcgtggtataatttaagattcgtattggaaaacgttattttcgttatatatgaagttagtaatatgttttcgcgcgcggtaaggtcgtgatcgtagtttatcgttttcggtagcgatttgttaattatcgtaatggtattaatcgttagattgtcggtaaacggtgtagcgtttagggcgttgtatgttttaatggtatgggttaacgtattaatgtcggttatcgtcgtgatatgcgacggtatattttcggttaatgcggcgtcgaggatcgttatattcggtattagcgaggtatgggttaatatttgtttgcgttcgtttatcgcgtcgataattatcgttatattggtggttttagagtcggtttcggcggtagttggaatggtaattagcggtaagcgcggttgtagaacgttggtttttgatatttttgttagcgtgttattcgggttcgttattagtaacgttacggttttcgtcgtatttagtatcgagtcgtcgttaaacgcgattattttattatagtttgatttacgtaattgcgttacggttgtatatacgtcggtaatgtacggttcgtttatcggatatggttagagcgttatggcgatatttttaacggttaggttacgcgttagttcggcggttatttttgtttgatgtaaaaagttgtttgttattacgaatagatgttttagtttacgcgtttgcgtttgttgttcgtaattgtttatcgagttcggatcgtaaagcgttatcggtggaacgttaaatgtttttattcgttgtagatttagggtatcgaacgtttgaaagagcgcggtttgtaatttatttt

SEQ ID NO: 16190 - DNA, 884 bp, Artificial Sequence
  chemically treated genomic DNA (Homo sapiens) CpG-island No: 16190
aaaataaattacaaaccgcgctctttcaaacgttcgataccctaaatctacaacgaataaaaacatttaacgttccaccgataacgctttacgatccgaactcgataaacaattacgaacaacaaacgcaaacgcgtaaactaaaacatctattcgtaataacaaacaactttttacatcaaacaaaaataaccgccgaactaacgcgtaacctaaccgttaaaaatatcgccataacgctctaaccatatccgataaacgaaccgtacattaccgacgtatatacaaccgtaacgcaattacgtaaatcaaactataataaaataatcgcgtttaacgacgactcgatactaaatacgacgaaaaccgtaacgttactaataacgaacccgaataacacgctaacaaaaatatcaaaaaccaacgttctacaaccgcgcttaccgctaattaccattccaactaccgccgaaaccgactctaaaaccaccaatataacgataattatcgacgcgataaacgaacgcaaacaaatattaacccatacctcgctaataccgaatataacgatcctcgacgccgcattaaccgaaaatataccgtcgcatatcacgacgataaccgacattaatacgttaacccataccattaaaacatacaacgccctaaacgctacaccgtttaccgacaatctaacgattaataccattacgataattaacaaatcgctaccgaaaacgataaactacgatcacgaccttaccgcgcgcgaaaacatattactaacttcatatataacgaaaataacgttttccaatacgaatcttaaattataccacgcgataacgcatcaaccgaacgcgacgctacatattccgcacgat

SEQ ID NO: 16191 - DNA, 884 bp, Artificial Sequence
  chemically treated genomic DNA (Homo sapiens) CpG-island No: 16191
aaaatgaattgtagatcgcgtttttttaggcgttcgatattttgaatttgtaacgggtaaaaatatttagcgttttatcggtgacgttttgcggttcgggttcggtgagtagttgcggatagtaagcgtaaacgcgtgggttgaaatatttgttcgtgatggtagatagttttttgtattaggtagggatgatcgtcgggttgacgcgtagtttgatcgttaaaggtatcgttatgacgttttggttatgttcggtgggcgaatcgtgtattatcgacgtgtgtgtagtcgtggcgtagttgcgtgagttaggttgtgatggggtgatcgcgtttggcggcggttcggtgttggatgcggcgaaagtcgtgacgttgttggtgacgaattcggatagtacgttggtagagatgttagaaattagcgttttgtaatcgcgtttgtcgttgattgttattttaattatcgtcggaatcggttttgaaattattaatgtaacggtgattatcgacgcggtgagcgggcgtaagtaggtgttagtttatgtttcgttgatgtcggatgtggcgattttcgacgtcgtattgatcgaaggtgtgtcgtcgtatgttacggcgatgatcggtattgatgcgttaatttatgttattgaagtatatagcgttttgaacgttatatcgtttatcgatagtttggcgattggtgttattgcgatgattggtaaatcgttgtcgaaagcggtgggttacggttacgattttgtcgcgcgcgagagtatgttgttggttttatgtatggcgggaatggcgttttttagtgcgggttttgggttgtgttacgcgatggcgtattagtcgggcgcggcgttgtatatttcgtacggt

SEQ ID NO: 16192 - DNA, 884 bp, Artificial Sequence
  chemically treated genomic DNA (Homo sapiens) CpG-island No: 16192
accgtacgaaatatacaacgccgcgcccgactaatacgccatcgcgtaacacaacccaaaacccgcactaaaaaacgccattcccgccatacataaaaccaacaacatactctcgcgcgcgacaaaatcgtaaccgtaacccaccgctttcgacaacgatttaccaatcatcgcaataacaccaatcgccaaactatcgataaacgatataacgttcaaaacgctatatacttcaataacataaattaacgcatcaataccgatcatcgccgtaacatacgacgacacaccttcgatcaatacgacgtcgaaaatcgccacatccgacatcaacgaaacataaactaacacctacttacgcccgctcaccgcgtcgataatcaccgttacattaataatttcaaaaccgattccgacgataattaaaataacaatcaacgacaaacgcgattacaaaacgctaatttctaacatctctaccaacgtactatccgaattcgtcaccaacaacgtcacgactttcgccgcatccaacaccgaaccgccgccaaacgcgatcaccccatcacaacctaactcacgcaactacgccacgactacacacacgtcgataatacacgattcgcccaccgaacataaccaaaacgtcataacgatacctttaacgatcaaactacgcgtcaacccgacgatcatccctacctaatacaaaaaactatctaccatcacgaacaaatatttcaacccacgcgtttacgcttactatccgcaactactcaccgaacccgaaccgcaaaacgtcaccgataaaacgctaaatatttttacccgttacaaattcaaaatatcgaacgcctaaaaaaacgcgatctacaattcatttt

SEQ ID NO: 16193 - DNA, 578 bp, Artificial Sequence
  chemically treated genomic DNA (Homo sapiens) CpG-island No: 16193
agaggtgtttgcgtcgtcgttagttgatgtggtaacgatgcgcgaaatggtagaacgggtcggattttaggttatcgtgggaggttaaaatggtatatttggtggtagtaatcgtttgcgtaagcggcgtggcgtatatttatatggcggcggaacggttggaaaagttgtgtttgttagagaagtggggagttagtattgaaatttaggcgcgttgggaacggagaatcgtttagcggatgaggatattcgtcgggcggatgttgttttgttgattacggatatcgagtttgtcggtgtcgagcgatttgaatattgtcgttatgtgtaatgtagtatttacgtatttttgcgtgagtcgtagcgggtaatgagcgcggtgcgtaaagtgttttttgcgtcgtagtaaatttattttattttggagtagtcggtttttttgttagttggttgtggtattgtcggcgatatttcgacggcgagcgttcggtgtttttacgaaatagacggtagaagtagttgttgtcgataaagtcgtaggcgtgcgttattttttttatttttaggttatagttttt

SEQ ID NO: 16194 - DNA, 578 bp, Artificial Sequence
  chemically treated genomic DNA (Homo sapiens) CpG-island No: 16194
aaaaactataacctaaaaataaaaaaaataacgcacgcctacgactttatcgacaacaactacttctaccgtctatttcgtaaaaacaccgaacgctcgccgtcgaaatatcgccgacaataccacaaccaactaacaaaaaaaccgactactccaaaataaaataaatttactacgacgcaaaaaacactttacgcaccgcgctcattacccgctacgactcacgcaaaaatacgtaaatactacattacacataacgacaatattcaaatcgctcgacaccgacaaactcgatatccgtaatcaacaaaacaacatccgcccgacgaatatcctcatccgctaaacgattctccgttcccaacgcgcctaaatttcaatactaactccccacttctctaacaaacacaacttttccaaccgttccgccgccatataaatatacgccacgccgcttacgcaaacgattactaccaccaaatataccattttaacctcccacgataacctaaaatccgacccgttctaccatttcgcgcatcgttaccacatcaactaacgacgacgcaaacacctct

SEQ ID NO: 16195 - DNA, 578 bp, Artificial Sequence
  chemically treated genomic DNA (Homo sapiens) CpG-island No: 16195
aaaggttatgatttgaaggtaaaagaagtggcgtacgtttgcggttttgtcgatagtaattatttttgtcgtttgtttcgtaaaaatatcgaacgttcgtcgtcggaatatcgtcggtagtattatagttaattgatagaaaaatcgattattttagaataagatgggtttgttgcggcgtagaaagtattttgcgtatcgcgtttattattcgttgcggtttacgtaggaatgcgtagatgttgtattgtatatagcggtaatgtttaaatcgttcggtatcggtaagttcgatattcgtaattaatagagtaatattcgttcggcggatatttttattcgttaaacgatttttcgtttttagcgcgtttgagttttaatgttgattttttatttttttaataggtataatttttttagtcgtttcgtcgttatataagtatgcgttacgtcgtttacgtaggcggttattgttattaggtatgttattttaattttttacggtaatttgaagttcggttcgttttgttatttcgcgtatcgttgttatattagttgacgacggcgtaggtattttt

SEQ ID NO: 16196 - DNA, 578 bp, Artificial Sequence
  chemically treated genomic DNA (Homo sapiens) CpG-island No: 16196
aaaaatacctacgccgtcgtcaactaatataacaacgatacgcgaaataacaaaacgaaccgaacttcaaattaccgtaaaaaattaaaataacatacctaataacaataaccgcctacgtaaacgacgtaacgcatacttatataacgacgaaacgactaaaaaaattatacctattaaaaaaataaaaaatcaacattaaaactcaaacgcgctaaaaacgaaaaatcgtttaacgaataaaaatatccgccgaacgaatattactctattaattacgaatatcgaacttaccgataccgaacgatttaaacattaccgctatatacaatacaacatctacgcattcctacgtaaaccgcaacgaataataaacgcgatacgcaaaatactttctacgccgcaacaaacccatcttattctaaaataatcgatttttctatcaattaactataatactaccgacgatattccgacgacgaacgttcgatatttttacgaaacaaacgacaaaaataattactatcgacaaaaccgcaaacgtacgccacttcttttaccttcaaatcataaccttt

SEQ ID NO: 16197 - DNA, 501 bp, Artificial Sequence
  chemically treated genomic DNA (Homo sapiens) CpG-island No: 16197
tcggaacgggtttttatagtgttaagacgttcgttatggagttttattttaatatcgaaacggttatgaatacggttggtaaatttacgcgttttggtagttaatggttgttcggtgtcgtttatatttagcggtaaatcgacgatgatttcgttcggttgttatttttttagtaaacgttcgataatgttttagttcggcgtatcgttttgtgttttaattgtaggtaaagggcgagcggtgtcggtaatgcgttggtcgaacgttacgttaatgtttttggtgtcgaagtcgaaggcgagtaagggttttaattcgattaggcgtgttttgttatattaggtatggtgagaaataattttataatttaagttagtatagtcgattcgcgttacggtcggtaatcggcgtttcgtatagattatttagatttgtcggggtcgttagttaggcgtatcgagaatttttgttttaagtgattttatttaggaggttaaatta

SEQ ID NO: 16198 - DNA, 501 bp, Artificial Sequence
  chemically treated genomic DNA (Homo sapiens) CpG-island No: 16198
taatttaacctcctaaataaaatcacttaaaacaaaaattctcgatacgcctaactaacgaccccgacaaatctaaataatctatacgaaacgccgattaccgaccgtaacgcgaatcgactatactaacttaaattataaaattatttctcaccatacctaatataacaaaacacgcctaatcgaattaaaacccttactcgccttcgacttcgacaccaaaaacattaacgtaacgttcgaccaacgcattaccgacaccgctcgccctttacctacaattaaaacacaaaacgatacgccgaactaaaacattatcgaacgtttactaaaaaaataacaaccgaacgaaatcatcgtcgatttaccgctaaatataaacgacaccgaacaaccattaactaccaaaacgcgtaaatttaccaaccgtattcataaccgtttcgatattaaaataaaactccataacgaacgtcttaacactataaaaacccgttccga

SEQ ID NO: 16199 - DNA, 501 bp, Artificial Sequence
  chemically treated genomic DNA (Homo sapiens) CpG-island No: 16199
tggtttagttttttggataaagttatttggaataggaattttcgatacgtttggttaacggtttcggtagatttggatagtttgtgcgaaacgtcgattgtcgatcgtggcgcgagtcggttatattgatttgggttgtggaattattttttattatgtttggtgtggtaggatacgtttgatcgagttggaatttttattcgttttcgatttcggtattaaaagtattggcgtagcgttcggttaacgtattatcggtatcgttcgttttttgtttgtaattaaagtataggacggtacgtcggattggaatattatcgagcgtttattgaaagagtggtagtcggacgaaattatcgtcggtttgtcgttgaatatggacggtatcgagtaattattgattgttagagcgcgtaaatttgttaatcgtatttatggtcgtttcggtgttgaagtaaagttttatgacgagcgttttagtattgtggaagttcgtttcgg

SEQ ID NO: 16200 - DNA, 501 bp, Artificial Sequence
  chemically treated genomic DNA (Homo sapiens) CpG-island No: 16200
ccgaaacgaacttccacaatactaaaacgctcgtcataaaactttacttcaacaccgaaacgaccataaatacgattaacaaatttacgcgctctaacaatcaataattactcgataccgtccatattcaacgacaaaccgacgataatttcgtccgactaccactctttcaataaacgctcgataatattccaatccgacgtaccgtcctatactttaattacaaacaaaaaacgaacgataccgataatacgttaaccgaacgctacgccaatacttttaataccgaaatcgaaaacgaataaaaattccaactcgatcaaacgtatcctaccacaccaaacataataaaaaataattccacaacccaaatcaatataaccgactcgcgccacgatcgacaatcgacgtttcgcacaaactatccaaatctaccgaaaccgttaaccaaacgtatcgaaaattcctattccaaataactttatccaaaaaactaaacca

SEQ ID NO: 16201 - DNA, 550 bp, Artificial Sequence
  chemically treated genomic DNA (Homo sapiens) CpG-island No: 16201
ttcgcgtcgatagatatagcgttgtatgtagtttattggatacgttaggtggtatatttatattttgatagtttggtaattacgatttggtcgatagttgggaatacggtcggtagtaatagttcgtattttttggtcgatacggagttttaaattatagaggtttttaggttttgagtgacgttcggtgattaacgcggttaatagttacgggttattaggtggtattaacgtatagatagtaagtatttcgagcgggttaggtgtatgattcgagtaaatatatacggatgtcgtgcgagaatatcgatttcgtgcgaataattattcgtcgaattagtgatttattagtgttcgttagtgcgatatttggcgtatttaaagttagtcggattcggttacggcgtttttatagtattttagaaattacggtaaaattacgaaagttcggcggataatttaaatggtaagttatttggtcgcgtagcgttattgagcgttgatttattatattaagtaaattcgtttttagataatgttggttatgatt

SEQ ID NO: 16202 - DNA, 550 bp, Artificial Sequence
  chemically treated genomic DNA (Homo sapiens) CpG-island No: 16202
aatcataaccaacattatctaaaaacgaatttacttaatataataaatcaacgctcaataacgctacgcgaccaaataacttaccatttaaattatccgccgaactttcgtaattttaccgtaatttctaaaatactataaaaacgccgtaaccgaatccgactaactttaaatacgccaaatatcgcactaacgaacactaataaatcactaattcgacgaataattattcgcacgaaatcgatattctcgcacgacatccgtatatatttactcgaatcatacacctaacccgctcgaaatacttactatctatacgttaataccacctaataacccgtaactattaaccgcgttaatcaccgaacgtcactcaaaacctaaaaacctctataatttaaaactccgtatcgaccaaaaaatacgaactattactaccgaccgtattcccaactatcgaccaaatcgtaattaccaaactatcaaaatataaatataccacctaacgtatccaataaactacatacaacgctatatctatcgacgcgaa

SEQ ID NO: 16203 - DNA, 550 bp, Artificial Sequence
  chemically treated genomic DNA (Homo sapiens) CpG-island No: 16203
gattatggttagtattgtttggggacgaatttatttggtatagtggattaacgtttaatggcgttgcgcgattagatgatttgttatttgggttgttcgtcgggttttcgtgattttgtcgtgatttttgggatattgtgggaacgtcgtggtcggattcggttggttttggatgcgttaagtgtcgtattggcgggtattggtggattattgattcgacggatgattgttcgtacggggtcgatgttttcgtacggtattcgtgtatgtttattcgggttatgtatttggttcgttcggggtatttgttgtttgtacgttggtgttatttgatggttcgtgattgttgatcgcgttggttatcgggcgttatttagggtttggggatttttgtagtttgaaatttcgtatcgattagggagtgcgggttgttattatcggtcgtgtttttagttgtcggttaagtcgtggttgttaggttgttagaatgtggatatgttatttggcgtgtttaataggttgtatgtaacgttgtgtttgtcggcgcgga

SEQ ID NO: 16204 - DNA, 550 bp, Artificial Sequence
  chemically treated genomic DNA (Homo sapiens) CpG-island No: 16204
tccgcgccgacaaacacaacgttacatacaacctattaaacacgccaaataacatatccacattctaacaacctaacaaccacgacttaaccgacaactaaaaacacgaccgataataacaacccgcactccctaatcgatacgaaatttcaaactacaaaaatccccaaaccctaaataacgcccgataaccaacgcgatcaacaatcacgaaccatcaaataacaccaacgtacaaacaacaaataccccgaacgaaccaaatacataacccgaataaacatacacgaataccgtacgaaaacatcgaccccgtacgaacaatcatccgtcgaatcaataatccaccaatacccgccaatacgacacttaacgcatccaaaaccaaccgaatccgaccacgacgttcccacaatatcccaaaaatcacgacaaaatcacgaaaacccgacgaacaacccaaataacaaatcatctaatcgcgcaacgccattaaacgttaatccactataccaaataaattcgtccccaaacaatactaaccataatc

SEQ ID NO: 16205 - DNA, 511 bp, Artificial Sequence
  chemically treated genomic DNA (Homo sapiens) CpG-island No: 16205
tgtcggcgtgttgttcgttgttagttaagttagacgggtgttaaagagagtttgggcgattattgttgtttttcgattgaacgcgttattatgcgagataaacgttgcgttagatgaacggggtgaaatgagtcgtatttcgaggtcgttgaatttgtagttttagtttggttttaaaatcggaaatcggtaattgggcgttttgttcgtgcgagaagttgtgatgtcgtagaagcgtttgtttgcgtagtattttttattataatcgttcgatatgcgtttaagaatacgacgatttaacggtttttgtttgttagggttaacggatgatgaggcgcgatcgtaaagatttgttttagatcgtttaatcgtgaaaaattaaatttattggaagatggtggtttatgtatcgcgttaataataatattcgttcgtttttgagttagggtattttatgaattatcgagtacgttattgataaattttaggcgcgttacgttatgatgttgat

SEQ ID NO: 16206 - DNA, 511 bp, Artificial Sequence
  chemically treated genomic DNA (Homo sapiens) CpG-island No: 16206
atcaacatcataacgtaacgcgcctaaaatttatcaataacgtactcgataattcataaaataccctaactcaaaaacgaacgaatattattattaacgcgatacataaaccaccatcttccaataaatttaatttttcacgattaaacgatctaaaacaaatctttacgatcgcgcctcatcatccgttaaccctaacaaacaaaaaccgttaaatcgtcgtattcttaaacgcatatcgaacgattataataaaaaatactacgcaaacaaacgcttctacgacatcacaacttctcgcacgaacaaaacgcccaattaccgatttccgattttaaaaccaaactaaaactacaaattcaacgacctcgaaatacgactcatttcaccccgttcatctaacgcaacgtttatctcgcataataacgcgttcaatcgaaaaacaacaataatcgcccaaactctctttaacacccgtctaacttaactaacaacgaacaacacgccgaca

SEQ ID NO: 16207 - DNA, 511 bp, Artificial Sequence
  chemically treated genomic DNA (Homo sapiens) CpG-island No: 16207
attaatattatagcgtgacgcgtttgaagtttattaatggcgtattcggtggtttatgggatgttttgatttaggggcgagcggatattattgttggcgcgatgtatgagttattattttttagtgagtttggttttttacggttgggcgatttggaataagtttttgcggtcgcgttttattattcgttagttttggtaagtaagagtcgttaaatcgtcgtatttttaagcgtatatcgggcgattgtggtgggggatattgcgtaggtaggcgtttttacggtattataatttttcgtacgaataagacgtttaattatcggttttcgattttaaaattaaattggagttgtaaatttagcggtttcgggatgcggtttattttatttcgtttatttggcgtaacgtttatttcgtatagtggcgcgtttaatcgagaagtaatagtggtcgtttaaattttttttgatattcgtttggtttggttggtaacgaatagtacgtcggta

SEQ ID NO: 16208 - DNA, 511 bp, Artificial Sequence
  chemically treated genomic DNA (Homo sapiens) CpG-island No: 16208
taccgacgtactattcgttaccaaccaaaccaaacgaatatcaaaaaaaatttaaacgaccactattacttctcgattaaacgcgccactatacgaaataaacgttacgccaaataaacgaaataaaataaaccgcatcccgaaaccgctaaatttacaactccaatttaattttaaaatcgaaaaccgataattaaacgtcttattcgtacgaaaaattataataccgtaaaaacgcctacctacgcaatatcccccaccacaatcgcccgatatacgcttaaaaatacgacgatttaacgactcttacttaccaaaactaacgaataataaaacgcgaccgcaaaaacttattccaaatcgcccaaccgtaaaaaaccaaactcactaaaaaataataactcatacatcgcgccaacaataatatccgctcgcccctaaatcaaaacatcccataaaccaccgaatacgccattaataaacttcaaacgcgtcacgctataatattaat

SEQ ID NO: 16209 - DNA, 768 bp, Artificial Sequence
  chemically treated genomic DNA (Homo sapiens) CpG-island No: 16209
cgttggaatagagtgcgtaagcgggcgtattatcgttcgtgatagtggtgatggtaaagtatagacgttgggcgcggtagagtatagttcgttgtatatttcggtagattcgttgtaaagtatgagtcgtgaagagaagttggatattttgcgtcgcgtcgattaggttgttcgcgaagcggataagcgcgtataggaagtgattgttagttttagtggtgtttatgaattaattttggttgcggttatcgacggtacgttagcggcggatgttcgttcgttggtgcgttttttcgtgagcgttttcgtcgaagaagatggtaaacgcgaacgcggtgttagtggcggcggcggtcgtttaggttatgaatttttttttgtcgatttcgacggcgaagttcgtgcggatgtatgggtaaaagaagtagtgcgtatggcgttggttaatttttttgtcgttgttgtattagcgggtattatgtcggtagtatttggcgtaggttggtcgggcgtgttgttgtatgaagcgcgtggttacggtttggacggggattttaatcgtcggggtattttagtattaagtggataggttcgggatatgtggtttagatttggtatcgggtgattattgtcgatgtcgacgttagattggaggtatgagattacgtattaggtcgtaacggttgatgaaggaattaaggtacgcggaatattaacgttgacggaatttaggaagatggaaattattagttgcgaatataattcgaa

SEQ ID NO: 16210 - DNA, 768 bp, Artificial Sequence
  chemically treated genomic DNA (Homo sapiens) CpG-island No: 16210
ttcgaattatattcgcaactaataatttccatcttcctaaattccgtcaacgttaatattccgcgtaccttaattccttcatcaaccgttacgacctaatacgtaatctcatacctccaatctaacgtcgacatcgacaataatcacccgataccaaatctaaaccacatatcccgaacctatccacttaatactaaaataccccgacgattaaaatccccgtccaaaccgtaaccacgcgcttcatacaacaacacgcccgaccaacctacgccaaatactaccgacataatacccgctaatacaacaacgacaaaaaaattaaccaacgccatacgcactacttcttttacccatacatccgcacgaacttcgccgtcgaaatcgacaaaaaaaaattcataacctaaacgaccgccgccgccactaacaccgcgttcgcgtttaccatcttcttcgacgaaaacgctcacgaaaaaacgcaccaacgaacgaacatccgccgctaacgtaccgtcgataaccgcaaccaaaattaattcataaacaccactaaaactaacaatcacttcctatacgcgcttatccgcttcgcgaacaacctaatcgacgcgacgcaaaatatccaacttctcttcacgactcatactttacaacgaatctaccgaaatatacaacgaactatactctaccgcgcccaacgtctatactttaccatcaccactatcacgaacgataatacgcccgcttacgcactctattccaacg

SEQ ID NO: 16211 - DNA, 768 bp, Artificial Sequence
  chemically treated genomic DNA (Homo sapiens) CpG-island No: 16211
ttcgaattgtgttcgtagttggtgatttttatttttttggatttcgttagcgttgatgtttcgcgtgttttgatttttttattaatcgttacggtttggtacgtggttttatgtttttaatttggcgtcgatatcggtaataattattcggtattaggtttgagttatatgtttcggatttgtttatttaatattgaagtgtttcggcggttgaagttttcgtttagatcgtgattacgcgttttatgtaatagtacgttcggttaatttgcgttaagtattatcggtatggtgttcgttggtgtagtaacggtagaaagattgattagcgttatacgtattgttttttttgtttatgtattcgtacggatttcgtcgtcgagatcggtaaggaagaatttataatttaaacgatcgtcgtcgttattggtatcgcgttcgcgtttgttatttttttcgacgagaacgtttacggaaagacgtattagcggacggatattcgtcgttagcgtgtcgtcggtggtcgtaattaaaattaatttatagatattattgaggttggtagttattttttgtacgcgtttgttcgtttcgcgggtaatttgatcgacgcgacgtaggatatttagtttttttttacggtttatgttttgtagcggatttatcgaggtatataacgggttatgttttatcgcgtttagcgtttgtattttattattattattattacggacgatggtgcgttcgtttgcgtattttgttttagcg

SEQ ID NO: 16212 - DNA, 768 bp, Artificial Sequence
  chemically treated genomic DNA (Homo sapiens) CpG-island No: 16212
cgctaaaacaaaatacgcaaacgaacgcaccatcgtccgtaataataataataataaaatacaaacgctaaacgcgataaaacataacccgttatatacctcgataaatccgctacaaaacataaaccgtaaaaaaaaactaaatatcctacgtcgcgtcgatcaaattacccgcgaaacgaacaaacgcgtacaaaaaataactaccaacctcaataatatctataaattaattttaattacgaccaccgacgacacgctaacgacgaatatccgtccgctaatacgtctttccgtaaacgttctcgtcgaaaaaaataacaaacgcgaacgcgataccaataacgacgacgatcgtttaaattataaattcttccttaccgatctcgacgacgaaatccgtacgaatacataaacaaaaaaaacaatacgtataacgctaatcaatctttctaccgttactacaccaacgaacaccataccgataatacttaacgcaaattaaccgaacgtactattacataaaacgcgtaatcacgatctaaacgaaaacttcaaccgccgaaacacttcaatattaaataaacaaatccgaaacatataactcaaacctaataccgaataattattaccgatatcgacgccaaattaaaaacataaaaccacgtaccaaaccgtaacgattaataaaaaaatcaaaacacgcgaaacatcaacgctaacgaaatccaaaaaaataaaaatcaccaactacgaacacaattcgaa

SEQ ID NO: 16213 - DNA, 1028 bp, Artificial Sequence
  chemically treated genomic DNA (Homo sapiens) CpG-island No: 16213
cgggttagtgtcgaagtcgaagttttttgcgtcgagaatcgtcgttttgatgatatcgatattcgtttttaggtcgatatcgatttgtaaacggattttgtgacgtaagtcgttagtaattagcgtttgttgggttttaataagttttagattttacggatagattgcgtattttatcgatgaaagcggatttgcgtcggtgtcgtcgttatagtttgcgatggtgattaagttcgtataagtttttggttatgttagtcgcgatggtgtttattttcggttcggaaattagttttacggagattatcgttttcgggttaatttgtttgaggtcgaaaatgagttgcgttaagttttcgatagagtagatatcgtggtgcggcggcggggagattagcgttatttcgggtatcgaatagcgtagtttggcgatgtaaggcgtgattttattattcggtaattgatcgttttcgtttggtttcgcgttttgggcgattttaatttgaatgacgtcggtattgattagatacgtcggagtaattttaaagcgatcggaagttatttgtttgatgcgcgatattttgttggtgtcgtagcgcgtcgggttttcgtcgtttttatcggagttcgaattatcgtcgatgttgtttatcgttttcgttagcgtttcgtgggttttcgggtttaacgcgtcgatagatatcgcggcggtattaaagcgtttaaatagttcgtttgtcggtttaatattagtaatgttgatcgcgtttttattcggcgtaattgttagtagatcgcgtagcgtggttgtcggacgtttattaattagtttcgcgtatttttgatagtcgttgtattcgtcgttttgtatcgtttgttgtagcgtgcgtattacgttcgggttgtaggcgtggtatacgtcgtcgtggacgtatttagtagaacgttttggttgatggggttacgcgttagttagttcggttcgatagattagaaaattcgttggaattttaaagtttgtttttaat

SEQ ID NO: 16214 - DNA, 1028 bp, Artificial Sequence
  chemically treated genomic DNA (Homo sapiens) CpG-island No: 16214
attaaaaacaaactttaaaattccaacgaattttctaatctatcgaaccgaactaactaacgcgtaaccccatcaaccaaaacgttctactaaatacgtccacgacgacgtataccacgcctacaacccgaacgtaatacgcacgctacaacaaacgatacaaaacgacgaatacaacgactatcaaaaatacgcgaaactaattaataaacgtccgacaaccacgctacgcgatctactaacaattacgccgaataaaaacgcgatcaacattactaatattaaaccgacaaacgaactatttaaacgctttaataccgccgcgatatctatcgacgcgttaaacccgaaaacccacgaaacgctaacgaaaacgataaacaacatcgacgataattcgaactccgataaaaacgacgaaaacccgacgcgctacgacaccaacaaaatatcgcgcatcaaacaaataacttccgatcgctttaaaattactccgacgtatctaatcaataccgacgtcattcaaattaaaatcgcccaaaacgcgaaaccaaacgaaaacgatcaattaccgaataataaaatcacgccttacatcgccaaactacgctattcgatacccgaaataacgctaatctccccgccgccgcaccacgatatctactctatcgaaaacttaacgcaactcattttcgacctcaaacaaattaacccgaaaacgataatctccgtaaaactaatttccgaaccgaaaataaacaccatcgcgactaacataaccaaaaacttatacgaacttaatcaccatcgcaaactataacgacgacaccgacgcaaatccgctttcatcgataaaatacgcaatctatccgtaaaatctaaaacttattaaaacccaacaaacgctaattactaacgacttacgtcacaaaatccgtttacaaatcgatatcgacctaaaaacgaatatcgatatcatcaaaacgacgattctcgacgcaaaaaacttcgacttcgacactaacccg

SEQ ID NO: 16215 - DNA, 1028 bp, Artificial Sequence
  chemically treated genomic DNA (Homo sapiens) CpG-island No: 16215
attggggataagttttgagattttagcggattttttaatttgtcgaatcgggttggttggcgcgtaattttattagttagggcgttttgttgaatacgtttacggcggcgtatattacgtttataattcggacgtggtgcgtacgttgtaataagcggtataaagcggcgagtatagcgattattaggaatacgcgaagttggttaatgagcgttcggtaattacgttgcgcgatttgttggtaattacgtcgggtgaaaacgcggttaatattgttgatgttgaatcggtaagcgaattgtttaaacgttttgatatcgtcgcgatgtttatcggcgcgttaagttcggaagtttacgaggcgttggcggaagcgatgaatagtatcggcggtaattcgaatttcggtgaaggcggcgaagattcggcgcgttacggtattaataaagtgtcgcgtattaagtaggtggttttcggtcgttttggggttatttcggcgtatttggttaatgtcgacgttatttagattaaagtcgtttagggcgcgaagttaggcgaaggcggttagttgtcgggtgataaagttacgttttatatcgttaaattgcgttattcggtgttcggagtgacgttgattttttcgtcgtcgtattacgatatttattttatcgaggatttagcgtagtttattttcgattttaagtaggttaattcgaaagcgatgattttcgtgaagttggttttcgaatcgggagtaggtattatcgcgattggtatggttaaaggtttatgcggatttgattattatcgtaggttatgacggcggtatcggcgtaagttcgtttttatcggtgaaatacgtagtttgttcgtgggatttggggtttgttgaaatttagtaggcgttggttgttaacggtttgcgttataagattcgtttgtaggtcgatgtcggtttgaaaacgggtgtcgatattattaaggcggcgattttcggcgtagaaagtttcggtttcggtattggttcg

SEQ ID NO: 16216 - DNA, 1028 bp, Artificial Sequence
  chemically treated genomic DNA (Homo sapiens) CpG-island No: 16216
cgaaccaataccgaaaccgaaactttctacgccgaaaatcgccgccttaataatatcgacacccgttttcaaaccgacatcgacctacaaacgaatcttataacgcaaaccgttaacaaccaacgcctactaaatttcaacaaaccccaaatcccacgaacaaactacgtatttcaccgataaaaacgaacttacgccgataccgccgtcataacctacgataataatcaaatccgcataaacctttaaccataccaatcgcgataatacctactcccgattcgaaaaccaacttcacgaaaatcatcgctttcgaattaacctacttaaaatcgaaaataaactacgctaaatcctcgataaaataaatatcgtaatacgacgacgaaaaaatcaacgtcactccgaacaccgaataacgcaatttaacgatataaaacgtaactttatcacccgacaactaaccgccttcgcctaacttcgcgccctaaacgactttaatctaaataacgtcgacattaaccaaatacgccgaaataaccccaaaacgaccgaaaaccacctacttaatacgcgacactttattaataccgtaacgcgccgaatcttcgccgccttcaccgaaattcgaattaccgccgatactattcatcgcttccgccaacgcctcgtaaacttccgaacttaacgcgccgataaacatcgcgacgatatcaaaacgtttaaacaattcgcttaccgattcaacatcaacaatattaaccgcgttttcacccgacgtaattaccaacaaatcgcgcaacgtaattaccgaacgctcattaaccaacttcgcgtattcctaataatcgctatactcgccgctttataccgcttattacaacgtacgcaccacgtccgaattataaacgtaatatacgccgccgtaaacgtattcaacaaaacgccctaactaataaaattacgcgccaaccaacccgattcgacaaattaaaaaatccgctaaaatctcaaaacttatccccaat

SEQ ID NO: 16217 - DNA, 610 bp, Artificial Sequence
  chemically treated genomic DNA (Homo sapiens) CpG-island No: 16217
ttatatcggtatatagatggtggttattttcgcgttcgttacgttcgaaaacgtttttggtttagtgtacgatttggtggaaattcgcgatcgcgttttgggtattattattggtatcgtggtgttcgcggtgatttatatttttgtttggtttgaaagtgaagcgcgtatattgtcgtaaaaattggttggtacgttgggtatgttaagtaaagtaatgcggattttacgttagtaggaagttacggttttgcgtatttatttgtaaattcgtatcggtttgtatgcggcgtttaatgtttgtgaagagatgtgttaacgcgtggcgttggagcgttaattggatagcgaagaacgcgtattattgattgaacgttcgtaaacggttattcgttagggtcgcgattttttttacgtttgggatgttatttggaattcggcgtaggcgttggataacgtattatagtcggatagagtaggttagtttgtcgacgttttggagaaatacgttgtcggtttggtaatcgtatttagtcgttttttttaaataacgtttgaagagatattcgttttttaggttattttggttattttattaaataggagtata

SEQ ID NO: 16218 - DNA, 610 bp, Artificial Sequence
  chemically treated genomic DNA (Homo sapiens) CpG-island No: 16218
tatactcctatttaataaaataaccaaaataacctaaaaaacgaatatctcttcaaacgttatttaaaaaaaacgactaaatacgattaccaaaccgacaacgtatttctccaaaacgtcgacaaactaacctactctatccgactataatacgttatccaacgcctacgccgaattccaaataacatcccaaacgtaaaaaaaatcgcgaccctaacgaataaccgtttacgaacgttcaatcaataatacgcgttcttcgctatccaattaacgctccaacgccacgcgttaacacatctcttcacaaacattaaacgccgcatacaaaccgatacgaatttacaaataaatacgcaaaaccgtaacttcctactaacgtaaaatccgcattactttacttaacatacccaacgtaccaaccaatttttacgacaatatacgcgcttcactttcaaaccaaacaaaaatataaatcaccgcgaacaccacgataccaataataatacccaaaacgcgatcgcgaatttccaccaaatcgtacactaaaccaaaaacgttttcgaacgtaacgaacgcgaaaataaccaccatctatataccgatataa

SEQ ID NO: 16219 - DNA, 610 bp, Artificial Sequence
  chemically treated genomic DNA (Homo sapiens) CpG-island No: 16219
tgtgtttttgtttaataaggtggttaggatggtttgagaggcgggtgtttttttaagcgttatttgaggagaacggttgagtgcggttgttagatcggtagcgtatttttttagggcgtcggtaaattgatttgttttgttcggttgtagtgcgttatttagcgtttgcgtcgagttttaggtggtattttaggcgtgaagaagatcgcggttttgacgaataatcgtttgcgaacgtttaattagtaatgcgcgtttttcgttgtttagttgacgttttagcgttacgcgttggtatatttttttataggtattaaacgtcgtatgtagatcgatacgaatttgtagataagtgcgtagagtcgtgattttttgttggcgtgggattcgtattattttatttaatatatttagcgtgttagttagtttttgcggtagtgtgcgcgttttatttttaggttagataaaggtgtaaattatcgcggatattacggtattaatgatgatatttagggcgcgatcgcgaatttttattaggtcgtatattgggttaaaaacgttttcgagcgtggcgagcgcgaaggtgattattatttgtgtgtcgatataa

SEQ ID NO: 16220 - DNA, 610 bp, Artificial Sequence
  chemically treated genomic DNA (Homo sapiens) CpG-island No: 16220
ttatatcgacacacaaataataatcaccttcgcgctcgccacgctcgaaaacgtttttaacccaatatacgacctaataaaaattcgcgatcgcgccctaaatatcatcattaataccgtaatatccgcgataatttacacctttatctaacctaaaaataaaacgcgcacactaccgcaaaaactaactaacacgctaaatatattaaataaaataatacgaatcccacgccaacaaaaaatcacgactctacgcacttatctacaaattcgtatcgatctacatacgacgtttaatacctataaaaaaatataccaacgcgtaacgctaaaacgtcaactaaacaacgaaaaacgcgcattactaattaaacgttcgcaaacgattattcgtcaaaaccgcgatcttcttcacgcctaaaataccacctaaaactcgacgcaaacgctaaataacgcactacaaccgaacaaaacaaatcaatttaccgacgccctaaaaaaatacgctaccgatctaacaaccgcactcaaccgttctcctcaaataacgcttaaaaaaacacccgcctctcaaaccatcctaaccaccttattaaacaaaaacaca

SEQ ID NO: 16221 - DNA, 1113 bp, Artificial Sequence
  chemically treated genomic DNA (Homo sapiens) CpG-island No: 16221
tttaggaacgttgaggacgagtaaatagtaatgcggtgtagtaaagaatatggaacgttttatattgcgtaataattgtcgtcggtagatgtagaaacgtagttaggcgtgcgttgttagtaggttacgcgttcggtagttttagttgggttgtatatttttggcggtttcgtttcgttttttttaacggtattaatgttggcgatttcggcgagtattgcgggttgtaaaaaagtggtgttgtgtttatcgtcgtcgattgtcgatgagattttttatgcggcgtagttgtgcggtgtgtaggacgtgtttaacgtcggcggcgtataggttattgtcgtattggcgtttggtacggaatttgtgttaaaagtggataaaattttcgggtcgggtaacgtttttgttatcgaagcgaaacgttaggtgagttagcgtttggacggtgcggcgatcgatatgttcgtaggttcgtcggaagtgttggtgattgttgatagcggcgttacgtcggatttcgtggtttttgatttgtttttttaggttgaatacggttcggatttataggtgattttattgacgttcgttgttgatatggcgcgtcgcgttgtcgaggtcgtcgaacgttaattggtagaattgtcgcgtgtcgaaatcgttcgttaggtattgaacgttagtcgtttgatcgtgattaaagatttagcgtagtgcgtggagatttttaattagtacggttcggagtatttgattatttagattcgtaacgttcgtgaattggtcgatagtattattagcgtcggttcggtattttttggtgattggttatcggaatcggtaggtgattacgttttcggtattaattacgttttatcgatttacggttatatcgttatttgttttagtttcgggttggtagatttttagaagcgtatgatcgtataggaattgtcgaaagaggggtttttcgcgttggttttaattatagaaatattggtcgtcgtcgagcgtttgatcgtttataaaaatgtcgttattttgcgtgttaacgtttttaaggagtaagtatgagtatcgtgattattatcgatttagcgcgtgaaaacgttcgta

SEQ ID NO: 16222 - DNA, 1113 bp, Artificial Sequence
  chemically treated genomic DNA (Homo sapiens) CpG-island No: 16222
tacgaacgttttcacgcgctaaatcgataataatcacgatactcatacttactccttaaaaacgttaacacgcaaaataacgacatttttataaacgatcaaacgctcgacgacgaccaatatttctataattaaaaccaacgcgaaaaacccctctttcgacaattcctatacgatcatacgcttctaaaaatctaccaacccgaaactaaaacaaataacgatataaccgtaaatcgataaaacgtaattaataccgaaaacgtaatcacctaccgattccgataaccaatcaccaaaaaataccgaaccgacgctaataatactatcgaccaattcacgaacgttacgaatctaaataatcaaatactccgaaccgtactaattaaaaatctccacgcactacgctaaatctttaatcacgatcaaacgactaacgttcaatacctaacgaacgatttcgacacgcgacaattctaccaattaacgttcgacgacctcgacaacgcgacgcgccatatcaacaacgaacgtcaataaaatcacctataaatccgaaccgtattcaacctaaaaaaacaaatcaaaaaccacgaaatccgacgtaacgccgctatcaacaatcaccaacacttccgacgaacctacgaacatatcgatcgccgcaccgtccaaacgctaactcacctaacgtttcgcttcgataacaaaaacgttacccgacccgaaaattttatccacttttaacacaaattccgtaccaaacgccaatacgacaataacctatacgccgccgacgttaaacacgtcctacacaccgcacaactacgccgcataaaaaatctcatcgacaatcgacgacgataaacacaacaccacttttttacaacccgcaatactcgccgaaatcgccaacattaataccgttaaaaaaaacgaaacgaaaccgccaaaaatatacaacccaactaaaactaccgaacgcgtaacctactaacaacgcacgcctaactacgtttctacatctaccgacgacaattattacgcaatataaaacgttccatattctttactacaccgcattactatttactcgtcctcaacgttcctaaa

SEQ ID NO: 16223 - DNA, 1113 bp, Artificial Sequence
  chemically treated genomic DNA (Homo sapiens) CpG-island No: 16223
tgcggacgtttttacgcgttaaatcggtaatagttacggtgtttatgtttgttttttaagggcgttaatacgtaaagtaacggtatttttgtgggcggttaggcgttcggcggcggttagtgtttttatggttgaagttagcgcggagaatttttttttcgatagtttttgtacggttatgcgtttttggaaatttgttagttcgaggttggaataggtggcggtgtaatcgtaagtcggtagaacgtggttggtgtcggaggcgtaattatttgtcgatttcggtgattagttattaagaaatatcgaatcggcgttggtgatgttatcgattagtttacgggcgttgcgggtttgaatgattaggtgtttcgggtcgtattggttggagatttttacgtattgcgttaaatttttagttacgattaggcggttggcgtttagtgtttggcgggcggtttcggtacgcggtagttttgttagttggcgttcgacggtttcggtaacgcgacgcgttatattagtagcgggcgttagtaaaattatttgtgagttcgggtcgtgtttagtttgagagagtaaattagaagttacgaaattcggcgtagcgtcgttgttagtaattattagtattttcgacgggtttgcgggtatatcgatcgtcgtatcgtttagacgttggtttatttgacgtttcgtttcggtgataaaggcgttattcggttcgaagattttgtttatttttggtatagatttcgtattaaacgttagtgcggtaatggtttgtgcgtcgtcgacgttaaatacgttttgtatatcgtatagttgcgtcgtataaaggattttatcggtaatcggcggcggtgagtatagtattatttttttatagttcgtaatattcgtcggagtcgttagtattaatatcgttgagaagagcggggcggagtcgttaggaatatataatttaattgaagttatcggacgcgtgatttgttggtaacgtacgtttggttgcgtttttatatttatcggcggtagttattgcgtagtgtggaacgttttatattttttattgtatcgtattgttgtttattcgtttttagcgtttttggg

SEQ ID NO: 16224 - DNA, 1113 bp, Artificial Sequence
  chemically treated genomic DNA (Homo sapiens) CpG-island No: 16224
cccaaaaacgctaaaaacgaataaacaacaatacgatacaataaaaaatataaaacgttccacactacgcaataactaccgccgataaatataaaaacgcaaccaaacgtacgttaccaacaaatcacgcgtccgataacttcaattaaattatatattcctaacgactccgccccgctcttctcaacgatattaatactaacgactccgacgaatattacgaactataaaaaaataatactatactcaccgccgccgattaccgataaaatcctttatacgacgcaactatacgatatacaaaacgtatttaacgtcgacgacgcacaaaccattaccgcactaacgtttaatacgaaatctataccaaaaataaacaaaatcttcgaaccgaataacgcctttatcaccgaaacgaaacgtcaaataaaccaacgtctaaacgatacgacgatcgatatacccgcaaacccgtcgaaaatactaataattactaacaacgacgctacgccgaatttcgtaacttctaatttactctctcaaactaaacacgacccgaactcacaaataattttactaacgcccgctactaatataacgcgtcgcgttaccgaaaccgtcgaacgccaactaacaaaactaccgcgtaccgaaaccgcccgccaaacactaaacgccaaccgcctaatcgtaactaaaaatttaacgcaatacgtaaaaatctccaaccaatacgacccgaaacacctaatcattcaaacccgcaacgcccgtaaactaatcgataacatcaccaacgccgattcgatatttcttaataactaatcaccgaaatcgacaaataattacgcctccgacaccaaccacgttctaccgacttacgattacaccgccacctattccaacctcgaactaacaaatttccaaaaacgcataaccgtacaaaaactatcgaaaaaaaaattctccgcgctaacttcaaccataaaaacactaaccgccgccgaacgcctaaccgcccacaaaaataccgttactttacgtattaacgcccttaaaaaacaaacataaacaccgtaactattaccgatttaacgcgtaaaaacgtccgca

SEQ ID NO: 16225 - DNA, 959 bp, Artificial Sequence
  chemically treated genomic DNA (Homo sapiens) CpG-island No: 16225
gattggaaggttgggtcgttagtcgcgcgcgttagggcgttagcgcgttaatggcgttgaaattagaaatcgttacgcgtttgcgtaagggtgagcgggaagaggtggcgattaatagtttgcgttttggcgatgtgattgaagtcgtcgtaggtgggcgtttgtttgtcgacggtaaattgtttttatcgtttgttagttttgatgaaagcgttttgatcggcgaatttatttcggtggagcgcgtaacgggcgataaagtttttgttggtgttattagcgtagatcgtttggtgacgttggaagtgttgttagaatcgggagttagcgttattgatcggattttgaaattgatcgaagaagtcgaagagcgtcgcgtttttattgagcggtttatcgatcgttttagtcgtatttatacgttcgcgattatggtcgtcgttttgttggtgacgttggtgttatcgttgttgtttgtcgttagttggtaggagtggatttataaagggttgacgttgttgttgattggttgttcgtgtgcgttagttattttaacgtttgcggcgattattttcgggttggcggcggtagcgcgtcgtggggcgttgattaaaggcggagcggcgttggaatagttgggtcgtgttatttaggtggcgtttgataaaatcggtacgttgatcgtcggtaaatcgcgcgttatcgcgatttattcggtaacgggtattagtgaatttgaattgttgatattggcggcggcggtcgagtaaggcgcgacgtatttattggcgtaagttatcgtacgcgaagtataggttgttgaattcgttatttttatcgtcgaattatagcgggcgttggtcgggtttggtattgaagcgtaggttaacggtgagcgcgtattgatttgcgttgtcgggaaatatttcgttgatgtatttattggtttaattaacgaa

SEQ ID NO: 16226 - DNA, 959 bp, Artificial Sequence
  chemically treated genomic DNA (Homo sapiens) CpG-island No: 16226
ttcgttaattaaaccaataaatacatcaacgaaatatttcccgacaacgcaaatcaatacgcgctcaccgttaacctacgcttcaataccaaacccgaccaacgcccgctataattcgacgataaaaataacgaattcaacaacctatacttcgcgtacgataacttacgccaataaatacgtcgcgccttactcgaccgccgccgccaatatcaacaattcaaattcactaatacccgttaccgaataaatcgcgataacgcgcgatttaccgacgatcaacgtaccgattttatcaaacgccacctaaataacacgacccaactattccaacgccgctccgcctttaatcaacgccccacgacgcgctaccgccgccaacccgaaaataatcgccgcaaacgttaaaataactaacgcacacgaacaaccaatcaacaacaacgtcaaccctttataaatccactcctaccaactaacgacaaacaacaacgataacaccaacgtcaccaacaaaacgacgaccataatcgcgaacgtataaatacgactaaaacgatcgataaaccgctcaataaaaacgcgacgctcttcgacttcttcgatcaatttcaaaatccgatcaataacgctaactcccgattctaacaacacttccaacgtcaccaaacgatctacgctaataacaccaacaaaaactttatcgcccgttacgcgctccaccgaaataaattcgccgatcaaaacgctttcatcaaaactaacaaacgataaaaacaatttaccgtcgacaaacaaacgcccacctacgacgacttcaatcacatcgccaaaacgcaaactattaatcgccacctcttcccgctcacccttacgcaaacgcgtaacgatttctaatttcaacgccattaacgcgctaacgccctaacgcgcgcgactaacgacccaaccttccaatc

SEQ ID NO: 16227 - DNA, 959 bp, Artificial Sequence
  chemically treated genomic DNA (Homo sapiens) CpG-island No: 16227
ttcgttaattaaattagtaaatgtattagcgggatgtttttcggtagcgtaaattaatacgcgtttatcgttaatttgcgttttaatgttagattcgattagcgttcgttgtgattcggcggtgggaatggcgagtttagtaatttgtgtttcgcgtacgatggtttgcgttagtggatgcgtcgcgttttgttcgatcgtcgtcgttagtgttagtagtttagatttattaatattcgttgtcggatgaatcgcggtaacgcgcggtttatcgacggttagcgtatcggttttattaaacgttatttgagtaatacgatttagttgttttagcgtcgtttcgtttttaattaacgttttacgacgcgttgtcgtcgttagttcggaggtaatcgtcgtaggcgttgagataattaacgtatacgggtagttaattagtagtagcgttagttttttataaatttatttttgttagttggcggtaaatagtagcggtggtattagcgttattagtagagcgacggttataatcgcgggcgtatagatacggttgaaacggtcgataaatcgtttaatgggagcgcgacgtttttcggttttttcgattagttttagaattcggttaatggcgttggttttcggttttgatagtatttttaacgttattagacggtttacgttggtggtattagtagggattttatcgttcgttgcgcgttttatcggaatggattcgtcggttagggcgtttttattaaaattggtaaacggtgagagtagtttatcgtcggtaggtaaacgtttatttgcggcgattttaattatatcgttagggcgtaggttgttaatcgttattttttttcgtttatttttacgtaggcgcgtggcggtttttggttttagcgttattaacgcgttaacgttttgacgcgcgcggttggcggtttagttttttagtt

SEQ ID NO: 16228 - DNA, 959 bp, Artificial Sequence
  chemically treated genomic DNA (Homo sapiens) CpG-island No: 16228
aactaaaaaactaaaccgccaaccgcgcgcgtcaaaacgttaacgcgttaataacgctaaaaccaaaaaccgccacgcgcctacgtaaaaataaacgaaaaaaaataacgattaacaacctacgccctaacgatataattaaaatcgccgcaaataaacgtttacctaccgacgataaactactctcaccgtttaccaattttaataaaaacgccctaaccgacgaatccattccgataaaacgcgcaacgaacgataaaatccctactaataccaccaacgtaaaccgtctaataacgttaaaaatactatcaaaaccgaaaaccaacgccattaaccgaattctaaaactaatcgaaaaaaccgaaaaacgtcgcgctcccattaaacgatttatcgaccgtttcaaccgtatctatacgcccgcgattataaccgtcgctctactaataacgctaataccaccgctactatttaccgccaactaacaaaaataaatttataaaaaactaacgctactactaattaactacccgtatacgttaattatctcaacgcctacgacgattacctccgaactaacgacgacaacgcgtcgtaaaacgttaattaaaaacgaaacgacgctaaaacaactaaatcgtattactcaaataacgtttaataaaaccgatacgctaaccgtcgataaaccgcgcgttaccgcgattcatccgacaacgaatattaataaatctaaactactaacactaacgacgacgatcgaacaaaacgcgacgcatccactaacgcaaaccatcgtacgcgaaacacaaattactaaactcgccattcccaccgccgaatcacaacgaacgctaatcgaatctaacattaaaacgcaaattaacgataaacgcgtattaatttacgctaccgaaaaacatcccgctaatacatttactaatttaattaacgaa

SEQ ID NO: 16229 - DNA, 524 bp, Artificial Sequence
  chemically treated genomic DNA (Homo sapiens) CpG-island No: 16229
ggttcgtttataaagcggtggtcgcgaattacgcgatcggattgaatgtttagaatggttgtcggaatgattttgtcgtttagtagtagggttacggtgtgtatcggacgtacgaagtgtacgtcgtttgcgttttaacgtattagtttcgggatcggtagtttcgttagagaagtcgtaattatattcggtagtagtgtttcggtgttttcgttttttatatgggcgcgatatagtagttattcgtttttatcggtagttagacgtttagtttggttaacggtaatatcgtaattacgcgtttaattttttgacgttttgttcggtttgtttttagcgtcgaacgtttgggtaatcgtcgggtcgcgtttttcgattttacgattcggttgcgttttcggtaggttagttattttagcgttaggacgagcggagtagtaattattgacggggcgtgtgcgaggttacgtttttagttttaagaagtcgtttaaggtttttagttgtcgggatgggggggttta

SEQ ID NO: 16230 - DNA, 524 bp, Artificial Sequence
  chemically treated genomic DNA (Homo sapiens) CpG-island No: 16230
taaacccccccatcccgacaactaaaaaccttaaacgacttcttaaaactaaaaacgtaacctcgcacacgccccgtcaataattactactccgctcgtcctaacgctaaaataactaacctaccgaaaacgcaaccgaatcgtaaaatcgaaaaacgcgacccgacgattacccaaacgttcgacgctaaaaacaaaccgaacaaaacgtcaaaaaattaaacgcgtaattacgatattaccgttaaccaaactaaacgtctaactaccgataaaaacgaataactactatatcgcgcccatataaaaaacgaaaacaccgaaacactactaccgaatataattacgacttctctaacgaaactaccgatcccgaaactaatacgttaaaacgcaaacgacgtacacttcgtacgtccgatacacaccgtaaccctactactaaacgacaaaatcattccgacaaccattctaaacattcaatccgatcgcgtaattcgcgaccaccgctttataaacgaacc

SEQ ID NO: 16231 - DNA, 524 bp, Artificial Sequence
  chemically treated genomic DNA (Homo sapiens) CpG-island No: 16231
tgagtttttttatttcggtagttgggggttttgggcgattttttgggattggagacgtggtttcgtatacgtttcgttaatggttgttgtttcgttcgttttggcgttgaagtagttagtttgtcggaagcgtaatcggatcgtgaaatcgaaaaacgcggttcggcgattgtttaggcgttcgacgttgaaggtaaatcgagtaaagcgttagaaggttgggcgcgtggttgcggtattatcgttgattaggttgagcgtttgattatcgataaaggcgaatggttgttgtatcgcgtttatgtgaagggcgaaagtatcgaagtattgttgtcgaatatggttgcgatttttttggcgaaattgtcgatttcgaaattgatgcgttggggcgtaagcgacgtgtatttcgtgcgttcggtgtatatcgtgattttgttgttgggcgataaagttatttcggtaattattttgggtatttagttcgatcgcgtgattcgcggttatcgttttatgggcgagtt

SEQ ID NO: 16232 - DNA, 524 bp, Artificial Sequence
  chemically treated genomic DNA (Homo sapiens) CpG-island No: 16232
aactcgcccataaaacgataaccgcgaatcacgcgatcgaactaaatacccaaaataattaccgaaataactttatcgcccaacaacaaaatcacgatatacaccgaacgcacgaaatacacgtcgcttacgccccaacgcatcaatttcgaaatcgacaatttcgccaaaaaaatcgcaaccatattcgacaacaatacttcgatactttcgcccttcacataaacgcgatacaacaaccattcgcctttatcgataatcaaacgctcaacctaatcaacgataataccgcaaccacgcgcccaaccttctaacgctttactcgatttaccttcaacgtcgaacgcctaaacaatcgccgaaccgcgtttttcgatttcacgatccgattacgcttccgacaaactaactacttcaacgccaaaacgaacgaaacaacaaccattaacgaaacgtatacgaaaccacgtctccaatcccaaaaaatcgcccaaaacccccaactaccgaaataaaaaaactca

SEQ ID NO: 16233 - DNA, 938 bp, Artificial Sequence
  chemically treated genomic DNA (Homo sapiens) CpG-island No: 16233
tattcgcgtattcgttttgatttgtttaattatgaatttcgcggttgttcgcgtggcgtaagttatttttggtatttttatagcgttaatcgtttgaaatattcgtttattcgtaaacgattgattgaattgtggcgcgaagtttttaagtaatatagcgattcggtattggcgtgggtatcgattatgaacgattcgtaaaagtgtttgagttataaataagtgcgtgggcgcggcgggtttattcgttttaattggtaggaattaaattagttgattgtcgtcgttaacgtttggattattagaatttacggttcggatcgcgttgtcggtttttcgtcgatttcggcgatgtcgatggttttttacgtcgtcggaacgcgttatttgtcgttgtttggcggtatttgtataagtttttacgattggtattgcgattgttttttgcgtttcgatgatttggggcgagtaaattgacgtatcggaatttgttgattggtataattttagttatattatcgtttgggggttaaacgtgtcgtagacgcgtatttcggatgtttatttttttattgaagtgcgttataaagggattaaaattgttgtcgttatattagattacgttgaaatcgttaaattgtgcgatttgtggttggtatcgaaatagggtatcgatgcggtaatggcgttggcgatgggttacgtaatgttgcgtgaattttatttcgataatttaagttagtattttatcgattatgtgcgtcgttatatcgatatgtcgatgttggtgatgttggaagaacgcgacggttattacgttgtaggtcgtatgttgcgcgttgttgatttggttgatgcgttgggttaggaaaataattcggaatggaaaattgtcgtttttaatattaatggcgaaatggttgcgtcgaacggtttta

SEQ ID NO: 16234 - DNA, 938 bp, Artificial Sequence
  chemically treated genomic DNA (Homo sapiens) CpG-island No: 16234
taaaaccgttcgacgcaaccatttcgccattaatattaaaaacgacaattttccattccgaattattttcctaacccaacgcatcaaccaaatcaacaacgcgcaacatacgacctacaacgtaataaccgtcgcgttcttccaacatcaccaacatcgacatatcgatataacgacgcacataatcgataaaatactaacttaaattatcgaaataaaattcacgcaacattacgtaacccatcgccaacgccattaccgcatcgataccctatttcgataccaaccacaaatcgcacaatttaacgatttcaacgtaatctaatataacgacaacaattttaatccctttataacgcacttcaataaaaaaataaacatccgaaatacgcgtctacgacacgtttaacccccaaacgataatataactaaaattataccaatcaacaaattccgatacgtcaatttactcgccccaaatcatcgaaacgcaaaaaacaatcgcaataccaatcgtaaaaacttatacaaataccgccaaacaacgacaaataacgcgttccgacgacgtaaaaaaccatcgacatcgccgaaatcgacgaaaaaccgacaacgcgatccgaaccgtaaattctaataatccaaacgttaacgacgacaatcaactaatttaattcctaccaattaaaacgaataaacccgccgcgcccacgcacttatttataactcaaacacttttacgaatcgttcataatcgatacccacgccaataccgaatcgctatattacttaaaaacttcgcgccacaattcaatcaatcgtttacgaataaacgaatatttcaaacgattaacgctataaaaataccaaaaataacttacgccacgcgaacaaccgcgaaattcataattaaacaaatcaaaacgaatacgcgaata

SEQ ID NO: 16235 - DNA, 938 bp, Artificial Sequence
  chemically treated genomic DNA (Homo sapiens) CpG-island No: 16235
tagaatcgttcggcgtaattatttcgttattggtattaaaggcgatagttttttatttcggattgtttttttggtttagcgtattaattagattagtagcgcgtagtatacgatttgtagcgtagtaatcgtcgcgtttttttagtattattagtatcggtatgtcggtgtagcgacgtatatagtcggtgaaatattggtttgggttgtcgaggtggaatttacgtagtattacgtggtttatcgttagcgttattgtcgtatcggtgttttgtttcggtgttagttatagatcgtatagtttggcgattttagcgtagtttggtgtgacggtaatagttttggtttttttgtaacgtattttagtaaagaagtgagtattcggggtacgcgtttgcggtacgtttgatttttaggcgatgatgtagttggagttgtattagttagtagatttcggtacgttagtttgttcgttttaggttatcggaacgtaggaggtagtcgtagtattagtcgtagaaatttatataggtgtcgttaagtagcgatagataacgcgtttcggcggcgtaagaaattatcgatatcgtcgggatcggcgagaaatcggtaacgcgattcgggtcgtaggttttgatggtttagacgttagcggcggtaattagttggtttagtttttgttagttggagcggataaattcgtcgcgtttacgtatttgtttgtagtttaggtatttttgcggatcgtttataatcgatgtttacgttagtatcggatcgttgtgttgtttgagggtttcgcgttatagtttaattagtcgtttacgaatgagcgggtattttaggcggttagcgttgtaaagatattaggagtaatttgcgttacgcgggtagtcgcgaggtttatgattgggtaggttagggcgagtgcgcgggta

SEQ ID NO: 16236 - DNA, 938 bp, Artificial Sequence
  chemically treated genomic DNA (Homo sapiens) CpG-island No: 16236
tacccgcgcactcgccctaacctacccaatcataaacctcgcgactacccgcgtaacgcaaattactcctaatatctttacaacgctaaccgcctaaaatacccgctcattcgtaaacgactaattaaactataacgcgaaaccctcaaacaacacaacgatccgatactaacgtaaacatcgattataaacgatccgcaaaaatacctaaactacaaacaaatacgtaaacgcgacgaatttatccgctccaactaacaaaaactaaaccaactaattaccgccgctaacgtctaaaccatcaaaacctacgacccgaatcgcgttaccgatttctcgccgatcccgacgatatcgataatttcttacgccgccgaaacgcgttatctatcgctacttaacgacacctatataaatttctacgactaatactacgactacctcctacgttccgataacctaaaacgaacaaactaacgtaccgaaatctactaactaatacaactccaactacatcatcgcctaaaaatcaaacgtaccgcaaacgcgtaccccgaatactcacttctttactaaaatacgttacaaaaaaaccaaaactattaccgtcacaccaaactacgctaaaatcgccaaactatacgatctataactaacaccgaaacaaaacaccgatacgacaataacgctaacgataaaccacgtaatactacgtaaattccacctcgacaacccaaaccaatatttcaccgactatatacgtcgctacaccgacataccgatactaataatactaaaaaaacgcgacgattactacgctacaaatcgtatactacgcgctactaatctaattaatacgctaaaccaaaaaaacaatccgaaataaaaaactatcgcctttaataccaataacgaaataattacgccgaacgattcta

SEQ ID NO: 16237 - DNA, 739 bp, Artificial Sequence
  chemically treated genomic DNA (Homo sapiens) CpG-island No: 16237
cgattatgttggcgggcgggatcggtaatattcgcgtcgattacgtataaaaaggcgagattaacgtcggtgcgaagttggtcgttttcggcggttcggtaatgaatatcggttttggcggtggtgtagcgttttttatggcgtttggttagtttgatgtcgatttcgattttgttttcgtatagcgcgataattcggagatggagcgtcgttgttaggaagtgatcgatcgttgttggtagtttggtgatgttaatttaattttgtttatttacgacgttggcgttggcggtttttttaacgttatgtcggaattggtgagcgacggcgggcgcggcggtaaatttgaattgcgcgagattttaagcgacgaatcgggtatgagttcgttggaaatttggtgtaacgaattttaggaacgttacgtgttggcggttgttgtcgattattatcgttgtatgacgaaattgtgtacgcgtgagcgcgtatttttacgcggggattggtgaagttatcgataattgtattttttttgtcgatcgttatttgataatacgtcgtcggttgtcgtggatttcgttggtaaacgcgaaatattcggagataattcgaataaggaagtttgtcggaaggtatatggatcgtattatcgatgcgcggttaaaatttttttttattattcgatatttatatggcggtgcgaatagtaaatatattagaatatcgggattttcggtat

SEQ ID NO: 16238 - DNA, 739 bp, Artificial Sequence
  chemically treated genomic DNA (Homo sapiens) CpG-island No: 16238
ataccgaaaatcccgatattctaatatatttactattcgcaccgccatataaatatcgaataataaaaaaaaattttaaccgcgcatcgataatacgatccatataccttccgacaaacttccttattcgaattatctccgaatatttcgcgtttaccaacgaaatccacgacaaccgacgacgtattatcaaataacgatcgacaaaaaaaatacaattatcgataacttcaccaatccccgcgtaaaaatacgcgctcacgcgtacacaatttcgtcatacaacgataataatcgacaacaaccgccaacacgtaacgttcctaaaattcgttacaccaaatttccaacgaactcatacccgattcgtcgcttaaaatctcgcgcaattcaaatttaccgccgcgcccgccgtcgctcaccaattccgacataacgttaaaaaaaccgccaacgccaacgtcgtaaataaacaaaattaaattaacatcaccaaactaccaacaacgatcgatcacttcctaacaacgacgctccatctccgaattatcgcgctatacgaaaacaaaatcgaaatcgacatcaaactaaccaaacgccataaaaaacgctacaccaccgccaaaaccgatattcattaccgaaccgccgaaaacgaccaacttcgcaccgacgttaatctcgcctttttatacgtaatcgacgcgaatattaccgatcccgcccgccaacataatcg

SEQ ID NO: 16239 - DNA, 739 bp, Artificial Sequence
  chemically treated genomic DNA (Homo sapiens) CpG-island No: 16239
gtgtcgagggtttcggtgttttaatgtgtttgttattcgtatcgttatgtgggtatcgagtggtaaggagaggttttgatcgcgtatcgatggtacggtttatgtatttttcgataggtttttttgttcgggttgttttcgggtatttcgcgtttattagcggagtttacggtagtcgacggcgtattattagatgacgatcggtagagaagatgtagttgtcggtggttttattaattttcgcgtaggggtgcgcgtttacgcgtatatagtttcgttatatagcggtaatgatcggtagtaatcgttagtacgtagcgtttttgggattcgttatattagatttttagcgggtttatgttcggttcgtcgtttagaatttcgcgtagtttaaatttatcgtcgcgttcgtcgtcgtttattagtttcggtatggcgttagaaagatcgttagcgttaacgtcgtggataaataggattgggttggtattattaagttgttagtaacggtcgattattttttggtagcgacgttttattttcgggttgtcgcgttgtacggaagtaaagtcgaggtcggtattagattgattagacgttatagaagacgttgtattatcgttaagatcgatgtttattgtcgggtcgtcgagaacgattagtttcgtatcgacgttgatttcgtttttttgtacgtgatcggcgcgaatgttgtcgatttcgttcgttagtatgatcg

SEQ ID NO: 16240 - DNA, 739 bp, Artificial Sequence
  chemically treated genomic DNA (Homo sapiens) CpG-island No: 16240
cgatcatactaacgaacgaaatcgacaacattcgcgccgatcacgtacaaaaaaacgaaatcaacgtcgatacgaaactaatcgttctcgacgacccgacaataaacatcgatcttaacgataatacaacgtcttctataacgtctaatcaatctaataccgacctcgactttacttccgtacaacgcgacaacccgaaaataaaacgtcgctaccaaaaaataatcgaccgttactaacaacttaataataccaacccaatcctatttatccacgacgttaacgctaacgatctttctaacgccataccgaaactaataaacgacgacgaacgcgacgataaatttaaactacgcgaaattctaaacgacgaaccgaacataaacccgctaaaaatctaatataacgaatcccaaaaacgctacgtactaacgattactaccgatcattaccgctatataacgaaactatatacgcgtaaacgcgcacccctacgcgaaaattaataaaaccaccgacaactacatcttctctaccgatcgtcatctaataatacgccgtcgactaccgtaaactccgctaataaacgcgaaatacccgaaaacaacccgaacaaaaaaacctatcgaaaaatacataaaccgtaccatcgatacgcgatcaaaacctctccttaccactcgatacccacataacgatacgaataacaaacacattaaaacaccgaaaccctcgacac

SEQ ID NO: 16241 - DNA, 1169 bp, Artificial Sequence
  chemically treated genomic DNA (Homo sapiens) CpG-island No: 16241
gtcgtcgtttatttcgaacgggtatagttttagtacgcgcgcggcgttttttagttttatcgtttttataggtacgcggtaagcgtagcgttatcggcgggtttttttaacgttaggtaggtttttcgcgcgtgggtgtgtatggtgtgtagtggattaaaggcgttgcgcgggttttgtatgatggtggtaattttgatgtcgcgtagggcgtaaggcgaaatcggtttgttatcggttaaaatttttttcgtcgtttggcgaacgttagcgggtaaaatgtttagcgttgcggcgtaggttaatgatttttcgttgtcgttatcgtcgattaacgttagtacgcgttcgcgttgtagggttaacgatatatcgtgtattagcggttgcgcggtttgtagcgcgatattacgtagtttaatttgttgcggtattagtgtgcgtgtttcgttattagatgagggtttagatgatcgcgtagtgcgttatttattaggttaaaggttattacgttgataaatagcgttagtttcggttagaatatttgtagcggttgggtttagatatattggcgcgcgtcgttaattattacgttttattcggcggtcggcgcggttatatcgaggttaaggaaagatattttcgcgacgtgtagtattatatggtcgatatttagcgttgttagtattagtagcgaagggattatcgcgtttgttagatgatcgataaatattcgtatatggttcgtatcggaaagtcgtgacgttagtataaattcgcgttggcgtagtgaaattattaggttgcgtattatgcgtgtatattacgtttagtgcgatagggcgatggcgataattacgttggttagttcggtgtcgagtacgttaattataaagaacgatagaatcgaggtcgggaaggttataaatatatcggcgacgcgtatggtggtttgattaacgcgttcgttaattaattcggcgttgtcgttaataattagttttaatgttagtattagtagtaggtaggttattatcgaatcgagcgatacgcgggtcgttgttattacgtcgcgacgatataattatttcggttcggaaatttttattattagggtttggatttatcggaggattgggtttttttaagggattttaacgtttggtttt

SEQ ID NO: 16242 - DNA, 1169 bp, Artificial Sequence
  chemically treated genomic DNA (Homo sapiens) CpG-island No: 16242
aaaaccaaacgttaaaatcccttaaaaaaacccaatcctccgataaatccaaaccctaataataaaaatttccgaaccgaaataattatatcgtcgcgacgtaataacaacgacccgcgtatcgctcgattcgataataacctacctactactaatactaacattaaaactaattattaacgacaacgccgaattaattaacgaacgcgttaatcaaaccaccatacgcgtcgccgatatatttataaccttcccgacctcgattctatcgttctttataattaacgtactcgacaccgaactaaccaacgtaattatcgccatcgccctatcgcactaaacgtaatatacacgcataatacgcaacctaataatttcactacgccaacgcgaatttatactaacgtcacgactttccgatacgaaccatatacgaatatttatcgatcatctaacaaacgcgataatcccttcgctactaatactaacaacgctaaatatcgaccatataatactacacgtcgcgaaaatatctttccttaacctcgatataaccgcgccgaccgccgaataaaacgtaataattaacgacgcgcgccaatatatctaaacccaaccgctacaaatattctaaccgaaactaacgctatttatcaacgtaataacctttaacctaataaataacgcactacgcgatcatctaaaccctcatctaataacgaaacacgcacactaataccgcaacaaattaaactacgtaatatcgcgctacaaaccgcgcaaccgctaatacacgatatatcgttaaccctacaacgcgaacgcgtactaacgttaatcgacgataacgacaacgaaaaatcattaacctacgccgcaacgctaaacattttacccgctaacgttcgccaaacgacgaaaaaaattttaaccgataacaaaccgatttcgccttacgccctacgcgacatcaaaattaccaccatcatacaaaacccgcgcaacgcctttaatccactacacaccatacacacccacgcgcgaaaaacctacctaacgttaaaaaaacccgccgataacgctacgcttaccgcgtacctataaaaacgataaaactaaaaaacgccgcgcgcgtactaaaactatacccgttcgaaataaacgacgac

SEQ ID NO: 16243 - DNA, 1169 bp, Artificial Sequence
  chemically treated genomic DNA (Homo sapiens) CpG-island No: 16243
aaggttaagcgttggggttttttgggggggtttaatttttcggtaggtttaggttttggtaatgggggttttcgggtcgaagtagttgtgtcgtcgcggcgtgatggtagcgattcgcgtgtcgttcggttcggtaatggtttgtttgttgttggtgttgatattagggttggttattggcggtagcgtcgggttgattggcgggcgcgttgattaggttattatgcgcgtcgtcgatatgtttatgattttttcgatttcgattttgtcgttttttatggttggcgtgttcggtatcgggttgattaacgtaattatcgttatcgttttgtcgtattgggcgtggtatgtacgtatggtgcgtagtttggtgattttattacgttaacgcgagtttgtgttggcgttacggtttttcggtgcgggttatgtgcgggtgtttgtcgattatttggtaggcgcggtgattttttcgttgttggtgttggtaacgttggatatcggttatatgatgttgtacgtcgcggggatgtttttttttggtttcggtgtgatcgcgtcgatcgtcgaatggggcgtgatgattaacgacgcgcgttagtatatttggatttagtcgttgtaaatgttttggtcggggttggcgttgtttattagcgtgatggtttttaatttggtgggtgacgtattgcgcgattatttggatttttatttggtgacggagtacgtatattaatgtcgtaatagattgaattacgtaatatcgcgttataggtcgcgtagtcgttggtatacggtgtatcgttaattttgtaacgcgggcgcgtgttggcgttagtcggcggtagcggtagcgggaaattattaatttgcgtcgtaacgttgggtattttgttcgttggcgttcgttagacggcgggggaaattttagtcgatggtaaatcggtttcgttttgcgttttgcgcggtattaaaattgttattattatgtagaattcgcgtagcgtttttaatttattgtatattatgtatatttacgcgcgggaaatttgtttggcgttagggaaattcgtcgatgacgttacgtttatcgcgtgtttatagaagcggtggggttggaaaacgtcgcgcgcgtgttgaagttgtattcgttcgagatgagcggcggt

SEQ ID NO: 16244 - DNA, 1169 bp, Artificial Sequence
  chemically treated genomic DNA (Homo sapiens) CpG-island No: 16244
accgccgctcatctcgaacgaatacaacttcaacacgcgcgcgacgttttccaaccccaccgcttctataaacacgcgataaacgtaacgtcatcgacgaatttccctaacgccaaacaaatttcccgcgcgtaaatatacataatatacaataaattaaaaacgctacgcgaattctacataataataacaattttaataccgcgcaaaacgcaaaacgaaaccgatttaccatcgactaaaatttcccccgccgtctaacgaacgccaacgaacaaaatacccaacgttacgacgcaaattaataatttcccgctaccgctaccgccgactaacgccaacacgcgcccgcgttacaaaattaacgatacaccgtataccaacgactacgcgacctataacgcgatattacgtaattcaatctattacgacattaatatacgtactccgtcaccaaataaaaatccaaataatcgcgcaatacgtcacccaccaaattaaaaaccatcacgctaataaacaacgccaaccccgaccaaaacatttacaacgactaaatccaaatatactaacgcgcgtcgttaatcatcacgccccattcgacgatcgacgcgatcacaccgaaaccaaaaaaaaacatccccgcgacgtacaacatcatataaccgatatccaacgttaccaacaccaacaacgaaaaaatcaccgcgcctaccaaataatcgacaaacacccgcacataacccgcaccgaaaaaccgtaacgccaacacaaactcgcgttaacgtaataaaatcaccaaactacgcaccatacgtacataccacgcccaatacgacaaaacgataacgataattacgttaatcaacccgataccgaacacgccaaccataaaaaacgacaaaatcgaaatcgaaaaaatcataaacatatcgacgacgcgcataataacctaatcaacgcgcccgccaatcaacccgacgctaccgccaataaccaaccctaatatcaacaccaacaacaaacaaaccattaccgaaccgaacgacacgcgaatcgctaccatcacgccgcgacgacacaactacttcgacccgaaaacccccattaccaaaacctaaacctaccgaaaaattaaacccccccaaaaaaccccaacgcttaacctt

SEQ ID NO: 16245 - DNA, 1033 bp, Artificial Sequence
  chemically treated genomic DNA (Homo sapiens) CpG-island No: 16245
ggcgttgacgtaatgcgcggttcgcgcggtttgaaagcggttggttcgtatgtggttattaaagcgatggtattcggcgtttttgtttgtttcgttatttcgtttaaaatttatggcgttaattattttattagtttcgcgtgtgcgattttcgtatattgtatcggtaacgtagtagagtagatttaattgggtaaataggatatcgtgtttgttggcggcggcgaagagttgtgttgggaaatggtttgcgaattcgacgtaatgggtgcgttgtttattaaatataacgatatttcggaaaaagtttttcgtatttacgacgtttatcgtgacggtttcgttatcgttggcggcggcggtatggtagtggttgaagagttggaatacgcgttggcgcgtggtgtttatatttatgttgaaatcgttggttacggcgtaatttttgatggtgtagatatggttgtttcgtttggcgaaggcgtagtacgttgtatgaagatggcgatgtatggcgttgatattttaatcgattatttgaatttttacggtatttcgatttcggttggcgacgtgaaagagttggtagttattcgtgaagtgttcggcgataagagttcggcgatttttgtaattaaagttatgatcggttattttttgggcgttgttggcgtataggaagttatttattttttgttgatgttggaatacggttttatcgtttcgagtattaatattgaagagttggacgagtaggttgcgggtttgaatatcgtgatcgaaacgatcgatcgcgaattgattatcgttatgtttaatagtttcggtttcggcggtattaacgttacgttggtaatgcgtaagttgaaagattaattcgtagtaggtcggagtagacgcgttagcgtcgtattcgacgttacgcgttaatgcggttttcggtattaacgtaaaagggaatttgatggtttttttttttatattattgataatcgtcgttagttttaggtaaatttttcgttttgtcgatttt

SEQ ID NO: 16246 - DNA, 1033 bp, Artificial Sequence
  chemically treated genomic DNA (Homo sapiens) CpG-island No: 16246
aaaatcgacaaaacgaaaaatttacctaaaactaacgacgattatcaataatataaaaaaaaaaaccatcaaattcccttttacgttaataccgaaaaccgcattaacgcgtaacgtcgaatacgacgctaacgcgtctactccgacctactacgaattaatctttcaacttacgcattaccaacgtaacgttaataccgccgaaaccgaaactattaaacataacgataatcaattcgcgatcgatcgtttcgatcacgatattcaaacccgcaacctactcgtccaactcttcaatattaatactcgaaacgataaaaccgtattccaacatcaacaaaaaataaataacttcctatacgccaacaacgcccaaaaaataaccgatcataactttaattacaaaaatcgccgaactcttatcgccgaacacttcacgaataactaccaactctttcacgtcgccaaccgaaatcgaaataccgtaaaaattcaaataatcgattaaaatatcaacgccatacatcgccatcttcatacaacgtactacgccttcgccaaacgaaacaaccatatctacaccatcaaaaattacgccgtaaccaacgatttcaacataaatataaacaccacgcgccaacgcgtattccaactcttcaaccactaccataccgccgccgccaacgataacgaaaccgtcacgataaacgtcgtaaatacgaaaaactttttccgaaatatcgttatatttaataaacaacgcacccattacgtcgaattcgcaaaccatttcccaacacaactcttcgccgccgccaacaaacacgatatcctatttacccaattaaatctactctactacgttaccgatacaatatacgaaaatcgcacacgcgaaactaataaaataattaacgccataaattttaaacgaaataacgaaacaaacaaaaacgccgaataccatcgctttaataaccacatacgaaccaaccgctttcaaaccgcgcgaaccgcgcattacgtcaacgcc

SEQ ID NO: 16247 - DNA, 1033 bp, Artificial Sequence
  chemically treated genomic DNA (Homo sapiens) CpG-island No: 16247
gaaatcgataaagcgggaagtttgtttggaattggcggcgattgttaatgatgtgaaaaagggaattattaggtttttttttgcgttagtgtcggaggtcgtattggcgcgtaacgtcggatgcgacgttggcgcgtttatttcgatttattgcgaattaattttttagtttgcgtattattagcgtggcgttggtgtcgtcgaagtcgaagttgttagatataacggtggttagttcgcgatcggtcgtttcggttacgatgtttagattcgtagtttgttcgtttagttttttaatgttgatgttcggggcgataaagtcgtgttttagtattagtagagagtagatagttttttgtacgttagtagcgtttagagagtgatcggttatggttttggttgtagaaatcgtcgggtttttatcgtcgaatattttacggatagttgttagtttttttacgtcgttaatcggagtcgaagtatcgtgggagtttaggtaatcgattggggtattaacgttatgtatcgttatttttatgtagcgtattgcgttttcgttagacggagtaattatgtttgtattattagaggttgcgtcgtagttaacgattttagtatagatgtgagtattacgcgttagcgcgtgttttagttttttaattattattatatcgtcgtcgttagcgataacgaaatcgttacggtgagcgtcgtaagtacgggaggtttttttcggggtgtcgttgtatttagtagatagcgtatttattgcgtcgaattcgtaagttattttttagtatagtttttcgtcgtcgttagtaaatacgatgttttgtttgtttagttggatttgttttattgcgttatcgatatagtgtgcggaagtcgtatacgcggagttgatggagtagttaacgttatgaattttaaacggggtggcgaggtaggtagaaacgtcggatgttatcgttttggtgattatatacgggttaatcgtttttaggtcgcgcgggtcgcgtattgcgttagcgtt

SEQ ID NO: 16248 - DNA, 1033 bp, Artificial Sequence
  chemically treated genomic DNA (Homo sapiens) CpG-island No: 16248
aacgctaacgcaatacgcgacccgcgcgacctaaaaacgattaacccgtatataatcaccaaaacgataacatccgacgtttctacctacctcgccaccccgtttaaaattcataacgttaactactccatcaactccgcgtatacgacttccgcacactatatcgataacgcaataaaacaaatccaactaaacaaacaaaacatcgtatttactaacgacgacgaaaaactatactaaaaaataacttacgaattcgacgcaataaatacgctatctactaaatacaacgacaccccgaaaaaaacctcccgtacttacgacgctcaccgtaacgatttcgttatcgctaacgacgacgatataataataattaaaaaactaaaacacgcgctaacgcgtaatactcacatctatactaaaatcgttaactacgacgcaacctctaataatacaaacataattactccgtctaacgaaaacgcaatacgctacataaaaataacgatacataacgttaataccccaatcgattacctaaactcccacgatacttcgactccgattaacgacgtaaaaaaactaacaactatccgtaaaatattcgacgataaaaacccgacgatttctacaaccaaaaccataaccgatcactctctaaacgctactaacgtacaaaaaactatctactctctactaatactaaaacacgactttatcgccccgaacatcaacattaaaaaactaaacgaacaaactacgaatctaaacatcgtaaccgaaacgaccgatcgcgaactaaccaccgttatatctaacaacttcgacttcgacgacaccaacgccacgctaataatacgcaaactaaaaaattaattcgcaataaatcgaaataaacgcgccaacgtcgcatccgacgttacgcgccaatacgacctccgacactaacgcaaaaaaaaacctaataattccctttttcacatcattaacaatcgccgccaattccaaacaaacttcccgctttatcgatttc

SEQ ID NO: 16249 - DNA, 530 bp, Artificial Sequence
  chemically treated genomic DNA (Homo sapiens) CpG-island No: 16249
gtcgagttcgtagtaggtttattaggaatcgaggatgattttcgtcgttaatgtattttagttaggtaacgtttagcgttagtaaattcgggcgtaggtattattaaattcgtcgcgtagtagattcgttagcgttacgttcgtcgttattattaaatcgttatagttaaggtaaagtagcggtggatgaaagataagatcgggatgttgtagtatcggattgagatcgcggttttcgattgttggtggaaatattcgtacgaagggatcggattatagtattataaatagtagtagtgcggcgagtatgagagataaaacggttaacgttagcggaaatagcggatcggtttgttgtcgataatgttaggtaaatagcgcgttttaggcggaaagtagtagtatttaaagtagtagggaatttttatgggcgtttatacggtggtagtttgagttttacgatagacggttatagttatgtagcgcgatttaaatgatcgagaatcgtgatagaaatatacgtagtagta

SEQ ID NO: 16250 - DNA, 530 bp, Artificial Sequence
  chemically treated genomic DNA (Homo sapiens) CpG-island No: 16250
tactactacgtatatttctatcacgattctcgatcatttaaatcgcgctacataactataaccgtctatcgtaaaactcaaactaccaccgtataaacgcccataaaaattccctactactttaaatactactactttccgcctaaaacgcgctatttacctaacattatcgacaacaaaccgatccgctatttccgctaacgttaaccgttttatctctcatactcgccgcactactactatttataatactataatccgatcccttcgtacgaatatttccaccaacaatcgaaaaccgcgatctcaatccgatactacaacatcccgatcttatctttcatccaccgctactttaccttaactataacgatttaataataacgacgaacgtaacgctaacgaatctactacgcgacgaatttaataatacctacgcccgaatttactaacgctaaacgttacctaactaaaatacattaacgacgaaaatcatcctcgattcctaataaacctactacgaactcgac

SEQ ID NO: 16251 - DNA, 530 bp, Artificial Sequence
  chemically treated genomic DNA (Homo sapiens) CpG-island No: 16251
tgttattacgtatgtttttattacgattttcggttatttaggtcgcgttatatagttatagtcgtttgtcgtggaatttaagttgttatcgtgtgggcgtttatgaaggttttttgttgttttgggtattgttgtttttcgtttggagcgcgttgtttgtttggtattatcggtagtaaatcgattcgttattttcgttgacgttagtcgttttattttttatgttcgtcgtattgttattgtttgtggtgttgtggttcgattttttcgtgcggatatttttattagtaatcgaaggtcgcgattttaattcgatgttgtaatatttcggttttattttttatttatcgttgttttattttggttatggcggtttgatggtagcggcgagcgtggcgttggcgagtttattgcgcggcgagtttgatggtgtttgcgttcgaatttgttggcgttgggcgttatttggttggagtgtattaacggcggggattattttcggtttttggtgggtttattgcgaattcggt

SEQ ID NO: 16252 - DNA, 530 bp, Artificial Sequence
  chemically treated genomic DNA (Homo sapiens) CpG-island No: 16252
accgaattcgcaataaacccaccaaaaaccgaaaataatccccgccgttaatacactccaaccaaataacgcccaacgccaacaaattcgaacgcaaacaccatcaaactcgccgcgcaataaactcgccaacgccacgctcgccgctaccatcaaaccgccataaccaaaataaaacaacgataaataaaaaataaaaccgaaatattacaacatcgaattaaaatcgcgaccttcgattactaataaaaatatccgcacgaaaaaatcgaaccacaacaccacaaacaataacaatacgacgaacataaaaaataaaacgactaacgtcaacgaaaataacgaatcgatttactaccgataataccaaacaaacaacgcgctccaaacgaaaaacaacaatacccaaaacaacaaaaaaccttcataaacgcccacacgataacaacttaaattccacgacaaacgactataactatataacgcgacctaaataaccgaaaatcgtaataaaaacatacgtaataaca

SEQ ID NO: 16253 - DNA, 554 bp, Artificial Sequence
  chemically treated genomic DNA (Homo sapiens) CpG-island No: 16253
atgggcggagttttaggcgttggatggcgatataatcgatatggtttttattatcgtttttatcggcgttggcggcggtgtagtgagcggttgtaaattgtttatcggttttggcggtttggcggggtatatcgggtatacgtttgtcgatttatacggtttagtttgcggttgtggacgtataggttgcgtggaagcgattgtttttggtcgcggtattgtagcggtagcgtagggggagttggttggcgcggatgcgaaaattatttttacgcgcgtcgggtagggtgacgagtaggcgtagtagttgatttatcgtttcgtacgtacgtttgtaaggttgatcgttgatattaaagttataattgattgttagtgcgtggtggtcggtggtagcgttggtttggtagaagggtatttggcgttggtggaaacgtatttggcgtaggagttagcggtattttatgttgatttattggcggcgtattatcgttatgatgtaggtttatttggggttgcgttgttggtttagggagaaaaattatgatgatggg

SEQ ID NO: 16254 - DNA, 554 bp, Artificial Sequence
  chemically treated genomic DNA (Homo sapiens) CpG-island No: 16254
cccatcatcataatttttctccctaaaccaacaacgcaaccccaaataaacctacatcataacgataatacgccgccaataaatcaacataaaataccgctaactcctacgccaaatacgtttccaccaacgccaaatacccttctaccaaaccaacgctaccaccgaccaccacgcactaacaatcaattataactttaatatcaacgatcaaccttacaaacgtacgtacgaaacgataaatcaactactacgcctactcgtcaccctacccgacgcgcgtaaaaataattttcgcatccgcgccaaccaactccccctacgctaccgctacaataccgcgaccaaaaacaatcgcttccacgcaacctatacgtccacaaccgcaaactaaaccgtataaatcgacaaacgtatacccgatataccccgccaaaccgccaaaaccgataaacaatttacaaccgctcactacaccgccgccaacgccgataaaaacgataataaaaaccatatcgattatatcgccatccaacgcctaaaactccgcccat

SEQ ID NO: 16255 - DNA, 554 bp, Artificial Sequence
  chemically treated genomic DNA (Homo sapiens) CpG-island No: 16255
tttattattataatttttttttttgggttaatagcgtagttttaagtaaatttgtattatggcggtaatgcgtcgttagtaaattaatatgaaatgtcgttggtttttgcgttagatacgtttttattagcgttagatatttttttgttagattaacgttgttatcgattattacgtattggtaattagttgtggttttaatattagcgattagttttgtaagcgtacgtgcggagcggtgaattagttgttgcgtttgttcgttattttgttcggcgcgcgtgaaaatagttttcgtattcgcgttagttaattttttttgcgttgtcgttgtaatgtcgcgattagaagtaatcgtttttacgtaatttgtgcgtttatagtcgtagattgggtcgtgtggatcggtaagcgtatgttcgatatgtttcgttagatcgttagggtcggtaagtagtttgtagtcgtttattatatcgtcgttaacgtcggtggaaacggtgataaagattatatcggttatatcgttatttagcgtttgaaatttcgtttat

SEQ ID NO: 16256 - DNA, 554 bp, Artificial Sequence
  chemically treated genomic DNA (Homo sapiens) CpG-island No: 16256
ataaacgaaatttcaaacgctaaataacgatataaccgatataatctttatcaccgtttccaccgacgttaacgacgatataataaacgactacaaactacttaccgaccctaacgatctaacgaaacatatcgaacatacgcttaccgatccacacgacccaatctacgactataaacgcacaaattacgtaaaaacgattacttctaatcgcgacattacaacgacaacgcaaaaaaaattaactaacgcgaatacgaaaactattttcacgcgcgccgaacaaaataacgaacaaacgcaacaactaattcaccgctccgcacgtacgcttacaaaactaatcgctaatattaaaaccacaactaattaccaatacgtaataatcgataacaacgttaatctaacaaaaaaatatctaacgctaataaaaacgtatctaacgcaaaaaccaacgacatttcatattaatttactaacgacgcattaccgccataatacaaatttacttaaaactacgctattaacccaaaaaaaaaaattataataataaa

SEQ ID NO: 16257 - DNA, 844 bp, Artificial Sequence
  chemically treated genomic DNA (Homo sapiens) CpG-island No: 16257
cgacgttatcggtgttgttaaaagaaggttagtacgacgtagcgtaaaaattgttcgttatttttttcgttaatgaaatgtttgaggagcgttatgttgttagcgtggcgattcgtaataaggttgaagttttgcgtttggtacgattgttgtattagtaagaatcggtaaattttattcgtttggattaattaatttggtaattgatgtagaacgagtagttacgcgaagttgtcgatttattgttgtaacgttattttttttagggcgatgcgcgtgttagttagattttaatggcgcgattggcgtttttgttggaaagttatttttatttggtaacgtcggcgaaggtggcgattttatcgaaatttttatcgttggcggagtaacgttagtggtaaagttagttgtcgggtattgtagataattgttcggtaatagttcgtttgttggggcgatatgtcgtttttttacgatgtcgtcgtttggaatcgtttggtaaagtgttatcgggatacgttattcggtgtggcgttgtatgtatggttttaggtcgaataacgataatcgagcgtttggtaatatcgtgcggtagtttattaggcgtattaggttgaggattacgttatcgtattggcggtttggtagaaaattagtttttacgatatgagtaatgaggatttgtttgttgttgttaatatcgtttaggcggtaggaaatggtgcggttcgcgatcgttggttataataggtagaaaaacgtggattgggaagtaatgttttttattggtggttgtatgcgtaacgttatatttttggttagtcggaattcgtattgaacgatt

SEQ ID NO: 16258 - DNA, 844 bp, Artificial Sequence
  chemically treated genomic DNA (Homo sapiens) CpG-island No: 16258
aatcgttcaatacgaattccgactaaccaaaaatataacgttacgcatacaaccaccaataaaaaacattacttcccaatccacgtttttctacctattataaccaacgatcgcgaaccgcaccatttcctaccgcctaaacgatattaacaacaacaaacaaatcctcattactcatatcgtaaaaactaattttctaccaaaccgccaatacgataacgtaatcctcaacctaatacgcctaataaactaccgcacgatattaccaaacgctcgattatcgttattcgacctaaaaccatacatacaacgccacaccgaataacgtatcccgataacactttaccaaacgattccaaacgacgacatcgtaaaaaaacgacatatcgccccaacaaacgaactattaccgaacaattatctacaatacccgacaactaactttaccactaacgttactccgccaacgataaaaatttcgataaaatcgccaccttcgccgacgttaccaaataaaaataactttccaacaaaaacgccaatcgcgccattaaaatctaactaacacgcgcatcgccctaaaaaaaataacgttacaacaataaatcgacaacttcgcgtaactactcgttctacatcaattaccaaattaattaatccaaacgaataaaatttaccgattcttactaatacaacaatcgtaccaaacgcaaaacttcaaccttattacgaatcgccacgctaacaacataacgctcctcaaacatttcattaacgaaaaaaataacgaacaatttttacgctacgtcgtactaaccttcttttaacaacaccgataacgtcg

SEQ ID NO: 16259 - DNA, 844 bp, Artificial Sequence
  chemically treated genomic DNA (Homo sapiens) CpG-island No: 16259
gatcgtttagtgcgagtttcggttgattaggaatgtaacgttgcgtatgtagttattagtagagggtattgttttttagtttacgtttttttgtttgttgtagttagcgatcgcgagtcgtattattttttgtcgtttgggcggtattggtagtagtaagtagatttttattgtttatgtcgtgaagattgattttttgttaggtcgttagtgcggtggcgtagtttttaatttgatacgtttgataggttatcgtacgatgttgttaggcgttcggttgtcgttgttcggtttgaagttatgtatataacgttatatcgggtagcgtgtttcgataatattttgttagacggttttaggcggcggtatcgtaggaaggcgatatatcgttttagtaagcgaattattgtcgggtaattatttgtaatattcggtaattgattttgttattgacgttgtttcgttagcggtaagggtttcgataaaatcgttattttcgtcggcgttgttaggtaaggatgattttttagtagagacgttagtcgcgttattaaagtttggttgatacgcgtatcgttttggaaaggatagcgttgtagtaataaatcggtagtttcgcgtgattgttcgttttgtattagttgttaggttagttgatttaggcgggtaagatttgtcggtttttgttgatatagtaatcgtgttagacgtagagttttagttttgttacgggtcgttacgttgatagtataacgttttttaagtattttattggcggggagggtggcgagtagtttttgcgttgcgtcgtattgatttttttttaatagtatcggtagcgtcg

SEQ ID NO: 16260 - DNA, 844 bp, Artificial Sequence
  chemically treated genomic DNA (Homo sapiens) CpG-island No: 16260
cgacgctaccgatactattaaaaaaaaatcaatacgacgcaacgcaaaaactactcgccaccctccccgccaataaaatacttaaaaaacgttatactatcaacgtaacgacccgtaacaaaactaaaactctacgtctaacacgattactatatcaacaaaaaccgacaaatcttacccgcctaaatcaactaacctaacaactaatacaaaacgaacaatcacgcgaaactaccgatttattactacaacgctatcctttccaaaacgatacgcgtatcaaccaaactttaataacgcgactaacgtctctactaaaaaatcatccttacctaacaacgccgacgaaaataacgattttatcgaaacccttaccgctaacgaaacaacgtcaataacaaaatcaattaccgaatattacaaataattacccgacaataattcgcttactaaaacgatatatcgccttcctacgataccgccgcctaaaaccgtctaacaaaatattatcgaaacacgctacccgatataacgttatatacataacttcaaaccgaacaacgacaaccgaacgcctaacaacatcgtacgataacctatcaaacgtatcaaattaaaaactacgccaccgcactaacgacctaacaaaaaatcaatcttcacgacataaacaataaaaatctacttactactaccaataccgcccaaacgacaaaaaataatacgactcgcgatcgctaactacaacaaacaaaaaaacgtaaactaaaaaacaataccctctactaataactacatacgcaacgttacattcctaatcaaccgaaactcgcactaaacgatc

SEQ ID NO: 16261 - DNA, 533 bp, Artificial Sequence
  chemically treated genomic DNA (Homo sapiens) CpG-island No: 16261
tcgcgggttagttcggcggcggtttttttttcggaaggtacgaagaagattggattataattaaagttattagtgttcgttggtttacgagtaattacgttcggttagttatcgtggtatattagcggagtgggatttttcgcgtgacgtagatatattagtacgtagtggaaacgcgtttgacgttggtcgttcggtacgttttttattgtttttagtagtttttgtagatttttttgatcggtcgcgtttttatcggaataacgcgcggagtaaatgttcggcgcgtcgttaagtatatttatcgttagattagagtcgtcggtaattgtcggtaaagcggttatttttgtcgtatggcgcgtttttagaatcgcgttttcgataaaggttaggtcggtttttttagcggaattaacgtcgaggtttgtttgggttacgatattaagatcgaagtcgttaagtagcgacgttagtttacgtattttatcgatattgtcggttgcgaggataattttttgtataggatattt

SEQ ID NO: 16262 - DNA, 533 bp, Artificial Sequence
  chemically treated genomic DNA (Homo sapiens) CpG-island No: 16262
aaatatcctatacaaaaaattatcctcgcaaccgacaatatcgataaaatacgtaaactaacgtcgctacttaacgacttcgatcttaatatcgtaacccaaacaaacctcgacgttaattccgctaaaaaaaccgacctaacctttatcgaaaacgcgattctaaaaacgcgccatacgacaaaaataaccgctttaccgacaattaccgacgactctaatctaacgataaatatacttaacgacgcgccgaacatttactccgcgcgttattccgataaaaacgcgaccgatcaaaaaaatctacaaaaactactaaaaacaataaaaaacgtaccgaacgaccaacgtcaaacgcgtttccactacgtactaatatatctacgtcacgcgaaaaatcccactccgctaatataccacgataactaaccgaacgtaattactcgtaaaccaacgaacactaataactttaattataatccaatcttcttcgtaccttccgaaaaaaaaaccgccgccgaactaacccgcga

SEQ ID NO: 16263 - DNA, 533 bp, Artificial Sequence
  chemically treated genomic DNA (Homo sapiens) CpG-island No: 16263
aggtattttatgtaaaaagttgttttcgtaatcggtaatgtcggtaaagtgcgtgagttggcgtcgttgtttagcgatttcggttttgatatcgtggtttaaatagatttcggcgttgatttcgttgaagaaatcggtttgatttttatcgaaaacgcgattttgaaagcgcgttatgcggtaaaagtgatcgttttatcggtaattgtcgacgattttggtttggcggtagatgtgtttggcggcgcgtcgggtatttatttcgcgcgttatttcggtgaagacgcgatcgattaaaagaatttgtaaaaattgttggaaataatgaaagacgtatcggacgattaacgttaggcgcgtttttattgcgtgttggtatatttgcgttacgcggaagattttatttcgttggtatgttacggtagttggtcgggcgtgattattcgtgaattagcgggtattggtggttttggttatgatttaatttttttcgtatttttcgaagggaaaatcgtcgtcgaattgattcgcga

SEQ ID NO: 16264 - DNA, 533 bp, Artificial Sequence
  chemically treated genomic DNA (Homo sapiens) CpG-island No: 16264
tcgcgaatcaattcgacgacgattttcccttcgaaaaatacgaaaaaaattaaatcataaccaaaaccaccaatacccgctaattcacgaataatcacgcccgaccaactaccgtaacataccaacgaaataaaatcttccgcgtaacgcaaatataccaacacgcaataaaaacgcgcctaacgttaatcgtccgatacgtctttcattatttccaacaatttttacaaattcttttaatcgatcgcgtcttcaccgaaataacgcgcgaaataaatacccgacgcgccgccaaacacatctaccgccaaaccaaaatcgtcgacaattaccgataaaacgatcacttttaccgcataacgcgctttcaaaatcgcgttttcgataaaaatcaaaccgatttcttcaacgaaatcaacgccgaaatctatttaaaccacgatatcaaaaccgaaatcgctaaacaacgacgccaactcacgcactttaccgacattaccgattacgaaaacaactttttacataaaatacct

SEQ ID NO: 16265 - DNA, 698 bp, Artificial Sequence
  chemically treated genomic DNA (Homo sapiens) CpG-island No: 16265
attattcggcgggtaatttggagaatgcggttacgttttaaatgaatagcgaaggggggaaatcggggaatgtattgatcgttaacggtaattatatcggaaataatggtttgatgacgtttaacgcgacgttgggcggcgataattcgtttatcgataagatgaacgtgaaaggcgatatttaagggaatattcgcgttcgggttgataatattggcggcgtcggtgtataaacggttaacggtattgaatttattgaggttggcggtaattttgtaggtaatttcgcgttgattatcggaattgtcgaagttggggtttacgtttatacgttggttaaagggaaggggaatgacgagaaaaattggtatttgattagtaaatgggacggcgtaacgttagcggatatattcgattttattaataatttttttgttgtggattcggaaggtttattagtttatcgttcggaggtcggaagttatattagtaatattgtcgtagttaattcgttgtttagttatcgtttatacgatcgtttgggtgagtcgtagtatatagatttattgtatttttaggggtcggtaagtagtatgtggatgcgttatgtcggagggtacgaacgtttaagggtcggtgacggttagttaaatatttaggttaatcgttatgtattgtagttaggcggcgatttggcg

SEQ ID NO: 16266 - DNA, 698 bp, Artificial Sequence
  chemically treated genomic DNA (Homo sapiens) CpG-island No: 16266
cgccaaatcgccgcctaactacaatacataacgattaacctaaatatttaactaaccgtcaccgacccttaaacgttcgtaccctccgacataacgcatccacatactacttaccgacccctaaaaatacaataaatctatatactacgactcacccaaacgatcgtataaacgataactaaacaacgaattaactacgacaatattactaatataacttccgacctccgaacgataaactaataaaccttccgaatccacaacaaaaaaattattaataaaatcgaatatatccgctaacgttacgccgtcccatttactaatcaaataccaatttttctcgtcattccccttccctttaaccaacgtataaacgtaaaccccaacttcgacaattccgataatcaacgcgaaattacctacaaaattaccgccaacctcaataaattcaataccgttaaccgtttatacaccgacgccgccaatattatcaacccgaacgcgaatattcccttaaatatcgcctttcacgttcatcttatcgataaacgaattatcgccgcccaacgtcgcgttaaacgtcatcaaaccattatttccgatataattaccgttaacgatcaatacattccccgatttccccccttcgctattcatttaaaacgtaaccgcattctccaaattacccgccgaataat

SEQ ID NO: 16267 - DNA, 698 bp, Artificial Sequence
  chemically treated genomic DNA (Homo sapiens) CpG-island No: 16267
cgttaaatcgtcgtttagttgtaatatatagcggttagtttgagtatttagttgatcgttatcggtttttgaacgttcgtgtttttcgatatgacgtatttatatattgtttgtcgatttttgagaatgtagtgaatttgtatattgcggtttatttagacggtcgtgtaaacgatggttaaatagcgagttggttgcggtaatgttgttgatatagttttcggttttcgggcgataaattgatgggtttttcggatttataatagggggattattgatgggatcgggtgtattcgttggcgttacgtcgttttatttattggttagatattagtttttttcgttattttttttttttttagttagcgtgtagacgtaagttttagtttcgatagtttcggtggttagcgcgaagttatttgtagaattatcgttaattttaatgagtttaatatcgttgatcgtttgtgtatcgacgtcgttaatgttattaattcgaacgcgagtgtttttttgggtatcgttttttacgtttattttatcggtgggcgaattatcgtcgtttagcgtcgcgttgaacgttattaggttattgttttcggtatagttgtcgttaacggttagtatatttttcggtttttttttttcgttatttatttgaggcgtggtcgtattttttaggttgttcgtcggatagt

SEQ ID NO: 16268 - DNA, 698 bp, Artificial Sequence
  chemically treated genomic DNA (Homo sapiens) CpG-island No: 16268
actatccgacgaacaacctaaaaaatacgaccacgcctcaaataaataacgaaaaaaaaaaaccgaaaaatatactaaccgttaacgacaactataccgaaaacaataacctaataacgttcaacgcgacgctaaacgacgataattcgcccaccgataaaataaacgtaaaaaacgatacccaaaaaaacactcgcgttcgaattaataacattaacgacgtcgatacacaaacgatcaacgatattaaactcattaaaattaacgataattctacaaataacttcgcgctaaccaccgaaactatcgaaactaaaacttacgtctacacgctaactaaaaaaaaaaaaaataacgaaaaaaactaatatctaaccaataaataaaacgacgtaacgccaacgaatacacccgatcccatcaataatccccctattataaatccgaaaaacccatcaatttatcgcccgaaaaccgaaaactatatcaacaacattaccgcaaccaactcgctatttaaccatcgtttacacgaccgtctaaataaaccgcaatatacaaattcactacattctcaaaaatcgacaaacaatatataaatacgtcatatcgaaaaacacgaacgttcaaaaaccgataacgatcaactaaatactcaaactaaccgctatatattacaactaaacgacgatttaacg

SEQ ID NO: 16269 - DNA, 794 bp, Artificial Sequence
  chemically treated genomic DNA (Homo sapiens) CpG-island No: 16269
atttcgttggcgtagtagttttggtaaacggtcgttagagattcgcgtattagcgaggcgtttcggtatattgcgttagaaatgtcggaaaaaatttcggtaatttaagataaaagtgtggttcgtttggcgcggtataatttatttttataagtttcgtcgttttatttatttaattggttatcgtatttaaatttttttttaggataagtttttcgttaaatttttagtttcgggaagttaattaatagcgtttcgtatttttgttgtagtatatttgcgcggtataggtagttttgttagtcgttcggacgagggtttttagcggcgcgggtttgaggttgtcggtaaatatttgggcgcggtgatatgttttttttaacgtcgaaatgtagttttacgtcgttttaggtaagcgtttatttagtagatgcgagaatgtcgagtttgatcgaagttttatttttagttattttggcgggtaaaggtttcggcgaagtttggtaagtttggcgttttgttcggggagatgattttcgtttttacgcgttcgttataatgggcgaaaaaggtttcggttatggtttcgtaaatttgtttatgggtgattttcggtaatagttcggtgaggttggttacgcgggaacgtatcgacgtaatgtttttcgtcgttagtttttttttattcggattgagatagtttgttaggcggttgaggtcggtattgtagtagtaaggtgtcgtggtggaagtcgcgatttttggtttcgcgataggtcgagtttgagattttg

SEQ ID NO: 16270 - DNA, 794 bp, Artificial Sequence
  chemically treated genomic DNA (Homo sapiens) CpG-island No: 16270
caaaatctcaaactcgacctatcgcgaaaccaaaaatcgcgacttccaccacgacaccttactactacaataccgacctcaaccgcctaacaaactatctcaatccgaataaaaaaaaactaacgacgaaaaacattacgtcgatacgttcccgcgtaaccaacctcaccgaactattaccgaaaatcacccataaacaaatttacgaaaccataaccgaaacctttttcgcccattataacgaacgcgtaaaaacgaaaatcatctccccgaacaaaacgccaaacttaccaaacttcgccgaaacctttacccgccaaaataactaaaaataaaacttcgatcaaactcgacattctcgcatctactaaataaacgcttacctaaaacgacgtaaaactacatttcgacgttaaaaaaaacatatcaccgcgcccaaatatttaccgacaacctcaaacccgcgccgctaaaaaccctcgtccgaacgactaacaaaactacctataccgcgcaaatatactacaacaaaaatacgaaacgctattaattaacttcccgaaactaaaaatttaacgaaaaacttatcctaaaaaaaaatttaaatacgataaccaattaaataaataaaacgacgaaacttataaaaataaattataccgcgccaaacgaaccacacttttatcttaaattaccgaaattttttccgacatttctaacgcaatataccgaaacgcctcgctaatacgcgaatctctaacgaccgtttaccaaaactactacgccaacgaaat

SEQ ID NO: 16271 - DNA, 794 bp, Artificial Sequence
  chemically treated genomic DNA (Homo sapiens) CpG-island No: 16271
taaagttttaggttcggtttatcgcgaaattaaagatcgcggtttttattacggtattttgttattataatgtcgattttagtcgtttggtaaattattttaattcggataaaaagaaattggcggcgaaaggtattacgtcggtacgttttcgcgtgattaattttatcgagttgttgtcggggattatttatgagtaggtttgcgaggttataatcgaggtttttttcgtttattatggcgagcgcgtggaagcggaaattattttttcgaataaaacgttagatttgttaaatttcgtcgaaatttttgttcgttagagtagttgggaatggaatttcggttaggttcggtattttcgtatttgttggatgaacgtttatttggggcggcgtggaattgtatttcgacgttgaaaaaggtatattatcgcgtttaggtgtttatcgatagttttaaattcgcgtcgttggaagttttcgttcggacgattggtaaggttgtttgtatcgcgtagatatgttgtaataggagtgcgaagcgttgttggttgatttttcggaattaggagtttaacgaagggtttattttggggaagggtttaggtacggtggttaattgggtaagtgggacggcggggtttgtaagagtaagttatatcgcgttaagcgggttatatttttgttttgaattgtcggaatttttttcggtatttttggcgtaatgtgtcgaaacgtttcgttgatacgcggatttttggcgatcgtttgttagaattgttgcgttagcgggat

SEQ ID NO: 16272 - DNA, 794 bp, Artificial Sequence
  chemically treated genomic DNA (Homo sapiens) CpG-island No: 16272
atcccgctaacgcaacaattctaacaaacgatcgccaaaaatccgcgtatcaacgaaacgtttcgacacattacgccaaaaataccgaaaaaaattccgacaattcaaaacaaaaatataacccgcttaacgcgatataacttactcttacaaaccccgccgtcccacttacccaattaaccaccgtacctaaacccttccccaaaataaacccttcgttaaactcctaattccgaaaaatcaaccaacaacgcttcgcactcctattacaacatatctacgcgatacaaacaaccttaccaatcgtccgaacgaaaacttccaacgacgcgaatttaaaactatcgataaacacctaaacgcgataatatacctttttcaacgtcgaaatacaattccacgccgccccaaataaacgttcatccaacaaatacgaaaataccgaacctaaccgaaattccattcccaactactctaacgaacaaaaatttcgacgaaatttaacaaatctaacgttttattcgaaaaaataatttccgcttccacgcgctcgccataataaacgaaaaaaacctcgattataacctcgcaaacctactcataaataatccccgacaacaactcgataaaattaatcacgcgaaaacgtaccgacgtaatacctttcgccgccaatttctttttatccgaattaaaataatttaccaaacgactaaaatcgacattataataacaaaataccgtaataaaaaccgcgatctttaatttcgcgataaaccgaacctaaaacttta

SEQ ID NO: 16273 - DNA, 927 bp, Artificial Sequence
  chemically treated genomic DNA (Homo sapiens) CpG-island No: 16273
cgtattcggtaattaatgtttgatgcgacgttgtcgcgttttattaggtttataattattgtcgatttgtaggtttgataaggtatttgtgtcgtattcggtaattaatgtttgatgcgacgttgtcgcgttttattaggtttataattgttgtcgatttgtaggtcggataaggtatttgtgtcgtattcggtaattaatgtttgatgcgacgttgtcgcgttttattaggtttataattattgtcgatttgtaggtcggataaggtatttgtgtcgtattcggtaattaatgtttgatgcgacgttgtcgcgttttattaggtttataattgttgtcgattcgtaggtcggataaggcgttcgcgtcgtattcggtagtgtttattcgcggcgatttaaaattttttttttataagttcgtacgttttttagttattcgttatttgttggcgtatcgtgacgttggtaatatattttttagatcgtttgttacggtaacgatttttgtttttttagtagtgttagacgcgtagtgtaatcgttcgtcgtttttagtttgcgtagtttagcggtaggttttagtaacgtacgtagtagggttttttttatattgcgtgtattaatgatttacgcgggtaggcggtgatagaggttcgaagaagttaggtcgattgtatcggttaaacgattggacgttaatttcgggtatgtttggtttatatttacgtttattatttgtttataacgacgcgaagtttttttggggttatttgtggggatttgaatttatcggggagtcgtcgtcgtttggcggtggttttatcgggcgcggtttcgttacgtcggtatagggtttattcgtttcgggcggtttttttgtgtttttttgttttgtttttcgtttttttcgtttagttacgacgcg

SEQ ID NO: 16274 - DNA, 927 bp, Artificial Sequence
  chemically treated genomic DNA (Homo sapiens) CpG-island No: 16274
cgcgtcgtaactaaacgaaaaaaacgaaaaacaaaacaaaaaaacacaaaaaaaccgcccgaaacgaataaaccctataccgacgtaacgaaaccgcgcccgataaaaccaccgccaaacgacgacgactccccgataaattcaaatccccacaaataaccccaaaaaaacttcgcgtcgttataaacaaataataaacgtaaatataaaccaaacatacccgaaattaacgtccaatcgtttaaccgatacaatcgacctaacttcttcgaacctctatcaccgcctacccgcgtaaatcattaatacacgcaatataaaaaaaaccctactacgtacgttactaaaacctaccgctaaactacgcaaactaaaaacgacgaacgattacactacgcgtctaacactactaaaaaaacaaaaatcgttaccgtaacaaacgatctaaaaaatatattaccaacgtcacgatacgccaacaaataacgaataactaaaaaacgtacgaacttataaaaaaaaaattttaaatcgccgcgaataaacactaccgaatacgacgcgaacgccttatccgacctacgaatcgacaacaattataaacctaataaaacgcgacaacgtcgcatcaaacattaattaccgaatacgacacaaataccttatccgacctacaaatcgacaataattataaacctaataaaacgcgacaacgtcgcatcaaacattaattaccgaatacgacacaaataccttatccgacctacaaatcgacaacaattataaacctaataaaacgcgacaacgtcgcatcaaacattaattaccgaatacgacacaaataccttatcaaacctacaaatcgacaataattataaacctaataaaacgcgacaacgtcgcatcaaacattaattaccgaatacg

SEQ ID NO: 16275 - DNA, 927 bp, Artificial Sequence
  chemically treated genomic DNA (Homo sapiens) CpG-island No: 16275
cgcgtcgtggttgggcggggagaacggagaataagatagaagggtatagagggatcgttcgggacgggtgaattttatgtcgacgtggcggaatcgcgttcgatagggttatcgttaggcggcggcggtttttcggtaggtttaaatttttataggtagttttagggggatttcgcgtcgttgtggatagataataggcgtggatgtgagttaggtatgttcggagttggcgtttaatcgtttgatcggtgtaatcggtttgattttttcgagtttttattatcgtttgttcgcgtgggttattggtatacgtaatatgaaaaaagttttgttgcgtgcgttgttggaatttatcgttgagttgcgtaagttggaagcggcgggcgattatattgcgcgtttggtattgttggaagagtagaaatcgttgtcgtggtaggcggtttgggaaatgtattgttaacgttacgatacgttagtaggtagcgaatggttggagagcgtgcgggtttatgagaaagaaattttgagtcgtcgcgggtaaatattgtcggatgcggcgcgagcgttttattcggtttacgggtcggtaatagttgtaggtttgataagacgcgatagcgtcgtattaggtattgattgtcggatgcggtataagtgttttattcggtttataggtcggtaatagttgtaggtttgataagacgcgatagcgtcgtattaggtattgattgtcggatgcggtataagtgttttattcggtttataggtcggtaatagttgtaggtttgataagacgcgatagcgtcgtattaggtattgattgtcggatgcggtataagtgttttattaggtttataggtcggtaatagttgtaggtttgataagacgcgatagcgtcgtattaggtattgattgtcggatgcg

SEQ ID NO: 16276 - DNA, 927 bp, Artificial Sequence
  chemically treated genomic DNA (Homo sapiens) CpG-island No: 16276
cgcatccgacaatcaatacctaatacgacgctatcgcgtcttatcaaacctacaactattaccgacctataaacctaataaaacacttataccgcatccgacaatcaatacctaatacgacgctatcgcgtcttatcaaacctacaactattaccgacctataaaccgaataaaacacttataccgcatccgacaatcaatacctaatacgacgctatcgcgtcttatcaaacctacaactattaccgacctataaaccgaataaaacacttataccgcatccgacaatcaatacctaatacgacgctatcgcgtcttatcaaacctacaactattaccgacccgtaaaccgaataaaacgctcgcgccgcatccgacaatatttacccgcgacgactcaaaatttctttctcataaacccgcacgctctccaaccattcgctacctactaacgtatcgtaacgttaacaatacatttcccaaaccgcctaccacgacaacgatttctactcttccaacaataccaaacgcgcaatataatcgcccgccgcttccaacttacgcaactcaacgataaattccaacaacgcacgcaacaaaacttttttcatattacgtataccaataacccacgcgaacaaacgataataaaaactcgaaaaaatcaaaccgattacaccgatcaaacgattaaacgccaactccgaacatacctaactcacatccacgcctattatctatccacaacgacgcgaaatccccctaaaactacctataaaaatttaaacctaccgaaaaaccgccgccgcctaacgataaccctatcgaacgcgattccgccacgtcgacataaaattcacccgtcccgaacgatccctctatacccttctatcttattctccgttctccccgcccaaccacgacgcg

SEQ ID NO: 16277 - DNA, 569 bp, Artificial Sequence
  chemically treated genomic DNA (Homo sapiens) CpG-island No: 16277
cgttatatagacgtttaggttagtgattagcggttatgtttagatagcggatttcgggaattattgtattgcgtttagttagatagcggcggttgagtcgataatagcgtcgattatatacgacggaatggcggtgatggggttttttagcgtaaacggaatcgtatttttattgatttttataaacgttaggaatatggcggttttattttgcggataaagttgagcgttgaataggcgtttgtcggttaaacgacggtcgataatggtcgttagttttagattaatcggcggaataacgatagcgatagaacgagcggtgatcggtaatacgtggttagtggtaaagttgaaggtaataaaatttgcggttttgttgatcgggttattaaggtcgattgttgtcgtcgcggcgatttttattgcgtatattagcgcgttttttttatttgcggtagttagtatagtacggatatcgtcgttgatttagttattaaagggggtgatgacgtagtatatcgttagtatgataaaaatggcggaaagaatcgggagtaaaaatgtggttt

SEQ ID NO: 16278 - DNA, 569 bp, Artificial Sequence
  chemically treated genomic DNA (Homo sapiens) CpG-island No: 16278
aaaccacatttttactcccgattctttccgccatttttatcatactaacgatatactacgtcatcaccccctttaataactaaatcaacgacgatatccgtactatactaactaccgcaaataaaaaaaacgcgctaatatacgcaataaaaatcgccgcgacgacaacaatcgaccttaataacccgatcaacaaaaccgcaaattttattaccttcaactttaccactaaccacgtattaccgatcaccgctcgttctatcgctatcgttattccgccgattaatctaaaactaacgaccattatcgaccgtcgtttaaccgacaaacgcctattcaacgctcaactttatccgcaaaataaaaccgccatattcctaacgtttataaaaatcaataaaaatacgattccgtttacgctaaaaaaccccatcaccgccattccgtcgtatataatcgacgctattatcgactcaaccgccgctatctaactaaacgcaatacaataattcccgaaatccgctatctaaacataaccgctaatcactaacctaaacgtctatataacg

SEQ ID NO: 16279 - DNA, 569 bp, Artificial Sequence
  chemically treated genomic DNA (Homo sapiens) CpG-island No: 16279
aaattatatttttgttttcgatttttttcgttatttttgttatgttggcgatgtattacgttattattttttttggtggttggattaacggcggtattcgtattgtgttgattgtcgtaggtgagaagggcgcgttgatgtacgtaatggggatcgtcgcggcgatagtaatcgattttggtggttcgattaataaagtcgtaggttttgttgtttttagttttattattgattacgtattatcggttatcgttcgttttatcgttatcgttatttcgtcgattggtttggggttggcgattattatcgatcgtcgtttaatcggtaaacgtttgtttaacgtttaattttattcgtagggtaagatcgttatgtttttggcgtttatggggattagtgagggtgcgatttcgtttgcgttggaaagttttattatcgttatttcgtcgtatatggtcggcgttattgtcggtttaatcgtcgttgtttggttgggcgtagtgtaatggttttcggagttcgttatttgggtatggtcgttggttattaatttgggcgtttatatggcg

SEQ ID NO: 16280 - DNA, 569 bp, Artificial Sequence
  chemically treated genomic DNA (Homo sapiens) CpG-island No: 16280
cgccatataaacgcccaaattaataaccaacgaccatacccaaataacgaactccgaaaaccattacactacgcccaaccaaacaacgacgattaaaccgacaataacgccgaccatatacgacgaaataacgataataaaactttccaacgcaaacgaaatcgcaccctcactaatccccataaacgccaaaaacataacgatcttaccctacgaataaaattaaacgttaaacaaacgtttaccgattaaacgacgatcgataataatcgccaaccccaaaccaatcgacgaaataacgataacgataaaacgaacgataaccgataatacgtaatcaataataaaactaaaaacaacaaaacctacgactttattaatcgaaccaccaaaatcgattactatcgccgcgacgatccccattacgtacatcaacgcgcccttctcacctacgacaatcaacacaatacgaataccgccgttaatccaaccaccaaaaaaaataataacgtaatacatcgccaacataacaaaaataacgaaaaaaatcgaaaacaaaaatataattt

SEQ ID NO: 16281 - DNA, 730 bp, Artificial Sequence
  chemically treated genomic DNA (Homo sapiens) CpG-island No: 16281
gaacggaggtcgggcgtcgggtcggtcggcggcggcggtagcgtatttttggggtgcgggttcgggtttcgtagtagttcgcggcggtagtagtagttcgggcggcgaatcgagaggataatgttcgtagtttgcgcgaggcgacggttggagtttttagttgcggtagttcgggagggtagggaggcggtggcggcgggttgcggaggtggttgttaattgcgcgtcgggtcgggacgcgcgtggtatgagttttcgcggaacgtgcgtttatcgtcgcggtttatcgcgtttttttttatagtttttattgggcgagggttttttattcgtcgcgcgtagttcggttcgttttttttcggcgagtatgtttagtgcgtttcggtcgcgttttgtttaagcggtcgtttttggtttttcgcggggtcgggagggggcggggtagtgggcggggtttcggatttgagttcgatttggggagtggcgcgagttaggaattggttggaagatggggtgtgtgtgcgtatatgggagcgaggaaagcgttgtaggaagtatgtaggtcgttttattttatagttgtgggagtggtggataagggcggcggttttgcgagaagtacgtgggcgcggcgggtcgttttagggatggagtaggttgtggttttgttaattttcgttattaaaggtttaaggacgttatttatttagtttcgggcgggcgtgggttt

SEQ ID NO: 16282 - DNA, 730 bp, Artificial Sequence
  chemically treated genomic DNA (Homo sapiens) CpG-island No: 16282
aaacccacgcccgcccgaaactaaataaataacgtccttaaacctttaataacgaaaattaacaaaaccacaacctactccatccctaaaacgacccgccgcgcccacgtacttctcgcaaaaccgccgcccttatccaccactcccacaactataaaataaaacgacctacatacttcctacaacgctttcctcgctcccatatacgcacacacaccccatcttccaaccaattcctaactcgcgccactccccaaatcgaactcaaatccgaaaccccgcccactaccccgccccctcccgaccccgcgaaaaaccaaaaacgaccgcttaaacaaaacgcgaccgaaacgcactaaacatactcgccgaaaaaaaacgaaccgaactacgcgcgacgaataaaaaaccctcgcccaataaaaactataaaaaaaaacgcgataaaccgcgacgataaacgcacgttccgcgaaaactcataccacgcgcgtcccgacccgacgcgcaattaacaaccacctccgcaacccgccgccaccgcctccctaccctcccgaactaccgcaactaaaaactccaaccgtcgcctcgcgcaaactacgaacattatcctctcgattcgccgcccgaactactactaccgccgcgaactactacgaaacccgaacccgcaccccaaaaatacgctaccgccgccgccgaccgacccgacgcccgacctccgttc

SEQ ID NO: 16283 - DNA, 730 bp, Artificial Sequence
  chemically treated genomic DNA (Homo sapiens) CpG-island No: 16283
agatttacgttcgttcggggttgagtgaatggcgtttttgggtttttgataacgggagttggtaagattatagtttattttatttttgaggcggttcgtcgcgtttacgtgtttttcgtagagtcgtcgtttttgtttattatttttatagttgtaaaataaagcggtttgtatgttttttatagcgtttttttcgtttttatatacgtatatatattttattttttagttagtttttaattcgcgttattttttaaatcggatttaaattcggagtttcgtttattgtttcgttttttttcggtttcgcggaaaattaggagcggtcgtttgggtaaggcgcggtcggaacgtattgggtatgttcgtcggggaggggcgggtcgggttgcgcgcggcgagtaggaagttttcgtttagtagaggttgtgggagagagcgcgatgggtcgcggcggtgggcgtacgtttcgcggggatttatgttacgcgcgtttcggttcgacgcgtaattagtagttattttcgtagttcgtcgttatcgtttttttgttttttcgggttgtcgtagttaggagttttagtcgtcgtttcgcgtaggttgcgggtattgttttttcggttcgtcgttcgggttgttgttgtcgtcgcggattgttgcggggttcggattcgtattttagggatacgttgtcgtcgtcgtcggtcggttcggcgttcggttttcgttt

SEQ ID NO: 16284 - DNA, 730 bp, Artificial Sequence
  chemically treated genomic DNA (Homo sapiens) CpG-island No: 16284
aaacgaaaaccgaacgccgaaccgaccgacgacgacgacaacgtatccctaaaatacgaatccgaaccccgcaacaatccgcgacgacaacaacaacccgaacgacgaaccgaaaaaacaatacccgcaacctacgcgaaacgacgactaaaactcctaactacgacaacccgaaaaaacaaaaaaacgataacgacgaactacgaaaataactactaattacgcgtcgaaccgaaacgcgcgtaacataaatccccgcgaaacgtacgcccaccgccgcgacccatcgcgctctctcccacaacctctactaaacgaaaacttcctactcgccgcgcgcaacccgacccgcccctccccgacgaacatacccaatacgttccgaccgcgccttacccaaacgaccgctcctaattttccgcgaaaccgaaaaaaaacgaaacaataaacgaaactccgaatttaaatccgatttaaaaaataacgcgaattaaaaactaactaaaaaataaaatatatatacgtatataaaaacgaaaaaaacgctataaaaaacatacaaaccgctttattttacaactataaaaataataaacaaaaacgacgactctacgaaaaacacgtaaacgcgacgaaccgcctcaaaaataaaataaactataatcttaccaactcccgttatcaaaaacccaaaaacgccattcactcaaccccgaacgaacgtaaatct

SEQ ID NO: 16285 - DNA, 626 bp, Artificial Sequence
  chemically treated genomic DNA (Homo sapiens) CpG-island No: 16285
tttggtcggtaagttagtgaagtttttacgttagatttatattagtgcgttttagatttatggacgttatgcgttcgttggcgttaggtgttatcgtgtaagttggtttgggtttgaatattcgatgggttatttattcgatgtgtatattatggaatcgttttatattttatgggcgacgggtttgttatttttgatgatttcgacggtcgtcggatattgtcgtaaatcgaattcgatcgagatcgcggttattaggtggttaatttcgattgttagattgaatatatgttggtcggtttgggtttggtatgtggtttttgtgtcgggttattaatcgcgattaatatacgtcgtcgttaaatgttatatttgtatattaattcgttttttggtcgttatgtggttcgtggattagtttgtgagattcggttatattatgtgttatggaaatttgtgtcgtcgatataaggttttcgcgttgatagtgcgtatagattcggtaatgtatatcgtggattgcggtttttagggtgtgtcgattacgtcgtggcgaaataatttttttggaggttgatagggaaggttttaaaattaattataatatatgattgtgttcggaatta

SEQ ID NO: 16286 - DNA, 626 bp, Artificial Sequence
  chemically treated genomic DNA (Homo sapiens) CpG-island No: 16286
taattccgaacacaatcatatattataattaattttaaaaccttccctatcaacctccaaaaaaattatttcgccacgacgtaatcgacacaccctaaaaaccgcaatccacgatatacattaccgaatctatacgcactatcaacgcgaaaaccttatatcgacgacacaaatttccataacacataatataaccgaatctcacaaactaatccacgaaccacataacgaccaaaaaacgaattaatatacaaatataacatttaacgacgacgtatattaatcgcgattaataacccgacacaaaaaccacataccaaacccaaaccgaccaacatatattcaatctaacaatcgaaattaaccacctaataaccgcgatctcgatcgaattcgatttacgacaatatccgacgaccgtcgaaatcatcaaaaataacaaacccgtcgcccataaaatataaaacgattccataatatacacatcgaataaataacccatcgaatattcaaacccaaaccaacttacacgataacacctaacgccaacgaacgcataacgtccataaatctaaaacgcactaatataaatctaacgtaaaaacttcactaacttaccgaccaaa

SEQ ID NO: 16287 - DNA, 626 bp, Artificial Sequence
  chemically treated genomic DNA (Homo sapiens) CpG-island No: 16287
tagtttcggatataattatgtgttgtgattgattttagggttttttttattaatttttaggaaggttgtttcgttacggcgtaatcggtatattttggaggtcgtaatttacggtgtgtattgtcgagtttgtgcgtattgttaacgcgggggttttgtgtcgacgatatagatttttatggtatatgatgtggtcggattttataaattggtttacgaattatataacggttagggggcggattagtatgtaagtgtgatatttagcgacggcgtgtgttaatcgcgattaatgattcgatataggagttatatgttaagtttaagtcggttagtatgtgtttaatttagtagtcggaattaattatttagtaatcgcgatttcggtcgagttcggtttgcgataatattcggcgatcgtcgggattattaggaatgatagattcgtcgtttatggagtgtgaggcggttttatgatgtgtatatcggatagatagtttatcgggtatttaaatttaggttaatttgtacgatggtatttggcgttagcggacgtatggcgtttatgggtttagaacgtattaatatgaatttgacgtaggagttttattgatttgtcgattaag

SEQ ID NO: 16288 - DNA, 626 bp, Artificial Sequence
  chemically treated genomic DNA (Homo sapiens) CpG-island No: 16288
cttaatcgacaaatcaataaaactcctacgtcaaattcatattaatacgttctaaacccataaacgccatacgtccgctaacgccaaataccatcgtacaaattaacctaaatttaaatacccgataaactatctatccgatatacacatcataaaaccgcctcacactccataaacgacgaatctatcattcctaataatcccgacgatcgccgaatattatcgcaaaccgaactcgaccgaaatcgcgattactaaataattaattccgactactaaattaaacacatactaaccgacttaaacttaacatataactcctatatcgaatcattaatcgcgattaacacacgccgtcgctaaatatcacacttacatactaatccgccccctaaccgttatataattcgtaaaccaatttataaaatccgaccacatcatataccataaaaatctatatcgtcgacacaaaacccccgcgttaacaatacgcacaaactcgacaatacacaccgtaaattacgacctccaaaatataccgattacgccgtaacgaaacaaccttcctaaaaattaataaaaaaaaccctaaaatcaatcacaacacataattatatccgaaacta

SEQ ID NO: 16289 - DNA, 530 bp, Artificial Sequence
  chemically treated genomic DNA (Homo sapiens) CpG-island No: 16289
tcggcgcgtattacgacggttagggcgttaattttatattttttttcgtttatgtcgagcgggtagaattgtgtgtttttgacgttaatggttaggaatatcgttatgatttgttagggtatagtggcgatatttggtacggttatttgtcggatgcgcgttcgggtttgcgttatggttatcgcgtttatggtttttggtaattcgtcgaggggtatcgttttaattcggcgaagttgttgattgatttttgcgcgcggtaaattgacggggagtttaaagataattcgttgttgtacgtcggttataatgaatttgattatcgcgataacgtcgttattgcgtcgaaatgcgtagtggtggttgattattatgattgggaagatgatgtttcgtcgcgtacgtcgtggggtagtattattatttatgaagtttatgttaaaggattaacgtatttgtattcggagatttcggtcgagattcgtggtatttataaagttttcgggtattcggtgatgattaattatttg

SEQ ID NO: 16290 - DNA, 530 bp, Artificial Sequence
  chemically treated genomic DNA (Homo sapiens) CpG-island No: 16290
caaataattaatcatcaccgaatacccgaaaactttataaataccacgaatctcgaccgaaatctccgaatacaaatacgttaatcctttaacataaacttcataaataataatactaccccacgacgtacgcgacgaaacatcatcttcccaatcataataatcaaccaccactacgcatttcgacgcaataacgacgttatcgcgataatcaaattcattataaccgacgtacaacaacgaattatctttaaactccccgtcaatttaccgcgcgcaaaaatcaatcaacaacttcgccgaattaaaacgatacccctcgacgaattaccaaaaaccataaacgcgataaccataacgcaaacccgaacgcgcatccgacaaataaccgtaccaaatatcgccactataccctaacaaatcataacgatattcctaaccattaacgtcaaaaacacacaattctacccgctcgacataaacgaaaaaaaatataaaattaacgccctaaccgtcgtaatacgcgccga

SEQ ID NO: 16291 - DNA, 530 bp, Artificial Sequence
  chemically treated genomic DNA (Homo sapiens) CpG-island No: 16291
taaatagttgattattatcggatgttcgagggttttataagtgttacggatttcgatcgggattttcgggtgtaagtacgttaattttttgatatgggttttataaatgatggtgttgttttacggcgtgcgcggcggggtattatttttttagttatagtgattaattattattacgtatttcggcgtaatggcggcgttgtcgcgatagttaggtttattatgatcggcgtgtagtagcgggttatttttaaatttttcgttaatttgtcgcgcgtaaggattaattaataatttcgtcgggttaaagcgatgtttttcggcgggttgttaggggttatgaacgcgataattataacgtaaattcgggcgcgtattcggtagataatcgtgttaaatgtcgttattgtgttttggtaagttatagcgatgtttttggttattggcgttaaagatatatagttttattcgttcggtatgagcggagaaaagtgtgaagttgacgttttgatcgtcgtaatgcgcgtcga

SEQ ID NO: 16292 - DNA, 530 bp, Artificial Sequence
  chemically treated genomic DNA (Homo sapiens) CpG-island No: 16292
tcgacgcgcattacgacgatcaaaacgtcaacttcacacttttctccgctcataccgaacgaataaaactatatatctttaacgccaataaccaaaaacatcgctataacttaccaaaacacaataacgacatttaacacgattatctaccgaatacgcgcccgaatttacgttataattatcgcgttcataacccctaacaacccgccgaaaaacatcgctttaacccgacgaaattattaattaatccttacgcgcgacaaattaacgaaaaatttaaaaataacccgctactacacgccgatcataataaacctaactatcgcgacaacgccgccattacgccgaaatacgtaataataattaatcactataactaaaaaaataataccccgccgcgcacgccgtaaaacaacaccatcatttataaaacccatatcaaaaaattaacgtacttacacccgaaaatcccgatcgaaatccgtaacacttataaaaccctcgaacatccgataataatcaactattta

SEQ ID NO: 16293 - DNA, 657 bp, Artificial Sequence
  chemically treated genomic DNA (Homo sapiens) CpG-island No: 16293
tgttttgacgggtgcggggtttatagttaatgttttgacgggtcggagtttatataaatgttttgacggggcggcgtttatattaatgttttgacgggtcggggtttatattaatgttttgacggggcggggtttatattaatgttttgacggggcggggtttatagtaattttttgacggggcggagtttatattaatgttttgacgggacggagtttatattaatgttttgacggggcggggtttatattaatgttttgacggggcggagtttatattaatgttttgacggggcggggtttatagtaattttttgacggggcggggtttatattaatgttttgacggggcggggtttatattaatgttttgacggggcggggtttatagtaattttttgacggggcggagtttatattaatgttttgacggggcggggtttatattaatgttttgacggggcggggtttatagtaattttttgacggggcggagtttatattaatgttttgacggggcggagtttatattaatgttttgacggggcggagtttatattaatgttttgacggggcggggtttatagtaattttttgacggggcggagtttatattaatgttttgacggggcggggtttatattaatgttttgacgg

SEQ ID NO: 16294 - DNA, 657 bp, Artificial Sequence
  chemically treated genomic DNA (Homo sapiens) CpG-island No: 16294
ccgtcaaaacattaatataaaccccgccccgtcaaaacattaatataaactccgccccgtcaaaaaattactataaaccccgccccgtcaaaacattaatataaactccgccccgtcaaaacattaatataaactccgccccgtcaaaacattaatataaactccgccccgtcaaaaaattactataaaccccgccccgtcaaaacattaatataaaccccgccccgtcaaaacattaatataaactccgccccgtcaaaaaattactataaaccccgccccgtcaaaacattaatataaaccccgccccgtcaaaacattaatataaaccccgccccgtcaaaaaattactataaaccccgccccgtcaaaacattaatataaactccgccccgtcaaaacattaatataaaccccgccccgtcaaaacattaatataaactccgtcccgtcaaaacattaatataaactccgccccgtcaaaaaattactataaaccccgccccgtcaaaacattaatataaaccccgccccgtcaaaacattaatataaaccccgacccgtcaaaacattaatataaacgccgccccgtcaaaacatttatataaactccgacccgtcaaaacattaactataaaccccgcacccgtcaaaaca

SEQ ID NO: 16295 - DNA, 657 bp, Artificial Sequence
  chemically treated genomic DNA (Homo sapiens) CpG-island No: 16295
tcgttagagtattagtgtgagtttcgtttcgttagagtattagtgtgagtttcgtttcgttagaagattattgtgagtttcgtttcgttagagtattagtgtgagtttcgtttcgttagagtattagtgtgagtttcgtttcgttagagtattagtgtgagtttcgtttcgttagaggattattgtgagtttcgtttcgttagagtattagtgtgagtttcgtttcgttagagtattagtgtgagtttcgtttcgttagaggattattgtgagtttcgtttcgttagagtattagtgtgagtttcgtttcgttagagtattagtgtgagtttcgtttcgttagaggattattgtgagtttcgtttcgttagagtattagtgtgagtttcgtttcgttagagtattagtgtgagtttcgtttcgttagagtattagtgtgagtttcgtttcgttagagtattagtgtgagtttcgtttcgttagaggattattgtgagtttcgtttcgttagagtattagtgtgagtttcgtttcgttagagtattagtgtgagtttcggttcgttagagtattagtgtgagcgtcgtttcgttagagtatttgtgtgagtttcggttcgttagagtattaattgtgagtttcgtattcgttagagta

SEQ ID NO: 16296 - DNA, 657 bp, Artificial Sequence
  chemically treated genomic DNA (Homo sapiens) CpG-island No: 16296
tactctaacgaatacgaaactcacaattaatactctaacgaaccgaaactcacacaaatactctaacgaaacgacgctcacactaatactctaacgaaccgaaactcacactaatactctaacgaaacgaaactcacactaatactctaacgaaacgaaactcacaataatcctctaacgaaacgaaactcacactaatactctaacgaaacgaaactcacactaatactctaacgaaacgaaactcacactaatactctaacgaaacgaaactcacactaatactctaacgaaacgaaactcacaataatcctctaacgaaacgaaactcacactaatactctaacgaaacgaaactcacactaatactctaacgaaacgaaactcacaataatcctctaacgaaacgaaactcacactaatactctaacgaaacgaaactcacactaatactctaacgaaacgaaactcacaataatcctctaacgaaacgaaactcacactaatactctaacgaaacgaaactcacactaatactctaacgaaacgaaactcacactaatactctaacgaaacgaaactcacaataatcttctaacgaaacgaaactcacactaatactctaacgaaacgaaactcacactaatactctaacga

SEQ ID NO: 16297 - DNA, 613 bp, Artificial Sequence
  chemically treated genomic DNA (Homo sapiens) CpG-island No: 16297
  unsure (552)
gtattatcgtgtgagtttcgttttttcgttagagtattatcgtgtgagtttcgttttttgttatagtattatcgtgtgagtttcgtttttcgttagagtattatcgtgtgagtttcgtttttcgttcgagtattatcgtgtgagtttcgtttttcgttagagtattatcgtgtgagtttcgtttttcgttatagtattatcgtgtgagtttcgttttttgttagagtattattgtgagttttttttttttttagagttttgtcgtgagtttcgtttttcgttagagtattatcgtgtgagtttcggtttttcgttcgagtattatcgtgtgagtttcgtttttcgttcgagtattatcgtgtgagtttcggttttcgttagagtattatcgtgtgagtttcgtttttcgttagagtattatcgtgtgagtttcgtttttcgttagagtattatcgtgtgagtttcgtttttcgttagagtattatcgtgtgagttttagtttttcgatagagtattatcgtgtgagttttaggtttttcggtttataggttnattatcgtgtgagtttcgtttttcgatagagtattatcgtagtgagtttttgttttttggt

SEQ ID NO: 16298 - DNA, 613 bp, Artificial Sequence
  chemically treated genomic DNA (Homo sapiens) CpG-island No: 16298
  unsure (62)
accaaaaaacaaaaactcactacgataatactctatcgaaaaacgaaactcacacgataatnaacctataaaccgaaaaacctaaaactcacacgataatactctatcgaaaaactaaaactcacacgataatactctaacgaaaaacgaaactcacacgataatactctaacgaaaaacgaaactcacacgataatactctaacgaaaaacgaaactcacacgataatactctaacgaaaaccgaaactcacacgataatactcgaacgaaaaacgaaactcacacgataatactcgaacgaaaaaccgaaactcacacgataatactctaacgaaaaacgaaactcacgacaaaactctaaaaaaaaaaaaaactcacaataatactctaacaaaaaacgaaactcacacgataatactataacgaaaaacgaaactcacacgataatactctaacgaaaaacgaaactcacacgataatactcgaacgaaaaacgaaactcacacgataatactctaacgaaaaacgaaactcacacgataatactataacaaaaaacgaaactcacacgataatactctaacgaaaaaacgaaactcacacgataatac

SEQ ID NO: 16299 - DNA, 613 bp, Artificial Sequence
  chemically treated genomic DNA (Homo sapiens) CpG-island No: 16299
  unsure (62)
gttaggaggtaggagtttattacggtaatgttttgtcgggaggcggagtttatacggtaatnagtttgtggatcgggaggtttggagtttatacggtaatgttttgtcgggaggttggagtttatacggtaatgttttggcgggaggcggagtttatacggtaatgttttgacgggaggcggagtttatacggtaatgttttgacgggaggcggagtttatacggtaatgttttgacgggagtcggagtttatacggtaatgttcggacgggagacggagtttatacggtaatgttcggacgggagatcggagtttatacggtaatgttttggcggaggacggagtttacggtaaggttttgagaggagaaggagtttatagtaatgttttggtagggggcggagtttatacggtaatgttgtgacgggaggcggagtttatacggtaatgttttgacggggggcggagtttatacggtaatgttcggacgggagacggagtttatacggtaatgttttggcgggagacggagtttatacggtaatgttgtgataggaggcggagtttatacggtaatgttttggcgggagagcggagtttatacggtaatgt

SEQ ID NO: 16300 - DNA, 613 bp, Artificial Sequence
  chemically treated genomic DNA (Homo sapiens) CpG-island No: 16300
  unsure (552)
acattaccgtataaactccgctctcccgccaaaacattaccgtataaactccgcctcctatcacaacattaccgtataaactccgtctcccgccaaaacattaccgtataaactccgtctcccgtccgaacattaccgtataaactccgccccccgtcaaaacattaccgtataaactccgcctcccgtcacaacattaccgtataaactccgccccctaccaaaacattactataaactccttctcctctcaaaaccttaccgtaaactccgtcctccgccaaaacattaccgtataaactccgatctcccgtccgaacattaccgtataaactccgtctcccgtccgaacattaccgtataaactccgactcccgtcaaaacattaccgtataaactccgcctcccgtcaaaacattaccgtataaactccgcctcccgtcaaaacattaccgtataaactccgcctcccgccaaaacattaccgtataaactccaacctcccgacaaaacattaccgtataaactccaaacctcccgatccacaaactnattaccgtataaactccgcctcccgacaaaacattaccgtaataaactcctacctcctaac

SEQ ID NO: 16301 - DNA, 619 bp, Artificial Sequence
  chemically treated genomic DNA (Homo sapiens) CpG-island No: 16301
tttcgtttttcgttagagtattatcgtgtgagtttcgtttttcgttagagtattatcgtgtgagtttcgtttttcgttagagtattatcgtgtgagtttcgtttttcgttatagtattatcgtgtgagtttcgtttttcgttatagtattatcgtgtgagtttcgtttttcgttatagtattatcgtgtgagtttcgtttttcgttatagtattatcgtgtgagtttcgtttttcgttatagtattatcgtgtgagtttcgtttttcgttatagtattatcgtgtgagtttcgtttttcgttatagtattatcgtgtgagtttcgtttttcggtagagtattatcgtgtgagtttcgtttttcgttagagtattatcgtgtgagtttcgtttttcgttagagtattatcgtgtgagtttcgtttttcgatagagtattatcgtgtgagtttcgtttttcgttatagtattatcgtgtgagtttcgtttttcgatagagtattatcgtgtgagtttcgtttttcgttagagtattatcgtgtgagtttcgtttttcggtagagtattatcgtgtgagtttcgttttttgtttaagtattattgtgtgagattcgtttttt

SEQ ID NO: 16302 - DNA, 619 bp, Artificial Sequence
  chemically treated genomic DNA (Homo sapiens) CpG-island No: 16302
aaaaaacgaatctcacacaataatacttaaacaaaaaacgaaactcacacgataatactctaccgaaaaacgaaactcacacgataatactctaacgaaaaacgaaactcacacgataatactctatcgaaaaacgaaactcacacgataatactataacgaaaaacgaaactcacacgataatactctatcgaaaaacgaaactcacacgataatactctaacgaaaaacgaaactcacacgataatactctaacgaaaaacgaaactcacacgataatactctaccgaaaaacgaaactcacacgataatactataacgaaaaacgaaactcacacgataatactataacgaaaaacgaaactcacacgataatactataacgaaaaacgaaactcacacgataatactataacgaaaaacgaaactcacacgataatactataacgaaaaacgaaactcacacgataatactataacgaaaaacgaaactcacacgataatactataacgaaaaacgaaactcacacgataatactctaacgaaaaacgaaactcacacgataatactctaacgaaaaacgaaactcacacgataatactctaacgaaaaacgaaa

SEQ ID NO: 16303 - DNA, 619 bp, Artificial Sequence
  chemically treated genomic DNA (Homo sapiens) CpG-island No: 16303
agggggcggattttatatagtaatgtttggataggaggcggagtttatacggtaatgttttgtcgggaggcggagtttatacggtaatgttttgacgggaggcggagtttatacggtaatgttttgtcgggaggcggagtttatacggtaatgttgtgacgggaggcggagtttatacggtaatgttttgtcgggaggcggagtttatacggtaatgttttggcgggaggcggagtttatacggtaatgttttgacgggaggcggagtttatacggtaatgttttgtcgggaggcggagtttatacggtaatgttgtgacgggaggcggagtttatacggtaatgttgtgacgggaggcggagtttatacggtaatgttgtgacgggaggcggagtttatacggtaatgttgtgacgggaggcggagtttatacggtaatgttgtgacgggaggcggagtttatacggtaatgttgtgacgggaggcggagtttatacggtaatgttgtgacgggaggcggagtttatacggtaatgttttgacgggaggcggagtttatacggtaatgttttgacgggaggcggagtttatacggtaatgttttgacgggaggcggag

SEQ ID NO: 16304 - DNA, 619 bp, Artificial Sequence
  chemically treated genomic DNA (Homo sapiens) CpG-island No: 16304
ctccgcctcccgtcaaaacattaccgtataaactccgcctcccgtcaaaacattaccgtataaactccgcctcccgtcaaaacattaccgtataaactccgcctcccgtcacaacattaccgtataaactccgcctcccgtcacaacattaccgtataaactccgcctcccgtcacaacattaccgtataaactccgcctcccgtcacaacattaccgtataaactccgcctcccgtcacaacattaccgtataaactccgcctcccgtcacaacattaccgtataaactccgcctcccgtcacaacattaccgtataaactccgcctcccgacaaaacattaccgtataaactccgcctcccgtcaaaacattaccgtataaactccgcctcccgccaaaacattaccgtataaactccgcctcccgacaaaacattaccgtataaactccgcctcccgtcacaacattaccgtataaactccgcctcccgacaaaacattaccgtataaactccgcctcccgtcaaaacattaccgtataaactccgcctcccgacaaaacattaccgtataaactccgcctcctatccaaacattactatataaaatccgccccct

SEQ ID NO: 16305 - DNA, 666 bp, Artificial Sequence
  chemically treated genomic DNA (Homo sapiens) CpG-island No: 16305
cgtattttgtattttgggaagggttcgacgtataggatagggatcgggtaggaggtaggggcggttttaggagatcgggtagcggacgggggagatcgcgggggattcgttaggggacgggggcggtcgcgtcggttggggtaggggtcgggggcggcggtaggggacgggagggggtcgcgggggattcgataggggacggaggaggtcgtagtagaatcggtagggaacggggttggtcgggggagtcgggataggggtcggggtcgtcgcggcggaggcgggaggtgttcgggcggtgttaggtcgtatttttggaaaacgttttataggaagttttggttcggtagcgtcgcgtttgtagtaggtttagggtcggttttagggtcggggcggtaagagtaggcggttatgggttaaggtacgcggttgggttgaggcgtttgtagcgacgagagattttttaggtcgatttcgttttcgtttttgtcgggggtagggtttggtattattattattttcgggggcgtaggaaatgcgtggttttcgggatggttacggggtttcgcgtagttaattttttcgtagttgagttgttaggtaacgttttggcgtttgcggggagggcggggtttgggcgtttggaggaagttagagttttggcgt

SEQ ID NO: 16306 - DNA, 666 bp, Artificial Sequence
  chemically treated genomic DNA (Homo sapiens) CpG-island No: 16306
acgccaaaactctaacttcctccaaacgcccaaaccccgccctccccgcaaacgccaaaacgttacctaacaactcaactacgaaaaaattaactacgcgaaaccccgtaaccatcccgaaaaccacgcatttcctacgcccccgaaaataataataataccaaaccctacccccgacaaaaacgaaaacgaaatcgacctaaaaaatctctcgtcgctacaaacgcctcaacccaaccgcgtaccttaacccataaccgcctactcttaccgccccgaccctaaaaccgaccctaaacctactacaaacgcgacgctaccgaaccaaaacttcctataaaacgttttccaaaaatacgacctaacaccgcccgaacacctcccgcctccgccgcgacgaccccgacccctatcccgactcccccgaccaaccccgttccctaccgattctactacgacctcctccgtcccctatcgaatcccccgcgaccccctcccgtcccctaccgccgcccccgacccctaccccaaccgacgcgaccgcccccgtcccctaacgaatcccccgcgatctcccccgtccgctacccgatctcctaaaaccgcccctacctcctacccgatccctatcctatacgtcgaacccttcccaaaatacaaaatacg

SEQ ID NO: 16307 - DNA, 666 bp, Artificial Sequence
  chemically treated genomic DNA (Homo sapiens) CpG-island No: 16307
gcgttaaagttttggttttttttaggcgtttagatttcgtttttttcgtaggcgttagggcgttgtttggtaatttagttgcgaggggattggttgcgcgggatttcgtgattatttcggagattacgtattttttgcgttttcggaagtggtgataatgttaggttttgttttcggtagaggcggaagcggagtcggtttgagaggtttttcgtcgttgtaggcgttttagtttagtcgcgtgttttggtttatggtcgtttatttttatcgtttcggttttggggtcggttttgggtttgttgtaggcgcggcgttgtcggattagagttttttgtggaacgttttttagaggtgcggtttggtatcgttcgggtatttttcgttttcgtcgcggcggtttcgatttttgtttcgattttttcgattaatttcgttttttgtcggttttattgcggtttttttcgttttttgtcgggtttttcgcggttttttttcgttttttgtcgtcgttttcgatttttgttttagtcgacgcggtcgttttcgttttttggcgggtttttcgcggtttttttcgttcgttgttcggttttttggggtcgtttttgttttttgttcggtttttgttttgtgcgtcgggttttttttaagatgtagagtgcg

SEQ ID NO: 16308 - DNA, 666 bp, Artificial Sequence
  chemically treated genomic DNA (Homo sapiens) CpG-island No: 16308
cgcactctacatcttaaaaaaaacccgacgcacaaaacaaaaaccgaacaaaaaacaaaaacgaccccaaaaaaccgaacaacgaacgaaaaaaaccgcgaaaaacccgccaaaaaacgaaaacgaccgcgtcgactaaaacaaaaatcgaaaacgacgacaaaaaacgaaaaaaaaccgcgaaaaacccgacaaaaaacgaaaaaaaccgcaataaaaccgacaaaaaacgaaattaatcgaaaaaatcgaaacaaaaatcgaaaccgccgcgacgaaaacgaaaaatacccgaacgataccaaaccgcacctctaaaaaacgttccacaaaaaactctaatccgacaacgccgcgcctacaacaaacccaaaaccgaccccaaaaccgaaacgataaaaataaacgaccataaaccaaaacacgcgactaaactaaaacgcctacaacgacgaaaaacctctcaaaccgactccgcttccgcctctaccgaaaacaaaacctaacattatcaccacttccgaaaacgcaaaaaatacgtaatctccgaaataatcacgaaatcccgcgcaaccaatcccctcgcaactaaattaccaaacaacgccctaacgcctacgaaaaaaacgaaatctaaacgcctaaaaaaaaccaaaactttaacgc

SEQ ID NO: 16309 - DNA, 684 bp, Artificial Sequence
  chemically treated genomic DNA (Homo sapiens) CpG-island No: 16309
ttgatttgttttttttgttatattttttttcgtttttgatagtatcgcgggcgtttgtagtttttagtgtttcgtgttgttttcgtttttttgatttgttttttttgttatattttttttcgtttttgatagtatcgcgggcgtttgtagtttttagtgtttcgtgttgttttcgtttttttgatttgttttttttgttatattttttttcgtttttgatagtatcgcgggcgtttgtagtttttagtgtttcgtgttgttttcgtttttttgatttgttttttttgttatattttttttcgtttttgatagtatcgcgggcgtttgtagtttttagtgtttcgtgttgttttcgtttttttgatttgttttttttgttatattttttttcgtttttgatagtatcgcgggcgtttgtagtttttagtgtttcgtgttgttttcgtttttttgatttgttttttttgttatatttttttttatttttgatagtatcgcgggcgtttgtagtttttagtgtttcgtgttgttttcgtttttttgatttgttttttttgttatatttttttttatttttgatattatcgtaggcgtttgtagtttttagtgtttcgtgttgttttcgtttttttgatttgttttttttgttatatttttttttatttttgatagtatcgtgggtgt

SEQ ID NO: 16310 - DNA, 684 bp, Artificial Sequence
  chemically treated genomic DNA (Homo sapiens) CpG-island No: 16310
acacccacgatactatcaaaaataaaaaaaaatataacaaaaaaaacaaatcaaaaaaacgaaaacaacacgaaacactaaaaactacaaacgcctacgataatatcaaaaataaaaaaaaatataacaaaaaaaacaaatcaaaaaaacgaaaacaacacgaaacactaaaaactacaaacgcccgcgatactatcaaaaataaaaaaaaatataacaaaaaaaacaaatcaaaaaaacgaaaacaacacgaaacactaaaaactacaaacgcccgcgatactatcaaaaacgaaaaaaaatataacaaaaaaaacaaatcaaaaaaacgaaaacaacacgaaacactaaaaactacaaacgcccgcgatactatcaaaaacgaaaaaaaatataacaaaaaaaacaaatcaaaaaaacgaaaacaacacgaaacactaaaaactacaaacgcccgcgatactatcaaaaacgaaaaaaaatataacaaaaaaaacaaatcaaaaaaacgaaaacaacacgaaacactaaaaactacaaacgcccgcgatactatcaaaaacgaaaaaaaatataacaaaaaaaacaaatcaaaaaaacgaaaacaacacgaaacactaaaaactacaaacgcccgcgatactatcaaaaacgaaaaaaaatataacaaaaaaaacaaatcaa

SEQ ID NO: 16311 - DNA, 684 bp, Artificial Sequence
  chemically treated genomic DNA (Homo sapiens) CpG-island No: 16311
atatttacgatattgttagagatggagaaaggtatgataggaagagtagattaagaagacgggaatagtacgaggtattgggagttgtaaacgtttgcgataatgttagagatggagaaaggtatgataggaagagtagattaagaagacgggaatagtacgaggtattgggagttgtaaacgttcgcgatattgttagagatggagaaaggtatgataggaagagtagattaagaagacgggaatagtacgaggtattgggagttgtaaacgttcgcgatattgttagagacggagaaaggtatgataggaagagtagattaagaagacgggaatagtacgaggtattgggagttgtaaacgttcgcgatattgttagagacggagaaaggtatgataggaagagtagattaagaagacgggaatagtacgaggtattgggagttgtaaacgttcgcgatattgttagagacggagaaaggtatgataggaagagtagattaagaagacgggaatagtacgaggtattgggagttgtaaacgttcgcgatattgttagagacggagaaaggtatgataggaagagtagattaagaagacgggaatagtacgaggtattgggagttgtaaacgttcgcgatattgttagagacggagaaaggtatgataggaagagtagattaa

SEQ ID NO: 16312 - DNA, 684 bp, Artificial Sequence
  chemically treated genomic DNA (Homo sapiens) CpG-island No: 16312
ttaatctactcttcctatcatacctttctccgtctctaacaatatcgcgaacgtttacaactcccaatacctcgtactattcccgtcttcttaatctactcttcctatcatacctttctccgtctctaacaatatcgcgaacgtttacaactcccaatacctcgtactattcccgtcttcttaatctactcttcctatcatacctttctccgtctctaacaatatcgcgaacgtttacaactcccaatacctcgtactattcccgtcttcttaatctactcttcctatcatacctttctccgtctctaacaatatcgcgaacgtttacaactcccaatacctcgtactattcccgtcttcttaatctactcttcctatcatacctttctccgtctctaacaatatcgcgaacgtttacaactcccaatacctcgtactattcccgtcttcttaatctactcttcctatcatacctttctccatctctaacaatatcgcgaacgtttacaactcccaatacctcgtactattcccgtcttcttaatctactcttcctatcatacctttctccatctctaacattatcgcaaacgtttacaactcccaatacctcgtactattcccgtcttcttaatctactcttcctatcatacctttctccatctctaacaatatcgtaaatat

SEQ ID NO: 16313 - DNA, 639 bp, Artificial Sequence
  chemically treated genomic DNA (Homo sapiens) CpG-island No: 16313
  unsure (200, 210, 214, 216..217, 486)
cgatttcgcggcgcgttcggttcgtttcggattcgggggcgttttttcgttcgtttcgcgttcgttcggttcgggagatttagttggtagttaggcgtcgagcgtttaagcggataggtttcggattttcgatatgtttgttgtgtcgcgcgtagtttcgttagtttttgcgtagattgcgtttgcgtattatatcgggngttcgagttntggntnngggggaggggggatatcgcgtttgcgtattacgtcggagtcgagcggggttgtagtgggggatatcgcgtttgcgtattatgttacgttcggagcgggtattgagtgggggcgtcgcgtttgcgtaaagcggattcgcggacggtggcgttaagggaacgttgaggtttcgcgtttttcgatcgaggtagagcgggttttgtttcggggaggtggtgggtattaatatttttaaagtttcgtgggtggtttttcgggatcgtttagatncgaagggtttgaacgtttagatcgtagggaatggggtcggaggggggcgttcgttcgcggaggtgggcgggagcggttcggggttttcgattttttgtttatatatattttttgattaattaaattattttgtaattgtgtgtgtttgtggag

SEQ ID NO: 16314 - DNA, 639 bp, Artificial Sequence
  chemically treated genomic DNA (Homo sapiens) CpG-island No: 16314
  unsure (154, 423..424, 426, 430, 440)
ctccacaaacacacacaattacaaaataatttaattaatcaaaaaatatatataaacaaaaaatcgaaaaccccgaaccgctcccgcccacctccgcgaacgaacgcccccctccgaccccattccctacgatctaaacgttcaaacccttcgnatctaaacgatcccgaaaaaccacccacgaaactttaaaaatattaatacccaccacctccccgaaacaaaacccgctctacctcgatcgaaaaacgcgaaacctcaacgttcccttaacgccaccgtccgcgaatccgctttacgcaaacgcgacgcccccactcaatacccgctccgaacgtaacataatacgcaaacgcgatatcccccactacaaccccgctcgactccgacgtaatacgcaaacgcgatatcccccctcccccnnanccanaactcgaacncccgatataatacgcaaacgcaatctacgcaaaaactaacgaaactacgcgcgacacaacaaacatatcgaaaatccgaaacctatccgcttaaacgctcgacgcctaactaccaactaaatctcccgaaccgaacgaacgcgaaacgaacgaaaaaacgcccccgaatccgaaacgaaccgaacgcgccgcgaaatcg

SEQ ID NO: 16315 - DNA, 639 bp, Artificial Sequence
  chemically treated genomic DNA (Homo sapiens) CpG-island No: 16315
  unsure (154, 423..424, 426, 430, 440)
ttttataaatatatataattataaaatagtttagttaattaagggatgtatataaataagaggtcggaggtttcgggtcgttttcgtttattttcgcggacgagcgttttttttcgattttattttttgcggtttgggcgtttaggtttttcgngtttgggcgatttcggagaattatttacggggttttaaaaatgttggtgtttattattttttcggaatagggttcgttttatttcggtcggggagcgcgggattttagcgtttttttaacgttatcgttcgcgggttcgttttgcgtaggcgcggcgtttttatttagtattcgtttcgggcgtggtatggtgcgtaggcgcgatgttttttattgtagtttcgttcgatttcggcgtggtgcgtaggcgcggtatttttttttttttnngnttanggttcggatnttcggtgtggtgcgtaggcgtagtttgcgtagggattggcgggattgcgcgcggtatagtagatatgtcgggggttcggggtttgttcgtttgagcgttcggcgtttggttgttagttgagtttttcggatcgggcgggcgcggggcgggcgaggaggcgttttcgggttcgaggcgggtcgggcgcgtcgcgggatcg

SEQ ID NO: 16316 - DNA, 639 bp, Artificial Sequence
  chemically treated genomic DNA (Homo sapiens) CpG-island No: 16316
  unsure (200, 210, 214, 216..217, 486)
cgatcccgcgacgcgcccgacccgcctcgaacccgaaaacgcctcctcgcccgccccgcgcccgcccgatccgaaaaactcaactaacaaccaaacgccgaacgctcaaacgaacaaaccccgaacccccgacatatctactataccgcgcgcaatcccgccaatccctacgcaaactacgcctacgcaccacaccgaanatccgaaccntaancnnaaaaaaaaaaaaataccgcgcctacgcaccacgccgaaatcgaacgaaactacaataaaaaacatcgcgcctacgcaccataccacgcccgaaacgaatactaaataaaaacgccgcgcctacgcaaaacgaacccgcgaacgataacgttaaaaaaacgctaaaatcccgcgctccccgaccgaaataaaacgaaccctattccgaaaaaataataaacaccaacatttttaaaaccccgtaaataattctccgaaatcgcccaaacncgaaaaacctaaacgcccaaaccgcaaaaaataaaatcgaaaaaaaacgctcgtccgcgaaaataaacgaaaacgacccgaaacctccgacctcttatttatatacatcccttaattaactaaactattttataattatatatatttataaaa

SEQ ID NO: 16317 - DNA, 582 bp, Artificial Sequence
  chemically treated genomic DNA (Homo sapiens) CpG-island No: 16317
atatcgggagtttttttttcgtagagtatacggtggagttcgtatttcgtagagtaatatcgtggatttcgtttttcggagagtattatcggtgagttagtttttcggtagagtattatcgtgtgagtttcgtttttcgttagagtattatcgtgtgaggtttacgtttttcggtagagtattatcgtgtgagtttcgtttttcgttagagtaattatacgtttcgcgtgcgggcgttttcggtgagtattcgtaagttcgggcgcgttcgaagatattcgggtgagtttcgtttttcgttagagtattatcgtgtgagtttcgtttttcgttatagtattatcgtgtgagtttcgtttttttatagagtattatcgtgtgagtttcgtttttcgttatagtattatcgtgtgagtttcgtttttcggtagagtattatcgtgtgagtttcgtttttcggtagagtattatcgtgtgagtttcgtatatttcgttagagtattatcgtgtgagtttcgtttttcgatagagtattatcgtgtgagtttatagtttttcgttagagtattatcgtgtgagttt

SEQ ID NO: 16318 - DNA, 582 bp, Artificial Sequence
  chemically treated genomic DNA (Homo sapiens) CpG-island No: 16318
aaactcacacgataatactctaacgaaaaactataaactcacacgataatactctatcgaaaaacgaaactcacacgataatactctaacgaaatatacgaaactcacacgataatactctaccgaaaaacgaaactcacacgataatactctaccgaaaaacgaaactcacacgataatactataacgaaaaacgaaactcacacgataatactctataaaaaaacgaaactcacacgataatactataacgaaaaacgaaactcacacgataatactctaacgaaaaacgaaactcacccgaatatcttcgaacgcgcccgaacttacgaatactcaccgaaaacgcccgcacgcgaaacgtataattactctaacgaaaaacgaaactcacacgataatactctaccgaaaaacgtaaacctcacacgataatactctaacgaaaaacgaaactcacacgataatactctaccgaaaaactaactcaccgataatactctccgaaaaacgaaatccacgatattactctacgaaatacgaactccaccgtatactctacgaaaaaaaaactcccgatat

SEQ ID NO: 16319 - DNA, 582 bp, Artificial Sequence
  chemically treated genomic DNA (Homo sapiens) CpG-island No: 16319
gagtttatacggtaatgttttgacggggggttgtgagtttatacggtaatgttttgtcggggggcggagtttatacggtaatgttttggcggggtgtgcggagtttatacggtaatgttttgtcgggaggcggagtttatacggtaatgttttgtcgggaggcggagtttatacggtaatgttgtgacgggaggcggagtttatacggtaatgttttgtggggaggcggagtttatacggtaatgttgtgacgggaggcggagtttatacggtaatgttttggcgggaggcggagtttattcggatgttttcgggcgcgttcgaatttacgggtgtttatcgagagcgttcgtacgcggaacgtgtaattgttttggcgggaggcggagtttatacggtaatgttttgtcgggaggcgtgagttttatacggtaatgttttgacgggaggcggagtttatacggtagtgttttgtcgggaggttagtttatcggtaatgtttttcgggaggcggagtttacggtattgttttgcgggatgcgggttttatcgtatgttttgcgggaggggagttttcggtat

SEQ ID NO: 16320 - DNA, 582 bp, Artificial Sequence
  chemically treated genomic DNA (Homo sapiens) CpG-island No: 16320
ataccgaaaactcccctcccgcaaaacatacgataaaacccgcatcccgcaaaacaataccgtaaactccgcctcccgaaaaacattaccgataaactaacctcccgacaaaacactaccgtataaactccgcctcccgtcaaaacattaccgtataaaactcacgcctcccgacaaaacattaccgtataaactccgcctcccgccaaaacaattacacgttccgcgtacgaacgctctcgataaacacccgtaaattcgaacgcgcccgaaaacatccgaataaactccgcctcccgccaaaacattaccgtataaactccgcctcccgtcacaacattaccgtataaactccgcctccccacaaaacattaccgtataaactccgcctcccgtcacaacattaccgtataaactccgcctcccgacaaaacattaccgtataaactccgcctcccgacaaaacattaccgtataaactccgcacaccccgccaaaacattaccgtataaactccgccccccgacaaaacattaccgtataaactcacaaccccccgtcaaaacattaccgtataaactc

SEQ ID NO: 16321 - DNA, 552 bp, Artificial Sequence
  chemically treated genomic DNA (Homo sapiens) CpG-island No: 16321
ttcgtttttcgttatagtattatcgtgtgagtttcgtttttcgttatagtattatcgtgtgagtttcgtttttcgttatagtattatcgtgtgatgtttcgtttttcgtttgaatattatcgttgtgatgtttcgtttttcgttcgagtattatcgtgtgagtttcggttttcgttaggagtattatcgtgtgagtttcgatttttttgtttagagttatgtatcgtcgtgagtttcgtttttcgttttagatatttatcgttgatgtaggtttcgttttttttgttatagtatttatcgtgtgtagttttagttttcgcgtttattaggcgattttattcggtgatgtaagtcgttcgtgatattttacgttttagatgttttatcgtgtgagtttcgtttttcgatatagtattatcgttgtgtatggttttttcggttttttcgtcgtatttaagaaggtcgatttaatatagttggttgtatgcgtgttcggtttttatcggggagattattatcgtgtgagtttcgtttttcgttagagtattatcg

SEQ ID NO: 16322 - DNA, 552 bp, Artificial Sequence
  chemically treated genomic DNA (Homo sapiens) CpG-island No: 16322
cgataatactctaacgaaaaacgaaactcacacgataataatctccccgataaaaaccgaacacgcatacaaccaactatattaaatcgaccttcttaaatacgacgaaaaaaccgaaaaaaccatacacaacgataatactatatcgaaaaacgaaactcacacgataaaacatctaaaacgtaaaatatcacgaacgacttacatcaccgaataaaatcgcctaataaacgcgaaaactaaaactacacacgataaatactataacaaaaaaaacgaaacctacatcaacgataaatatctaaaacgaaaaacgaaactcacgacgatacataactctaaacaaaaaaatcgaaactcacacgataatactcctaacgaaaaccgaaactcacacgataatactcgaacgaaaaacgaaacatcacaacgataatattcaaacgaaaaacgaaacatcacacgataatactataacgaaaaacgaaactcacacgataatactataacgaaaaacgaaactcacacgataatactataacgaaaaacgaa

SEQ ID NO: 16323 - DNA, 552 bp, Artificial Sequence
  chemically treated genomic DNA (Homo sapiens) CpG-island No: 16323
cggtaatgttttgacgggaggcggagtttatacggtaatgattttttcggtgaggatcgggtacgtatgtaattagttgtgttaaatcgatttttttggatgcggcgaagggatcggggaggttatgtataacggtaatgttatgtcgggagacggagtttatacggtaaagtatttggaacgtggaatgttacggacgatttgtattatcgagtgaaatcgtttagtggacgcggaggttggagttgtatacggtgaatgttgtgatagggaggacggagtttatattaacggtgaatgtttgagacgggagacggagtttacgacggtatatgattttggatagggagatcggagtttatacggtaatgtttttgacgggagtcggagtttatacggtaatgttcggacgggaggcggagtattataacggtaatgtttagacgggaggcggagtattatacggtaatgttgtgacgggaggcggagtttatacggtaatgttgtgacgggaggcggagtttatacggtaatgttgtgacgggaggcgga

SEQ ID NO: 16324 - DNA, 552 bp, Artificial Sequence
  chemically treated genomic DNA (Homo sapiens) CpG-island No: 16324
tccgcctcccgtcacaacattaccgtataaactccgcctcccgtcacaacattaccgtataaactccgcctcccgtcacaacattaccgtataatactccgcctcccgtctaaacattaccgttataatactccgcctcccgtccgaacattaccgtataaactccgactcccgtcaaaaacattaccgtataaactccgatctccctatccaaaatcatataccgtcgtaaactccgtctcccgtctcaaacattcaccgttaatataaactccgtcctccctatcacaacattcaccgtatacaactccaacctccgcgtccactaaacgatttcactcgataatacaaatcgtccgtaacattccacgttccaaatactttaccgtataaactccgtctcccgacataacattaccgttatacataacctccccgatcccttcgccgcatccaaaaaaatcgatttaacacaactaattacatacgtacccgatcctcaccgaaaaaatcattaccgtataaactccgcctcccgtcaaaacattaccg

SEQ ID NO: 16325 - DNA, 582 bp, Artificial Sequence
  chemically treated genomic DNA (Homo sapiens) CpG-island No: 16325
cggtgtcgttcgtcgtgcgtcgtcgtcgtttgattcgcgtgttttcggattaatagtaggagagcggatattatatacgatcgtatggattaggcggcgtaggacgttcgacgacgcgttaagtatatttgcggatagaggcgcgcgggatttcgggaatagtgatttgtttgttcgttcgtacgaggttagatagcggaatagatttatttagcgtagagttgacgttatgtgatattaagtatcgagggtacgtaattggatagagcgatagcgggggataatcgcgatttgagatattcgcgttcggaattcgagacgcggttgtaagaagaggattaaaatatttgtagtatagagtaaatacggaaacgggaatgaatgtaggtgtatagtaaggtaaacggatttcgaacgggtagataagatatcgaaagttcggagttcgatgagtatcgattcgatcgggagtgtcgtgtagataaatatagggaggaatagagatattatcgtgagaatcgttaaagatgtaggattttttaggtaacgattataaaataggtacgattgggtgagtataaa

SEQ ID NO: 16326 - DNA, 582 bp, Artificial Sequence
  chemically treated genomic DNA (Homo sapiens) CpG-island No: 16326
tttatactcacccaatcgtacctattttataatcgttacctaaaaaatcctacatctttaacgattctcacgataatatctctattcctccctatatttatctacacgacactcccgatcgaatcgatactcatcgaactccgaactttcgatatcttatctacccgttcgaaatccgtttaccttactatacacctacattcattcccgtttccgtatttactctatactacaaatattttaatcctcttcttacaaccgcgtctcgaattccgaacgcgaatatctcaaatcgcgattatcccccgctatcgctctatccaattacgtaccctcgatacttaatatcacataacgtcaactctacgctaaataaatctattccgctatctaacctcgtacgaacgaacaaacaaatcactattcccgaaatcccgcgcgcctctatccgcaaatatacttaacgcgtcgtcgaacgtcctacgccgcctaatccatacgatcgtatataatatccgctctcctactattaatccgaaaacacgcgaatcaaacgacgacgacgcacgacgaacgacaccg

SEQ ID NO: 16327 - DNA, 582 bp, Artificial Sequence
  chemically treated genomic DNA (Homo sapiens) CpG-island No: 16327
tttgtgtttatttagtcgtatttattttgtggtcgttatttggagggttttatatttttggcggtttttacggtggtgtttttgtttttttttgtatttatttatacgatattttcggtcgggtcggtatttatcgggtttcggattttcggtgttttgtttattcgttcggggttcgtttgttttgttgtgtatttgtatttattttcgttttcgtgtttgttttgtgttgtaggtgttttggttttttttttgtagtcgcgtttcgggtttcggacgcgggtgttttaggtcgcggttatttttcgttgtcgttttgtttagttgcgtattttcggtgtttgatgttatatggcgttagttttgcgttaagtggatttgtttcgttatttggtttcgtacgggcggataggtagattattgttttcgggatttcgcgcgtttttgttcgtaggtatgtttgacgcgtcgtcgggcgttttgcgtcgtttggtttatacggtcgtgtgtagtattcgtttttttgttgttagttcggagatacgcgggttaagcggcgacggcgtacgacggacgatatcg

SEQ ID NO: 16328 - DNA, 582 bp, Artificial Sequence
  chemically treated genomic DNA (Homo sapiens) CpG-island No: 16328
cgatatcgtccgtcgtacgccgtcgccgcttaacccgcgtatctccgaactaacaacaaaaaaacgaatactacacacgaccgtataaaccaaacgacgcaaaacgcccgacgacgcgtcaaacatacctacgaacaaaaacgcgcgaaatcccgaaaacaataatctacctatccgcccgtacgaaaccaaataacgaaacaaatccacttaacgcaaaactaacgccatataacatcaaacaccgaaaatacgcaactaaacaaaacgacaacgaaaaataaccgcgacctaaaacacccgcgtccgaaacccgaaacgcgactacaaaaaaaaaaccaaaacacctacaacacaaaacaaacacgaaaacgaaaataaatacaaatacacaacaaaacaaacgaaccccgaacgaataaacaaaacaccgaaaatccgaaacccgataaataccgacccgaccgaaaatatcgtataaataaatacaaaaaaaaacaaaaacaccaccgtaaaaaccgccaaaaatataaaaccctccaaataacgaccacaaaataaatacgactaaataaacacaaa

SEQ ID NO: 16329 - DNA, 519 bp, Artificial Sequence
  chemically treated genomic DNA (Homo sapiens) CpG-island No: 16329
gtattcgtttattatttgcgttcgaggatgcgttcggggtgtcgtattcgattattatttgcgtaggaggatgcgttcgtcgagtcgtattcgtttattaattgcgtaggaggatgcgttcgtcgagtcgtattcgtttattatttgcgtaggaggatgcgttcgtcgagtcgtattcgttgattatttgcgtaggaggatgcgttcgttcggagtgcgttaatcgcgtttcgatcgatttgcgatacgtaagatgtcgttgcgtcgagtcgtattcgtttattatttgcgtaggaggatgcgttcgtcgagtcgtattcgtttattatttgcgtaggaggatgcgttcgtcgagtcgtattcgtttattatttgtatacgaagatgcgttcgtcgagtggtatcggtgtattttttgcggcgcgtgagtaatgatatttgttaagattgaatagtattttataggtgggtcgtgaaggtagggcgtgcgagggttagcgtaggggttattatttgatg

SEQ ID NO: 16330 - DNA, 519 bp, Artificial Sequence
  chemically treated genomic DNA (Homo sapiens) CpG-island No: 16330
catcaaataataacccctacgctaaccctcgcacgccctaccttcacgacccacctataaaatactattcaatcttaacaaatatcattactcacgcgccgcaaaaaatacaccgataccactcgacgaacgcatcttcgtatacaaataataaacgaatacgactcgacgaacgcatcctcctacgcaaataataaacgaatacgactcgacgaacgcatcctcctacgcaaataataaacgaatacgactcgacgcaacgacatcttacgtatcgcaaatcgatcgaaacgcgattaacgcactccgaacgaacgcatcctcctacgcaaataatcaacgaatacgactcgacgaacgcatcctcctacgcaaataataaacgaatacgactcgacgaacgcatcctcctacgcaattaataaacgaatacgactcgacgaacgcatcctcctacgcaaataataatcgaatacgacaccccgaacgcatcctcgaacgcaaataataaacgaatac

SEQ ID NO: 16331 - DNA, 519 bp, Artificial Sequence
  chemically treated genomic DNA (Homo sapiens) CpG-island No: 16331
tattagatggtgatttttacgttgattttcgtacgttttgtttttacggtttatttgtaaggtattgtttagttttggtaagtgttattatttacgcgtcgtaaagggtgtatcggtgttattcgacgaacgtattttcgtatgtaaatggtgaacgggtgcgattcgacgaacgtatttttttacgtaaatggtgaacgggtgcgattcgacgaacgtatttttttacgtaaatggtgaacgggtgcgattcgacgtaacggtattttgcgtatcgtaaatcggtcgaaacgcggttagcgtatttcgagcgaacgtatttttttacgtaaatggttaacgggtgcgattcgacgaacgtatttttttacgtaaatggtgaacgggtgcgattcggcgaacgtatttttttacgtaattggtgaacgggtgcgattcgacgaacgtatttttttacgtaaatggtgatcgggtgcgatatttcgaacgtattttcgaacgtaaatggtgaacgggtgt

SEQ ID NO: 16332 - DNA, 519 bp, Artificial Sequence
  chemically treated genomic DNA (Homo sapiens) CpG-island No: 16332
acacccgttcaccatttacgttcgaaaatacgttcgaaatatcgcacccgatcaccatttacgtaaaaaaatacgttcgtcgaatcgcacccgttcaccaattacgtaaaaaaatacgttcgccgaatcgcacccgttcaccatttacgtaaaaaaatacgttcgtcgaatcgcacccgttaaccatttacgtaaaaaaatacgttcgctcgaaatacgctaaccgcgtttcgaccgatttacgatacgcaaaataccgttacgtcgaatcgcacccgttcaccatttacgtaaaaaaatacgttcgtcgaatcgcacccgttcaccatttacgtaaaaaaatacgttcgtcgaatcgcacccgttcaccatttacatacgaaaatacgttcgtcgaataacaccgatacaccctttacgacgcgtaaataataacacttaccaaaactaaacaataccttacaaataaaccgtaaaaacaaaacgtacgaaaatcaacgtaaaaatcaccatctaata

SEQ ID NO: 16333 - DNA, 619 bp, Artificial Sequence
  chemically treated genomic DNA (Homo sapiens) CpG-island No: 16333
gttcgcggtaattcgacgttttcggaatttttttatatttgtcgtgatgttaatttcgcgatataattttcggtacggatattttcggttttcggagtaggttgcgtcggagaaatttcgatacgtggtagatttttaaaacgagattcgtacgggcgggttttttatcgtatgtgcggtgatatttacgtcgcgtggcgtcgtcgtgcgcgtggtttttcgatttttatgtgcgttttgtattcgggcgtttattgtgttcgtttttttttatttttcgtatcggggtaagggttttgtaaggcgtgtggttaaatacgcgtttacgggtcgtgtatggtgttttttcggtgcggtttatcgtttgtacggtttttatgttgtgtttttgttattaattcgtgggtaatcggaatgcgtgtcgtattcggttatgggagggtgttcgttcggtagatcgatatagtattgggacgagtagtgtaaggtaacgaggaggtttagagcgtaatatttagagggtgcgttcgggtagtagagttatggttgttttatcgggttttaagggtatacggaacggtggttgtgtttttttaatgtttttttttgatttatagta

SEQ ID NO: 16334 - DNA, 619 bp, Artificial Sequence
  chemically treated genomic DNA (Homo sapiens) CpG-island No: 16334
tactataaatcaaaaaaaaacattaaaaaaacacaaccaccgttccgtatacccttaaaacccgataaaacaaccataactctactacccgaacgcaccctctaaatattacgctctaaacctcctcgttaccttacactactcgtcccaatactatatcgatctaccgaacgaacaccctcccataaccgaatacgacacgcattccgattacccacgaattaataacaaaaacacaacataaaaaccgtacaaacgataaaccgcaccgaaaaaacaccatacacgacccgtaaacgcgtatttaaccacacgccttacaaaacccttaccccgatacgaaaaataaaaaaaaacgaacacaataaacgcccgaatacaaaacgcacataaaaatcgaaaaaccacgcgcacgacgacgccacgcgacgtaaatatcaccgcacatacgataaaaaacccgcccgtacgaatctcgttttaaaaatctaccacgtatcgaaatttctccgacgcaacctactccgaaaaccgaaaatatccgtaccgaaaattatatcgcgaaattaacatcacgacaaatataaaaaaattccgaaaacgtcgaattaccgcgaac

SEQ ID NO: 16335 - DNA, 619 bp, Artificial Sequence
  chemically treated genomic DNA (Homo sapiens) CpG-island No: 16335
tgttgtaagttaagaaaaaatattgagaaaatataattatcgtttcgtatatttttgggattcgataaggtaattatggttttattgttcgggcgtattttttaggtgttgcgttttaaattttttcgttgttttatattgttcgttttagtgttatatcggtttatcgggcggatatttttttatggtcgaatacggtacgtatttcgattatttacgggttgatgataaagatataatatggggatcgtatagacggtaaatcgtatcgggaagatattatatacggttcgtgagcgcgtatttgattatacgttttataaagtttttgtttcgatacggggaatgaaagggaacggatatagtaaacgttcgggtataggacgtatatgggggtcgggaaattacgcgtacgacgacgttacgcgacgtggatgttatcgtatatgcggtggaaaattcgttcgtgcggatttcgttttaagagtttattacgtgtcggggttttttcggcgtaatttatttcggaaatcggagatgttcgtgtcggagattatatcgcggaattggtattacggtaaatgtggggaggtttcggagacgtcgaattatcgcgggt

SEQ ID NO: 16336 - DNA, 619 bp, Artificial Sequence
  chemically treated genomic DNA (Homo sapiens) CpG-island No: 16336
acccgcgataattcgacgtctccgaaacctccccacatttaccgtaataccaattccgcgatataatctccgacacgaacatctccgatttccgaaataaattacgccgaaaaaaccccgacacgtaataaactcttaaaacgaaatccgcacgaacgaattttccaccgcatatacgataacatccacgtcgcgtaacgtcgtcgtacgcgtaatttcccgacccccatatacgtcctatacccgaacgtttactatatccgttccctttcattccccgtatcgaaacaaaaactttataaaacgtataatcaaatacgcgctcacgaaccgtatataatatcttcccgatacgatttaccgtctatacgatccccatattatatctttatcatcaacccgtaaataatcgaaatacgtaccgtattcgaccataaaaaaatatccgcccgataaaccgatataacactaaaacgaacaatataaaacaacgaaaaaatttaaaacgcaacacctaaaaaatacgcccgaacaataaaaccataattaccttatcgaatcccaaaaatatacgaaacgataattatattttctcaatattttttcttaacttacaaca

SEQ ID NO: 16337 - DNA, 520 bp, Artificial Sequence
  chemically treated genomic DNA (Homo sapiens) CpG-island No: 16337
  unsure (492, 509)
gaggcgagcgagttaggcgcgagttttttgggattgtagcggcggttttaggtcgcgttttgcgttaatttttcgtacgtgttcgtagttttttggttatttagcgtcgtagggaaggcgttgggtttttttttttatttgtatcgggacgttaagggtttggcgcgtcgcgatttagggggcgggggcgggtttcgcgtatgcgcgttgcgtttggcgggcgtgagggcgggtcgttgcggcggcggcggcggcggttatcgaatcgcggttatagagtttgtaatagtaatagagttatggtttaagttggttagcggggcgggtaggtagtagacgcggtaggcgcgcgtttttcggtaggggagttcgagattttagaattttaagaaagagaggggcgagaggtggtcgaggcgggcgggttggggtattgcgtttttttaacggcgcggattttttttgaaaattaatattaaaaaaaaaaaagtngaggatttagaggtttngttggggggta

SEQ ID NO: 16338 - DNA, 520 bp, Artificial Sequence
  chemically treated genomic DNA (Homo sapiens) CpG-island No: 16338
  unsure (12, 29)
taccccccaacnaaacctctaaatcctcnacttttttttttttaatattaattttcaaaaaaaatccgcgccgttaaaaaaacgcaataccccaacccgcccgcctcgaccacctctcgcccctctctttcttaaaattctaaaatctcgaactcccctaccgaaaaacgcgcgcctaccgcgtctactacctacccgccccgctaaccaacttaaaccataactctattactattacaaactctataaccgcgattcgataaccgccgccgccgccgccgcaacgacccgccctcacgcccgccaaacgcaacgcgcatacgcgaaacccgcccccgccccctaaatcgcgacgcgccaaacccttaacgtcccgatacaaataaaaaaaaaaacccaacgccttccctacgacgctaaataaccaaaaaactacgaacacgtacgaaaaattaacgcaaaacgcgacctaaaaccgccgctacaatcccaaaaaactcgcgcctaactcgctcgcctc

SEQ ID NO: 16339 - DNA, 520 bp, Artificial Sequence
  chemically treated genomic DNA (Homo sapiens) CpG-island No: 16339
  unsure (12, 29)
tattttttagtnaagtttttgggtttttngtttttttttttttaatattaatttttaaagaggattcgcgtcgttgggagagcgtagtgttttagttcgttcgtttcggttatttttcgttttttttttttttaaaattttgaggtttcgggtttttttgtcggggggcgcgcgtttgtcgcgtttgttgtttgttcgtttcgttggttagtttgagttatggttttgttattgttatagattttgtggtcgcggttcggtagtcgtcgtcgtcgtcgtcgtagcggttcgtttttacgttcgttaggcgtagcgcgtatgcgcgaggttcgttttcgttttttaggtcgcggcgcgttaggtttttggcgtttcggtataaatgaaggagggggtttagcgttttttttgcggcgttggatggttagggagttgcgggtacgtgcgaaagattggcgtagagcgcgatttggggtcgtcgttgtaattttaggagattcgcgtttggttcgttcgtttt

SEQ ID NO: 16340 - DNA, 520 bp, Artificial Sequence
  chemically treated genomic DNA (Homo sapiens) CpG-island No: 16340
  unsure (492, 509)
aaaacgaacgaaccaaacgcgaatctcctaaaattacaacgacgaccccaaatcgcgctctacgccaatctttcgcacgtacccgcaactccctaaccatccaacgccgcaaaaaaaacgctaaaccccctccttcatttataccgaaacgccaaaaacctaacgcgccgcgacctaaaaaacgaaaacgaacctcgcgcatacgcgctacgcctaacgaacgtaaaaacgaaccgctacgacgacgacgacgacgactaccgaaccgcgaccacaaaatctataacaataacaaaaccataactcaaactaaccaacgaaacgaacaaacaacaaacgcgacaaacgcgcgccccccgacaaaaaaacccgaaacctcaaaattttaaaaaaaaaaaaaacgaaaaataaccgaaacgaacgaactaaaacactacgctctcccaacgacgcgaatcctctttaaaaattaatattaaaaaaaaaaaaacnaaaaacccaaaaacttnactaaaaaata

SEQ ID NO: 16341 - DNA, 1639 bp, Artificial Sequence
  chemically treated genomic DNA (Homo sapiens) CpG-island No: 16341
cgtttcgttcgtgcgggatattagtttttaggatgcgttaatcgtagatcgtttaagcgtaagaggtggcgagaggttattacggttgtttaatagttgcgtttttaggttgtttggtgtgacgtagtagttttcgttcggattttgaggtttggcgtttcgattgagtcgaggtttgtgttattcgatattttttgcgattcggttttttaggtttatttagcgcggtttttttcggtttttcgagttttatcgtagtttttttttattttcgttttttttcggttttttgttagtgttcgtcgcgatgtttttgcgtaattattttaagtgatattagcgtttatattcgtacggagcgagtttgaagtttttatttttcggaatttaacgtcgggtcgttaagggcgggtatttaagcgaggattagcggattaaggtcgcgattagagtttagcggttttcgcgtagttagagttcgatagtttttgcgtattcgtcgtgcgtatttttattcgtgcgcgtgcgcgtattcgttttttcgtttcgttttagtattaatcgttttttttttacgtttacgattttttaacgtagtttttttcgtttttcgcgcgcgagtagaaaggtttcggcgtgcgcgcgttcgttcgtttcgcgttttgtcgggaaggggagtgagtagaggcgtttacgtcgcgcgggaggcggaggcgacggcgatttcggtggcggcggcggttacgacggagacggttgcgttcgtttgttttttcggcgttatggcggttgtcgggggtagataagcggagggagcgggagcgcgcgcgcgacggcggcggcggcggcggcgacgattggttatttatagtttttgttgttttcgtttttggtgttttaataatgaattgttagttttatttcgtaggggatcgcgcgttggtgttgcggatcggggtttttttttttttttcgcgtttgtttttttttttttttttcgtacggatttttgtttatttcgagacgtcggagttttaggattgggcggcggagatttcgggtttgggtgcgggggaggtcgtttattcgagtcggtttttttcgtttcgttaagttcgtcggtaagaaagggggcggcgggcgggttaggatgtggcggagaggataggaatcggtcgggcggagggcgggcgcggcgcggtgtttaggcggcggtttagcggtcgggtgaaggtcgggtggttttgtgagtgtcggtggcggtgtacgggtttggcgcgtagggggcgtgtgagcggcgagtataggtcggggtcgtagaacgtatttttgcgtcggttcggcggttttgtttcggttttttcggtttggtgtcgatcgggtcgcgagaggagattcgcgaatggttagtatttagtcggtgcgtgggttttgtcgcgattcgggtttttagtacgtggggagcggcgggagggggagggggcggcggttcgggcgagtttgggagggcgcggggcgggtttgcgggaagtttgaggcgggaagagggatttttggatcgggatggaggttttgggagaggggggtaggttcgcgagggaggttgattggagcgcgttggatggatgagtgaggatgg

SEQ ID NO: 16342 - DNA, 1639 bp, Artificial Sequence
  chemically treated genomic DNA (Homo sapiens) CpG-island No: 16342
ccatcctcactcatccatccaacgcgctccaatcaacctccctcgcgaacctacccccctctcccaaaacctccatcccgatccaaaaatccctcttcccgcctcaaacttcccgcaaacccgccccgcgccctcccaaactcgcccgaaccgccgccccctccccctcccgccgctccccacgtactaaaaacccgaatcgcgacaaaacccacgcaccgactaaatactaaccattcgcgaatctcctctcgcgacccgatcgacaccaaaccgaaaaaaccgaaacaaaaccgccgaaccgacgcaaaaatacgttctacgaccccgacctatactcgccgctcacacgccccctacgcgccaaacccgtacaccgccaccgacactcacaaaaccacccgaccttcacccgaccgctaaaccgccgcctaaacaccgcgccgcgcccgccctccgcccgaccgattcctatcctctccgccacatcctaacccgcccgccgccccctttcttaccgacgaacttaacgaaacgaaaaaaaccgactcgaataaacgacctcccccgcacccaaacccgaaatctccgccgcccaatcctaaaactccgacgtctcgaaataaacaaaaatccgtacgaaaaaaaaaaaaaaaaacaaacgcgaaaaaaaaaaaaaaaccccgatccgcaacaccaacgcgcgatcccctacgaaataaaactaacaattcattattaaaacaccaaaaacgaaaacaacaaaaactataaataaccaatcgtcgccgccgccgccgccgccgtcgcgcgcgcgctcccgctccctccgcttatctacccccgacaaccgccataacgccgaaaaaacaaacgaacgcaaccgtctccgtcgtaaccgccgccgccaccgaaatcgccgtcgcctccgcctcccgcgcgacgtaaacgcctctactcactccccttcccgacaaaacgcgaaacgaacgaacgcgcgcacgccgaaacctttctactcgcgcgcgaaaaacgaaaaaaactacgttaaaaaatcgtaaacgtaaaaaaaaaacgattaatactaaaacgaaacgaaaaaacgaatacgcgcacgcgcacgaataaaaatacgcacgacgaatacgcaaaaactatcgaactctaactacgcgaaaaccgctaaactctaatcgcgaccttaatccgctaatcctcgcttaaatacccgcccttaacgacccgacgttaaattccgaaaaataaaaacttcaaactcgctccgtacgaatataaacgctaatatcacttaaaataattacgcaaaaacatcgcgacgaacactaacaaaaaaccgaaaaaaaacgaaaataaaaaaaaactacgataaaactcgaaaaaccgaaaaaaaccgcgctaaataaacctaaaaaaccgaatcgcaaaaaatatcgaataacacaaacctcgactcaatcgaaacgccaaacctcaaaatccgaacgaaaactactacgtcacaccaaacaacctaaaaacgcaactattaaacaaccgtaataacctctcgccacctcttacgcttaaacgatctacgattaacgcatcctaaaaactaatatcccgcacgaacgaaacg

SEQ ID NO: 16343 - DNA, 1639 bp, Artificial Sequence
  chemically treated genomic DNA (Homo sapiens) CpG-island No: 16343
ttatttttatttatttatttagcgcgttttaattagtttttttcgcggatttgttttttttttttagggtttttatttcggtttaggagttttttttttcgttttaaatttttcgtagattcgtttcgcgtttttttaggttcgttcgagtcgtcgttttttttttttttcgtcgttttttacgtgttgggagttcgggtcgcggtaggatttacgtatcggttaagtgttagttattcgcgggttttttttcgcggttcggtcggtattaagtcgaagaggtcggggtagggtcgtcgggtcggcgtaaggatgcgttttgcggtttcggtttgtattcgtcgtttatacgttttttgcgcgttaggttcgtatatcgttatcggtatttatagagttattcggtttttattcggtcgttgggtcgtcgtttgggtatcgcgtcgcgttcgtttttcgttcggtcggtttttgtttttttcgttatattttgattcgttcgtcgtttttttttttatcggcgggtttggcggggcggagggagtcgattcgggtggacggtttttttcgtatttaggttcgggattttcgtcgtttagttttagggtttcggcgtttcggggtaagtaagagttcgtgcgggggagggggaaggggatagacgcggaggggaaggggaagtttcggttcgtagtattaacgcgcgattttttgcggagtggagttaataatttattattgaagtattaagggcgagggtagtaagagttataagtaattagtcgtcgtcgtcgtcgtcgtcgtcgtcgcgcgcgcgttttcgtttttttcgtttatttgttttcggtagtcgttatgacgtcgagaaagtaagcgagcgtaatcgttttcgtcgtagtcgtcgtcgttatcgaggtcgtcgtcgttttcgtttttcgcgcgacgtaagcgtttttgtttattttttttttcgatagagcgcgaggcgggcgggcgcgcgtacgtcgaagtttttttgttcgcgcgcgggaggcgggagggattacgttgaagggtcgtgggcgtaggaaaaaagcgattggtgttggggcggggcgggggggcgagtgcgcgtacgcgtacgaatgggagtgcgtacggcggatgcgtagaggttgtcggattttgattgcgcggagatcgttggattttggtcgcggttttagttcgttgattttcgtttgggtgttcgtttttagcggttcggcgttgaatttcgggaagtgggagttttaggttcgtttcgtgcgggtatgggcgttaatgttatttgggatggttgcgtaaggatatcgcggcggatattgataaggaatcggggaggaacgggggtggggagagattgcgatgggattcgggaagtcgggaagggtcgcgttgaataagtttaaggggtcgggtcgtaaggagtgtcgggtagtataggtttcggtttagtcggagcgttaggttttagggttcgggcgggggttgttgcgttatattaggtagtttgggaacgtaattgttgggtaatcgtggtggtttttcgttattttttacgtttgggcgatttgcgattgacgtattttgggagttgatgtttcgtacgggcggggcg

SEQ ID NO: 16344 - DNA, 1639 bp, Artificial Sequence
  chemically treated genomic DNA (Homo sapiens) CpG-island No: 16344
cgccccgcccgtacgaaacatcaactcccaaaatacgtcaatcgcaaatcgcccaaacgtaaaaaataacgaaaaaccaccacgattacccaacaattacgttcccaaactacctaatataacgcaacaacccccgcccgaaccctaaaacctaacgctccgactaaaccgaaacctatactacccgacactccttacgacccgaccccttaaacttattcaacgcgacccttcccgacttcccgaatcccatcgcaatctctccccacccccgttcctccccgattccttatcaatatccgccgcgatatccttacgcaaccatcccaaataacattaacgcccatacccgcacgaaacgaacctaaaactcccacttcccgaaattcaacgccgaaccgctaaaaacgaacacccaaacgaaaatcaacgaactaaaaccgcgaccaaaatccaacgatctccgcgcaatcaaaatccgacaacctctacgcatccgccgtacgcactcccattcgtacgcgtacgcgcactcgcccccccgccccgccccaacaccaatcgcttttttcctacgcccacgacccttcaacgtaatccctcccgcctcccgcgcgcgaacaaaaaaacttcgacgtacgcgcgcccgcccgcctcgcgctctatcgaaaaaaaaaataaacaaaaacgcttacgtcgcgcgaaaaacgaaaacgacgacgacctcgataacgacgacgactacgacgaaaacgattacgctcgcttactttctcgacgtcataacgactaccgaaaacaaataaacgaaaaaaacgaaaacgcgcgcgcgacgacgacgacgacgacgacgacgactaattacttataactcttactaccctcgcccttaatacttcaataataaattattaactccactccgcaaaaaatcgcgcgttaatactacgaaccgaaacttccccttcccctccgcgtctatccccttccccctcccccgcacgaactcttacttaccccgaaacgccgaaaccctaaaactaaacgacgaaaatcccgaacctaaatacgaaaaaaaccgtccacccgaatcgactccctccgccccgccaaacccgccgataaaaaaaaaaacgacgaacgaatcaaaatataacgaaaaaaacaaaaaccgaccgaacgaaaaacgaacgcgacgcgatacccaaacgacgacccaacgaccgaataaaaaccgaataactctataaataccgataacgatatacgaacctaacgcgcaaaaaacgtataaacgacgaatacaaaccgaaaccgcaaaacgcatccttacgccgacccgacgaccctaccccgacctcttcgacttaataccgaccgaaccgcgaaaaaaaacccgcgaataactaacacttaaccgatacgtaaatcctaccgcgacccgaactcccaacacgtaaaaaacgacgaaaaaaaaaaaaaacgacgactcgaacgaacctaaaaaaacgcgaaacgaatctacgaaaaatttaaaacgaaaaaaaaaactcctaaaccgaaataaaaaccctaaaaaaaaaaaacaaatccgcgaaaaaaactaattaaaacgcgctaaataaataaataaaaataa

SEQ ID NO: 16345 - DNA, 603 bp, Artificial Sequence
  chemically treated genomic DNA (Homo sapiens) CpG-island No: 16345
gggcggcgggcgagggcggtaggagagggcgacgggtagtttcgcgtcgagaaagtttcgagtatttgagggttttgtttgttggttttttttgcggcggttggattgaggagcggatggttgaggagttagagaggcggcggttacggtagttgtattcggttcggtttcgggcgtttttttcgttttttcgtttttgtagacggtttataaaaaaattttgttttgtattcggaattttcgtttttatacggattcgagcgtgataaggttttgtcgtttcgtttattaggttcggtacgtttttttattggttaggatttttttacgatagtttcggcgtttcgtttagttacgtttattattggatggagtttcggaggggcgggaagggggcggggtcgcggttttaatagataggggcggggtttttttttttcggagtcgggcgtgggtcggggggtcgtggtcgggtgtagcggcgggcgaattgggggcgcgggtcgcgtgtagcgggagggggaggggttggtcgggttttttcgggtgtggcggagttttggtttgcggattatcgtaatttttagtatatttgcgggggtt

SEQ ID NO: 16346 - DNA, 603 bp, Artificial Sequence
  chemically treated genomic DNA (Homo sapiens) CpG-island No: 16346
aacccccgcaaatatactaaaaattacgataatccgcaaaccaaaactccgccacacccgaaaaaacccgaccaacccctccccctcccgctacacgcgacccgcgcccccaattcgcccgccgctacacccgaccacgaccccccgacccacgcccgactccgaaaaaaaaaaaccccgcccctatctattaaaaccgcgaccccgcccccttcccgcccctccgaaactccatccaataataaacgtaactaaacgaaacgccgaaactatcgtaaaaaaatcctaaccaataaaaaaacgtaccgaacctaataaacgaaacgacaaaaccttatcacgctcgaatccgtataaaaacgaaaattccgaatacaaaacaaaatttttttataaaccgtctacaaaaacgaaaaaacgaaaaaaacgcccgaaaccgaaccgaatacaactaccgtaaccgccgcctctctaactcctcaaccatccgctcctcaatccaaccgccgcaaaaaaaaccaacaaacaaaaccctcaaatactcgaaactttctcgacgcgaaactacccgtcgccctctcctaccgccctcgcccgccgccc

SEQ ID NO: 16347 - DNA, 603 bp, Artificial Sequence
  chemically treated genomic DNA (Homo sapiens) CpG-island No: 16347
ggttttcgtaggtgtgttgggagttgcgatggttcgtaggttaggatttcgttatattcgaggggattcggttagtttttttttttttcgttgtacgcggttcgcgtttttaattcgttcgtcgttgtattcggttacggtttttcggtttacgttcggtttcgggaggaaaaggtttcgtttttatttgttggagtcgcgatttcgtttttttttcgttttttcgaggttttatttaatagtgagcgtggttgggcgggacgtcgaggttgtcgtgagggggttttgattaatggggaagcgtgtcgggtttggtgggcggggcggtaaggttttgttacgttcgggttcgtgtgaaaacgggggtttcgagtgtaaagtaaagtttttttgtaaatcgtttgtaaaggcgggggggcgaagaaggcgttcgagatcgggtcgagtgtagttgtcgtggtcgtcgtttttttagttttttagttattcgttttttagtttagtcgtcgtagaggagattagtaagtagagtttttagatgttcggagttttttcggcgcgaagttgttcgtcgtttttttttgtcgttttcgttcgtcgttt

SEQ ID NO: 16348 - DNA, 603 bp, Artificial Sequence
  chemically treated genomic DNA (Homo sapiens) CpG-island No: 16348
aaacgacgaacgaaaacgacaaaaaaaaacgacgaacaacttcgcgccgaaaaaactccgaacatctaaaaactctacttactaatctcctctacgacgactaaactaaaaaacgaataactaaaaaactaaaaaaacgacgaccacgacaactacactcgacccgatctcgaacgccttcttcgcccccccgcctttacaaacgatttacaaaaaaactttactttacactcgaaacccccgttttcacacgaacccgaacgtaacaaaaccttaccgccccgcccaccaaacccgacacgcttccccattaatcaaaaccccctcacgacaacctcgacgtcccgcccaaccacgctcactattaaataaaacctcgaaaaaacgaaaaaaaaacgaaatcgcgactccaacaaataaaaacgaaaccttttcctcccgaaaccgaacgtaaaccgaaaaaccgtaaccgaatacaacgacgaacgaattaaaaacgcgaaccgcgtacaacgaaaaaaaaaaaaactaaccgaatcccctcgaatataacgaaatcctaacctacgaaccatcgcaactcccaacacacctacgaaaacc

SEQ ID NO: 16349 - DNA, 615 bp, Artificial Sequence
  chemically treated genomic DNA (Homo sapiens) CpG-island No: 16349
agcgtatagggcgggacgggagtaggtatgaagagatggagatatgggcgacgattcgcggaattaacggtgtgtaagtttaggtgatatacgttcggttacggtagagaggtggatgggcgaacgatacgcgagatgatgttcgcgggattgaatagtaatattaggcgtcgtatgtgggatcgacgtgatgcggtataggtcgcgagcggtggcgagtagttgtgaataggaggatgggtacgtgggattaaggacgggagagaagagattggttatgaaagacgtgggggtatcggagtttgcgggcgggtggggagtgattggttgtgcggttttgcggcggcgacgcgggggatagaagaacgtgaaaataaagagaatcgcggacgtcgacgggcgtggtagtgaagaacgtgcgcgaggtggtaaaatcgggatatgggggttttgcgagagagtgggagatacgataaagagatagatgttagatggtggggaggattggaagggatgttcgttgcgcgagcgtcgggcgggtgtgtcgtgcgcgtgttttatatattatatatatatattatatatgttatatatatatattatatttattagttt

SEQ ID NO: 16350 - DNA, 615 bp, Artificial Sequence
  chemically treated genomic DNA (Homo sapiens) CpG-island No: 16350
aaactaataaatataatatatatatataacatatataatatatatatataatatataaaacacgcgcacgacacacccgcccgacgctcgcgcaacgaacatcccttccaatcctccccaccatctaacatctatctctttatcgtatctcccactctctcgcaaaacccccatatcccgattttaccacctcgcgcacgttcttcactaccacgcccgtcgacgtccgcgattctctttattttcacgttcttctatcccccgcgtcgccgccgcaaaaccgcacaaccaatcactccccacccgcccgcaaactccgatacccccacgtctttcataaccaatctcttctctcccgtccttaatcccacgtacccatcctcctattcacaactactcgccaccgctcgcgacctataccgcatcacgtcgatcccacatacgacgcctaatattactattcaatcccgcgaacatcatctcgcgtatcgttcgcccatccacctctctaccgtaaccgaacgtatatcacctaaacttacacaccgttaattccgcgaatcgtcgcccatatctccatctcttcatacctactcccgtcccgccctatacgct

SEQ ID NO: 16351 - DNA, 615 bp, Artificial Sequence
  chemically treated genomic DNA (Homo sapiens) CpG-island No: 16351
aaattggtaggtgtggtatgtgtgtgtggtatgtgtggtatgtgtgtgtggtgtgtgaagtacgcgtacggtatattcgttcggcgttcgcgtagcgagtattttttttagttttttttattatttgatatttatttttttatcgtgttttttattttttcgtaaggtttttatatttcggttttattatttcgcgtacgttttttattattacgttcgtcggcgttcgcggttttttttatttttacgtttttttatttttcgcgtcgtcgtcgtagggtcgtataattaattattttttattcgttcgtaaatttcgatatttttacgttttttatagttaattttttttttttcgtttttgattttacgtatttatttttttgtttatagttattcgttatcgttcgcgatttatatcgtattacgtcggttttatatacggcgtttagtgttattgtttaatttcgcggatattatttcgcgtatcgttcgtttatttatttttttatcgtgatcgagcgtgtgttatttaagtttatatatcgttagtttcgcgggtcgtcgtttatgtttttatttttttatatttgttttcgtttcgttttatacgtt

SEQ ID NO: 16352 - DNA, 615 bp, Artificial Sequence
  chemically treated genomic DNA (Homo sapiens) CpG-island No: 16352
aacgtataaaacgaaacgaaaacaaatataaaaaaataaaaacataaacgacgacccgcgaaactaacgatatataaacttaaataacacacgctcgatcacgataaaaaaataaataaacgaacgatacgcgaaataatatccgcgaaattaaacaataacactaaacgccgtatataaaaccgacgtaatacgatataaatcgcgaacgataacgaataactataaacaaaaaaataaatacgtaaaatcaaaaacgaaaaaaaaaaaattaactataaaaaacgtaaaaatatcgaaatttacgaacgaataaaaaataattaattatacgaccctacgacgacgacgcgaaaaataaaaaaacgtaaaaataaaaaaaaccgcgaacgccgacgaacgtaataataaaaaacgtacgcgaaataataaaaccgaaatataaaaaccttacgaaaaaataaaaaacacgataaaaaaataaatatcaaataataaaaaaaactaaaaaaaatactcgctacgcgaacgccgaacgaatataccgtacgcgtacttcacacaccacacacacataccacacataccacacacacataccacacctaccaattt

SEQ ID NO: 16353 - DNA, 613 bp, Artificial Sequence
  chemically treated genomic DNA (Homo sapiens) CpG-island No: 16353
ggggcgtgcggtacgggaggcgtgggcggcggcgcgcggatgcgcgttttggtgcggagcgcgcgttgcgggggagggcggcggggagcgtcggtatgacggtcgggggttgcgttcgcgtcggatagtggttggggtcgtgcgggcgcgtgtagcgggtggcgtgacgcggtgcgcgcggggggtgcgcgggtcggggcgtgcggttatcgtcgtttagtgtcgtgagggcgttcgggaagtcgatcggtattggggtcgtgtggtgttttggtgttcgcgtcgagaatcgtgtagtggatgcgcggcgggaggttgaggtcgcgcggtttagttacgggtgggcggaggtcgaatcgtgcgagaggcgttttacgcgggtggataggcgcgtaaggagggcgcggcgcgcgggttagcgaattatatcgcgatacgggcggggtcgcgcgcggggaaggcgttggtattgatgacgggcggcggtagggaagcgggtggtaggtcgggggtggagggcgagtgatagggggcgagtagtgtgcggttttcggatggcgatatacgtattgttgggtaattgagtgacgatgagggttaggtcggcgagtat

SEQ ID NO: 16354 - DNA, 613 bp, Artificial Sequence
  chemically treated genomic DNA (Homo sapiens) CpG-island No: 16354
atactcgccgacctaaccctcatcgtcactcaattacccaacaatacgtatatcgccatccgaaaaccgcacactactcgccccctatcactcgccctccacccccgacctaccacccgcttccctaccgccgcccgtcatcaataccaacgccttccccgcgcgcgaccccgcccgtatcgcgatataattcgctaacccgcgcgccgcgccctccttacgcgcctatccacccgcgtaaaacgcctctcgcacgattcgacctccgcccacccgtaactaaaccgcgcgacctcaacctcccgccgcgcatccactacacgattctcgacgcgaacaccaaaacaccacacgaccccaataccgatcgacttcccgaacgccctcacgacactaaacgacgataaccgcacgccccgacccgcgcaccccccgcgcgcaccgcgtcacgccacccgctacacgcgcccgcacgaccccaaccactatccgacgcgaacgcaacccccgaccgtcataccgacgctccccgccgccctcccccgcaacgcgcgctccgcaccaaaacgcgcatccgcgcgccgccgcccacgcctcccgtaccgcacgcccc

SEQ ID NO: 16355 - DNA, 613 bp, Artificial Sequence
  chemically treated genomic DNA (Homo sapiens) CpG-island No: 16355
atattcgtcggtttggtttttatcgttatttagttgtttagtaatacgtatatcgttattcggaaatcgtatattattcgttttttgttattcgttttttattttcggtttgttattcgtttttttatcgtcgttcgttattagtgttagcgtttttttcgcgcgcgatttcgttcgtgtcgcgatatagttcgttgattcgcgcgtcgcgttttttttacgcgtttatttattcgcgtggggcgtttttcgtacgattcggttttcgtttattcgtaattgagtcgcgcggttttaatttttcgtcgcgtatttattatacgattttcggcgcgaatattagggtattatacgattttaatgtcgatcggtttttcggacgtttttacggtattaagcggcggtggtcgtacgtttcggttcgcgtatttttcgcgcgtatcgcgttacgttattcgttgtacgcgttcgtacggttttaattattattcgacgcgaacgtagttttcgatcgttatgtcgacgtttttcgtcgttttttttcgtagcgcgcgtttcgtattaaagcgcgtattcgcgcgtcgtcgtttacgtttttcgtgtcgtacgtttt

SEQ ID NO: 16356 - DNA, 613 bp, Artificial Sequence
  chemically treated genomic DNA (Homo sapiens) CpG-island No: 16356
aaaacgtacgacacgaaaaacgtaaacgacgacgcgcgaatacgcgctttaatacgaaacgcgcgctacgaaaaaaaacgacgaaaaacgtcgacataacgatcgaaaactacgttcgcgtcgaataataattaaaaccgtacgaacgcgtacaacgaataacgtaacgcgatacgcgcgaaaaatacgcgaaccgaaacgtacgaccaccgccgcttaataccgtaaaaacgtccgaaaaaccgatcgacattaaaatcgtataataccctaatattcgcgccgaaaatcgtataataaatacgcgacgaaaaattaaaaccgcgcgactcaattacgaataaacgaaaaccgaatcgtacgaaaaacgccccacgcgaataaataaacgcgtaaaaaaaacgcgacgcgcgaatcaacgaactatatcgcgacacgaacgaaatcgcgcgcgaaaaaaacgctaacactaataacgaacgacgataaaaaaacgaataacaaaccgaaaataaaaaacgaataacaaaaaacgaataatatacgatttccgaataacgatatacgtattactaaacaactaaataacgataaaaaccaaaccgacgaatat

SEQ ID NO: 16357 - DNA, 756 bp, Artificial Sequence
  chemically treated genomic DNA (Homo sapiens) CpG-island No: 16357
ggtcgtttgttagggtcgggaaaggattttttatcgttattttcggggttcggtttttttttattaacgtttgttagttcgcgtggatttcgagttcggtttcggaaattagtttgattatttcgtttattttttaagttttttcgggcggcggtcggttagtttttatggtgcggtgagttaggttcggtcgtcgtttcggtcgttttgcgatgaatggttttgtttagaaggtcggcgtttaagcgacgttttcgttcgcgcgttcggggtttttaggtcgtttttcgtttcgtgtttttatattgcgaaacggacggtcggatgtttcgttttagggtcggggtcgtttgttttttgtcgatttggcgtagagtcgttttttgtattcggtttcgtgtcgttttggggttgtttatagtcgggttgtgttatcgagttgagttcggaatcgaatggcgggtcgcggaaaaggcggttaggttcgtaggggcgattgttcgaggttttagaatagcgttcggggagttttaggtcggtttcgaggggatcgcgggcgggataggaggggaatagttggtatcggcgttcggttttagttgttcgattgcggtgggcgggtaggtacgttttttcgtagttattcgcgtacgggtttttaaggcgttaagggtaatttatttggtcgttgtaagaaagcgattgcgtttttacgtttagttagtcgttttgtttatgagaattatttggagggta

SEQ ID NO: 16358 - DNA, 756 bp, Artificial Sequence
  chemically treated genomic DNA (Homo sapiens) CpG-island No: 16358
taccctccaaataattctcataaacaaaacgactaactaaacgtaaaaacgcaatcgctttcttacaacgaccaaataaattacccttaacgccttaaaaacccgtacgcgaataactacgaaaaaacgtacctacccgcccaccgcaatcgaacaactaaaaccgaacgccgataccaactattcccctcctatcccgcccgcgatcccctcgaaaccgacctaaaactccccgaacgctattctaaaacctcgaacaatcgcccctacgaacctaaccgccttttccgcgacccgccattcgattccgaactcaactcgataacacaacccgactataaacaaccccaaaacgacacgaaaccgaatacaaaaaacgactctacgccaaatcgacaaaaaacaaacgaccccgaccctaaaacgaaacatccgaccgtccgtttcgcaatataaaaacacgaaacgaaaaacgacctaaaaaccccgaacgcgcgaacgaaaacgtcgcttaaacgccgaccttctaaacaaaaccattcatcgcaaaacgaccgaaacgacgaccgaacctaactcaccgcaccataaaaactaaccgaccgccgcccgaaaaaacttaaaaaataaacgaaataatcaaactaatttccgaaaccgaactcgaaatccacgcgaactaacaaacgttaataaaaaaaaaccgaaccccgaaaataacgataaaaaatcctttcccgaccctaacaaacgacc

SEQ ID NO: 16359 - DNA, 756 bp, Artificial Sequence
  chemically treated genomic DNA (Homo sapiens) CpG-island No: 16359
tgttttttaggtggtttttatggataaggcggttggttggacgtgggggcgtagtcgtttttttgtagcgattaggtgaattgtttttgacgttttggaaattcgtgcgcgggtggttgcgggggaacgtgtttattcgtttatcgtagtcgggtagttgaagtcgggcgtcgatgttagttgttttttttttgtttcgttcgcggttttttcgaggtcggtttggggtttttcgggcgttgttttgggatttcgagtagtcgtttttgcgggtttggtcgtttttttcgcggttcgttattcgatttcgggtttagttcggtggtatagttcggttgtaagtaattttagggcggtacggggtcgggtgtagaaggcggttttgcgttaggtcggtaggggataggcgatttcggttttggagcggagtattcgatcgttcgtttcgtaatgtggggatacggggcggggagcggtttggaggtttcgggcgcgcgggcgggagcgtcgtttggacgtcggttttttgggtagagttatttatcgtagggcggtcgaggcggcggtcgagtttggtttatcgtattatggaagttggtcggtcgtcgttcggggaggtttgggaaatgggcgaagtggttagattggttttcggagtcgggttcggaatttacgcggattggtagacgttggtgggggaggatcgaatttcgagggtggcggtggagggttttttttcgattttagtaggcgatt

SEQ ID NO: 16360 - DNA, 756 bp, Artificial Sequence
  chemically treated genomic DNA (Homo sapiens) CpG-island No: 16360
aatcgcctactaaaatcgaaaaaaaaccctccaccgccaccctcgaaattcgatcctcccccaccaacgtctaccaatccgcgtaaattccgaacccgactccgaaaaccaatctaaccacttcgcccatttcccaaacctccccgaacgacgaccgaccaacttccataatacgataaaccaaactcgaccgccgcctcgaccgccctacgataaataactctacccaaaaaaccgacgtccaaacgacgctcccgcccgcgcgcccgaaacctccaaaccgctccccgccccgtatccccacattacgaaacgaacgatcgaatactccgctccaaaaccgaaatcgcctatcccctaccgacctaacgcaaaaccgccttctacacccgaccccgtaccgccctaaaattacttacaaccgaactataccaccgaactaaacccgaaatcgaataacgaaccgcgaaaaaaacgaccaaacccgcaaaaacgactactcgaaatcccaaaacaacgcccgaaaaaccccaaaccgacctcgaaaaaaccgcgaacgaaacaaaaaaaaaacaactaacatcgacgcccgacttcaactacccgactacgataaacgaataaacacgttcccccgcaaccacccgcgcacgaatttccaaaacgtcaaaaacaattcacctaatcgctacaaaaaaacgactacgcccccacgtccaaccaaccgccttatccataaaaaccacctaaaaaaca

SEQ ID NO: 16361 - DNA, 1001 bp, Artificial Sequence
  chemically treated genomic DNA (Homo sapiens) CpG-island No: 16361
tcggcgtttagttgtcgtttcggtcgaagcgttttcgtcgtcgtcgtcgttcgtttcgtatagttcggtcggttcgtcgttgttcgcgttcgtttcggttttcggttcgcgttcgtttagataattgagttcgggtcgcggttgtataagaatttatgtaaatttcggacgttagcgggcggggtttcgtcgggtttagttcggcgttagggggcgggtcgcggcgcggattggcgtagtcgggtttatcggaggtttcgggtttgggcggcggggggaggaggaaagggcgcgggtgggggacgcggaggggagggcgtcggggaggtgtagggggagggatcggcgagtttgggagagggaggttgtagagagggagcgggatcgggaaggagaggtgtgttcgtcggggcggaggcgggcggagagtttgatagttcggaagggtttcggcggcgatttttcgtttatatttcggtgttcgggtttttttttcgcggtacgtttttagtgtttacggtttcgggatttttgttgggggttacggaagtattcgtcgtcgtttttagttgtatcgaattgcgttattagcgtttcgggacgcgcgggtttcgtcggtagggggcggaatggggtaggggtagttcgcgttttattgcgggtttcgtttcgtttttaggtttcgggtattttggagcgcgaggagggaaagggatagggcggagagaaggtcgaggattgggtgttaaggagagattgaagaacgtacgaggaaggggatcgaggagtagttaatttcggggttttggcgtttaagaatttcggtagaaagggttttaaattcgattttatttcgatttttaatggtttcgaatttatatttggtttttttattgacggggcgagatgttttgtttttagtagtttttagagttaagttaggcgagaggcgtaggaggtagagagagcgggcgcgggaggttagggttcgtttgggggtt

SEQ ID NO: 16362 - DNA, 1001 bp, Artificial Sequence
  chemically treated genomic DNA (Homo sapiens) CpG-island No: 16362
aacccccaaacgaaccctaacctcccgcgcccgctctctctacctcctacgcctctcgcctaacttaactctaaaaactactaaaaacaaaacatctcgccccgtcaataaaaaaaccaaatataaattcgaaaccattaaaaatcgaaataaaatcgaatttaaaaccctttctaccgaaattcttaaacgccaaaaccccgaaattaactactcctcgatccccttcctcgtacgttcttcaatctctccttaacacccaatcctcgaccttctctccgccctatccctttccctcctcgcgctccaaaatacccgaaacctaaaaacgaaacgaaacccgcaataaaacgcgaactacccctaccccattccgccccctaccgacgaaacccgcgcgtcccgaaacgctaataacgcaattcgatacaactaaaaacgacgacgaatacttccgtaacccccaacaaaaatcccgaaaccgtaaacactaaaaacgtaccgcgaaaaaaaaacccgaacaccgaaatataaacgaaaaatcgccgccgaaacccttccgaactatcaaactctccgcccgcctccgccccgacgaacacacctctccttcccgatcccgctccctctctacaacctccctctcccaaactcgccgatccctccccctacacctccccgacgccctcccctccgcgtcccccacccgcgccctttcctcctccccccgccgcccaaacccgaaacctccgataaacccgactacgccaatccgcgccgcgacccgccccctaacgccgaactaaacccgacgaaaccccgcccgctaacgtccgaaatttacataaattcttatacaaccgcgacccgaactcaattatctaaacgaacgcgaaccgaaaaccgaaacgaacgcgaacaacgacgaaccgaccgaactatacgaaacgaacgacgacgacgacgaaaacgcttcgaccgaaacgacaactaaacgccga

SEQ ID NO: 16363 - DNA, 1001 bp, Artificial Sequence
  chemically treated genomic DNA (Homo sapiens) CpG-island No: 16363
ggtttttaagcggattttggtttttcgcgttcgttttttttgttttttacgtttttcgtttagtttggttttggaggttgttagaaataggatatttcgtttcgttaataagaggattaagtgtaaattcggagttattgaggatcggggtgggatcggatttggagttttttttgtcgaggtttttgggcgttagggtttcgggattggttgtttttcggttttttttttcgtgcgttttttaatttttttttggtatttagttttcggtttttttttcgttttgttttttttttttttcgcgttttaaaatgttcggagtttggaggcgaggcggggttcgtagtggggcgcgagttgtttttgttttatttcgttttttgtcggcggggttcgcgcgtttcggggcgttggtgacgtaattcggtgtaattgggagcggcggcggatgttttcgtggtttttagtaggggtttcggggtcgtgaatattgagaacgtgtcgcgagggggaggttcgggtatcgggatgtgggcgaggggtcgtcgtcgagattttttcgggttgttaagtttttcgttcgttttcgtttcggcggatatatttttttttttcggtttcgttttttttttgtagttttttttttttaggttcgtcgatttttttttttgtattttttcggcgttttttttttcgcgttttttattcgcgtttttttttttttttttcgtcgtttaggttcggggttttcggtaggttcggttgcgttaattcgcgtcgcggttcgttttttgacgtcgagttgggttcggcgaggtttcgttcgttgacgttcgggatttgtatgagtttttgtgtagtcgcggttcgggtttagttgtttgagcgagcgcgagtcgggagtcggggcgggcgcgggtagcggcgggtcggtcgggttgtgcggggcgagcggcggcggcggcgggggcgtttcggtcggggcggtagttgggcgtcgg

SEQ ID NO: 16364 - DNA, 1001 bp, Artificial Sequence
  chemically treated genomic DNA (Homo sapiens) CpG-island No: 16364
ccgacgcccaactaccgccccgaccgaaacgcccccgccgccgccgccgctcgccccgcacaacccgaccgacccgccgctacccgcgcccgccccgactcccgactcgcgctcgctcaaacaactaaacccgaaccgcgactacacaaaaactcatacaaatcccgaacgtcaacgaacgaaacctcgccgaacccaactcgacgtcaaaaaacgaaccgcgacgcgaattaacgcaaccgaacctaccgaaaaccccgaacctaaacgacgaaaaaaaaaaaaaaaaacgcgaataaaaaacgcgaaaaaaaaaacgccgaaaaaatacaaaaaaaaaaatcgacgaacctaaaaaaaaaaaactacaaaaaaaaaacgaaaccgaaaaaaaaaaatatatccgccgaaacgaaaacgaacgaaaaacttaacaacccgaaaaaatctcgacgacgacccctcgcccacatcccgatacccgaacctccccctcgcgacacgttctcaatattcacgaccccgaaacccctactaaaaaccacgaaaacatccgccgccgctcccaattacaccgaattacgtcaccaacgccccgaaacgcgcgaaccccgccgacaaaaaacgaaataaaacaaaaacaactcgcgccccactacgaaccccgcctcgcctccaaactccgaacattttaaaacgcgaaaaaaaaaaaaaacaaaacgaaaaaaaaaccgaaaactaaataccaaaaaaaaattaaaaaacgcacgaaaaaaaaaaccgaaaaacaaccaatcccgaaaccctaacgcccaaaaacctcgacaaaaaaaactccaaatccgatcccaccccgatcctcaataactccgaatttacacttaatcctcttattaacgaaacgaaatatcctatttctaacaacctccaaaaccaaactaaacgaaaaacgtaaaaaacaaaaaaaacgaacgcgaaaaaccaaaatccgcttaaaaacc

SEQ ID NO: 16365 - DNA, 643 bp, Artificial Sequence
  chemically treated genomic DNA (Homo sapiens) CpG-island No: 16365
tggtcggcgaagttttcgacgttttcgagttttattttagcgggtcgcgcggtattgtagtcgggggtttttgcggattggttcgatagggtgcgcggacggggacgcgggtttcgagtatcgcgacgttagggttttttggtagggtttaagtatttttcggggttatatcgtcgttcgtagggtcgcgttttcgtattgcggtacgttggggtcgtaggcgtcgaagcgggacgcgttgttttttacgacgttcgttttttttaacgttagggtagttattttaggttcgttcggagaagtttattcggttttcggtttttatttagtcgcgaggtttcgtcggtttggagatttgcgttttcgggatttatattttaaatatgatttttggaacggtttttatcgttcgtcgtcgtcgtcgtcgcgtttataacggtttcggcgtattgtgtttttatttgggtttcgtttgtttaaggtcgtttcgcggttttttcgtgtttttgaggtttatttttttacgttagtttttgcgtttttttttcgggtgttttcgtcgcgtttttaaatttagcggggtttattcgtagggtagatttttttttttttttttttaattaagagttgttgtagtaaggta

SEQ ID NO: 16366 - DNA, 643 bp, Artificial Sequence
  chemically treated genomic DNA (Homo sapiens) CpG-island No: 16366
taccttactacaacaactcttaattaaaaaaaaaaaaaaaaaaatctaccctacgaataaaccccgctaaatttaaaaacgcgacgaaaacacccgaaaaaaaaacgcaaaaactaacgtaaaaaaataaacctcaaaaacacgaaaaaaccgcgaaacgaccttaaacaaacgaaacccaaataaaaacacaatacgccgaaaccgttataaacgcgacgacgacgacgacgaacgataaaaaccgttccaaaaatcatatttaaaatataaatcccgaaaacgcaaatctccaaaccgacgaaacctcgcgactaaataaaaaccgaaaaccgaataaacttctccgaacgaacctaaaataactaccctaacgttaaaaaaaacgaacgtcgtaaaaaacaacgcgtcccgcttcgacgcctacgaccccaacgtaccgcaatacgaaaacgcgaccctacgaacgacgatataaccccgaaaaatacttaaaccctaccaaaaaaccctaacgtcgcgatactcgaaacccgcgtccccgtccgcgcaccctatcgaaccaatccgcaaaaacccccgactacaataccgcgcgacccgctaaaataaaactcgaaaacgtcgaaaacttcgccgacca

SEQ ID NO: 16367 - DNA, 643 bp, Artificial Sequence
  chemically treated genomic DNA (Homo sapiens) CpG-island No: 16367
tgttttgttgtagtagtttttggttggaaaaaggaagaaagaaatttgttttgcgagtgggtttcgttgggtttgggggcgcgacggggatattcgagaggaaaacgtaggggttggcgtgaaggggtgaattttaggggtacgggagagtcgcggggcgattttgagtaaacgaaatttaaataaaaatatagtgcgtcgaggtcgttgtgagcgcggcggcggcggcggcgggcggtggaagtcgttttaaagattatatttgaaatatggatttcgggggcgtagatttttaggtcggcggggtttcgcgattgagtgggggtcgggggtcgggtgggttttttcgggcgggtttgaggtggttgttttgacgttgggagggacggacgtcgtagaaaatagcgcgtttcgtttcggcgtttgcgattttagcgtgtcgtaatgcggaggcgcggttttgcgggcggcggtgtggtttcgaggggtgtttgggttttgttaaaggattttggcgtcgcggtgttcggggttcgcgttttcgttcgcgtattttgtcgggttagttcgtaggaattttcggttgtagtgtcgcgcggttcgttagggtgggattcgggggcgtcggaggtttcgtcgatta

SEQ ID NO: 16368 - DNA, 643 bp, Artificial Sequence
  chemically treated genomic DNA (Homo sapiens) CpG-island No: 16368
taatcgacgaaacctccgacgcccccgaatcccaccctaacgaaccgcgcgacactacaaccgaaaattcctacgaactaacccgacaaaatacgcgaacgaaaacgcgaaccccgaacaccgcgacgccaaaatcctttaacaaaacccaaacacccctcgaaaccacaccgccgcccgcaaaaccgcgcctccgcattacgacacgctaaaatcgcaaacgccgaaacgaaacgcgctattttctacgacgtccgtccctcccaacgtcaaaacaaccacctcaaacccgcccgaaaaaacccacccgacccccgacccccactcaatcgcgaaaccccgccgacctaaaaatctacgcccccgaaatccatatttcaaatataatctttaaaacgacttccaccgcccgccgccgccgccgccgcgctcacaacgacctcgacgcactatatttttatttaaatttcgtttactcaaaatcgccccgcgactctcccgtacccctaaaattcaccccttcacgccaacccctacgttttcctctcgaatatccccgtcgcgcccccaaacccaacgaaacccactcgcaaaacaaatttctttcttcctttttccaaccaaaaactactacaacaaaaca

SEQ ID NO: 16369 - DNA, 536 bp, Artificial Sequence
  chemically treated genomic DNA (Homo sapiens) CpG-island No: 16369
ttcgaagtggtcgttagtcgaagcgtaattgtttttttttaattcgtttttttgcgtttttttttttcggttattttttttttagtttttagtttcgcggcgcgtcgagggttaagcgcgcgcgcgaggtgggggtatttggtttgggaggggggcgagaaaagggggcgtcgagcgtcgttggcggagaagttgggttcgttttagttttttttttttaatttcggagtcgaggggcggttcgatcggaagggttcggcgcgttttcgttttttcggttggtttgtagtttggtttggtcgcggttcggaatcgcgaggacgttgtttggaggtcgcgttttgcgtagttcgagagggggagggggcggaggtttcggagtcgcggtcgcgcgtcgttcgttagtcgatcgatttttaaaggcgggagcgcggtgaatttcgtcggatatttggggggtttcgatgtttttgtaggattgaggggcgaacggagaggggtttagggattttgtggtcgtgggatggcggtcggta

SEQ ID NO: 16370 - DNA, 536 bp, Artificial Sequence
  chemically treated genomic DNA (Homo sapiens) CpG-island No: 16370
taccgaccgccatcccacgaccacaaaatccctaaacccctctccgttcgcccctcaatcctacaaaaacatcgaaaccccccaaatatccgacgaaattcaccgcgctcccgcctttaaaaatcgatcgactaacgaacgacgcgcgaccgcgactccgaaacctccgccccctccccctctcgaactacgcaaaacgcgacctccaaacaacgtcctcgcgattccgaaccgcgaccaaaccaaactacaaaccaaccgaaaaaacgaaaacgcgccgaacccttccgatcgaaccgcccctcgactccgaaattaaaaaaaaaaaactaaaacgaacccaacttctccgccaacgacgctcgacgcccccttttctcgcccccctcccaaaccaaatacccccacctcgcgcgcgcgcttaaccctcgacgcgccgcgaaactaaaaactaaaaaaaaaataaccgaaaaaaaaaaacgcaaaaaaacgaattaaaaaaaaacaattacgcttcgactaacgaccacttcgaa

SEQ ID NO: 16371 - DNA, 536 bp, Artificial Sequence
  chemically treated genomic DNA (Homo sapiens) CpG-island No: 16371
tgtcggtcgttattttacggttataggatttttgagttttttttcgttcgttttttagttttgtagaggtatcgggattttttaggtgttcggcggggtttatcgcgttttcgtttttggggatcgatcggttggcgggcgacgcgcggtcgcggtttcggagttttcgttttttttttttttcgggttacgtaggacgcggtttttaagtagcgttttcgcggtttcgggtcgcggttaggttaggttgtaggttagtcggggaggcggagacgcgtcgggttttttcgatcgggtcgtttttcggtttcggggttggggagagggaattagagcgagtttagttttttcgttagcggcgttcggcgtttttttttttcgttttttttttaagttaaatatttttatttcgcgcgcgcgtttaattttcggcgcgtcgcgaggttgggagttgggaggggagtagtcgagggggaggggcgtaggggagcgagttggaggggggtagttgcgtttcggttgacgattatttcggg

SEQ ID NO: 16372 - DNA, 536 bp, Artificial Sequence
  chemically treated genomic DNA (Homo sapiens) CpG-island No: 16372
cccgaaataatcgtcaaccgaaacgcaactacccccctccaactcgctcccctacgcccctccccctcgactactcccctcccaactcccaacctcgcgacgcgccgaaaattaaacgcgcgcgcgaaataaaaatatttaacttaaaaaaaaaacgaaaaaaaaaaacgccgaacgccgctaacgaaaaaactaaactcgctctaattccctctccccaaccccgaaaccgaaaaacgacccgatcgaaaaaacccgacgcgtctccgcctccccgactaacctacaacctaacctaaccgcgacccgaaaccgcgaaaacgctacttaaaaaccgcgtcctacgtaacccgaaaaaaaaaaaaaacgaaaactccgaaaccgcgaccgcgcgtcgcccgccaaccgatcgatccccaaaaacgaaaacgcgataaaccccgccgaacacctaaaaaatcccgatacctctacaaaactaaaaaacgaacgaaaaaaaactcaaaaatcctataaccgtaaaataacgaccgaca

SEQ ID NO: 16373 - DNA, 733 bp, Artificial Sequence
  chemically treated genomic DNA (Homo sapiens) CpG-island No: 16373
cggcggcggcgagtggtatttttcgagcgttgtagttggtcgggtagttattgcgtcggttatatttggttcgggttgaacggtcgtcgcggtttttttttcgtcggttttcggggttcgcgcgtcgtagttcgttcggcggcgcgtttatcgatcgtcggggtcgcggtcgggcgagcggagaataaggtatagtttgtatttaggtttttgtttttatatggcgatgtgcgcgagcgttcgtcgagcggtcgtattatataagggtacgcggcgggcgtcgggttgagttggtgcgcgtttattggttcgcgcgtttttcggtaatcggtttttacgagtggaaattagttagtcgttttcgttcgtttttcgtttttttttttttttttttttcgggtattttcgtttttcgttttcgtatttttttcgttgtttaatttttttttttgtttgtattttttttttaattttttttttcgcggttttttttttttttttgtttcgttgttatttttttttcgtggtcgtttggtttgttttttttcgtttcgcgtacgtttttatttttattttacgtattttttttttaaattcggcgagtaacggcggaggagcgggaaggttcggatgcgggaggggagtttgtgtgcgtgtgtgtttgtgcgtgtgtgtgtgtgtgcgtgtgtgtgtgtgtgtgagagtgtgtcgttgacgtaaaaaacgatgaatt

SEQ ID NO: 16374 - DNA, 733 bp, Artificial Sequence
  chemically treated genomic DNA (Homo sapiens) CpG-island No: 16374
aattcatcgttttttacgtcaacgacacactctcacacacacacacacacgcacacacacacacacgcacaaacacacacgcacacaaactcccctcccgcatccgaaccttcccgctcctccgccgttactcgccgaatttaaaaaaaaaatacgtaaaataaaaataaaaacgtacgcgaaacgaaaaaaaacaaaccaaacgaccacgaaaaaaaaataacaacgaaacaaaaaaaaaaaaaaaaccgcgaaaaaaaaaattaaaaaaaaaatacaaacaaaaaaaaaaattaaacaacgaaaaaaatacgaaaacgaaaaacgaaaatacccgaaaaaaaaaaaaaaaaaaaaacgaaaaacgaacgaaaacgactaactaatttccactcgtaaaaaccgattaccgaaaaacgcgcgaaccaataaacgcgcaccaactcaacccgacgcccgccgcgtacccttatataatacgaccgctcgacgaacgctcgcgcacatcgccatataaaaacaaaaacctaaatacaaactataccttattctccgctcgcccgaccgcgaccccgacgatcgataaacgcgccgccgaacgaactacgacgcgcgaaccccgaaaaccgacgaaaaaaaaaccgcgacgaccgttcaacccgaaccaaatataaccgacgcaataactacccgaccaactacaacgctcgaaaaataccactcgccgccgccg

SEQ ID NO: 16375 - DNA, 733 bp, Artificial Sequence
  chemically treated genomic DNA (Homo sapiens) CpG-island No: 16375
aatttatcgttttttacgttagcgatatatttttatatatatatatatacgtatatatatatatacgtatagatatatacgtatataagtttttttttcgtattcgggttttttcgttttttcgtcgttgttcgtcgggtttggggagggggtgcgtggggtgggagtgggagcgtgcgcggagcgggagaggataggttaagcggttacgggagaagaatgataacgaggtaaagggaggaggaaggtcgcgggaagaaaaattggggagagggtgtaggtaaaaaggggggttaagtaacgaagggggtgcggaggcgaggagcggagatattcggggagaaagaaagggagggggcggggagcgggcgggggcggttggttggtttttattcgtgagagtcggttgtcgagagacgcgcgggttaatgagcgcgtattagtttagttcggcgttcgtcgcgtgtttttatatggtgcggtcgttcggcgggcgttcgcgtatatcgttatataagggtaggaatttaaatataggttatattttgtttttcgttcgttcggtcgcggtttcggcgatcgatgagcgcgtcgtcgagcgggttgcggcgcgcgggtttcgggagtcggcggggagggggtcgcggcggtcgtttagttcgggttagatgtggtcggcgtaatggttgttcggttagttgtagcgttcggaaggtgttattcgtcgtcgtcg

SEQ ID NO: 16376 - DNA, 733 bp, Artificial Sequence
  chemically treated genomic DNA (Homo sapiens) CpG-island No: 16376
cgacgacgacgaataacaccttccgaacgctacaactaaccgaacaaccattacgccgaccacatctaacccgaactaaacgaccgccgcgaccccctccccgccgactcccgaaacccgcgcgccgcaacccgctcgacgacgcgctcatcgatcgccgaaaccgcgaccgaacgaacgaaaaacaaaatataacctatatttaaattcctacccttatataacgatatacgcgaacgcccgccgaacgaccgcaccatataaaaacacgcgacgaacgccgaactaaactaatacgcgctcattaacccgcgcgtctctcgacaaccgactctcacgaataaaaaccaaccaaccgcccccgcccgctccccgccccctccctttctttctccccgaatatctccgctcctcgcctccgcacccccttcgttacttaacccccctttttacctacaccctctccccaatttttcttcccgcgaccttcctcctccctttacctcgttatcattcttctcccgtaaccgcttaacctatcctctcccgctccgcgcacgctcccactcccaccccacgcaccccctccccaaacccgacgaacaacgacgaaaaaacgaaaaaacccgaatacgaaaaaaaaacttatatacgtatatatctatacgtatatatatatatacgtatatatatatatataaaaatatatcgctaacgtaaaaaacgataaatt

SEQ ID NO: 16377 - DNA, 676 bp, Artificial Sequence
  chemically treated genomic DNA (Homo sapiens) CpG-island No: 16377
  unsure (283, 340, 344, 346, 391..392, 399..400, 404, 409..410, 429)
  unsure (432..433, 435..436, 449..450, 457, 480, 482..483, 486..487)
  unsure (489, 502, 530..531, 535, 587, 592, 618, 642, 652)
atcggagcgtcgcgatttcgcgagggtatcgggtatcggggtgggggtggggatagatcgagcgcgttttttttgcgtagttttcggtcgtttttatttcgtgttttttttgttcgtaggtaatcgtttttttttcgttcgtttcgcggtcgttttcgttcgttttttcgggagggtttttgcgttcggtcgagcgttttcgggcgggtatcgagagcggcgttgggggttgcggcgttcgttttcgtcggggtatcgtggcgattggcgtcgttttggtagntattttttgtagttgtcgcggtcggggttttgcgtagtgaggcggacggtgtatttnttananaaattcggcggtggcggcggtttcggttttttttttttttttcgnnttttcgnnnttntcgtnnnttatttttttcgttcggnttnnnnntcgtcgcgtgatnntcgattntttcgggcgtacgcgtcgtattntnnttnntncgggtttcgtttntattcgcgttcgtcgcgtcggcgtattnnnttntattttatcgttagtgacgcggggcgcgggttagcgcgagggcgcgggttanagttnacgttcgttacgtttcgttcgttatnatttgtttattgtttttttttttntatatatcgntttcgatcgcgacgcgttttacgt

SEQ ID NO: 16378 - DNA, 676 bp, Artificial Sequence
  chemically treated genomic DNA (Homo sapiens) CpG-island No: 16378
  unsure (25, 35, 59, 85, 90, 142, 145..146, 175, 188, 190..191, 194..195)
  unsure (197, 220, 227..228, 241..242, 244..245, 248, 266..267, 273)
  unsure (276..277, 285..286, 331, 333, 337, 394)
acgtaaaacgcgtcgcgatcgaaancgatatatanaaaaaaaaaaacaataaacaaatnataacgaacgaaacgtaacgaacgtnaactntaacccgcgccctcgcgctaacccgcgccccgcgtcactaacgataaaatanaannnaatacgccgacgcgacgaacgcgaatanaaacgaaacccgnannaannanaatacgacgcgtacgcccgaaanaatcgannatcacgcgacgannnnnaanccgaacgaaaaaaataannnacganaannncgaaaanncgaaaaaaaaaaaaaaaaccgaaaccgccgccaccgccgaatttntntaanaaatacaccgtccgcctcactacgcaaaaccccgaccgcgacaactacaaaaaatanctaccaaaacgacgccaatcgccacgataccccgacgaaaacgaacgccgcaacccccaacgccgctctcgatacccgcccgaaaacgctcgaccgaacgcaaaaaccctcccgaaaaaacgaacgaaaacgaccgcgaaacgaacgaaaaaaaaacgattacctacgaacaaaaaaaacacgaaataaaaacgaccgaaaactacgcaaaaaaaacgcgctcgatctatccccacccccaccccgatacccgataccctcgcgaaatcgcgacgctccgat

SEQ ID NO: 16379 - DNA, 676 bp, Artificial Sequence
  chemically treated genomic DNA (Homo sapiens) CpG-island No: 16379
  unsure (25, 35, 59, 85, 90, 142, 145..146, 175, 188, 190..191, 194..195)
  unsure (197, 220, 227..228, 241..242, 244..245, 248, 266..267, 273)
  unsure (276..277, 285..286, 331, 333, 337, 394)
gcgtaaagcgcgtcgcggtcggaancggtatatangaaaaggggggtaataaataggtnatggcgggcggaacgtggcgggcgtnaattntaattcgcgttttcgcgttggttcgcgtttcgcgttattggcggtaaggtgnagnnngatacgtcggcgcggcggacgcgggtanaggcggaattcgnannagnngnagtgcggcgcgtgcgttcggggnaatcggnnattacgcggcggnnnnnaantcgggcggggaaagtaannngcggnaannncgggggnncgggggaggagggaaaggtcgagatcgtcgttatcgtcgaatttntntggngggtgtatcgttcgttttattgcgtagagtttcggtcgcggtagttgtagaaaatgnttgttaaagcggcgttagtcgttacggtgtttcggcgggggcgggcgtcgtagtttttagcgtcgttttcggtgttcgttcggggacgttcggtcgggcgtagggattttttcgggggagcgggcgggggcggtcgcggggcgagcgggggaggggcggttatttgcgggtagagggggtacggggtgggggcggtcggggattgcgtaggaagggcgcgttcggtttgtttttatttttatttcggtgttcggtgttttcgcgaggtcgcggcgtttcggt

SEQ ID NO: 16380 - DNA, 676 bp, Artificial Sequence
  chemically treated genomic DNA (Homo sapiens) CpG-island No: 16380
  unsure (283, 340, 344, 346, 391..392, 399..400, 404, 409..410, 429)
  unsure (432..433, 435..436, 449..450, 457, 480, 482..483, 486..487)
  unsure (489, 502, 530..531, 535, 587, 592, 618, 642, 652)
accgaaacgccgcgacctcgcgaaaacaccgaacaccgaaataaaaataaaaacaaaccgaacgcgcccttcctacgcaatccccgaccgcccccaccccgtaccccctctacccgcaaataaccgcccctcccccgctcgccccgcgaccgcccccgcccgctcccccgaaaaaatccctacgcccgaccgaacgtccccgaacgaacaccgaaaacgacgctaaaaactacgacgcccgcccccgccgaaacaccgtaacgactaacgccgctttaacaancattttctacaactaccgcgaccgaaactctacgcaataaaacgaacgatacacccnccananaaattcgacgataacgacgatctcgacctttccctcctcccccgnncccccgnnnttnccgcnnnttactttccccgcccganttnnnnnccgccgcgtaatnnccgattnccccgaacgcacgcgccgcactncnnctnntncgaattccgcctntacccgcgtccgccgcgccgacgtatcnnnctncaccttaccgccaataacgcgaaacgcgaaccaacgcgaaaacgcgaattanaattnacgcccgccacgttccgcccgccatnacctatttattaccccccttttcntatataccgnttccgaccgcgacgcgctttacgc

SEQ ID NO: 16381 - DNA, 860 bp, Artificial Sequence
  chemically treated genomic DNA (Homo sapiens) CpG-island No: 16381
gtgcgcgtttcgagtacgtagcggtgcggggtcggcgggtatttggttggcgttcggcgcgggcgtcgtttttcgatcgggattttacggcgtcgtaggaggatatcgacgaggtagaggagaagtcggaggagtcggagtcgggcgagtcgggcgtcgaggggtttaagatcgagtagttggcgtcgtaggcgttcggggcggcggcgggcggcgacgcgtcgtagaagtagtttaggttgagcgggttggttatgaggtcgtagtcgttcgtcgcgtttcgtagttttttttcgtcgcggttgtcgtttagtagtttgtttataattatgtttttaggttgggcgttcgaggatttcgatatttgcgttatcggttcgttgcgcgcggttgtttttcgggttggtttagggagttgtcggcgggcggacggcgcgggttagtacgggcgcggcgcgggattgttagggtatttaacgggtcgtagcgttcgtcgattttttcggcgttcggttcggttattggcggtgttcgggtcgttttttagtttttttttcggatgcgttcgatttttagtaaaatgtataggatgaggtaatgcgtttttcgtttttcgttttcgtttcgttcgttcggtttcgtttagatcgatcggttgtttgtttgttttttatcgggaaatttcgatagcgcgcggtttttagtttttcgtttttcgtttttcgtttttcgtttttcgttttcgggatttcgtttttcgttcgggttatttttgttttttaggttttcgtcgggtttgggcgttcggggagagggcgcgcggcgtagggttgggtttgtagagggaggcgggagttagt

SEQ ID NO: 16382 - DNA, 860 bp, Artificial Sequence
  chemically treated genomic DNA (Homo sapiens) CpG-island No: 16382
actaactcccgcctccctctacaaacccaaccctacgccgcgcgccctctccccgaacgcccaaacccgacgaaaacctaaaaaacaaaaataacccgaacgaaaaacgaaatcccgaaaacgaaaaacgaaaaacgaaaaacgaaaaacgaaaaactaaaaaccgcgcgctatcgaaatttcccgataaaaaacaaacaaacaaccgatcgatctaaacgaaaccgaacgaacgaaacgaaaacgaaaaacgaaaaacgcattacctcatcctatacattttactaaaaatcgaacgcatccgaaaaaaaaactaaaaaacgacccgaacaccgccaataaccgaaccgaacgccgaaaaaatcgacgaacgctacgacccgttaaataccctaacaatcccgcgccgcgcccgtactaacccgcgccgtccgcccgccgacaactccctaaaccaacccgaaaaacaaccgcgcgcaacgaaccgataacgcaaatatcgaaatcctcgaacgcccaacctaaaaacataattataaacaaactactaaacgacaaccgcgacgaaaaaaaactacgaaacgcgacgaacgactacgacctcataaccaacccgctcaacctaaactacttctacgacgcgtcgccgcccgccgccgccccgaacgcctacgacgccaactactcgatcttaaacccctcgacgcccgactcgcccgactccgactcctccgacttctcctctacctcgtcgatatcctcctacgacgccgtaaaatcccgatcgaaaaacgacgcccgcgccgaacgccaaccaaatacccgccgaccccgcaccgctacgtactcgaaacgcgcac

SEQ ID NO: 16383 - DNA, 860 bp, Artificial Sequence
  chemically treated genomic DNA (Homo sapiens) CpG-island No: 16383
attgattttcgtttttttttgtaggtttagttttgcgtcgcgcgtttttttttcgggcgtttaggttcggcgggggtttagagggtagggatggttcgggcgagggacggggtttcggaggcgggaggcgggaggcgggaggcgggaagcgggaggttggaagtcgcgcgttgtcggggtttttcggtgaagggtaggtaaataatcggtcggtttgggcggagtcgggcgggcggggcgagggcggagggcggagggcgtattgttttattttgtatattttattggaaatcggacgtattcggaggaggggttgggaggcggttcgggtatcgttaatggtcgggtcgggcgtcggggaggtcggcgagcgttgcggttcgttaaatattttggtagtttcgcgtcgcgttcgtattggttcgcgtcgttcgttcgtcgatagttttttgagttagttcgggaggtagtcgcgcgtagcgagtcggtggcgtaggtgtcggggttttcgagcgtttagtttgggagtatgattgtggataagttgttggacgatagtcgcggcggagaggggttgcgggacgcggcgggcggttgcggttttatgattagttcgtttaatttgagttatttttacggcgcgtcgtcgttcgtcgtcgtttcgggcgtttgcgacgttagttgttcggttttgggtttttcggcgttcggttcgttcggtttcgattttttcgattttttttttgtttcgtcggtgtttttttgcggcgtcgtggagtttcggtcgagaggcggcgttcgcgtcgagcgttagttaggtattcgtcggtttcgtatcgttgcgtattcggggcgcgtat

SEQ ID NO: 16384 - DNA, 860 bp, Artificial Sequence
  chemically treated genomic DNA (Homo sapiens) CpG-island No: 16384
atacgcgccccgaatacgcaacgatacgaaaccgacgaatacctaactaacgctcgacgcgaacgccgcctctcgaccgaaactccacgacgccgcaaaaaaacaccgacgaaacaaaaaaaaaatcgaaaaaatcgaaaccgaacgaaccgaacgccgaaaaacccaaaaccgaacaactaacgtcgcaaacgcccgaaacgacgacgaacgacgacgcgccgtaaaaataactcaaattaaacgaactaatcataaaaccgcaaccgcccgccgcgtcccgcaacccctctccgccgcgactatcgtccaacaacttatccacaatcatactcccaaactaaacgctcgaaaaccccgacacctacgccaccgactcgctacgcgcgactacctcccgaactaactcaaaaaactatcgacgaacgaacgacgcgaaccaatacgaacgcgacgcgaaactaccaaaatatttaacgaaccgcaacgctcgccgacctccccgacgcccgacccgaccattaacgatacccgaaccgcctcccaacccctcctccgaatacgtccgatttccaataaaatatacaaaataaaacaatacgccctccgccctccgccctcgccccgcccgcccgactccgcccaaaccgaccgattatttacctacccttcaccgaaaaaccccgacaacgcgcgacttccaacctcccgcttcccgcctcccgcctcccgcctcccgcctccgaaaccccgtccctcgcccgaaccatccctaccctctaaacccccgccgaacctaaacgcccgaaaaaaaaacgcgcgacgcaaaactaaacctacaaaaaaaaacgaaaatcaat

SEQ ID NO: 16385 - DNA, 521 bp, Artificial Sequence
  chemically treated genomic DNA (Homo sapiens) CpG-island No: 16385
tttaggagcgcgttggtagagtcgggtaatgggtcgtttcgttcgtagcggtttttttcgacgttcgtatatagattatatttagtatttattttcgggattcgttcgtttttcgtttttcgggggttagggattttgacgtttcggtcggtcgtcgtagcgttaggtcgttagtttttcgtttttttattcggcgacgtttttttattttcgattttcggttacgattggtggagtttcggcgggggcgggtcgagggcgttgattgatagtagtacgcgtcgggcggaatttataggtttggaagcgaagttggtattttggcgttttacgtcgttaagtttttgttcgcgacgcgatattgtagttgtcgtttcgcggatcgaggtttggttttttttacgatttaatttttcgtgaatttcggacgtttgagttttttgggagtatttatttattttaaggtttttcgtttgttagcgaaagtgtttataatcgtagttgattttagtagggtagtt

SEQ ID NO: 16386 - DNA, 521 bp, Artificial Sequence
  chemically treated genomic DNA (Homo sapiens) CpG-island No: 16386
aactaccctactaaaatcaactacgattataaacactttcgctaacaaacgaaaaaccttaaaataaataaatactcccaaaaaactcaaacgtccgaaattcacgaaaaattaaatcgtaaaaaaaaccaaacctcgatccgcgaaacgacaactacaatatcgcgtcgcgaacaaaaacttaacgacgtaaaacgccaaaataccaacttcgcttccaaacctataaattccgcccgacgcgtactactatcaatcaacgccctcgacccgcccccgccgaaactccaccaatcgtaaccgaaaatcgaaaataaaaaaacgtcgccgaataaaaaaacgaaaaactaacgacctaacgctacgacgaccgaccgaaacgtcaaaatccctaacccccgaaaaacgaaaaacgaacgaatcccgaaaataaatactaaatataatctatatacgaacgtcgaaaaaaaccgctacgaacgaaacgacccattacccgactctaccaacgcgctcctaaa

SEQ ID NO: 16387 - DNA, 521 bp, Artificial Sequence
  chemically treated genomic DNA (Homo sapiens) CpG-island No: 16387
gattgttttattagagttaattgcggttgtgggtattttcgttgataagcgaaaagttttgaggtaggtggatgtttttaggaaatttagacgttcgaagtttacgaggagttgggtcgtgagaggggttagatttcgattcgcggggcgatagttgtagtgtcgcgtcgcgagtaggagtttggcggcgtagagcgttagggtgttaatttcgtttttaggtttgtgggtttcgttcggcgcgtgttgttgttagttaacgttttcggttcgttttcgtcgaagttttattaatcgtagtcgggggtcggaggtgaggagacgtcgtcgggtgaggaagcggggggttagcggtttggcgttgcggcgatcgatcggggcgttaggatttttggttttcggagagcgaagggcgggcgggtttcggaggtgagtgttggatgtggtttgtgtgcggacgtcgggaggggtcgttgcgggcggagcgatttattgttcggttttgttagcgcgtttttaga

SEQ ID NO: 16388 - DNA, 521 bp, Artificial Sequence
  chemically treated genomic DNA (Homo sapiens) CpG-island No: 16388
tctaaaaacgcgctaacaaaaccgaacaataaatcgctccgcccgcaacgacccctcccgacgtccgcacacaaaccacatccaacactcacctccgaaacccgcccgcccttcgctctccgaaaaccaaaaatcctaacgccccgatcgatcgccgcaacgccaaaccgctaaccccccgcttcctcacccgacgacgtctcctcacctccgacccccgactacgattaataaaacttcgacgaaaacgaaccgaaaacgttaactaacaacaacacgcgccgaacgaaacccacaaacctaaaaacgaaattaacaccctaacgctctacgccgccaaactcctactcgcgacgcgacactacaactatcgccccgcgaatcgaaatctaacccctctcacgacccaactcctcgtaaacttcgaacgtctaaatttcctaaaaacatccacctacctcaaaacttttcgcttatcaacgaaaatacccacaaccgcaattaactctaataaaacaatc

SEQ ID NO: 16389 - DNA, 686 bp, Artificial Sequence
  chemically treated genomic DNA (Homo sapiens) CpG-island No: 16389
gttcgatttttttagtacgtttattttagttattattggtcgttttttcgttggcgtgattaagatttagtttttttttcgttgggattattttgaggcgatttgcggaagttgaggggtttcggaggaggggtcgcgatgtatttcgggttttgtagtttatttgtataattatagttagagagcggggttttacgattcggagaattataatttttagtagtcgggcggaagcggagcgagggggggttcgcgttacgtgggcgttcggtttgggcgggttattttttagtgcggcggcggcggcggtggcggcggtttcggggatcggggttttttgtttggagcggttgcgggggggtttcggagcggcgaggtcggcggttttttttagtttgttcggtttcggttatttttcgcgggggtgggaggggtcgttttttgggtcgggtatttgtttaggcgttcgtcgtttcgttttaggtcggtttcgttcggtttgaggggaggaatcggtcgggtttcgtcgcgcggtttagttattttcggagtcgtcgtttttgtttttagtgtttcggatcggaggtcgtttatcgtttttcgggtcgacgttatgaagattaaagatgttaagaaattttgtaagacgggggttggggttcgttaggttgggagggtatttttgg

SEQ ID NO: 16390 - DNA, 686 bp, Artificial Sequence
  chemically treated genomic DNA (Homo sapiens) CpG-island No: 16390
ccaaaaataccctcccaacctaacgaaccccaacccccgtcttacaaaatttcttaacatctttaatcttcataacgtcgacccgaaaaacgataaacgacctccgatccgaaacactaaaaacaaaaacgacgactccgaaaataactaaaccgcgcgacgaaacccgaccgattcctcccctcaaaccgaacgaaaccgacctaaaacgaaacgacgaacgcctaaacaaatacccgacccaaaaaacgacccctcccacccccgcgaaaaataaccgaaaccgaacaaactaaaaaaaaccgccgacctcgccgctccgaaacccccccgcaaccgctccaaacaaaaaaccccgatccccgaaaccgccgccaccgccgccgccgccgcactaaaaaataacccgcccaaaccgaacgcccacgtaacgcgaaccccccctcgctccgcttccgcccgactactaaaaattataattctccgaatcgtaaaaccccgctctctaactataattatacaaataaactacaaaacccgaaatacatcgcgacccctcctccgaaacccctcaacttccgcaaatcgcctcaaaataatcccaacgaaaaaaaaactaaatcttaatcacgccaacgaaaaaacgaccaataataactaaaataaacgtactaaaaaaatcgaac

SEQ ID NO: 16391 - DNA, 686 bp, Artificial Sequence
  chemically treated genomic DNA (Homo sapiens) CpG-island No: 16391
ttaagggtgtttttttaatttggcgggttttagttttcgttttatagggttttttggtatttttgatttttatggcgtcggttcgaggggcgatggacggttttcgattcggggtattgagagtagaggcggcgatttcggaggtggttgggtcgcgcggcgaggttcggtcggtttttttttttaggtcgggcggggtcggtttagggcggggcggcgggcgtttgagtagatgttcggtttagggggcggttttttttattttcgcgaggggtggtcgggatcgagtaagttggggaaggtcgtcggtttcgtcgtttcggggttttttcgtagtcgttttaaataaaaggtttcggttttcggagtcgtcgttatcgtcgtcgtcgtcgtattgagaaatagttcgtttaggtcgaacgtttacgtgacgcgagttttttttcgtttcgttttcgttcggttgttggggattgtagtttttcgggtcgtgaggtttcgttttttggttgtagttgtgtaggtggattataaagttcgagatgtatcgcggtttttttttcgaggttttttagttttcgtagatcgttttagagtggttttagcgagaagagggttgggttttagttacgttagcgaggaggcgattaatggtgattgagatgggcgtgttggggaagtcgggt

SEQ ID NO: 16392 - DNA, 686 bp, Artificial Sequence
  chemically treated genomic DNA (Homo sapiens) CpG-island No: 16392
acccgacttccccaacacgcccatctcaatcaccattaatcgcctcctcgctaacgtaactaaaacccaaccctcttctcgctaaaaccactctaaaacgatctacgaaaactaaaaaacctcgaaaaaaaaaccgcgatacatctcgaactttataatccacctacacaactacaaccaaaaaacgaaacctcacgacccgaaaaactacaatccccaacaaccgaacgaaaacgaaacgaaaaaaaactcgcgtcacgtaaacgttcgacctaaacgaactatttctcaatacgacgacgacgacgataacgacgactccgaaaaccgaaaccttttatttaaaacgactacgaaaaaaccccgaaacgacgaaaccgacgaccttccccaacttactcgatcccgaccacccctcgcgaaaataaaaaaaaccgccccctaaaccgaacatctactcaaacgcccgccgccccgccctaaaccgaccccgcccgacctaaaaaaaaaaaccgaccgaacctcgccgcgcgacccaaccacctccgaaatcgccgcctctactctcaataccccgaatcgaaaaccgtccatcgcccctcgaaccgacgccataaaaatcaaaaataccaaaaaaccctataaaacgaaaactaaaacccgccaaattaaaaaaacacccttaa

SEQ ID NO: 16393 - DNA, 798 bp, Artificial Sequence
  chemically treated genomic DNA (Homo sapiens) CpG-island No: 16393
gcgggttgggcgcgagaagacgtggtagtaggttcgttttttcgagtagacgggaggcgttattatggggggggggggtcgcggttcgtttcgcgtagaaagagtttttttttcgtcgttgttcgcgtttttagtttagtacgatcgcggcggttttacgcgtgtagagacggcggcggcggcgttggaaagttcggggcgtcgaggggagggttgggacgcggtatgaagggaaagttcggttcgggtttgtttcgttttatcgggttggcggcgcgttcgttcgtgtgggagtacgagtggtcgggcgagcggggtttcgcggttcgggttcggacggtcgggcgttgcgttatttttcgtttttcgagtttcggttcgggttgagtcgttcggtttttttttttttcgttcgttcgtttgtttttttttggagtttggattgatttggtcgcgttggcgttagggagtcggagttgtttagtttttattttttagttgttaatattcggcgtattcgtttgttcgttcgttcgtttatacgtttattcgtttattcgcgcgtcgtcgtcgttgtcgcgcgattagggattttttttaaattttcggttcggtcggcgtgagcgtagcgcggtcggggtcggaggacggcgcgggggagcggtcggagttatttttttttatcggtagttttacgtttcgtttttttttggagaaaaaatagtgtggcggcgtttaggtttttttaattttgtttttttagtttcggtggagcggatttagtttattatttgtaag

SEQ ID NO: 16394 - DNA, 798 bp, Artificial Sequence
  chemically treated genomic DNA (Homo sapiens) CpG-island No: 16394
cttacaaataataaactaaatccgctccaccgaaactaaaaaaacaaaattaaaaaaacctaaacgccgccacactattttttctccaaaaaaaaacgaaacgtaaaactaccgataaaaaaaaataactccgaccgctcccccgcgccgtcctccgaccccgaccgcgctacgctcacgccgaccgaaccgaaaatttaaaaaaaatccctaatcgcgcgacaacgacgacgacgcgcgaataaacgaataaacgtataaacgaacgaacgaacaaacgaatacgccgaatattaacaactaaaaaataaaaactaaacaactccgactccctaacgccaacgcgaccaaatcaatccaaactccaaaaaaaaacaaacgaacgaacgaaaaaaaaaaaaaccgaacgactcaacccgaaccgaaactcgaaaaacgaaaaataacgcaacgcccgaccgtccgaacccgaaccgcgaaaccccgctcgcccgaccactcgtactcccacacgaacgaacgcgccgccaacccgataaaacgaaacaaacccgaaccgaactttcccttcataccgcgtcccaaccctcccctcgacgccccgaactttccaacgccgccgccgccgtctctacacgcgtaaaaccgccgcgatcgtactaaactaaaaacgcgaacaacgacgaaaaaaaaactctttctacgcgaaacgaaccgcgaccccccccccccataataacgcctcccgtctactcgaaaaaacgaacctactaccacgtcttctcgcgcccaacccgc

SEQ ID NO: 16395 - DNA, 798 bp, Artificial Sequence
  chemically treated genomic DNA (Homo sapiens) CpG-island No: 16395
tttgtagataatggattaagttcgttttatcgggattaaaaaggtagggttaggaaagtttgaacgtcgttatattgttttttttttaggaagaaacggggcgtggggttgtcggtagaagggggtggtttcggtcgttttttcgcgtcgtttttcggtttcggtcgcgttgcgtttacgtcggtcgggtcgggaatttggagaggatttttggtcgcgcggtagcggcggcggcgcgcgggtgagcgggtgagcgtgtgagcgggcgggcgggtaggcgagtgcgtcgggtattggtagttgaggagtggaggttgggtagtttcgattttttgacgttagcgcgattagattaatttaggttttaggagaaagtaggcgggcgggcggagaaaggagaggtcgagcggtttaattcgggtcgaggttcggggagcggagagtggcgtagcgttcggtcgttcggattcgggtcgcgagatttcgttcgttcggttattcgtgtttttatacggacgggcgcgtcgttaattcggtaaaacgaaatagattcgaatcgaattttttttttatgtcgcgttttagtttttttttcggcgtttcgggttttttagcgtcgtcgtcgtcgtttttgtacgcgtggggtcgtcgcggtcgtgttgggttgggggcgcgggtagcggcgggaagggggttttttttgcgcggggcgggtcgcgattttttttttttatgatggcgtttttcgtttgttcggaggagcgaatttgttattacgttttttcgcgtttagttcgt

SEQ ID NO: 16396 - DNA, 798 bp, Artificial Sequence
  chemically treated genomic DNA (Homo sapiens) CpG-island No: 16396
acgaactaaacgcgaaaaaacgtaataacaaattcgctcctccgaacaaacgaaaaacgccatcataaaaaaaaaaaatcgcgacccgccccgcgcaaaaaaaacccccttcccgccgctacccgcgcccccaacccaacacgaccgcgacgaccccacgcgtacaaaaacgacgacgacgacgctaaaaaacccgaaacgccgaaaaaaaaactaaaacgcgacataaaaaaaaaattcgattcgaatctatttcgttttaccgaattaacgacgcgcccgtccgtataaaaacacgaataaccgaacgaacgaaatctcgcgacccgaatccgaacgaccgaacgctacgccactctccgctccccgaacctcgacccgaattaaaccgctcgacctctcctttctccgcccgcccgcctactttctcctaaaacctaaattaatctaatcgcgctaacgtcaaaaaatcgaaactacccaacctccactcctcaactaccaatacccgacgcactcgcctacccgcccgcccgctcacacgctcacccgctcacccgcgcgccgccgccgctaccgcgcgaccaaaaatcctctccaaattcccgacccgaccgacgtaaacgcaacgcgaccgaaaccgaaaaacgacgcgaaaaaacgaccgaaaccacccccttctaccgacaaccccacgccccgtttcttcctaaaaaaaaaacaatataacgacgttcaaactttcctaaccctacctttttaatcccgataaaacgaacttaatccattatctacaaa

SEQ ID NO: 16397 - DNA, 882 bp, Artificial Sequence
  chemically treated genomic DNA (Homo sapiens) CpG-island No: 16397
cgtttgcgtcgtcggcgtcgtattatattcggtttagtacgttgtacggattgtcgttaaagttttatcgttagtatcgttttgcgcgatgtaagtcggtcggtaatatttttttatcgtcgttggtatatacgtcgttttttacgtaggcgttatcgtcgttattgtcgggttatacggtgggtagttcgtatattatttagagtttttcggttaaattgtatttatcgtttttcgtcgtgcgttcgcgttttaagagtgtcgagttttttcgttcgtcgttttttaagcgcgtgtagtcggtcgagaagttgggagtttttttgagtgcggataagaagggcgcgttgcgtaaatatagtttcgaggtgggttattcggattttcgtaaggatttttatggcgagttggcgttgtatagttttgtcgagttcgacggtgagacgtttttagtcgagggttttggcgcgtttcggtaggtcgtcgttcgtcgtttgggtcgataggagttatttttgagtttgggcgcggattcgttgttgttcgagggtgtttttaggttattagtgtcgagtaaggagaaggaattttcggggggcgtcgaggcgtgtattttatttcgcgcgacgattttcggtggtcggattttggagcgggacgtcggttgtacgcggtattagagcgtgtagacggaggatggtattggcgggatggttagggttgtggttaaggcggcgttgagttcggtgtaggaatacgagataggtcggcgtagtagttttggcgaggcgggtatatttttggtatttattgtcgtagagtttgcgcggttcggggttaaggttgtggtgttttagtttttgggcgcggattttaaggggt

SEQ ID NO: 16398 - DNA, 882 bp, Artificial Sequence
  chemically treated genomic DNA (Homo sapiens) CpG-island No: 16398
accccttaaaatccgcgcccaaaaactaaaacaccacaaccttaaccccgaaccgcgcaaactctacgacaataaataccaaaaatatacccgcctcgccaaaactactacgccgacctatctcgtattcctacaccgaactcaacgccgccttaaccacaaccctaaccatcccgccaataccatcctccgtctacacgctctaataccgcgtacaaccgacgtcccgctccaaaatccgaccaccgaaaatcgtcgcgcgaaataaaatacacgcctcgacgccccccgaaaattccttctccttactcgacactaataacctaaaaacaccctcgaacaacaacgaatccgcgcccaaactcaaaaataactcctatcgacccaaacgacgaacgacgacctaccgaaacgcgccaaaaccctcgactaaaaacgtctcaccgtcgaactcgacaaaactatacaacgccaactcgccataaaaatccttacgaaaatccgaataacccacctcgaaactatatttacgcaacgcgcccttcttatccgcactcaaaaaaactcccaacttctcgaccgactacacgcgcttaaaaaacgacgaacgaaaaaactcgacactcttaaaacgcgaacgcacgacgaaaaacgataaatacaatttaaccgaaaaactctaaataatatacgaactacccaccgtataacccgacaataacgacgataacgcctacgtaaaaaacgacgtatataccaacgacgataaaaaaatattaccgaccgacttacatcgcgcaaaacgatactaacgataaaactttaacgacaatccgtacaacgtactaaaccgaatataatacgacgccgacgacgcaaacg

SEQ ID NO: 16399 - DNA, 882 bp, Artificial Sequence
  chemically treated genomic DNA (Homo sapiens) CpG-island No: 16399
attttttggagttcgcgtttagaggttgaggtattatagttttagtttcgggtcgcgtaggttttacgataatgggtattaggggtgtgttcgtttcgttagagttgttgcgtcggtttgtttcgtgtttttgtatcgggtttagcgtcgttttggttatagttttggttatttcgttagtgttatttttcgtttgtacgttttgatgtcgcgtgtagtcgacgtttcgttttagggttcggttatcgggggtcgtcgcgcggggtggggtgtacgtttcggcgtttttcggggattttttttttttgttcgatattggtggtttggaggtattttcgggtagtaacgggttcgcgtttaggtttaaaggtgatttttgtcggtttaggcggcggacggcgatttgtcggggcgcgttaaggttttcgattgggggcgttttatcgtcggattcggtaaggttatgtagcgttagttcgttatggaagtttttgcggaaattcgggtggtttatttcgaggttgtgtttgcgtagcgcgttttttttgttcgtatttaaagaggtttttagtttttcggtcgattgtacgcgtttgaggagcggcgagcgagggggttcggtatttttggggcgcgggcgtacgacgggaggcgatgagtgtagtttggtcgggaagttttgagtagtgtgcgagttgtttatcgtgtggttcggtagtggcggcggtgacgtttgcgtgggggacggcgtgtgtgttagcggcgatagagggatgttgtcggtcgatttgtatcgcgtagagcggtattggcgatggagttttggcgatagttcgtgtagcgtgttgggtcgaatgtggtgcgacgtcgacgacgtaggcg

SEQ ID NO: 16400 - DNA, 882 bp, Artificial Sequence
  chemically treated genomic DNA (Homo sapiens) CpG-island No: 16400
cgcctacgtcgtcgacgtcgcaccacattcgacccaacacgctacacgaactatcgccaaaactccatcgccaataccgctctacgcgatacaaatcgaccgacaacatccctctatcgccgctaacacacacgccgtcccccacgcaaacgtcaccgccgccactaccgaaccacacgataaacaactcgcacactactcaaaacttcccgaccaaactacactcatcgcctcccgtcgtacgcccgcgccccaaaaataccgaaccccctcgctcgccgctcctcaaacgcgtacaatcgaccgaaaaactaaaaacctctttaaatacgaacaaaaaaaacgcgctacgcaaacacaacctcgaaataaaccacccgaatttccgcaaaaacttccataacgaactaacgctacataaccttaccgaatccgacgataaaacgcccccaatcgaaaaccttaacgcgccccgacaaatcgccgtccgccgcctaaaccgacaaaaatcacctttaaacctaaacgcgaacccgttactacccgaaaatacctccaaaccaccaatatcgaacaaaaaaaaaaaatccccgaaaaacgccgaaacgtacaccccaccccgcgcgacgacccccgataaccgaaccctaaaacgaaacgtcgactacacgcgacatcaaaacgtacaaacgaaaaataacactaacgaaataaccaaaactataaccaaaacgacgctaaacccgatacaaaaacacgaaacaaaccgacgcaacaactctaacgaaacgaacacacccctaatacccattatcgtaaaacctacgcgacccgaaactaaaactataatacctcaacctctaaacgcgaactccaaaaaat

SEQ ID NO: 16401 - DNA, 882 bp, Artificial Sequence
  chemically treated genomic DNA (Homo sapiens) CpG-island No: 16401
ttcgtttttttatttgtgtgcgtgcgtagatgcgtttttaggtgggagtttttggtgtagtttttgtcgtaattcgggtgcgcgtacgtgtgcgttgtttgttttttgcgcgtttacgaacgtcggtttcgtttggatggcgcggtttcggttattatatttggattttttgtagttttttcgagtttagtgtttatcgtttcgggttttaaataatttaggaaggagggggacgtggcgggatcgggcgcgggtttttggagttcgcggaagagttggaagtgtttttggtattgaggcgtcgggtatatcgcggggtattcggatagtagttcgtagggggcgttcgacgtcgtaggtattgaaagttcggttcgcgggaagtagttattcgaggagtcggcgtcgggtttcgggtatatcggttgtagcgttagcgttttgggttcgggggtcggggttggagttagggttgggtttacgaaggcgtcgggagttcgggttcgtagggtagggcgtatttaattcgagtgatttttcgaatttaaaagtttagttattagtttcgggtcgttagtatatgcgtttagagtttcgggcggcggcggatattgcgtttcggaggtttcgttgggcgttagagcgtaggtttggggcgcgttatcgggtttcgggttcgagaagttggtgaggaggagatttaggttttaggtggcgttcgcgttttttttatcgtttttttttttttcgggttggtttttagattttacgtggaggggcggtttcgtggggttaggaggattcgggtttatgttttgcgttttttcggagcgttattattgcgggagggagtaggtagttcgaggttcggtggatattggg

SEQ ID NO: 16402 - DNA, 882 bp, Artificial Sequence
  chemically treated genomic DNA (Homo sapiens) CpG-island No: 16402
cccaatatccaccgaacctcgaactacctactccctcccgcaataataacgctccgaaaaaacgcaaaacataaacccgaatcctcctaaccccacgaaaccgcccctccacgtaaaatctaaaaaccaacccgaaaaaaaaaaaaacgataaaaaaaacgcgaacgccacctaaaacctaaatctcctcctcaccaacttctcgaacccgaaacccgataacgcgccccaaacctacgctctaacgcccaacgaaacctccgaaacgcaatatccgccgccgcccgaaactctaaacgcatatactaacgacccgaaactaataactaaacttttaaattcgaaaaatcactcgaattaaatacgccctaccctacgaacccgaactcccgacgccttcgtaaacccaaccctaactccaaccccgacccccgaacccaaaacgctaacgctacaaccgatatacccgaaacccgacgccgactcctcgaataactacttcccgcgaaccgaactttcaatacctacgacgtcgaacgccccctacgaactactatccgaataccccgcgatatacccgacgcctcaataccaaaaacacttccaactcttccgcgaactccaaaaacccgcgcccgatcccgccacgtccccctccttcctaaattatttaaaacccgaaacgataaacactaaactcgaaaaaactacaaaaaatccaaatataataaccgaaaccgcgccatccaaacgaaaccgacgttcgtaaacgcgcaaaaaacaaacaacgcacacgtacgcgcacccgaattacgacaaaaactacaccaaaaactcccacctaaaaacgcatctacgcacgcacacaaataaaaaaacgaa

SEQ ID NO: 16403 - DNA, 882 bp, Artificial Sequence
  chemically treated genomic DNA (Homo sapiens) CpG-island No: 16403
tttagtgtttatcgaatttcgagttgtttgttttttttcgtagtggtggcgtttcgaagaggcgtaggatatgggttcgggtttttttgattttacggagtcgtttttttacgtgaagtttgaggattagttcggggaggaagaggacgatgagaggggcgcggacgttatttgggatttggattttttttttattaatttttcgggttcggagttcggtggcgcgttttagatttgcgttttggcgtttagcgaggttttcggggcgtaatattcgtcgtcgttcgagattttgggcgtatatgttggcggttcggggttggtggttgggtttttgggttcggaggattattcgggttgggtgcgttttgttttgcgagttcgggttttcgacgttttcgtgggtttagttttggttttagtttcggttttcgagtttaaggcgttggcgttgtaatcggtgtattcggggttcggcgtcggtttttcgggtggttatttttcgcggatcgggtttttagtgtttgcggcgtcgggcgttttttacgggttattgttcgggtatttcgcgatgtattcggcgttttagtattaagggtatttttagttttttcgcgggttttagggattcgcgttcggtttcgttacgttttttttttttttgagttgtttgggattcgggacggtgggtattggattcggggggattgtagaggatttaggtgtgatagtcgagatcgcgttatttaagcgaggtcgacgttcgtgggcgcgtaagaggtaggtagcgtatacgtgcgcgtattcgggttgcggtaagagttatattaagagtttttatttgaaggcgtatttgcgtacgtatataggtgagggggcggg

SEQ ID NO: 16404 - DNA, 882 bp, Artificial Sequence
  chemically treated genomic DNA (Homo sapiens) CpG-island No: 16404
cccgccccctcacctatatacgtacgcaaatacgccttcaaataaaaactcttaatataactcttaccgcaacccgaatacgcgcacgtatacgctacctacctcttacgcgcccacgaacgtcgacctcgcttaaataacgcgatctcgactatcacacctaaatcctctacaatccccccgaatccaatacccaccgtcccgaatcccaaacaactcaaaaaaaaaaaaaacgtaacgaaaccgaacgcgaatccctaaaacccgcgaaaaaactaaaaatacccttaatactaaaacgccgaatacatcgcgaaatacccgaacaataacccgtaaaaaacgcccgacgccgcaaacactaaaaacccgatccgcgaaaaataaccacccgaaaaaccgacgccgaaccccgaatacaccgattacaacgccaacgccttaaactcgaaaaccgaaactaaaaccaaaactaaacccacgaaaacgtcgaaaacccgaactcgcaaaacaaaacgcacccaacccgaataatcctccgaacccaaaaacccaaccaccaaccccgaaccgccaacatatacgcccaaaatctcgaacgacgacgaatattacgccccgaaaacctcgctaaacgccaaaacgcaaatctaaaacgcgccaccgaactccgaacccgaaaaattaataaaaaaaaaatccaaatcccaaataacgtccgcgcccctctcatcgtcctcttcctccccgaactaatcctcaaacttcacgtaaaaaaacgactccgtaaaatcaaaaaaacccgaacccatatcctacgcctcttcgaaacgccaccactacgaaaaaaaacaaacaactcgaaattcgataaacactaaa

SEQ ID NO: 16405 - DNA, 507 bp, Artificial Sequence
  chemically treated genomic DNA (Homo sapiens) CpG-island No: 16405
ggtttggggtttagttcgtttacggggtatagagggtagtttcgcgtttgtttgtacgtacgtatttttttcgacgtttttgtttttcggttagttgttttattcgtagcgatttttgtatggtcgttaggttcgggtattattcgcgtttttcggtttttagttttcgtagttgtttcggcgacggttataacgaatcggggattatttcggaggcggcgtcgtaacgcgcgaattgtttagtcgcgtagcgcggttttagttgttatcgcggggttaggaggttttcggggtttggttatcggggtttcggtttgcggcgcgggggcggtcgcgttcggtagttacgggaattcggggttagggtcgtcgttatatttagtaggttgcgtgtttgtcgtacggacgtcgttattttggttgtgcggggtttttataggttcgtcgggttgtttatgttcggtgtttgagcgcgaggttcggtgtgggttagggtagggcgagggg

SEQ ID NO: 16406 - DNA, 507 bp, Artificial Sequence
  chemically treated genomic DNA (Homo sapiens) CpG-island No: 16406
cccctcgccctaccctaacccacaccgaacctcgcgctcaaacaccgaacataaacaacccgacgaacctataaaaaccccgcacaaccaaaataacgacgtccgtacgacaaacacgcaacctactaaatataacgacgaccctaaccccgaattcccgtaactaccgaacgcgaccgcccccgcgccgcaaaccgaaaccccgataaccaaaccccgaaaacctcctaaccccgcgataacaactaaaaccgcgctacgcgactaaacaattcgcgcgttacgacgccgcctccgaaataatccccgattcgttataaccgtcgccgaaacaactacgaaaactaaaaaccgaaaaacgcgaataatacccgaacctaacgaccatacaaaaatcgctacgaataaaacaactaaccgaaaaacaaaaacgtcgaaaaaaatacgtacgtacaaacaaacgcgaaactaccctctataccccgtaaacgaactaaaccccaaacc

SEQ ID NO: 16407 - DNA, 507 bp, Artificial Sequence
  chemically treated genomic DNA (Homo sapiens) CpG-island No: 16407
tttttcgttttgttttggtttatatcgggtttcgcgtttaggtatcgggtatggatagttcggcgggtttgtgaggatttcgtatagttaagatggcggcgttcgtgcgataggtacgtagtttattaggtgtggcggcgattttggtttcgggttttcgtggttatcgggcgcggtcgttttcgcgtcgtaggtcgggatttcggtggttagatttcgaggattttttgatttcgcggtggtagttgggatcgcgttacgcggttaagtagttcgcgcgttacggcgtcgttttcggggtggttttcggttcgttatggtcgtcgtcggagtagttgcgggagttggaggtcgaagaacgcgaatggtattcgagtttggcgattatgtaggagtcgttgcgggtgaagtagttggtcgaagagtagaagcgtcgggagaggtgcgtgcgtgtaggtagacgcggggttgttttttgtgtttcgtgggcgaattgggttttaaatt

SEQ ID NO: 16408 - DNA, 507 bp, Artificial Sequence
  chemically treated genomic DNA (Homo sapiens) CpG-island No: 16408
aatttaaaacccaattcgcccacgaaacacaaaaaacaaccccgcgtctacctacacgcacgcacctctcccgacgcttctactcttcgaccaactacttcacccgcaacgactcctacataatcgccaaactcgaataccattcgcgttcttcgacctccaactcccgcaactactccgacgacgaccataacgaaccgaaaaccaccccgaaaacgacgccgtaacgcgcgaactacttaaccgcgtaacgcgatcccaactaccaccgcgaaatcaaaaaatcctcgaaatctaaccaccgaaatcccgacctacgacgcgaaaacgaccgcgcccgataaccacgaaaacccgaaaccaaaatcgccgccacacctaataaactacgtacctatcgcacgaacgccgccatcttaactatacgaaatcctcacaaacccgccgaactatccatacccgatacctaaacgcgaaacccgatataaaccaaaacaaaacgaaaaa

SEQ ID NO: 16409 - DNA, 715 bp, Artificial Sequence
  chemically treated genomic DNA (Homo sapiens) CpG-island No: 16409
attggttgcggtcgttgtggtttcgtttttttgagtggtgcggagttttgtgatgcggagtttcgtgatgtacgtttcgatgtttgcggggttataaaaacgttcgtaagcgttaagtttttttaggagtcgtcggtaagggggtaacgaggaagtttttaagagcgcggtcggaaagtaggtggggagaatttggagaaaaggcgtattttgcggtttcggagattattatgttttagggagtttttcgtagtgggagaggtcgtcggggtaggcggagggtttttagagtcgggggtggggggtttgtggggcggtttcggtttatatcggggagtgcggcgattagacggttagttgtcgaatttgaggtttcggtgggttcgtcgttcgttttttttggataagtttaggcgatgtgagtacgtttagttttttatattttattttcgttttttttaaatagatttagcgtaaaacgagtattgatatagcgggggtttatatttcggaggttttttagggagaggtcggggagtgcggttatttatggtttcgaagttttcgttggtattttgaaaggtatcgtatttttcgtttaaggcgttatttttgtggtagtgggcgtatggacgtttatagttgggcggggtaggatttaaatttcgttagtggtggattagtattggtgataggagagatttgggaagaatta

SEQ ID NO: 16410 - DNA, 715 bp, Artificial Sequence
  chemically treated genomic DNA (Homo sapiens) CpG-island No: 16410
taattcttcccaaatctctcctatcaccaatactaatccaccactaacgaaatttaaatcctaccccgcccaactataaacgtccatacgcccactaccacaaaaataacgccttaaacgaaaaatacgatacctttcaaaataccaacgaaaacttcgaaaccataaataaccgcactccccgacctctccctaaaaaacctccgaaatataaacccccgctatatcaatactcgttttacgctaaatctatttaaaaaaaacgaaaataaaatataaaaaactaaacgtactcacatcgcctaaacttatccaaaaaaaacgaacgacgaacccaccgaaacctcaaattcgacaactaaccgtctaatcgccgcactccccgatataaaccgaaaccgccccacaaaccccccacccccgactctaaaaaccctccgcctaccccgacgacctctcccactacgaaaaactccctaaaacataataatctccgaaaccgcaaaatacgccttttctccaaattctccccacctactttccgaccgcgctcttaaaaacttcctcgttacccccttaccgacgactcctaaaaaaacttaacgcttacgaacgtttttataaccccgcaaacatcgaaacgtacatcacgaaactccgcatcacaaaactccgcaccactcaaaaaaacgaaaccacaacgaccgcaaccaat

SEQ ID NO: 16411 - DNA, 715 bp, Artificial Sequence
  chemically treated genomic DNA (Homo sapiens) CpG-island No: 16411
taattttttttagattttttttattattaatattggtttattattggcggaatttaaattttgtttcgtttaattgtaaacgtttatgcgtttattattataagggtaacgttttaagcgagaaatacgatgttttttaggatgttagcggggatttcggagttataggtaatcgtatttttcgatttttttttaaagaattttcgggatgtgggttttcgttgtgttagtgttcgttttgcgttaggtttgtttgggagagacgggagtgaaatgtaggaggttgggcgtgtttatatcgtttggatttgtttaagagaggcgggcgacggatttatcgaggttttagattcggtagttggtcgtttggtcgtcgtatttttcggtgtgggtcggggtcgttttataggttttttattttcgattttgaggatttttcgtttgtttcgacgattttttttattgcgagagattttttgagatataatggttttcgaggtcgtagggtgcgttttttttttagattttttttatttgtttttcggtcgcgtttttaagagttttttcgttgtttttttgtcggcggtttttgaggagatttggcgtttgcgagcgtttttatagtttcgtaggtatcggggcgtgtattacgaagtttcgtattataaagtttcgtattatttaaggaggcggggttatagcggtcgtagttaat

SEQ ID NO: 16412 - DNA, 715 bp, Artificial Sequence
  chemically treated genomic DNA (Homo sapiens) CpG-island No: 16412
attaactacgaccgctataaccccgcctccttaaataatacgaaactttataatacgaaacttcgtaatacacgccccgatacctacgaaactataaaaacgctcgcaaacgccaaatctcctcaaaaaccgccgacaaaaaaacaacgaaaaaactcttaaaaacgcgaccgaaaaacaaataaaaaaaatctaaaaaaaaaacgcaccctacgacctcgaaaaccattatatctcaaaaaatctctcgcaataaaaaaaatcgtcgaaacaaacgaaaaatcctcaaaatcgaaaataaaaaacctataaaacgaccccgacccacaccgaaaaatacgacgaccaaacgaccaactaccgaatctaaaacctcgataaatccgtcgcccgcctctcttaaacaaatccaaacgatataaacacgcccaacctcctacatttcactcccgtctctcccaaacaaacctaacgcaaaacgaacactaacacaacgaaaacccacatcccgaaaattctttaaaaaaaaatcgaaaaatacgattacctataactccgaaatccccgctaacatcctaaaaaacatcgtatttctcgcttaaaacgttacccttataataataaacgcataaacgtttacaattaaacgaaacaaaatttaaattccgccaataataaaccaatattaataataaaaaaaatctaaaaaaaatta

SEQ ID NO: 16413 - DNA, 639 bp, Artificial Sequence
  chemically treated genomic DNA (Homo sapiens) CpG-island No: 16413
gtgttcggttttcgcgtaattttttagtttcgtggttcgatttatttttaatttggttagttttcgtcgttttttttttttttttatcggttttttttttcgatcgttttaggagagaagttttttttttgtagtttttgtttttagcgttttcgggatttttcggttatgattaagtatttgcggatatacggggtcgtttcgtatcgttgttttttgtgcggggtcggttgttttagtttggtttttatgtaggcgtatatgcgcggttattcgtttagttaattttcgttcggatggattattcgttttatttttttttattttttttcgaggtcgtttcggttttcgatttttttttgttgtttttttttttttattatttgacggggtgtcggtagcgttttagttaagagtttaattaaagaacgaaaagcgggtcggttcggtttttgatttggtatcgttgttacggcggtttagtaaatttcgttttagaagcgttttaggaagggcgtcgagtgtttttttttggacgatcgcgggtcgtagaagtttaggttagcgagttttatagagtgaggatattgaagtgtgtaggagcgaaggttaatagtaggggagattgtcgattttatt

SEQ ID NO: 16414 - DNA, 639 bp, Artificial Sequence
  chemically treated genomic DNA (Homo sapiens) CpG-island No: 16414
aataaaatcgacaatctcccctactattaaccttcgctcctacacacttcaatatcctcactctataaaactcgctaacctaaacttctacgacccgcgatcgtccaaaaaaaaacactcgacgcccttcctaaaacgcttctaaaacgaaatttactaaaccgccgtaacaacgataccaaatcaaaaaccgaaccgacccgcttttcgttctttaattaaactcttaactaaaacgctaccgacaccccgtcaaataataaaaaaaaaaaaacaacaaaaaaaaatcgaaaaccgaaacgacctcgaaaaaaaataaaaaaaaataaaacgaataatccatccgaacgaaaattaactaaacgaataaccgcgcatatacgcctacataaaaaccaaactaaaacaaccgaccccgcacaaaaaacaacgatacgaaacgaccccgtatatccgcaaatacttaatcataaccgaaaaatcccgaaaacgctaaaaacaaaaactacaaaaaaaaaacttctctcctaaaacgatcgaaaaaaaaaaccgataaaaaaaaaaaaaaaacgacgaaaactaaccaaattaaaaataaatcgaaccacgaaactaaaaaattacgcgaaaaccgaacac

SEQ ID NO: 16415 - DNA, 639 bp, Artificial Sequence
  chemically treated genomic DNA (Homo sapiens) CpG-island No: 16415
gatgagatcgataattttttttattgttaattttcgtttttgtatattttagtgtttttattttgtagggttcgttggtttgggtttttgcgattcgcgatcgtttaggagagggtattcggcgttttttttggggcgtttttggggcggaatttgttaggtcgtcgtagtagcggtgttaggttagaagtcgagtcggttcgtttttcgttttttaattggatttttggttaagacgttatcgatatttcgttaggtggtggaggaagaaggataatagggagaggtcgagggtcgagacggtttcgaggaggagtagaggaaggtggagcggatggtttattcgggcgggagttggttgggcgagtgatcgcgtatgtgcgtttgtatggaggttaggttgggatagtcggtttcgtatagggagtagcggtacggagcggtttcgtgtgttcgtaggtgtttggttatggtcgagaagtttcgggagcgttgaggataaaggttataggagaagggttttttttttagagcggtcggaaggggaggtcggtgaaggaaggaagaaggcggcgaaagttggttaagttaggggtggatcgggttacggggttaggggattgcgcgggaatcgggtat

SEQ ID NO: 16416 - DNA, 639 bp, Artificial Sequence
  chemically treated genomic DNA (Homo sapiens) CpG-island No: 16416
atacccgattcccgcgcaatcccctaaccccgtaacccgatccacccctaacttaaccaactttcgccgccttcttccttccttcaccgacctccccttccgaccgctctaaaaaaaaaacccttctcctataacctttatcctcaacgctcccgaaacttctcgaccataaccaaacacctacgaacacacgaaaccgctccgtaccgctactccctatacgaaaccgactatcccaacctaacctccatacaaacgcacatacgcgatcactcgcccaaccaactcccgcccgaataaaccatccgctccaccttcctctactcctcctcgaaaccgtctcgaccctcgacctctccctattatccttcttcctccaccacctaacgaaatatcgataacgtcttaaccaaaaatccaattaaaaaacgaaaaacgaaccgactcgacttctaacctaacaccgctactacgacgacctaacaaattccgccccaaaaacgccccaaaaaaaacgccgaataccctctcctaaacgatcgcgaatcgcaaaaacccaaaccaacgaaccctacaaaataaaaacactaaaatatacaaaaacgaaaattaacaataaaaaaaattatcgatctcatc

SEQ ID NO: 16417 - DNA, 535 bp, Artificial Sequence
  chemically treated genomic DNA (Homo sapiens) CpG-island No: 16417
tgtttagcgggatggatattttttttattttcgaggcgtttcgttttttttaggaggtagtcggtttcgaggattcggtgttcgggtatattttgcggtatgtcggttttggattggtgggggttgtgcgatcgtaagttattcgttttttttattgtaatttacggcgcgcggagtttgatttgggaacgttcggttcgggagagagaggaacgcgtgtttcgattttgttttcggttattcgtttttttttcgggagtatacggatttcgagatcgcggttttttcggcgttttttttttatatcgtgttaagtcgtcgttaggtcgcgtttggaacggagattgattatgttttttatcgttttttttttagtttacgttttttgtagtcgcgaattgtattttttagggtttcgggggtttcggggttcgagttcgcggtattttgggagtggtagtttacgcgggtcgtcggtttagttaagaataatgggaggagtttggggttaggattatatttttcggagattcgg

SEQ ID NO: 16418 - DNA, 535 bp, Artificial Sequence
  chemically treated genomic DNA (Homo sapiens) CpG-island No: 16418
ccgaatctccgaaaaatataatcctaaccccaaactcctcccattattcttaactaaaccgacgacccgcgtaaactaccactcccaaaataccgcgaactcgaaccccgaaacccccgaaaccctaaaaaatacaattcgcgactacaaaaaacgtaaactaaaaaaaaaacgataaaaaacataatcaatctccgttccaaacgcgacctaacgacgacttaacacgatataaaaaaaaaacgccgaaaaaaccgcgatctcgaaatccgtatactcccgaaaaaaaaacgaataaccgaaaacaaaatcgaaacacgcgttcctctctctcccgaaccgaacgttcccaaatcaaactccgcgcgccgtaaattacaataaaaaaaacgaataacttacgatcgcacaacccccaccaatccaaaaccgacataccgcaaaatatacccgaacaccgaatcctcgaaaccgactacctcctaaaaaaaacgaaacgcctcgaaaataaaaaaaatatccatcccgctaaaca

SEQ ID NO: 16419 - DNA, 535 bp, Artificial Sequence
  chemically treated genomic DNA (Homo sapiens) CpG-island No: 16419
tcgggttttcgggaggtgtggttttagttttaggttttttttattgtttttggttaggtcggcggttcgcgtggattattatttttagggtgtcgcgggttcgggtttcgggattttcgaggttttgggaaatgtagttcgcggttgtaggaggcgtgggttggagaaggagcggtggaaagtatagttagttttcgttttaggcgcgatttggcggcggtttggtacggtgtggagggaagacgtcggagaggtcgcggtttcggggttcgtgtgttttcggagaggaggcgggtggtcgaaagtagggtcggagtacgcgtttttttttttttcgggtcgagcgtttttagattagatttcgcgcgtcgtggattgtagtggaaggggcgagtgatttgcggtcgtatagtttttattagtttaggatcggtatgtcgtaaggtgtgttcggatatcgagttttcggggtcggttgttttttggggaggacggggcgtttcgggggtggaagaagtgtttatttcgttggata

SEQ ID NO: 16420 - DNA, 535 bp, Artificial Sequence
  chemically treated genomic DNA (Homo sapiens) CpG-island No: 16420
tatccaacgaaataaacacttcttccacccccgaaacgccccgtcctccccaaaaaacaaccgaccccgaaaactcgatatccgaacacaccttacgacataccgatcctaaactaataaaaactatacgaccgcaaatcactcgccccttccactacaatccacgacgcgcgaaatctaatctaaaaacgctcgacccgaaaaaaaaaaaaacgcgtactccgaccctactttcgaccacccgcctcctctccgaaaacacacgaaccccgaaaccgcgacctctccgacgtcttccctccacaccgtaccaaaccgccgccaaatcgcgcctaaaacgaaaactaactatactttccaccgctccttctccaacccacgcctcctacaaccgcgaactacatttcccaaaacctcgaaaatcccgaaacccgaacccgcgacaccctaaaaataataatccacgcgaaccgccgacctaaccaaaaacaataaaaaaaacctaaaactaaaaccacacctcccgaaaacccga

SEQ ID NO: 16421 - DNA, 900 bp, Artificial Sequence
  chemically treated genomic DNA (Homo sapiens) CpG-island No: 16421
cgtttttcgggttttggtcgggaatttcgtcgtttcggttttcgcgttttggttgtcggcggaagaagcgaggcgttcggattatatttttcggaggttttcgcggttcgtttttttgcggtcgcgacgcgggggtttgtgttttttaggtgcggttcgagggcgtcggtcggtcgcggattttttttttcgtggtgttttgcgcgtggtcggttcggttttcggtttttcgcggcggcgttggttgttgtcgtgcgtcgcggtcgtttcgtttcgttttcgttttttttttttttttcggttttgcgtacgggtcgttttttttttcgttttttcggttttttttacggtgttaagatggcggcggcggcgggcggcggtagttgtttcgggtttggtttcgcgcggggtcgtttttcgggtcggtcgcggggcgtcggcgggggcgggggtcgcggcggacggggtaacggggtcgaaagagtgcgggtagttttgcggcgcggcggtggcgcgacggggtcgggcggagtcgagttcggggaggatacggttttgtttcgtttgttggggtttcgtcggggtttgcgtcggtttcgtcgtttgtgggtcggttcgcgggtttagcggggtcggggacggggtcggggtcggggttggggttcgagtcgaggttgcgtgtcggaggaggagagtagtgacggggaattcgacgaggaggtgaggcggttggaggcgttttcggcgtcgggtggggcggaggtcggggtttttaggggtttgggttgtttcgggggcggcgtgggtaggtcgggtttttagggttttttcggagagacggggtacggagggagggcggttgtatgtagttttcgggggaaagggtttttggaagtgggt

SEQ ID NO: 16422 - DNA, 900 bp, Artificial Sequence
  chemically treated genomic DNA (Homo sapiens) CpG-island No: 16422
acccacttccaaaaaccctttcccccgaaaactacatacaaccgccctccctccgtaccccgtctctccgaaaaaaccctaaaaacccgacctacccacgccgcccccgaaacaacccaaacccctaaaaaccccgacctccgccccacccgacgccgaaaacgcctccaaccgcctcacctcctcgtcgaattccccgtcactactctcctcctccgacacgcaacctcgactcgaaccccaaccccgaccccgaccccgtccccgaccccgctaaacccgcgaaccgacccacaaacgacgaaaccgacgcaaaccccgacgaaaccccaacaaacgaaacaaaaccgtatcctccccgaactcgactccgcccgaccccgtcgcgccaccgccgcgccgcaaaactacccgcactctttcgaccccgttaccccgtccgccgcgacccccgcccccgccgacgccccgcgaccgacccgaaaaacgaccccgcgcgaaaccaaacccgaaacaactaccgccgcccgccgccgccgccatcttaacaccgtaaaaaaaaccgaaaaaacgaaaaaaaaaacgacccgtacgcaaaaccgaaaaaaaaaaaaaaaacgaaaacgaaacgaaacgaccgcgacgcacgacaacaaccaacgccgccgcgaaaaaccgaaaaccgaaccgaccacgcgcaaaacaccacgaaaaaaaaaatccgcgaccgaccgacgccctcgaaccgcacctaaaaaacacaaacccccgcgtcgcgaccgcaaaaaaacgaaccgcgaaaacctccgaaaaatataatccgaacgcctcgcttcttccgccgacaaccaaaacgcgaaaaccgaaacgacgaaattcccgaccaaaacccgaaaaacg

SEQ ID NO: 16423 - DNA, 900 bp, Artificial Sequence
  chemically treated genomic DNA (Homo sapiens) CpG-island No: 16423
atttatttttagaggttttttttttcggaagttgtatgtagtcgtttttttttcgtgtttcgttttttcgaaggaattttgaggattcggtttgtttacgtcgttttcgggataatttagatttttggaagtttcggttttcgttttattcggcgtcggggacgtttttaatcgttttattttttcgtcggatttttcgttattgtttttttttttcggtacgtagtttcgattcgggttttagtttcggtttcgatttcgttttcggtttcgttggattcgcgggtcggtttataggcggcggagtcggcgtaggtttcggcggagttttagtaaacggagtagggtcgtgtttttttcgggttcggtttcgttcggtttcgtcgcgttatcgtcgcgtcgtagagttattcgtattttttcggtttcgttgtttcgttcgtcgcggttttcgttttcgtcggcgtttcgcggtcggttcgggaagcggtttcgcgcggagttaggttcggggtaattgtcgtcgttcgtcgtcgtcgttattttggtatcgtgagaggggtcggggaggcggggggaggggcggttcgtgcgtagggtcggggggaggggagagagcgggggcggggcggggcggtcgcggcgtacgataataattagcgtcgtcgcgggagatcgggggtcgggtcggttacgcgtagggtattacgggagagggagttcgcggtcggtcggcgttttcggatcgtatttggggagtatagattttcgcgtcgcggtcgtagaggggcgaatcgcgggggttttcgggaaatgtagttcggacgtttcgtttttttcgtcggtagttagggcgcgagggtcgggacggcggggttttcggttaggattcggaaagcg

SEQ ID NO: 16424 - DNA, 900 bp, Artificial Sequence
  chemically treated genomic DNA (Homo sapiens) CpG-island No: 16424
cgctttccgaatcctaaccgaaaaccccgccgtcccgaccctcgcgccctaactaccgacgaaaaaaacgaaacgtccgaactacatttcccgaaaacccccgcgattcgcccctctacgaccgcgacgcgaaaatctatactccccaaatacgatccgaaaacgccgaccgaccgcgaactccctctcccgtaataccctacgcgtaaccgacccgacccccgatctcccgcgacgacgctaattattatcgtacgccgcgaccgccccgccccgcccccgctctctcccctccccccgaccctacgcacgaaccgcccctccccccgcctccccgacccctctcacgataccaaaataacgacgacgacgaacgacgacaattaccccgaacctaactccgcgcgaaaccgcttcccgaaccgaccgcgaaacgccgacgaaaacgaaaaccgcgacgaacgaaacaacgaaaccgaaaaaatacgaataactctacgacgcgacgataacgcgacgaaaccgaacgaaaccgaacccgaaaaaaacacgaccctactccgtttactaaaactccgccgaaacctacgccgactccgccgcctataaaccgacccgcgaatccaacgaaaccgaaaacgaaatcgaaaccgaaactaaaacccgaatcgaaactacgtaccgaaaaaaaaaaacaataacgaaaaatccgacgaaaaaataaaacgattaaaaacgtccccgacgccgaataaaacgaaaaccgaaacttccaaaaatctaaattatcccgaaaacgacgtaaacaaaccgaatcctcaaaattccttcgaaaaaacgaaacacgaaaaaaaaacgactacatacaacttccgaaaaaaaaaacctctaaaaataaat

SEQ ID NO: 16425 - DNA, 838 bp, Artificial Sequence
  chemically treated genomic DNA (Homo sapiens) CpG-island No: 16425
  unsure (634, 687)
ggtaagacggttcgatataagcgaatataataaatatcgcgtagtataagttataaaatatatttacgcgggataaatagacgttattcgattttttcgtaagtaaatacgaagacgttttcgtaacggtcgtgaaaagtaacgtataagttagaacgcgttcgagtaagagagtataatgtagggcgcgatcgcgtatattagatatgcgagcgacgatagcgtttaacgttaattatatgatcggtttagtacgagatacgagtacgtgatttaatataagaatgaacgtgttacgcgtacgagattattatcgttatatacgaatatatcgtgatagagatttacgattacgagattgtcgtatcgaagtatatatttatagcgagtaagagatatagagagcgatatacggagacgcgatatcgacgagagttgataacgtatatatatacgcgatatatatagcgacgtgatattcgcgagaacgagtaagatagatatatcgagatagatattgatatatagatatagtgagatatatttttttttagtcggcgtagtcgattgtatatttgcgatatattgacgcgttgcgtaggatagatacgtatagagtcgtacgagatagagntagagaacgagatagagatacgcgagatcgacgcgagatatatagattagtancgtagagagacgtagtatatagagatatcgacgtgatatatcgagatatattatttattcgtatacgcgcggtacgtgttagagacgatatattcgattagatcgatatagatatacgatttagagattatacgtcgagcgcgtagacgtt

SEQ ID NO: 16426 - DNA, 838 bp, Artificial Sequence
  chemically treated genomic DNA (Homo sapiens) CpG-island No: 16426
  unsure (152, 205)
aacgtctacgcgctcgacgtataatctctaaatcgtatatctatatcgatctaatcgaatatatcgtctctaacacgtaccgcgcgtatacgaataaataatatatctcgatatatcacgtcgatatctctatatactacgtctctctacgntactaatctatatatctcgcgtcgatctcgcgtatctctatctcgttctctanctctatctcgtacgactctatacgtatctatcctacgcaacgcgtcaatatatcgcaaatatacaatcgactacgccgactaaaaaaaaatatatctcactatatctatatatcaatatctatctcgatatatctatcttactcgttctcgcgaatatcacgtcgctatatatatcgcgtatatatatacgttatcaactctcgtcgatatcgcgtctccgtatatcgctctctatatctcttactcgctataaatatatacttcgatacgacaatctcgtaatcgtaaatctctatcacgatatattcgtatataacgataataatctcgtacgcgtaacacgttcattcttatattaaatcacgtactcgtatctcgtactaaaccgatcatataattaacgttaaacgctatcgtcgctcgcatatctaatatacgcgatcgcgccctacattatactctcttactcgaacgcgttctaacttatacgttacttttcacgaccgttacgaaaacgtcttcgtatttacttacgaaaaaatcgaataacgtctatttatcccgcgtaaatatattttataacttatactacgcgatatttattatattcgcttatatcgaaccgtcttacc

SEQ ID NO: 16427 - DNA, 838 bp, Artificial Sequence
  chemically treated genomic DNA (Homo sapiens) CpG-island No: 16427
  unsure (152, 205)
ggcgtttgcgcgttcggcgtgtgatttttgagtcgtgtgtttgtgtcgatttggtcgagtgtgtcgtttttgatacgtgtcgcgcgtgtgcgagtgggtggtgtgtttcggtgtgttacgtcgatgtttttgtatgttgcgtttttttacgntattggtttgtatgtttcgcgtcggtttcgcgtgtttttgtttcgttttttgnttttgtttcgtgcgattttgtgcgtgtttgttttgcgtagcgcgttagtgtgtcgtaggtgtgtagtcggttgcgtcgattgagagagggtgtgttttattgtgtttgtgtgttagtgtttgtttcggtgtgtttgttttgttcgttttcgcgggtgttacgtcgttgtgtgtgtcgcgtgtgtgtgtgcgttattagttttcgtcggtgtcgcgttttcgtgtgtcgttttttgtgttttttgttcgttgtggatgtgtgtttcggtgcggtagtttcgtggtcgtaagtttttgttacggtgtattcgtgtgtagcgatggtggtttcgtgcgcgtgatacgtttatttttgtgttgagttacgtgttcgtgtttcgtgttgagtcgattatgtggttggcgttaggcgttgtcgtcgttcgtatgtttggtgtgcgcggtcgcgttttgtattgtgtttttttgttcgggcgcgttttggtttgtgcgttgttttttacggtcgttgcgggggcgttttcgtgtttgtttgcgggggggtcgggtggcgtttgtttgtttcgcgtgggtgtgttttgtggtttgtgttgcgcggtgtttgttgtgttcgtttgtgtcgggtcgttttgtt

SEQ ID NO: 16428 - DNA, 838 bp, Artificial Sequence
  chemically treated genomic DNA (Homo sapiens) CpG-island No: 16428
  unsure (634, 687)
aacaaaacgacccgacacaaacgaacacaacaaacaccgcgcaacacaaaccacaaaacacacccacgcgaaacaaacaaacgccacccgacccccccgcaaacaaacacgaaaacgcccccgcaacgaccgtaaaaaacaacgcacaaaccaaaacgcgcccgaacaaaaaaacacaatacaaaacgcgaccgcgcacaccaaacatacgaacgacgacaacgcctaacgccaaccacataatcgactcaacacgaaacacgaacacgtaactcaacacaaaaataaacgtatcacgcgcacgaaaccaccatcgctacacacgaatacaccgtaacaaaaacttacgaccacgaaactaccgcaccgaaacacacatccacaacgaacaaaaaacacaaaaaacgacacacgaaaacgcgacaccgacgaaaactaataacgcacacacacacgcgacacacacaacgacgtaacacccgcgaaaacgaacaaaacaaacacaccgaaacaaacactaacacacaaacacaataaaacacaccctctctcaatcgacgcaaccgactacacacctacgacacactaacgcgctacgcaaaacaaacacgcacaaaatcgcacgaaacaaaancaaaaaacgaaacaaaaacacgcgaaaccgacgcgaaacatacaaaccaatancgtaaaaaaacgcaacatacaaaaacatcgacgtaacacaccgaaacacaccacccactcgcacacgcgcgacacgtatcaaaaacgacacactcgaccaaatcgacacaaacacacgactcaaaaatcacacgccgaacgcgcaaacgcc

SEQ ID NO: 16429 - DNA, 638 bp, Artificial Sequence
  chemically treated genomic DNA (Homo sapiens) CpG-island No: 16429
  unsure (435, 475)
gttagttcgtggtgttgcggggatatcgggtcggtttcgtcgtcgtcgtcggggttcgagattatcgtcgtcgcggcgggtatcgcggacgagtcggggttcgtagtcgagatggtggcggcggtcgggggcgtagtcggggacggagtgtgttggggttgcggcggcggttgtttgttgtagggtttattagcgttggggtcggtggaggacgggcggtttatcgcgtttcgaattaattatggaattgcgggcgtttgtttggtcgcggggtcgttcgggttaaggcggtgcgcgtttcgcgggtagcgagtttcgaggtaacgttacggcgtttagtttaggttcgggcggcggagacgttcggcgttcggtaggcggagggttggatcgcgttgatgtatttcgtagttttcggcgtttcgagtacgtttncgcgtcggatttcgcgcggtgtttttttttcggcggcgtntttcgggtttcgaattttagcggtgcgtagagttttggtttattcgtttttggaatagtcggtgacgtaagttttcggggtcgcgcgcggacgtgacgtttggatacgtgtgcggtcgtttaggcgcgcggggattggtagagttattttgcgtcgggggcgt

SEQ ID NO: 16430 - DNA, 638 bp, Artificial Sequence
  chemically treated genomic DNA (Homo sapiens) CpG-island No: 16430
  unsure (164, 204)
acgcccccgacgcaaaataactctaccaatccccgcgcgcctaaacgaccgcacacgtatccaaacgtcacgtccgcgcgcgaccccgaaaacttacgtcaccgactattccaaaaacgaataaaccaaaactctacgcaccgctaaaattcgaaacccgaaanacgccgccgaaaaaaaaacaccgcgcgaaatccgacgcgnaaacgtactcgaaacgccgaaaactacgaaatacatcaacgcgatccaaccctccgcctaccgaacgccgaacgtctccgccgcccgaacctaaactaaacgccgtaacgttacctcgaaactcgctacccgcgaaacgcgcaccgccttaacccgaacgaccccgcgaccaaacaaacgcccgcaattccataattaattcgaaacgcgataaaccgcccgtcctccaccgaccccaacgctaataaaccctacaacaaacaaccgccgccgcaaccccaacacactccgtccccgactacgcccccgaccgccgccaccatctcgactacgaaccccgactcgtccgcgatacccgccgcgacgacgataatctcgaaccccgacgacgacgacgaaaccgacccgatatccccgcaacaccacgaactaac

SEQ ID NO: 16431 - DNA, 638 bp, Artificial Sequence
  chemically treated genomic DNA (Homo sapiens) CpG-island No: 16431
  unsure (164, 204)
acgttttcggcgtagggtggttttgttagttttcgcgcgtttgggcggtcgtatacgtgtttaggcgttacgttcgcgcgcggtttcgggggtttgcgttatcggttgttttagaagcgggtgggttagggttttgcgtatcgttggggttcggggttcggggnacgtcgtcgggaggagggtatcgcgcggggttcgacgcgnaggcgtgttcggaacgtcgggggttgcggagtgtattagcgcggtttagtttttcgtttgtcgggcgtcgagcgttttcgtcgttcggatttgggttgggcgtcgtggcgttgtttcggagttcgttgttcgcggggcgcgtatcgttttgattcgggcggtttcgcggttaggtaggcgttcgtagttttatggttggttcggagcgcgatgagtcgttcgttttttatcggttttagcgttaataaattttgtagtaagtagtcgtcgtcgtagttttagtatatttcgttttcggttgcgttttcggtcgtcgttattatttcggttgcgggtttcggttcgttcgcggtgttcgtcgcggcggcggtgatttcgggtttcggcggcggcggcggggtcggttcggtgttttcgtagtattacgagttgat

SEQ ID NO: 16432 - DNA, 638 bp, Artificial Sequence
  chemically treated genomic DNA (Homo sapiens) CpG-island No: 16432
  unsure (435, 475)
atcaactcgtaatactacgaaaacaccgaaccgaccccgccgccgccgccgaaacccgaaatcaccgccgccgcgacgaacaccgcgaacgaaccgaaacccgcaaccgaaataataacgacgaccgaaaacgcaaccgaaaacgaaatatactaaaactacgacgacgactacttactacaaaatttattaacgctaaaaccgataaaaaacgaacgactcatcgcgctccgaaccaaccataaaactacgaacgcctacctaaccgcgaaaccgcccgaatcaaaacgatacgcgccccgcgaacaacgaactccgaaacaacgccacgacgcccaacccaaatccgaacgacgaaaacgctcgacgcccgacaaacgaaaaactaaaccgcgctaatacactccgcaacccccgacgttccgaacacgcctncgcgtcgaaccccgcgcgataccctcctcccgacgacgtnccccgaaccccgaaccccaacgatacgcaaaaccctaacccacccgcttctaaaacaaccgataacgcaaacccccgaaaccgcgcgcgaacgtaacgcctaaacacgtatacgaccgcccaaacgcgcgaaaactaacaaaaccaccctacgccgaaaacgt

SEQ ID NO: 16433 - DNA, 769 bp, Artificial Sequence
  chemically treated genomic DNA (Homo sapiens) CpG-island No: 16433
atttcgacgttttatttagattcgcgttttattagggcggcgcgcggcgatttcgcgtttcgcggagtttcgggttcgcgcgcgttcgttcgttttcggagatagattagcgcgcgcgtttcgggtcgtttttttttagcgcgcgttcgtttcggggttcgcgtcgtcgtcgtcgtcgtcgtcgcgcgcgcgtagtttaagtaaaggaggaaaaaaaaaagggggaaaaatagaaagcggcggcggttgtagtagcgattcgtcgtcggattgggttaagtcgggcggcggtcgcgcgagtcggcgatttagggtattggcggcggttagttagggcgggtcgtgtttaaaaaaaaaagtcgcggcggcggcggttgtttagggaaggaggtttgagggtcgcgtgtagcgggcgggtagttgggtgggttgggggcggtcgcgcggcgtttcggagtttcgggtcgttcggagtcggcgggcgggcggaggcggaggcggcggcggttgtagcggttgtaggagcggcggcggttgcggcggcggcggcggtattttttttttatatgattttattgtttgttttcgtgattagcgcgagcggttttcgtatttttttcgtttttttttgtcgcgcggcgtgagcgtcgggttcggggttttttcggtcgttcgttttttttttttttttttttttttttttttttttttttttcgggtttcgcgtttttttcgttttcgttttttttatggatatgttggattcggg

SEQ ID NO: 16434 - DNA, 769 bp, Artificial Sequence
  chemically treated genomic DNA (Homo sapiens) CpG-island No: 16434
cccgaatccaacatatccataaaaaaaacgaaaacgaaaaaaacgcgaaacccgaaaaaaaaaaaaaaaaaaaaaaaaaaaaaaaaaaaaaaaacgaacgaccgaaaaaaccccgaacccgacgctcacgccgcgcgacaaaaaaaaacgaaaaaaatacgaaaaccgctcgcgctaatcacgaaaacaaacaataaaatcatataaaaaaaaaataccgccgccgccgccgcaaccgccgccgctcctacaaccgctacaaccgccgccgcctccgcctccgcccgcccgccgactccgaacgacccgaaactccgaaacgccgcgcgaccgcccccaacccacccaactacccgcccgctacacgcgaccctcaaacctccttccctaaacaaccgccgccgccgcgacttttttttttaaacacgacccgccctaactaaccgccgccaataccctaaatcgccgactcgcgcgaccgccgcccgacttaacccaatccgacgacgaatcgctactacaaccgccgccgctttctatttttcccccttttttttttcctcctttacttaaactacgcgcgcgcgacgacgacgacgacgacgacgcgaaccccgaaacgaacgcgcgctaaaaaaaaacgacccgaaacgcgcgcgctaatctatctccgaaaacgaacgaacgcgcgcgaacccgaaactccgcgaaacgcgaaatcgccgcgcgccgccctaataaaacgcgaatctaaataaaacgtcgaaat

SEQ ID NO: 16435 - DNA, 769 bp, Artificial Sequence
  chemically treated genomic DNA (Homo sapiens) CpG-island No: 16435
ttcgggtttagtatgtttatggggggggcgggggcggggggggcgcggggttcgggggggaggggaggggaggggagggagggaggggagggggcgggcggtcgggggggtttcgagttcggcgtttacgtcgcgcggtaggaggggacggaggagatacgggagtcgttcgcgttgattacggggataaatagtggggttatgtgaggaggagatgtcgtcgtcgtcgtcgtagtcgtcgtcgtttttgtagtcgttgtagtcgtcgtcgttttcgttttcgttcgttcgtcggtttcgggcggttcgaggtttcgggacgtcgcgcggtcgtttttagtttatttagttgttcgttcgttgtacgcggtttttaggtttttttttttgagtagtcgtcgtcgtcgcgatttttttttttgaatacggttcgttttggttggtcgtcgttagtgttttggatcgtcggttcgcgcggtcgtcgttcggtttggtttagttcggcggcggatcgttgttgtagtcgtcgtcgttttttattttttttttttttttttttttttttttatttgagttgcgcgcgcgcggcggcggcggcggcggcggcgcgagtttcggggcggacgcgcgttggggggaggcggttcggggcgcgcgcgttggtttgttttcgggggcgggcgggcgcgcgcgagttcggggtttcgcggggcgcgaggtcgtcgcgcgtcgttttggtgaaacgcgggtttggatggaacgtcggggt

SEQ ID NO: 16436 - DNA, 769 bp, Artificial Sequence
  chemically treated genomic DNA (Homo sapiens) CpG-island No: 16436
accccgacgttccatccaaacccgcgtttcaccaaaacgacgcgcgacgacctcgcgccccgcgaaaccccgaactcgcgcgcgcccgcccgcccccgaaaacaaaccaacgcgcgcgccccgaaccgcctccccccaacgcgcgtccgccccgaaactcgcgccgccgccgccgccgccgccgcgcgcgcgcaactcaaataaaaaaaaaaaaaaaaaaaaaaaaaaaataaaaaacgacgacgactacaacaacgatccgccgccgaactaaaccaaaccgaacgacgaccgcgcgaaccgacgatccaaaacactaacgacgaccaaccaaaacgaaccgtattcaaaaaaaaaaatcgcgacgacgacgactactcaaaaaaaaaaacctaaaaaccgcgtacaacgaacgaacaactaaataaactaaaaacgaccgcgcgacgtcccgaaacctcgaaccgcccgaaaccgacgaacgaacgaaaacgaaaacgacgacgactacaacgactacaaaaacgacgacgactacgacgacgacgacgacatctcctcctcacataaccccactatttatccccgtaatcaacgcgaacgactcccgtatctcctccgtcccctcctaccgcgcgacgtaaacgccgaactcgaaacccccccgaccgcccgccccctcccctccctccctcccctcccctcccctcccccccgaaccccgcgccccccccgcccccgccccccccataaacatactaaacccgaa

SEQ ID NO: 16437 - DNA, 840 bp, Artificial Sequence
  chemically treated genomic DNA (Homo sapiens) CpG-island No: 16437
gttgtttcggttatcgttgttgtcgtcgttaggtaagattttcggttcggtcgtgttttcgcgtttcggtttcggtttcggtttcgcggtttgtaggtcggggtcgttatgatttcgagcggtcgcgggttcggtttaaaatggaggtcgtcggcgcgggggggatttggcgtttttcgttttcggttttcggtttcggcggcgttttcggttttaggcgcggtcgggtgggattggggttttgtagttgggcgcgggggcgggggcgcgggcgcgggtcgcgttgattttgtttttttttgtgtttttggtagttacgataagggattcgaggcggaggagggcgtcgagttgtaggaaggtgagtgtttgtcgggtcggtcgcgttcggggagggttgggggcgttcggcgcggttttgatcgtgtttcgatttttttcggttttaggcggggacggtttaggagcggaggagtagatagcggtggttattattagcgtttagtaggcggcgttcggcgattataatatttagtattagtttcgtatagagataaatggaggataggtgagcggcgggtcgcgagggcgaacgggcgggcgggcgggcgcgtcgggaaggttcggatttggttttagcgtcggtttcgtcgttttgtcgttttttgtaggtgatatatcgcgtagtttaggtgattgatggttagttggacggttagggcgatatagttggcgtcgttagcgtcgtgtttatcgttgttttcgcgggggggtagtaggttgtgatttaggtgggtgtggacggggtagtttagcgttcgggtttcgtcgttgtttttg

SEQ ID NO: 16438 - DNA, 840 bp, Artificial Sequence
  chemically treated genomic DNA (Homo sapiens) CpG-island No: 16438
caaaaacaacgacgaaacccgaacgctaaactaccccgtccacacccacctaaatcacaacctactacccccccgcgaaaacaacgataaacacgacgctaacgacgccaactatatcgccctaaccgtccaactaaccatcaatcacctaaactacgcgatatatcacctacaaaaaacgacaaaacgacgaaaccgacgctaaaaccaaatccgaaccttcccgacgcgcccgcccgcccgcccgttcgccctcgcgacccgccgctcacctatcctccatttatctctatacgaaactaatactaaatattataatcgccgaacgccgcctactaaacgctaataataaccaccgctatctactcctccgctcctaaaccgtccccgcctaaaaccgaaaaaaatcgaaacacgatcaaaaccgcgccgaacgcccccaaccctccccgaacgcgaccgacccgacaaacactcaccttcctacaactcgacgccctcctccgcctcgaatcccttatcgtaactaccaaaaacacaaaaaaaaacaaaatcaacgcgacccgcgcccgcgcccccgcccccgcgcccaactacaaaaccccaatcccacccgaccgcgcctaaaaccgaaaacgccgccgaaaccgaaaaccgaaaacgaaaaacgccaaatcccccccgcgccgacgacctccattttaaaccgaacccgcgaccgctcgaaatcataacgaccccgacctacaaaccgcgaaaccgaaaccgaaaccgaaacgcgaaaacacgaccgaaccgaaaatcttacctaacgacgacaacaacgataaccgaaacaac

SEQ ID NO: 16439 - DNA, 840 bp, Artificial Sequence
  chemically treated genomic DNA (Homo sapiens) CpG-island No: 16439
tagaggtagcggcggggttcgggcgttgggttgtttcgtttatatttatttgggttatagtttgttgttttttcgcgaaggtagcggtggatacgacgttgacggcgttagttgtgtcgttttggtcgtttagttgattattagttatttggattacgcggtatgttatttgtagggggcggtagagcggcgaggtcggcgttggggttaggttcgagttttttcggcgcgttcgttcgttcgttcgttcgttttcgcggttcgtcgtttatttgttttttatttgtttttgtgcggaattggtattggatgttgtggtcgtcgaacgtcgtttgttggacgttggtgatggttatcgttgtttgttttttcgtttttgggtcgttttcgtttggggtcgaggagggtcggggtacggttagggtcgcgtcgagcgtttttagtttttttcgggcgcggtcggttcggtaagtatttatttttttgtagttcgacgttttttttcgtttcgggttttttgtcgtggttgttaggggtataggagggagtagggttagcgcggttcgcgttcgcgttttcgttttcgcgtttagttgtagggttttagttttattcggtcgcgtttgaggtcgggggcgtcgtcgaggtcgggggtcgggggcgggaggcgttaggtttttttcgcgtcggcggtttttattttgagtcgggttcgcggtcgttcgggattatggcggtttcggtttgtaggtcgcggggtcggggtcggggtcggggcgcgggggtacggtcgggtcggggattttatttggcggcggtagtagcggtggtcgaggtagt

SEQ ID NO: 16440 - DNA, 840 bp, Artificial Sequence
  chemically treated genomic DNA (Homo sapiens) CpG-island No: 16440
actacctcgaccaccgctactaccgccgccaaataaaatccccgacccgaccgtacccccgcgccccgaccccgaccccgaccccgcgacctacaaaccgaaaccgccataatcccgaacgaccgcgaacccgactcaaaataaaaaccgccgacgcgaaaaaaacctaacgcctcccgcccccgacccccgacctcgacgacgcccccgacctcaaacgcgaccgaataaaactaaaaccctacaactaaacgcgaaaacgaaaacgcgaacgcgaaccgcgctaaccctactccctcctatacccctaacaaccacgacaaaaaacccgaaacgaaaaaaaacgtcgaactacaaaaaaataaatacttaccgaaccgaccgcgcccgaaaaaaactaaaaacgctcgacgcgaccctaaccgtaccccgaccctcctcgaccccaaacgaaaacgacccaaaaacgaaaaaacaaacaacgataaccatcaccaacgtccaacaaacgacgttcgacgaccacaacatccaataccaattccgcacaaaaacaaataaaaaacaaataaacgacgaaccgcgaaaacgaacgaacgaacgaacgaacgcgccgaaaaaactcgaacctaaccccaacgccgacctcgccgctctaccgccccctacaaataacataccgcgtaatccaaataactaataatcaactaaacgaccaaaacgacacaactaacgccgtcaacgtcgtatccaccgctaccttcgcgaaaaaacaacaaactataacccaaataaatataaacgaaacaacccaacgcccgaaccccgccgctacctcta

SEQ ID NO: 16441 - DNA, 723 bp, Artificial Sequence
  chemically treated genomic DNA (Homo sapiens) CpG-island No: 16441
  unsure (458)
agagagtagacgtcggagtattgagtagtttagattttgcggtatgtttttttcggaagaagcgggagaggcggcggtaagagtagaagtaggattttaagtagagaattaggatagcgaggtcgggggttggatcgtagttcggcggttaggaagtgtgtcggggcggcggggacgttcgggtatttagttaattttacggggcggggcggtcgcgggtcgcgggcggatgacgcgtcggggtcggcggaggagtagttattttttggggtcgtcggtcggggtcgttggttgtatttagcgtcggagtcgggagttagcggtcgtcgttatgttttattagatcggtatttaaggtaatagcgttcggcgcgattcgtagggaaggggttttcgggagagtcgggagagtcgggagggttgtaggatcggtaggggttggagtcggtcgggagttncggaagtcggtttcgcggggcgagtcgggtttgggggttttttcgcgtttttgttttttcggtcgttggcggtttgcgtttttttttagttcgggttttggtggtcgttacggttggagaatttgtttcggaatttcgggggagtcgaagggaaattgggtttttcgaggcgggtttgtgttgaaggggggcgggttttttatcggtttttcgacggtgggttaattttttttttttttgggttttcgagggagaggacgggaat

SEQ ID NO: 16442 - DNA, 723 bp, Artificial Sequence
  chemically treated genomic DNA (Homo sapiens) CpG-island No: 16442
  unsure (266)
attcccgtcctctccctcgaaaacccaaaaaaaaaaaaaattaacccaccgtcgaaaaaccgataaaaaacccgccccccttcaacacaaacccgcctcgaaaaacccaatttcccttcgactcccccgaaattccgaaacaaattctccaaccgtaacgaccaccaaaacccgaactaaaaaaaaacgcaaaccgccaacgaccgaaaaaacaaaaacgcgaaaaaacccccaaacccgactcgccccgcgaaaccgacttccgnaactcccgaccgactccaacccctaccgatcctacaaccctcccgactctcccgactctcccgaaaaccccttccctacgaatcgcgccgaacgctattaccttaaataccgatctaataaaacataacgacgaccgctaactcccgactccgacgctaaatacaaccaacgaccccgaccgacgaccccaaaaaataactactcctccgccgaccccgacgcgtcatccgcccgcgacccgcgaccgccccgccccgtaaaattaactaaatacccgaacgtccccgccgccccgacacacttcctaaccgccgaactacgatccaacccccgacctcgctatcctaattctctacttaaaatcctacttctactcttaccgccgcctctcccgcttcttccgaaaaaaacataccgcaaaatctaaactactcaatactccgacgtctactctct

SEQ ID NO: 16443 - DNA, 723 bp, Artificial Sequence
  chemically treated genomic DNA (Homo sapiens) CpG-island No: 16443
  unsure (266)
gttttcgttttttttttcggggatttaaaaggggaaaaggttggtttatcgtcgggggatcggtggaaggttcgtttttttttaatataggttcgtttcggaaagtttaattttttttcggttttttcggaatttcgggataaattttttaatcgtgacggttattagggttcgggttggaggaggacgtaggtcgttagcggtcgggaaagtaggagcgcggagaggtttttaggttcggttcgtttcgcgagatcggttttcgnagttttcggtcgattttagtttttgtcggttttgtagttttttcggttttttcggttttttcggaagttttttttttgcgagtcgcgtcgggcgttgttattttggatgtcggtttggtgggatatggcggcggtcgttagttttcggtttcggcgttgagtgtagttagcggtttcggtcggcggttttaggaagtggttgttttttcgtcggtttcggcgcgttattcgttcgcgattcgcggtcgtttcgtttcgtgaggttgattgagtgttcgagcgttttcgtcgtttcgatatattttttggtcgtcgggttgcggtttagttttcggtttcgttattttagttttttgtttggggttttgtttttgtttttgtcgtcgtttttttcgtttttttcgggggggatatgtcgtagaatttagattgtttagtgtttcgacgtttgtttttt

SEQ ID NO: 16444 - DNA, 723 bp, Artificial Sequence
  chemically treated genomic DNA (Homo sapiens) CpG-island No: 16444
  unsure (458)
aaaaaacaaacgtcgaaacactaaacaatctaaattctacgacatatcccccccgaaaaaaacgaaaaaaacgacgacaaaaacaaaaacaaaaccccaaacaaaaaactaaaataacgaaaccgaaaactaaaccgcaacccgacgaccaaaaaatatatcgaaacgacgaaaacgctcgaacactcaatcaacctcacgaaacgaaacgaccgcgaatcgcgaacgaataacgcgccgaaaccgacgaaaaaacaaccacttcctaaaaccgccgaccgaaaccgctaactacactcaacgccgaaaccgaaaactaacgaccgccgccatatcccaccaaaccgacatccaaaataacaacgcccgacgcgactcgcaaaaaaaaaacttccgaaaaaaccgaaaaaaccgaaaaaactacaaaaccgacaaaaactaaaatcgaccgaaaactncgaaaaccgatctcgcgaaacgaaccgaacctaaaaacctctccgcgctcctactttcccgaccgctaacgacctacgtcctcctccaacccgaaccctaataaccgtcacgattaaaaaatttatcccgaaattccgaaaaaaccgaaaaaaaattaaactttccgaaacgaacctatattaaaaaaaaacgaaccttccaccgatcccccgacgataaaccaaccttttccccttttaaatccccgaaaaaaaaaacgaaaac

SEQ ID NO: 16445 - DNA, 1018 bp, Artificial Sequence
  chemically treated genomic DNA (Homo sapiens) CpG-island No: 16445
cgtacgatcgttttattattaatcgtacgttttacgttttatttttagtattacgtaacgattgattcgacgtatcgaagttacggtatttcgtattcggtacgaattattacgatagattagaatttaaatcgaattcgaatcggaatcgagacggaattcgttttcgttattcgatagttagggaatttcgtattacgttatacgtatagtttattacgatcggaggttagaaattatatatggtaatcgttaacgtttttttcgattgcgaataagcgtattcggaatttttattcgcgagtcgcgatacgcgtaattagaattcgattttcgcgtaattcgatcgttaaattaggtattgtcgattcggaatcgtcgtcgttcgtcgcgatttatatagttatatagcgattcgttatttacgataatcgtttataggtatttcgtattttacgttacgttttagcgtatttcgtatattagggacgttagatcgcggaaatttgcggagtttatgatcgttagtatattatattaggtaattttaatattttaggatatcgcgacgttagaaattcggagttggtaattttttattatttcgttttcggaaatttcgtatcgtcgtcggatcgcgaaaattcgcgatacgcgatacgggcgttaatcggtagttacgtagatttcggcgagtttcgaaacgcgacgaattttttaagcgcgagtttagagatatacggataacgggaaatttacgcgtaacggcgatttcgcgaattaacgacgcggcgaattatggacgttatttttcgaggtttcgaatttcgaaaacggggaagttcgatgagttaaatttataacgataatacggatcgtcgtttgattcgtattttgaaatatcgttatcgttaatttattacgtcgaatatcgcgattttcgaattttagtcgggaatacggtatcgtttttacgcgatttcgtaatacgcgatcgatacgcgcgtaattcgtattt

SEQ ID NO: 16446 - DNA, 1018 bp, Artificial Sequence
  chemically treated genomic DNA (Homo sapiens) CpG-island No: 16446
aaatacgaattacgcgcgtatcgatcgcgtattacgaaatcgcgtaaaaacgataccgtattcccgactaaaattcgaaaatcgcgatattcgacgtaataaattaacgataacgatatttcaaaatacgaatcaaacgacgatccgtattatcgttataaatttaactcatcgaacttccccgttttcgaaattcgaaacctcgaaaaataacgtccataattcgccgcgtcgttaattcgcgaaatcgccgttacgcgtaaatttcccgttatccgtatatctctaaactcgcgcttaaaaaattcgtcgcgtttcgaaactcgccgaaatctacgtaactaccgattaacgcccgtatcgcgtatcgcgaattttcgcgatccgacgacgatacgaaatttccgaaaacgaaataataaaaaattaccaactccgaatttctaacgtcgcgatatcctaaaatattaaaattacctaatataatatactaacgatcataaactccgcaaatttccgcgatctaacgtccctaatatacgaaatacgctaaaacgtaacgtaaaatacgaaatacctataaacgattatcgtaaataacgaatcgctatataactatataaatcgcgacgaacgacgacgattccgaatcgacaatacctaatttaacgatcgaattacgcgaaaatcgaattctaattacgcgtatcgcgactcgcgaataaaaattccgaatacgcttattcgcaatcgaaaaaaacgttaacgattaccatatataatttctaacctccgatcgtaataaactatacgtataacgtaatacgaaattccctaactatcgaataacgaaaacgaattccgtctcgattccgattcgaattcgatttaaattctaatctatcgtaataattcgtaccgaatacgaaataccgtaacttcgatacgtcgaatcaatcgttacgtaatactaaaaataaaacgtaaaacgtacgattaataataaaacgatcgtacg

SEQ ID NO: 16447 - DNA, 1018 bp, Artificial Sequence
  chemically treated genomic DNA (Homo sapiens) CpG-island No: 16447
gggtgcgagttgcgcgcgtgtcgatcgcgtgttgcggggtcgcgtgggagcggtgtcgtgttttcgattggggttcgggagtcgcgatgttcggcgtggtggattgacggtggcggtgttttagggtgcgagttaggcggcgattcgtgttgtcgttgtgagtttggtttatcggattttttcgttttcggagttcgaggtttcgaggagtggcgtttatgattcgtcgcgtcgttggttcgcgggatcgtcgttgcgcgtaggtttttcgttgttcgtgtatttttaggttcgcgtttggggagttcgtcgcgtttcggggttcgtcgagatttgcgtgattatcgattggcgttcgtgtcgcgtgtcgcgagttttcgcggttcggcggcgatgcgagattttcgggggcggggtggtgggaaattgttagtttcgggtttttggcgtcgcgatgttttagagtgttgagattgtttgatgtggtgtgttggcggttatggatttcgtaggttttcgcggtttggcgtttttgatgtgcgaggtgcgttgaggcgtggcgtggggtgcggggtgtttatgagcgattgtcgtagatggcgggtcgttatgtggttatgtgggtcgcggcgggcgacggcggtttcgggtcggtagtgtttggtttggcggtcgggttgcgcgagagtcgagttttggttacgcgtgtcgcgattcgcgggtgggagtttcgggtgcgtttgttcgtagtcggagggggcgttggcggttgttatgtgtggtttttggttttcggtcgtggtaggttgtgcgtatggcgtagtgcggagttttttagttgtcgggtagcgggagcggatttcgtttcggtttcggttcgagttcggtttgggttttggtttgtcgtgatggttcgtgtcgggtgcgaggtgtcgtggtttcggtgcgtcgagttagtcgttgcgtggtgttgggggtggggcgtggggcgtgcggttggtgatggggcggtcgtgcg

SEQ ID NO: 16448 - DNA, 1018 bp, Artificial Sequence
  chemically treated genomic DNA (Homo sapiens) CpG-island No: 16448
cgcacgaccgccccatcaccaaccgcacgccccacgccccacccccaacaccacgcaacgactaactcgacgcaccgaaaccacgacacctcgcacccgacacgaaccatcacgacaaaccaaaacccaaaccgaactcgaaccgaaaccgaaacgaaatccgctcccgctacccgacaactaaaaaactccgcactacgccatacgcacaacctaccacgaccgaaaaccaaaaaccacacataacaaccgccaacgccccctccgactacgaacaaacgcacccgaaactcccacccgcgaatcgcgacacgcgtaaccaaaactcgactctcgcgcaacccgaccgccaaaccaaacactaccgacccgaaaccgccgtcgcccgccgcgacccacataaccacataacgacccgccatctacgacaatcgctcataaacaccccgcaccccacgccacgcctcaacgcacctcgcacatcaaaaacgccaaaccgcgaaaacctacgaaatccataaccgccaacacaccacatcaaacaatctcaacactctaaaacatcgcgacgccaaaaacccgaaactaacaatttcccaccaccccgcccccgaaaatctcgcatcgccgccgaaccgcgaaaactcgcgacacgcgacacgaacgccaatcgataatcacgcaaatctcgacgaaccccgaaacgcgacgaactccccaaacgcgaacctaaaaatacacgaacaacgaaaaacctacgcgcaacgacgatcccgcgaaccaacgacgcgacgaatcataaacgccactcctcgaaacctcgaactccgaaaacgaaaaaatccgataaaccaaactcacaacgacaacacgaatcgccgcctaactcgcaccctaaaacaccgccaccgtcaatccaccacgccgaacatcgcgactcccgaaccccaatcgaaaacacgacaccgctcccacgcgaccccgcaacacgcgatcgacacgcgcgcaactcgcaccc

SEQ ID NO: 16449 - DNA, 732 bp, Artificial Sequence
  chemically treated genomic DNA (Homo sapiens) CpG-island No: 16449
  unsure (392)
acgggcgatttaaatttcgtaggcggggaaaatcgagagacgcgatcgtatttattcgtcgacgcgacgcgggtaaatcgtcgcgtaggaattaaatcgagtttttgaagcgacgaaaagttattaattcgttatacgtaaaacgacggatatcgacgcgtaacgacgcgggcgggtttaacgcgggggcgggcgaagattagtagcgagagacgaacgaacgattcgagacgatcgtatattcgcgaaacggagcgggaaggaagggaagcgatacgatttaattacgcgacgtaatgttatttaagtaacgttcggaataggacggggatgagagagcggacgttataagagtcgtaataggacgagtaatacgtattaagacgagggancgcgaatacgttattatatagaatttcgagtcgataacgtacgcgtatcgcgataacgggggggaatcggaaatcgatattaatacggagaatagtcgcgggtaaacgaacgtaataattagattcgcgcgggaaaggaaaacgttcggggatacgaacgagagagaaaaagggaatttttattaggtatcgtagtcggaacgcgatcgcgagcgatcgcgtacgttaataggttcggtacgatatagtaggatacgattattattcggcgcgggagcgaagacgtattacgaaagggggtagttatatcgtcgcggagcgaacgtcgaagataagggcg

SEQ ID NO: 16450 - DNA, 732 bp, Artificial Sequence
  chemically treated genomic DNA (Homo sapiens) CpG-island No: 16450
  unsure (341)
cgcccttatcttcgacgttcgctccgcgacgatataactaccccctttcgtaatacgtcttcgctcccgcgccgaataataatcgtatcctactatatcgtaccgaacctattaacgtacgcgatcgctcgcgatcgcgttccgactacgatacctaataaaaattccctttttctctctcgttcgtatccccgaacgttttcctttcccgcgcgaatctaattattacgttcgtttacccgcgactattctccgtattaatatcgatttccgattcccccccgttatcgcgatacgcgtacgttatcgactcgaaattctatataataacgtattcgcgntccctcgtcttaatacgtattactcgtcctattacgactcttataacgtccgctctctcatccccgtcctattccgaacgttacttaaataacattacgtcgcgtaattaaatcgtatcgcttcccttccttcccgctccgtttcgcgaatatacgatcgtctcgaatcgttcgttcgtctctcgctactaatcttcgcccgcccccgcgttaaacccgcccgcgtcgttacgcgtcgatatccgtcgttttacgtataacgaattaataacttttcgtcgcttcaaaaactcgatttaattcctacgcgacgatttacccgcgtcgcgtcgacgaataaatacgatcgcgtctctcgattttccccgcctacgaaatttaaatcgcccgt

SEQ ID NO: 16451 - DNA, 732 bp, Artificial Sequence
  chemically treated genomic DNA (Homo sapiens) CpG-island No: 16451
  unsure (341)
cgtttttgttttcggcgttcgtttcgcggcggtgtagttgttttttttcgtggtgcgttttcgttttcgcgtcgggtggtggtcgtgttttattgtgtcgtgtcgggtttgttggcgtgcgcggtcgttcgcggtcgcgtttcggttgcggtatttagtgggggttttttttttttttttcgttcgtgttttcgggcgtttttttttttcgcgcgggtttggttgttgcgttcgtttgttcgcggttgtttttcgtgttggtgtcggttttcggttttttttcgttgtcgcggtgcgcgtgcgttatcggttcggggttttgtatggtgacgtgttcgcgntttttcgttttgatgcgtgttgttcgttttgttgcggtttttgtggcgttcgtttttttattttcgttttgtttcgggcgttgtttgggtggtattgcgtcgcgtggttgagtcgtgtcgttttttttttttttcgtttcgtttcgcgggtgtgcggtcgtttcgggtcgttcgttcgtttttcgttgttggttttcgttcgttttcgcgttgggttcgttcgcgtcgttgcgcgtcggtgttcgtcgttttgcgtgtggcgggttggtggtttttcgtcgttttaagggttcggtttggtttttgcgcggcggtttgttcgcgtcgcgtcggcgggtaggtgcggtcgcgtttttcggtttttttcgtttgcggggtttgggtcgttcgt

SEQ ID NO: 16452 - DNA, 732 bp, Artificial Sequence
  chemically treated genomic DNA (Homo sapiens) CpG-island No: 16452
  unsure (392)
acgaacgacccaaaccccgcaaacgaaaaaaaccgaaaaacgcgaccgcacctacccgccgacgcgacgcgaacaaaccgccgcgcaaaaaccaaaccgaacccttaaaacgacgaaaaaccaccaacccgccacacgcaaaacgacgaacaccgacgcgcaacgacgcgaacgaacccaacgcgaaaacgaacgaaaaccaacaacgaaaaacgaacgaacgacccgaaacgaccgcacacccgcgaaacgaaacgaaaaaaaaaaaaaacgacacgactcaaccacgcgacgcaataccacccaaacaacgcccgaaacaaaacgaaaataaaaaaacgaacgccacaaaaaccgcaacaaaacgaacaacacgcatcaaaacgaaaaancgcgaacacgtcaccatacaaaaccccgaaccgataacgcacgcgcaccgcgacaacgaaaaaaaaccgaaaaccgacaccaacacgaaaaacaaccgcgaacaaacgaacgcaacaaccaaacccgcgcgaaaaaaaaaaacgcccgaaaacacgaacgaaaaaaaaaaaaaaaacccccactaaataccgcaaccgaaacgcgaccgcgaacgaccgcgcacgccaacaaacccgacacgacacaataaaacacgaccaccacccgacgcgaaaacgaaaacgcaccacgaaaaaaaacaactacaccgccgcgaaacgaacgccgaaaacaaaaacg

SEQ ID NO: 16453 - DNA, 551 bp, Artificial Sequence
  chemically treated genomic DNA (Homo sapiens) CpG-island No: 16453
ggaatttcgaggggcgggggtttggcgtaggttttcgttcggggttttcgagttgttttattttgcgcgaagtcgttacgttattgttttgattaggaaggcggggtcggcgcggggcggggttggcggcgtcggcgtagttcgggggcggcgggaggaggaggtggcggcggtggcgttgggagtttttgttatcgttggggtcgggtcgggcgggagtgtaggggacgtgagggcgtaagggtcgggatatggggttcgttagtttcgttgttcgcggtttaagtcgtcgttcgggttagtcgtcgttgtcgttgttgttgttattattgttgttgtttttgcgcgcgtagttcgttatcgggagtttggtcggtgggagtttcggcgcggtcgaggtgaggtcgggtcgggttttgggggatgggggaaggggcgggatcgggtttttggacgtcggcgcggatatgtttagggtagaaagcgcggtttttttagttaggtggttagtttttaggcgtttttaattatatttatgaatttagggtttt

SEQ ID NO: 16454 - DNA, 551 bp, Artificial Sequence
  chemically treated genomic DNA (Homo sapiens) CpG-island No: 16454
aaaaccctaaattcataaatataattaaaaacgcctaaaaactaaccacctaactaaaaaaaccgcgctttctaccctaaacatatccgcgccgacgtccaaaaacccgatcccgccccttcccccatcccccaaaacccgacccgacctcacctcgaccgcgccgaaactcccaccgaccaaactcccgataacgaactacgcgcgcaaaaacaacaacaataataacaacaacaacgacaacgacgactaacccgaacgacgacttaaaccgcgaacaacgaaactaacgaaccccatatcccgacccttacgccctcacgtcccctacactcccgcccgacccgaccccaacgataacaaaaactcccaacgccaccgccgccacctcctcctcccgccgcccccgaactacgccgacgccgccaaccccgccccgcgccgaccccgccttcctaatcaaaacaataacgtaacgacttcgcgcaaaataaaacaactcgaaaaccccgaacgaaaacctacgccaaacccccgcccctcgaaattcc

SEQ ID NO: 16455 - DNA, 551 bp, Artificial Sequence
  chemically treated genomic DNA (Homo sapiens) CpG-island No: 16455
ggaattttgggtttataaatgtgattgggggcgtttgggggttgattatttggttggaaagatcgcgttttttgttttggatatgttcgcgtcggcgtttagagattcggtttcgtttttttttttattttttaggattcggttcggttttatttcggtcgcgtcggggtttttatcggttaggttttcgatggcgggttgcgcgcgtagaagtagtagtaatagtggtagtagtagcggtagcggcggttggttcgggcggcgatttagatcgcgagtagcggggttggcgggttttatgtttcggtttttgcgtttttacgttttttgtattttcgttcggttcggttttagcggtgataggagtttttagcgttatcgtcgttatttttttttttcgtcgttttcgggttgcgtcggcgtcgttagtttcgtttcgcgtcggtttcgtttttttggttaggataatagcgtggcggtttcgcgtagagtggagtagttcgggaatttcgggcgggagtttgcgttaggttttcgtttttcgagatttt

SEQ ID NO: 16456 - DNA, 551 bp, Artificial Sequence
  chemically treated genomic DNA (Homo sapiens) CpG-island No: 16456
aaaatctcgaaaaacgaaaacctaacgcaaactcccgcccgaaattcccgaactactccactctacgcgaaaccgccacgctattatcctaaccaaaaaaacgaaaccgacgcgaaacgaaactaacgacgccgacgcaacccgaaaacgacgaaaaaaaaaaataacgacgataacgctaaaaactcctatcaccgctaaaaccgaaccgaacgaaaatacaaaaaacgtaaaaacgcaaaaaccgaaacataaaacccgccaaccccgctactcgcgatctaaatcgccgcccgaaccaaccgccgctaccgctactactaccactattactactacttctacgcgcgcaacccgccatcgaaaacctaaccgataaaaaccccgacgcgaccgaaataaaaccgaaccgaatcctaaaaaataaaaaaaaaaacgaaaccgaatctctaaacgccgacgcgaacatatccaaaacaaaaaacgcgatctttccaaccaaataatcaacccccaaacgcccccaatcacatttataaacccaaaattcc

SEQ ID NO: 16457 - DNA, 566 bp, Artificial Sequence
  chemically treated genomic DNA (Homo sapiens) CpG-island No: 16457
cgggttttcggagagaggtggtttttcgttaaatagaggtttatttttaatatattcgggggaagacgtttttttaataagcgtgggaagagttttttatcggatattttaagaaagttttttgggaacgggggggaaaaaaggttcgggattgaaacggttgggtcggaaggaaaagggaaaggcgaagaaaagagttaaagggagacggtttttttggggcgacggatattcgtaacggatatttattcgattatacgatattttttcggttaaatattttttttatggttttttaggtgtttatcgtatttataattttttttttttaaattattggagtaaatcgcgcgttatataggaatttcgtaaatcgttcgttataatttttaaacgggtttttaaacggaagcgcgttattcggaaaataattcgagatttatatttatatttacgatatgtgataattttaattgcggtgattcgcgaattttttttttcgttttgtttataattgttttaattcgttcgattttaatcggttcgtttattatattagttatatt

SEQ ID NO: 16458 - DNA, 566 bp, Artificial Sequence
  chemically treated genomic DNA (Homo sapiens) CpG-island No: 16458
aatataactaatataataaacgaaccgattaaaatcgaacgaattaaaacaattataaacaaaacgaaaaaaaaaattcgcgaatcaccgcaattaaaattatcacatatcgtaaatataaatataaatctcgaattattttccgaataacgcgcttccgtttaaaaacccgtttaaaaattataacgaacgatttacgaaattcctatataacgcgcgatttactccaataatttaaaaaaaaaaaattataaatacgataaacacctaaaaaaccataaaaaaaatatttaaccgaaaaaatatcgtataatcgaataaatatccgttacgaatatccgtcgccccaaaaaaaccgtctccctttaactcttttcttcgcctttcccttttccttccgacccaaccgtttcaatcccgaaccttttttcccccccgttcccaaaaaactttcttaaaatatccgataaaaaactcttcccacgcttattaaaaaaacgtcttcccccgaatatattaaaaataaacctctatttaacgaaaaaccacctctctccgaaaacccg

SEQ ID NO: 16459 - DNA, 566 bp, Artificial Sequence
  chemically treated genomic DNA (Homo sapiens) CpG-island No: 16459
gatatagttggtgtagtagacggatcgattaaggtcgaacggattgaggtagttatgagtagagcgggaggggaggttcgcgaattatcgtagttgagattgttatatgtcgtgagtgtgggtgtgagtttcgaattgtttttcgggtggcgcgttttcgtttagagattcgtttgagggttgtggcgaacggtttgcgaagtttttatatggcgcgcgatttattttagtggtttggggaggaggagttatgggtgcggtgagtatttaggaggttatggagggggtatttagtcgaggggatgtcgtgtaatcggatgggtgttcgttacgggtgttcgtcgttttaagggggtcgtttttttttggttttttttttcgtttttttttttttttttcggtttaatcgttttagtttcggattttttttttttttcgtttttaagaggtttttttaaaatattcggtggggggttttttttacgtttattagaggagcgttttttttcgaatgtattaaaggtgggtttttgtttagcgagaggttattttttttcggaagttcg

SEQ ID NO: 16460 - DNA, 566 bp, Artificial Sequence
  chemically treated genomic DNA (Homo sapiens) CpG-island No: 16460
cgaacttccgaaaaaaaataacctctcgctaaacaaaaacccacctttaatacattcgaaaaaaaacgctcctctaataaacgtaaaaaaaaccccccaccgaatattttaaaaaaacctcttaaaaacgaaaaaaaaaaaaaatccgaaactaaaacgattaaaccgaaaaaaaaaaaaaaaaacgaaaaaaaaaaccaaaaaaaaacgacccccttaaaacgacgaacacccgtaacgaacacccatccgattacacgacatcccctcgactaaataccccctccataacctcctaaatactcaccgcacccataactcctcctccccaaaccactaaaataaatcgcgcgccatataaaaacttcgcaaaccgttcgccacaaccctcaaacgaatctctaaacgaaaacgcgccacccgaaaaacaattcgaaactcacacccacactcacgacatataacaatctcaactacgataattcgcgaacctcccctcccgctctactcataactacctcaatccgttcgaccttaatcgatccgtctactacaccaactatatc

SEQ ID NO: 16461 - DNA, 689 bp, Artificial Sequence
  chemically treated genomic DNA (Homo sapiens) CpG-island No: 16461
  unsure (129, 137, 166, 176, 205, 242, 266, 290, 326, 372, 387..388)
  unsure (425, 459, 503, 526, 551, 567)
ttagtttcgagagttagggcgcgcggcggaggcgaggtcggggcggttttcgttttttcggtcgttttttttcgcgtcgtttcggttttttttttcggttttcggcgggtatttggcggcggcgggtanggggcggngttgcgcgtcgttcgtcgtcgggggggtntttcggtttngtcgtcgttcgggcgggtcgttcgttttngcgtttcgttttcgcgttcgcggggcgcggcgttcgngtcgtttcgcgtcgttcgcgcggntcgcggtcggcgtcgtttcgtttnttcggcgggcgtcgtttcgcgttttcgtttcgtttnggtaatcgcgcgtttcgcggggtcgcgttcggcggttttttcgatncggttttttcggttnngtcgggcgcgtcgttttcgcgtttttcggtcgcgcgnttcgggcggttcgcgtttttcggcgtcgtcggtntcgggtttcggttcgcggttttttcgtcggttcgggcgcggttntcgtttcggtttcggtttttcgncgggcgtcgttttcgttcgcgggtngtcgtttcgttcgttngcgcggtcgttcgtcgttttttcggggcgcgtttcgcggcgttcgtttttcgtcgtcggcgcgcgcgtcggcgcgttttttcgttcgttttttcgcgttcgtcgttcggcgacggttttcgt

SEQ ID NO: 16462 - DNA, 689 bp, Artificial Sequence
  chemically treated genomic DNA (Homo sapiens) CpG-island No: 16462
  unsure (123, 139, 164, 187, 231, 265, 302..303, 318, 364, 400, 424)
  unsure (448, 485, 514, 524, 553, 561)
acgaaaaccgtcgccgaacgacgaacgcgaaaaaacgaacgaaaaaacgcgccgacgcgcgcgccgacgacgaaaaacgaacgccgcgaaacgcgccccgaaaaaacgacgaacgaccgcgcnaacgaacgaaacgacnacccgcgaacgaaaacgacgcccgncgaaaaaccgaaaccgaaacganaaccgcgcccgaaccgacgaaaaaaccgcgaaccgaaacccganaccgacgacgccgaaaaacgcgaaccgcccgaancgcgcgaccgaaaaacgcgaaaacgacgcgcccgacnnaaccgaaaaaaccgnatcgaaaaaaccgccgaacgcgaccccgcgaaacgcgcgattaccnaaacgaaacgaaaacgcgaaacgacgcccgccgaanaaacgaaacgacgccgaccgcganccgcgcgaacgacgcgaaacgacncgaacgccgcgccccgcgaacgcgaaaacgaaacgcnaaaacgaacgacccgcccgaacgacgacnaaaccgaaanacccccccgacgacgaacgacgcgcaacnccgccccntacccgccgccgccaaatacccgccgaaaaccgaaaaaaaaaaccgaaacgacgcgaaaaaaaacgaccgaaaaaacgaaaaccgccccgacctcgcctccgccgcgcgccctaactctcgaaactaa

SEQ ID NO: 16463 - DNA, 689 bp, Artificial Sequence
  chemically treated genomic DNA (Homo sapiens) CpG-island No: 16463
  unsure (123, 139, 164, 187, 231, 265, 302..303, 318, 364, 400, 424)
  unsure (448, 485, 514, 524, 553, 561)
gcgggggtcgtcgtcgggcggcgggcgcgggggggcgggcgggggggcgcgtcggcgcgcgcgtcggcggcggggggcgggcgtcgcggggcgcgtttcgggggggcggcgggcggtcgcgtnggcgggcggggcggtngttcgcgggcgggggcggcgttcgncggggggtcggggtcggggcggnggtcgcgttcgggtcggcgggggggtcgcgggtcggggttcggngtcggcggcgtcggggggcgcgggtcgttcgggncgcgcggtcggggggcgcgggggcggcgcgttcggtnnggtcgggggggtcgngtcgggggggtcgtcgggcgcggtttcgcggggcgcgcggttgttngggcggggcgggggcgcggggcggcgttcgtcgggngggcggggcggcgtcggtcgcggntcgcgcgggcggcgcggggcggtncgggcgtcgcgtttcgcgggcgcgggggcggggcgtnggggcgggcggttcgttcgggcggcggtngggtcggggngttttttcggcggcgggcggcgcgtagtntcgttttntgttcgtcgtcgttaggtgttcgtcgagggtcggagggaggagtcggggcggcgcgagggggagcggtcgggagggcggaggtcgtttcggtttcgttttcgtcgcgcgttttgattttcgggattgg

SEQ ID NO: 16464 - DNA, 689 bp, Artificial Sequence
  chemically treated genomic DNA (Homo sapiens) CpG-island No: 16464
  unsure (129, 137, 166, 176, 205, 242, 266, 290, 326, 372, 387..388)
  unsure (425, 459, 503, 526, 551, 567)
ccaatcccgaaaatcaaaacgcgcgacgaaaacgaaaccgaaacgacctccgccctcccgaccgctccccctcgcgccgccccgactcctccctccgaccctcgacgaacacctaacgacgacgaacanaaaacganactacgcgccgcccgccgccgaaaaaacnccccgacccnaccgccgcccgaacgaaccgcccgccccnacgccccgcccccgcgcccgcgaaacgcgacgcccgnaccgccccgcgccgcccgcgcganccgcgaccgacgccgccccgcccncccgacgaacgccgccccgcgcccccgccccgcccnaacaaccgcgcgccccgcgaaaccgcgcccgacgacccccccgacncgacccccccgaccnnaccgaacgcgccgcccccgcgccccccgaccgcgcgncccgaacgacccgcgccccccgacgccgccgacnccgaaccccgacccgcgacccccccgccgacccgaacgcgaccnccgccccgaccccgaccccccgncgaacgccgcccccgcccgcgaacnaccgccccgcccgccnacgcgaccgcccgccgcccccccgaaacgcgccccgcgacgcccgccccccgccgccgacgcgcgcgccgacgcgcccccccgcccgcccccccgcgcccgccgcccgacgacgacccccgc

SEQ ID NO: 16465 - DNA, 815 bp, Artificial Sequence
  chemically treated genomic DNA (Homo sapiens) CpG-island No: 16465
tttatttattttcggtttttttatttattttcggtttttttatttatttttaattttttcgtttattttcggttttttcgtttattttcggttttttcgtttagttcggatttttttatttattttcgattttttcgtttattttcgattttttcgtttattttcggttttttcgtttattttcggttatttcgtttattttcggattttttcgtttattttcgattttttcgtttattttcgatttttacgtttattttcggttttttcgtttatgtcggattttacgttattttcggtttttcgttatttcgggttttcgtgtatttcggtttttcgttatattggattttttcgtttatttcgggtttttcggtattttggaattttgcggttattttgggaatttttcggttattttcggggtttttcggtaagattagaaattttcggttaatttttgagattttcgggttaattttcggggtttttcggttaatattcggggtttttttgggtaatatttcggggttttttcgggtaaagttcgggaaattttttcgggtaattttcggggcgttttcggagaaatatttcgggggttttttcggtagaagaacggagaatttttttgggtaaataatcgcggggtttttttgggtaaaatcgcggggggttttgcgggtaatatttcgggggtttttgcggggataatcgggaaattttttgtgtaatataaagagaggttttggagataatatacggggtttttcgagaaaaatttgggggttttcgcgagattagttgggtttttt

SEQ ID NO: 16466 - DNA, 815 bp, Artificial Sequence
  chemically treated genomic DNA (Homo sapiens) CpG-island No: 16466
aaaaaacccaactaatctcgcgaaaacccccaaatttttctcgaaaaaccccgtatattatctccaaaacctctctttatattacacaaaaaatttcccgattatccccgcaaaaacccccgaaatattacccgcaaaaccccccgcgattttacccaaaaaaaccccgcgattatttacccaaaaaaattctccgttcttctaccgaaaaaacccccgaaatatttctccgaaaacgccccgaaaattacccgaaaaaatttcccgaactttacccgaaaaaaccccgaaatattacccaaaaaaaccccgaatattaaccgaaaaaccccgaaaattaacccgaaaatctcaaaaattaaccgaaaatttctaatcttaccgaaaaaccccgaaaataaccgaaaaattcccaaaataaccgcaaaattccaaaataccgaaaaacccgaaataaacgaaaaaatccaatataacgaaaaaccgaaatacacgaaaacccgaaataacgaaaaaccgaaaataacgtaaaatccgacataaacgaaaaaaccgaaaataaacgtaaaaatcgaaaataaacgaaaaaatcgaaaataaacgaaaaaatccgaaaataaacgaaataaccgaaaataaacgaaaaaaccgaaaataaacgaaaaaatcgaaaataaacgaaaaaatcgaaaataaataaaaaaatccgaactaaacgaaaaaaccgaaaataaacgaaaaaaccgaaaataaacgaaaaaattaaaaataaataaaaaaaccgaaaataaataaaaaaaccgaaaataaataaa

SEQ ID NO: 16467 - DNA, 815 bp, Artificial Sequence
  chemically treated genomic DNA (Homo sapiens) CpG-island No: 16467
ggggggtttaattgatttcgcgagggtttttaaatttttttcgagaggtttcgtgtattgtttttaaggtttttttttatgttatataaagagtttttcggttattttcgtagaggttttcgggatattgttcgtaaggtttttcgcggttttgtttagaagggtttcgcggttatttatttaaagggatttttcgtttttttatcgaaagggttttcgggatattttttcgaaggcgtttcggggattgttcgagagggtttttcgggttttgttcgaaggggtttcggggtattgtttaaaagggtttcgggtattggtcgaagggtttcgggaattggttcgagggttttaaggattggtcgagagtttttggttttgtcgaagggtttcgggaatggtcgaagggtttttaggatggtcgtagggttttagaatgtcggagggttcgggatggacggagggatttagtatggcggagggtcgggatgtacgagggttcgggatggcgaagggtcggggatggcgtagggttcggtatggacggagggatcggggatggacgtagggatcggggatggacggagggatcggggatggacggagggattcggggatggacggagtgatcggggatggacggagggatcggggatggacggagggatcggggatggacggagggatcggggatggatggagggattcgggttggacggagggatcggggatggacggagggatcggggatggacggagggattggggatggatggagggatcgaggatggatggagggatcgaggatggatgga

SEQ ID NO: 16468 - DNA, 815 bp, Artificial Sequence
  chemically treated genomic DNA (Homo sapiens) CpG-island No: 16468
tccatccatcctcgatccctccatccatcctcgatccctccatccatccccaatccctccgtccatccccgatccctccgtccatccccgatccctccgtccaacccgaatccctccatccatccccgatccctccgtccatccccgatccctccgtccatccccgatccctccgtccatccccgatcactccgtccatccccgaatccctccgtccatccccgatccctccgtccatccccgatccctacgtccatccccgatccctccgtccataccgaaccctacgccatccccgacccttcgccatcccgaaccctcgtacatcccgaccctccgccatactaaatccctccgtccatcccgaaccctccgacattctaaaaccctacgaccatcctaaaaacccttcgaccattcccgaaacccttcgacaaaaccaaaaactctcgaccaatccttaaaaccctcgaaccaattcccgaaacccttcgaccaatacccgaaacccttttaaacaataccccgaaaccccttcgaacaaaacccgaaaaaccctctcgaacaatccccgaaacgccttcgaaaaaatatcccgaaaaccctttcgataaaaaaacgaaaaatccctttaaataaataaccgcgaaacccttctaaacaaaaccgcgaaaaaccttacgaacaatatcccgaaaacctctacgaaaataaccgaaaaactctttatataacataaaaaaaaaccttaaaaacaatacacgaaacctctcgaaaaaaatttaaaaaccctcgcgaaatcaattaaacccccc

SEQ ID NO: 16469 - DNA, 528 bp, Artificial Sequence
  chemically treated genomic DNA (Homo sapiens) CpG-island No: 16469
ttttaatatttaatttcgtttttaattttattcgtatgcgtaattagaattagtcgacgtaattttcgattttaattcgtaatcgtttttttttattatcgaattttattttttatttttatattttagttcggttattttacgcgtagtatcgaattttatatttttattttgtttcgtatttttcgtttcgttttttatatttttattttgaagtatgatttataattagatttcgacgataaatcgattattcgaattcgatcgtaattttttttttaattaaatttatttattaatttttaattttatttttcgtttttatttttattttgagttatagttttaatttacggtttgtttcgaaatttcgatatttattttttttttatttttagtttaaattttatgtttttttcgattcggattcgtaatcgcgattcgagttttaatcgtattcgtaatggtttcgtaattttaagttaatcgtatttttgcgttaattttatttcgtttttattttatttt

SEQ ID NO: 16470 - DNA, 528 bp, Artificial Sequence
  chemically treated genomic DNA (Homo sapiens) CpG-island No: 16470
aaaataaaataaaaacgaaataaaattaacgcaaaaatacgattaacttaaaattacgaaaccattacgaatacgattaaaactcgaatcgcgattacgaatccgaatcgaaaaaaacataaaatttaaactaaaaataaaaaaaaaataaatatcgaaatttcgaaacaaaccgtaaattaaaactataactcaaaataaaaataaaaacgaaaaataaaattaaaaattaataaataaatttaattaaaaaaaaaattacgatcgaattcgaataatcgatttatcgtcgaaatctaattataaatcatacttcaaaataaaaatataaaaaacgaaacgaaaaatacgaaacaaaataaaaatataaaattcgatactacgcgtaaaataaccgaactaaaatataaaaataaaaaataaaattcgataataaaaaaaaacgattacgaattaaaatcgaaaattacgtcgactaattctaattacgcatacgaataaaattaaaaacgaaattaaatattaaaa

SEQ ID NO: 16471 - DNA, 528 bp, Artificial Sequence
  chemically treated genomic DNA (Homo sapiens) CpG-island No: 16471
agagtggaatgggaacgaggtagggttaacgtaggggtgcgattggtttggggttgcgaggttattacgggtgcgattgaggttcgagtcgcgattgcggattcgggtcggagggagtatggagtttgggttgaggatggaagagggatgggtgtcgggatttcggagtaggtcgtggattggggttgtgatttagaatagagatgggaacggggaatgaggttgggagttgataggtgggtttggttggggagggaattgcgatcggattcgagtgatcggtttgtcgtcgaagtttggttatggattatgttttaggataggggtatggagagcggggcggggagtgcgaaatagagtggggatatggggttcggtattgcgcgtgggatgatcgaattgggatgtgggagtgggaagtagagttcgatgatgagggagagcggttgcgggttgaggtcgaggattgcgtcgattgattttgattgcgtatgcgagtgaggttgaagacggagttaggtgttggga

SEQ ID NO: 16472 - DNA, 528 bp, Artificial Sequence
  chemically treated genomic DNA (Homo sapiens) CpG-island No: 16472
tcccaacacctaactccgtcttcaacctcactcgcatacgcaatcaaaatcaatcgacgcaatcctcgacctcaacccgcaaccgctctccctcatcatcgaactctacttcccactcccacatcccaattcgatcatcccacgcgcaataccgaaccccatatccccactctatttcgcactccccgccccgctctccatacccctatcctaaaacataatccataaccaaacttcgacgacaaaccgatcactcgaatccgatcgcaattccctccccaaccaaacccacctatcaactcccaacctcattccccgttcccatctctattctaaatcacaaccccaatccacgacctactccgaaatcccgacacccatccctcttccatcctcaacccaaactccatactccctccgacccgaatccgcaatcgcgactcgaacctcaatcgcacccgtaataacctcgcaaccccaaaccaatcgcacccctacgttaaccctacctcgttcccattccactct

SEQ ID NO: 16473 - DNA, 749 bp, Artificial Sequence
  chemically treated genomic DNA (Homo sapiens) CpG-island No: 16473
gattttcgttttttacggttatttttttatcgttgtggtacgttatagacgtttttttttcgagacgttaatcgttatacgattcgtatcgtaagagataatttattgcgcgcgtagaatttcgtagttatatttttgtttcggaacggtagtttattttcggaattatatttttgtattcgggatcgatataggtcgacgtttaattcgcgtagtcgatagtaagtagtgtgtatgttagatttattagatcgtaaatttttaattttttgcggttataagtttagtattttaattgtaggtttttcgtcgagttcgtaatttgagcgcgtatgaagggtaggtatttatgtaacgtatgtggtcgtcgtatacgtcgattaacgttataacgtttacgtatgttcgtaaatggttaggattttcgagtgttcgtagaggttattttattgtgaaaatttattagtataattttagaatttgacgcgagtttcgtggaggttgtcgtattcgcgtatatattcgtttagtatacgtcgtagattgttcgttttgtatatttacgttacggatcgcgtcgttaataggatacgtgattagtttttgttatgtttacgatagttagagtacggttttcggttaggatttagaatataaatttagtgttatgatgcgtattttaaataatatataacgtatatacgcgttagtttcgttatttttgtagaatattttcgttttttttatta

SEQ ID NO: 16474 - DNA, 749 bp, Artificial Sequence
  chemically treated genomic DNA (Homo sapiens) CpG-island No: 16474
taataaaaaaaacgaaaatattctacaaaaataacgaaactaacgcgtatatacgttatatattatttaaaatacgcatcataacactaaatttatattctaaatcctaaccgaaaaccgtactctaactatcgtaaacataacaaaaactaatcacgtatcctattaacgacgcgatccgtaacgtaaatatacaaaacgaacaatctacgacgtatactaaacgaatatatacgcgaatacgacaacctccacgaaactcgcgtcaaattctaaaattatactaataaattttcacaataaaataacctctacgaacactcgaaaatcctaaccatttacgaacatacgtaaacgttataacgttaatcgacgtatacgacgaccacatacgttacataaatacctacccttcatacgcgctcaaattacgaactcgacgaaaaacctacaattaaaatactaaacttataaccgcaaaaaattaaaaatttacgatctaataaatctaacatacacactacttactatcgactacgcgaattaaacgtcgacctatatcgatcccgaatacaaaaatataattccgaaaataaactaccgttccgaaacaaaaatataactacgaaattctacgcgcgcaataaattatctcttacgatacgaatcgtataacgattaacgtctcgaaaaaaaaacgtctataacgtaccacaacgataaaaaaataaccgtaaaaaacgaaaatc

SEQ ID NO: 16475 - DNA, 749 bp, Artificial Sequence
  chemically treated genomic DNA (Homo sapiens) CpG-island No: 16475
tggtggagggagcggggatattttgtagggatggcggggttaacgcgtgtgtgcgttgtgtgttatttggggtacgtattatgatattagatttgtgttttggattttggtcgagagtcgtgttttggttatcgtgggtatgatagaagttagttacgtattttgttggcgacgcggttcgtggcgtggatgtatagagcgggtagtttacggcgtgtgttgagcgagtgtgtacgcggatgcggtagtttttacggagttcgcgttaggttttagaattgtgttggtaagtttttatagtggggtagtttttgcgagtattcgggagttttagttatttgcgaatatacgtgagcgttatgacgttagtcggcgtgtgcggcgattatatgcgttatatagatgtttattttttatgcgcgtttagattacgggttcggcgagagatttgtagttgggatgttggatttgtgatcgtaggaggttagaggtttgcggtttagtgaatttagtatgtatattatttgttgtcggttgcgcgggttgggcgtcggtttatgtcgatttcgggtgtaagagtgtgatttcggaaataggttgtcgtttcgaagtaagagtatgattacggagttttgcgcgcgtagtggattattttttgcgatacgaatcgtgtagcggttgacgtttcggaaaggaagcgtttgtggcgtgttatagcggtggaaaagtgatcgtggggggcgggggtt

SEQ ID NO: 16476 - DNA, 749 bp, Artificial Sequence
  chemically treated genomic DNA (Homo sapiens) CpG-island No: 16476
aacccccgccccccacgatcacttttccaccgctataacacgccacaaacgcttcctttccgaaacgtcaaccgctacacgattcgtatcgcaaaaaataatccactacgcgcgcaaaactccgtaatcatactcttacttcgaaacgacaacctatttccgaaatcacactcttacacccgaaatcgacataaaccgacgcccaacccgcgcaaccgacaacaaataatatacatactaaattcactaaaccgcaaacctctaacctcctacgatcacaaatccaacatcccaactacaaatctctcgccgaacccgtaatctaaacgcgcataaaaaataaacatctatataacgcatataatcgccgcacacgccgactaacgtcataacgctcacgtatattcgcaaataactaaaactcccgaatactcgcaaaaactaccccactataaaaacttaccaacacaattctaaaacctaacgcgaactccgtaaaaactaccgcatccgcgtacacactcgctcaacacacgccgtaaactacccgctctatacatccacgccacgaaccgcgtcgccaacaaaatacgtaactaacttctatcatacccacgataaccaaaacacgactctcgaccaaaatccaaaacacaaatctaatatcataatacgtaccccaaataacacacaacgcacacacgcgttaaccccgccatccctacaaaatatccccgctccctccacca

SEQ ID NO: 16477 - DNA, 605 bp, Artificial Sequence
  chemically treated genomic DNA (Homo sapiens) CpG-island No: 16477
gggttgcgtgggggtatcgtcgattgtataggacgcggtttcggttcgcgtagtttcgtaggcggcgttagagcgtattgttcgtttcgtgatttcggtttatagttcggtcgggcggagttaggggcgggtttttgcgtttttgggcgttggagcgcggcgattattacgtcgcgtggcggacggacggattgacggacgcgtagttttattcgaaaggttatggcggagtacgtttttcgtcgttgttgtttgggttgggattttagtacgtagtaggtatagtcgtttggtcgtagggttacggggttcgtttttttcgtttcggtgggggtagggggcgggttgttattcggacgcgggaaaatatgggttcggtcgcgggcgcgtttatttttcgggtttttcggggttttcgcgtttttgttttgcgcgcggtcgtggggcgtcggtgttttcgttcggagatgttttgttaatgttattcgttcgtaagatgcggtttcgatttcgtttggatttagttattttaggaaattgtaggcgtttttcggtaggattttcggtgtttagaggggtcggaggattcggcgggtttttgcgtt

SEQ ID NO: 16478 - DNA, 605 bp, Artificial Sequence
  chemically treated genomic DNA (Homo sapiens) CpG-island No: 16478
aacgcaaaaacccgccgaatcctccgacccctctaaacaccgaaaatcctaccgaaaaacgcctacaatttcctaaaataactaaatccaaacgaaatcgaaaccgcatcttacgaacgaataacattaacaaaacatctccgaacgaaaacaccgacgccccacgaccgcgcgcaaaacaaaaacgcgaaaaccccgaaaaacccgaaaaataaacgcgcccgcgaccgaacccatattttcccgcgtccgaataacaacccgccccctacccccaccgaaacgaaaaaaacgaaccccgtaaccctacgaccaaacgactatacctactacgtactaaaatcccaacccaaacaacaacgacgaaaaacgtactccgccataacctttcgaataaaactacgcgtccgtcaatccgtccgtccgccacgcgacgtaataatcgccgcgctccaacgcccaaaaacgcaaaaacccgcccctaactccgcccgaccgaactataaaccgaaatcacgaaacgaacaatacgctctaacgccgcctacgaaactacgcgaaccgaaaccgcgtcctatacaatcgacgatacccccacgcaaccc

SEQ ID NO: 16479 - DNA, 605 bp, Artificial Sequence
  chemically treated genomic DNA (Homo sapiens) CpG-island No: 16479
agcgtaggaattcgtcgagtttttcggtttttttgggtatcgggggttttgtcgaggagcgtttgtagttttttggggtagttgggtttaggcggggtcgaggtcgtattttgcgagcgggtggtattggtagggtattttcgggcgagggtatcggcgttttacggtcgcgcgtagggtaggggcgcgggggtttcgggaagttcgagaggtaggcgcgttcgcggtcgggtttatgttttttcgcgttcgggtgatagttcgttttttatttttatcgaagcggagggagcgggtttcgtggttttgcgattaggcgattgtatttgttgcgtgttgaagttttagtttaggtagtagcggcgaggggcgtgtttcgttatggtttttcgggtaaggttgcgcgttcgttagttcgttcgttcgttacgcggcgtgatagtcgtcgcgttttagcgtttagagacgtaggggttcgtttttagtttcgttcggtcggattgtggatcggagttacgaggcgggtaatgcgttttggcgtcgtttgcggggttacgcgagtcgggatcgcgttttgtgtaatcgacggtgtttttacgtagttt

SEQ ID NO: 16480 - DNA, 605 bp, Artificial Sequence
  chemically treated genomic DNA (Homo sapiens) CpG-island No: 16480
aaactacgtaaaaacaccgtcgattacacaaaacgcgatcccgactcgcgtaaccccgcaaacgacgccaaaacgcattacccgcctcgtaactccgatccacaatccgaccgaacgaaactaaaaacgaacccctacgtctctaaacgctaaaacgcgacgactatcacgccgcgtaacgaacgaacgaactaacgaacgcgcaaccttacccgaaaaaccataacgaaacacgcccctcgccgctactacctaaactaaaacttcaacacgcaacaaatacaatcgcctaatcgcaaaaccacgaaacccgctccctccgcttcgataaaaataaaaaacgaactatcacccgaacgcgaaaaaacataaacccgaccgcgaacgcgcctacctctcgaacttcccgaaacccccgcgcccctaccctacgcgcgaccgtaaaacgccgataccctcgcccgaaaataccctaccaataccacccgctcgcaaaatacgacctcgaccccgcctaaacccaactaccccaaaaaactacaaacgctcctcgacaaaacccccgatacccaaaaaaaccgaaaaactcgacgaattcctacgct

SEQ ID NO: 16481 - DNA, 604 bp, Artificial Sequence
  chemically treated genomic DNA (Homo sapiens) CpG-island No: 16481
  unsure (155, 491)
tcgcgtttttttttttttcgtttataaaaaaaattcgaggttttcgtcgttatattttatttaacgtcgggtatttttcgcgtagttaatacgttttattttatttattatttttacggacgcgtttatttatcgatcgtcgagcgtttttcgtngaatttttaatcgtttttttttttatttttttaagttaggagcggaaggagacgtaaaatcgtcgtttataatcgtttttcgtcgtttttttttcgttaatattttttaattagtacgcgattcgcgcggcgtcgcgttttttagttaagggcgcggagggtacgttcgtttttacgtatcgcgaggcgggaaggatcggcgcggcgttcgagggtcgtaggaggcgagtcgcgttcgattatatatcgttcggcggattttcggtattttattagtcgagcgttttaaagtacggcgtcgcggcggtttatagacggatttattattcgtttcgngtttatcgtaaatttagttatcgcgatacgtcgcgcgttttatcgcgtatcgattatagtttatatttagaaataagatatttttacggtcgtcgcgtacgtacgttcgagcg

SEQ ID NO: 16482 - DNA, 604 bp, Artificial Sequence
  chemically treated genomic DNA (Homo sapiens) CpG-island No: 16482
  unsure (114, 450)
cgctcgaacgtacgtacgcgacgaccgtaaaaatatcttatttctaaatataaactataatcgatacgcgataaaacgcgcgacgtatcgcgataactaaatttacgataaacncgaaacgaataataaatccgtctataaaccgccgcgacgccgtactttaaaacgctcgactaataaaataccgaaaatccgccgaacgatatataatcgaacgcgactcgcctcctacgaccctcgaacgccgcgccgatccttcccgcctcgcgatacgtaaaaacgaacgtaccctccgcgcccttaactaaaaaacgcgacgccgcgcgaatcgcgtactaattaaaaaatattaacgaaaaaaaaacgacgaaaaacgattataaacgacgattttacgtctccttccgctcctaacttaaaaaaataaaaaaaaaaacgattaaaaattcnacgaaaaacgctcgacgatcgataaataaacgcgtccgtaaaaataataaataaaataaaacgtattaactacgcgaaaaatacccgacgttaaataaaatataacgacgaaaacctcgaattttttttataaacgaaaaaaaaaaaaacgcga

SEQ ID NO: 16483 - DNA, 604 bp, Artificial Sequence
  chemically treated genomic DNA (Homo sapiens) CpG-island No: 16483
  unsure (114, 450)
cgttcgggcgtgcgtgcgcggcggtcgtgggggtgttttgtttttgggtgtgggttgtggtcggtgcgcggtggggcgcgcggcgtgtcgcggtggttgggtttgcggtgggtncggggcgggtggtgggttcgtttgtgggtcgtcgcggcgtcgtgttttggggcgttcggttggtggggtgtcgggggttcgtcgggcggtgtgtggtcgggcgcggttcgttttttgcggttttcgggcgtcgcgtcggtttttttcgtttcgcggtgcgtgggggcgggcgtgtttttcgcgtttttggttggggggcgcggcgtcgcgcgggtcgcgtgttggttggggggtgttggcggggggggggcggcggggggcggttgtgggcggcggttttgcgttttttttcgtttttggtttgggggggtgggggggggggcggttgggggtttngcggggggcgttcggcggtcggtgggtgggcgcgttcgtgggggtggtgggtggggtggggcgtgttggttgcgcggggggtgttcggcgttgggtggggtgtggcggcgggggtttcgggttttttttgtgggcggggggggggggggcgcgg

SEQ ID NO: 16484 - DNA, 604 bp, Artificial Sequence
  chemically treated genomic DNA (Homo sapiens) CpG-island No: 16484
  unsure (155, 491)
ccgcgccccccccccccccgcccacaaaaaaaacccgaaacccccgccgccacaccccacccaacgccgaacaccccccgcgcaaccaacacgccccaccccacccaccacccccacgaacgcgcccacccaccgaccgccgaacgccccccgcnaaacccccaaccgcccccccccccacccccccaaaccaaaaacgaaaaaaaacgcaaaaccgccgcccacaaccgccccccgccgccccccccccgccaacaccccccaaccaacacgcgacccgcgcgacgccgcgccccccaaccaaaaacgcgaaaaacacgcccgcccccacgcaccgcgaaacgaaaaaaaccgacgcgacgcccgaaaaccgcaaaaaacgaaccgcgcccgaccacacaccgcccgacgaacccccgacaccccaccaaccgaacgccccaaaacacgacgccgcgacgacccacaaacgaacccaccacccgccccgnacccaccgcaaacccaaccaccgcgacacgccgcgcgccccaccgcgcaccgaccacaacccacacccaaaaacaaaacacccccacgaccgccgcgcacgcacgcccgaacg

SEQ ID NO: 16485 - DNA, 815 bp, Artificial Sequence
  chemically treated genomic DNA (Homo sapiens) CpG-island No: 16485
cgagtagtcgcgggcgaggtcggacgtatcgttttgggtttagttttcgtcgcgttcgggttacgaattttttgcgggtcgaagtcgcgttcgagcgaagttgggagcgcgcggttcggtggtttcgttgtttaggtttgggcgtgtagcggagggagcggcgcggttgtcggagggcggcgagggcgttcggtcgggtcgtttttgcgttttcgtttttttcgttttatattttggggatcgggaggcggcgcgtttttagatcgtcggtcgcgcgtttgtttgttcgggttcgttcgttgggcgggaaggtgtcgcggcgcgtagacgggtttttcgcggcgggcgtttttattttcggtttcgcgttttcggtgtcggttaaaggcggtttcgggttcgcgtttcggtttttagcgttttcgggtcgcgtcgatttttagtttcgcgtcgcgtcgcgtttatggttttcgacgagggtaattcgcgttcgtcgcgcgttttttcgttcgttggtttcgtcgttcgcgttttggtgttcggcgttcggtttcgcgcgacgttacgttcggaggcgtcgtattgtttttcggaggaggcggtcgagcggcgttggggcggttcgggagttgtagttgcgtttttaaggcgcgtcggcgttatttcgtggtcgtagtttcgttgtgcgttttgttcggggtcgtgcggggttgggacgtcgaggattagtttcgaggacgggcgggcgggggtttttgtttttttttttgagttaagtagttttttagggcgttattagtttcgagggtcgaaag

SEQ ID NO: 16486 - DNA, 815 bp, Artificial Sequence
  chemically treated genomic DNA (Homo sapiens) CpG-island No: 16486
ctttcgaccctcgaaactaataacgccctaaaaaactacttaactcaaaaaaaaaaacaaaaacccccgcccgcccgtcctcgaaactaatcctcgacgtcccaaccccgcacgaccccgaacaaaacgcacaacgaaactacgaccacgaaataacgccgacgcgccttaaaaacgcaactacaactcccgaaccgccccaacgccgctcgaccgcctcctccgaaaaacaatacgacgcctccgaacgtaacgtcgcgcgaaaccgaacgccgaacaccaaaacgcgaacgacgaaaccaacgaacgaaaaaacgcgcgacgaacgcgaattaccctcgtcgaaaaccataaacgcgacgcgacgcgaaactaaaaatcgacgcgacccgaaaacgctaaaaaccgaaacgcgaacccgaaaccgcctttaaccgacaccgaaaacgcgaaaccgaaaataaaaacgcccgccgcgaaaaacccgtctacgcgccgcgacaccttcccgcccaacgaacgaacccgaacaaacaaacgcgcgaccgacgatctaaaaacgcgccgcctcccgatccccaaaatataaaacgaaaaaaacgaaaacgcaaaaacgacccgaccgaacgccctcgccgccctccgacaaccgcgccgctccctccgctacacgcccaaacctaaacaacgaaaccaccgaaccgcgcgctcccaacttcgctcgaacgcgacttcgacccgcaaaaaattcgtaacccgaacgcgacgaaaactaaacccaaaacgatacgtccgacctcgcccgcgactactcg

SEQ ID NO: 16487 - DNA, 815 bp, Artificial Sequence
  chemically treated genomic DNA (Homo sapiens) CpG-island No: 16487
ttttcggttttcggggttggtggcgttttgggaagttgtttggtttaggggaaggagtagggattttcgttcgttcgttttcgaagttggttttcggcgttttagtttcgtacggtttcgggtagggcgtatagcggggttgcggttacgaggtggcgtcggcgcgttttggaagcgtagttgtagttttcgggtcgttttagcgtcgttcggtcgtttttttcgaggaataatgcggcgttttcgggcgtagcgtcgcgcggggtcggacgtcggatattagagcgcgggcggcggagttagcgggcgagagagcgcgcggcgggcgcgggttgttttcgtcgagagttatgggcgcggcgcggcgcggggttgaggatcggcgcggttcggaggcgttggggatcggggcgcgggttcggggtcgtttttagtcggtatcgagggcgcggggtcggggatgagggcgttcgtcgcggggagttcgtttgcgcgtcgcggtattttttcgtttagcgagcgagttcgagtaggtagacgcgcggtcggcggtttgggggcgcgtcgtttttcggtttttaaaatgtgaagcggggagggcggagacgtagagacggttcggtcgggcgttttcgtcgtttttcggtagtcgcgtcgtttttttcgttgtacgtttaggtttgagtagcgaggttatcgggtcgcgcgtttttagtttcgttcggacgcggtttcggttcgtagagggttcgtggttcggacgcggcgagagttgggtttaggacggtgcgttcggtttcgttcgcggttgttcg

SEQ ID NO: 16488 - DNA, 815 bp, Artificial Sequence
  chemically treated genomic DNA (Homo sapiens) CpG-island No: 16488
cgaacaaccgcgaacgaaaccgaacgcaccgtcctaaacccaactctcgccgcgtccgaaccacgaaccctctacgaaccgaaaccgcgtccgaacgaaactaaaaacgcgcgacccgataacctcgctactcaaacctaaacgtacaacgaaaaaaacgacgcgactaccgaaaaacgacgaaaacgcccgaccgaaccgtctctacgtctccgccctccccgcttcacattttaaaaaccgaaaaacgacgcgcccccaaaccgccgaccgcgcgtctacctactcgaactcgctcgctaaacgaaaaaataccgcgacgcgcaaacgaactccccgcgacgaacgccctcatccccgaccccgcgccctcgataccgactaaaaacgaccccgaacccgcgccccgatccccaacgcctccgaaccgcgccgatcctcaaccccgcgccgcgccgcgcccataactctcgacgaaaacaacccgcgcccgccgcgcgctctctcgcccgctaactccgccgcccgcgctctaatatccgacgtccgaccccgcgcgacgctacgcccgaaaacgccgcattattcctcgaaaaaaacgaccgaacgacgctaaaacgacccgaaaactacaactacgcttccaaaacgcgccgacgccacctcgtaaccgcaaccccgctatacgccctacccgaaaccgtacgaaactaaaacgccgaaaaccaacttcgaaaacgaacgaacgaaaatccctactccttcccctaaaccaaacaacttcccaaaacgccaccaaccccgaaaaccgaaaa

SEQ ID NO: 16489 - DNA, 791 bp, Artificial Sequence
  chemically treated genomic DNA (Homo sapiens) CpG-island No: 16489
tttcggcgcggtatttacgtagagtttaaggagtagttttcgattttttttcggagggtcgtgtaggttttttcggcggtttttatttgcgttttcgttcgttagcggcgttggggaaggggagggagcggttcggacgttgttcgtcgcgcgtagggagtcgttcgtcgtaggttttgtcgtcgttcgttcgcgtttttttcgcgagtttcggagggcgggtttgcggtcgagttagcggcggcggaggggtagcgtagatttttgcggttcgggcgggcgcggcgcgggagttttgggtcgttggcgggtaacgtttttgttcgatttcgttggggaaggttggcgttgttgttcggtcggagttaggggtaggttgcgtaaaggtgatttagggagattttgcgggtcgttttgggtcgcgtttttcggatcggttcgtttcggttcgattggaggggaggaggaggagtaggtcgagcgtattcgcgttggagtttgcgaggagcgtagggtggagcgcgttagtcggggttttcggatttggtttaggtaggtgggtgtatttgtagttcggtggttttgcggggtagtttggggttacggaggacgtcgggggacggagcggggagggcggttagatttgatttagggatgtgagtagatttaagaatagttggacgtgtgtgtgtagagtggggtgtagtcgcgggcgcgtggggaggggcgtattagtcgggagattttgttttttttttagtgcgggtttttttgtcgtggggtttttgtag

SEQ ID NO: 16490 - DNA, 791 bp, Artificial Sequence
  chemically treated genomic DNA (Homo sapiens) CpG-island No: 16490
ctacaaaaaccccacgacaaaaaaacccgcactaaaaaaaaaacaaaatctcccgactaatacgcccctccccacgcgcccgcgactacaccccactctacacacacacgtccaactattcttaaatctactcacatccctaaatcaaatctaaccgccctccccgctccgtcccccgacgtcctccgtaaccccaaactaccccgcaaaaccaccgaactacaaatacacccacctacctaaaccaaatccgaaaaccccgactaacgcgctccaccctacgctcctcgcaaactccaacgcgaatacgctcgacctactcctcctcctcccctccaatcgaaccgaaacgaaccgatccgaaaaacgcgacccaaaacgacccgcaaaatctccctaaatcacctttacgcaacctacccctaactccgaccgaacaacaacgccaaccttccccaacgaaatcgaacaaaaacgttacccgccaacgacccaaaactcccgcgccgcgcccgcccgaaccgcaaaaatctacgctacccctccgccgccgctaactcgaccgcaaacccgccctccgaaactcgcgaaaaaaacgcgaacgaacgacgacaaaacctacgacgaacgactccctacgcgcgacgaacaacgtccgaaccgctccctccccttccccaacgccgctaacgaacgaaaacgcaaataaaaaccgccgaaaaaacctacacgaccctccgaaaaaaaatcgaaaactactccttaaactctacgtaaataccgcgccgaaa

SEQ ID NO: 16491 - DNA, 791 bp, Artificial Sequence
  chemically treated genomic DNA (Homo sapiens) CpG-island No: 16491
ttgtaggaattttacggtagggagattcgtattgggaagagagtagggtttttcggttggtgcgtttttttttacgcgttcgcggttgtattttattttgtatatatacgtttaattatttttggatttatttatatttttggattaagtttggtcgtttttttcgtttcgtttttcggcgtttttcgtggttttaggttgtttcgtaaagttatcgagttgtaaatatatttatttatttgggttagattcgaggatttcggttggcgcgttttattttgcgtttttcgtaagttttagcgcgaatgcgttcggtttgttttttttttttttttttagtcgagtcgaggcgagtcgattcgggaggcgcgatttagggcggttcgtaaggtttttttaagttatttttgcgtagtttgtttttggtttcggtcgggtagtagcgttagttttttttagcgaggtcgggtagaggcgttgttcgttagcggtttaggattttcgcgtcgcgttcgttcgggtcgtagaggtttgcgttgttttttcgtcgtcgttggttcggtcgtagattcgtttttcggggttcgcggggagagcgcgggcgggcggcggtaaggtttgcggcgggcggttttttgcgcgcggcgggtagcgttcgggtcgttttttttttttttttagcgtcgttggcgggcggaggcgtaggtagggatcgtcggggaagtttgtacggtttttcgaggagaggtcggggattgttttttgggttttacgtgagtgtcgcgtcgagg

SEQ ID NO: 16492 - DNA, 791 bp, Artificial Sequence
  chemically treated genomic DNA (Homo sapiens) CpG-island No: 16492
cctcgacgcgacactcacgtaaaacccaaaaaacaatccccgacctctcctcgaaaaaccgtacaaacttccccgacgatccctacctacgcctccgcccgccaacgacgctaaaaaaaaaaaaaaaacgacccgaacgctacccgccgcgcgcaaaaaaccgcccgccgcaaaccttaccgccgcccgcccgcgctctccccgcgaaccccgaaaaacgaatctacgaccgaaccaacgacgacgaaaaaacaacgcaaacctctacgacccgaacgaacgcgacgcgaaaatcctaaaccgctaacgaacaacgcctctacccgacctcgctaaaaaaaactaacgctactacccgaccgaaaccaaaaacaaactacgcaaaaataacttaaaaaaaccttacgaaccgccctaaatcgcgcctcccgaatcgactcgcctcgactcgactaaaaaaaaaaaaaaaaaacaaaccgaacgcattcgcgctaaaacttacgaaaaacgcaaaataaaacgcgccaaccgaaatcctcgaatctaacccaaataaataaatatatttacaactcgataactttacgaaacaacctaaaaccacgaaaaacgccgaaaaacgaaacgaaaaaaacgaccaaacttaatccaaaaatataaataaatccaaaaataattaaacgtatatatacaaaataaaatacaaccgcgaacgcgtaaaaaaaaacgcaccaaccgaaaaaccctactctcttcccaatacgaatctccctaccgtaaaattcctacaa

SEQ ID NO: 16493 - DNA, 934 bp, Artificial Sequence
  chemically treated genomic DNA (Homo sapiens) CpG-island No: 16493
cgcggttttttttattttttcgtttttcgttgtcgtcgtcgtcgtcgtttttggatttggacggatttagtggtcgttgtcgttttcgtagggtcgggtattatttttcgtttgcggtggtttcgtcgattttttcgcggttgttgtttcgttcgcgtcggcggaaggagacgcgttgcgcgtcgtcgttgttcggggagggagacggagtagtattggtcgcggcgcggtggcggcggttgggttgtttcggggttttcgacggtcgcgttgggttttgttttagtttttttgtgtggcgttgtagtataaggttgcgaatttgggagtttaaaggagtgtttgcggggagggttcgaggtcgttgtgttcggggtagagcggtcggttcgtttcgagtttgcgttttttcgggttcgttgttgtgtttcggttcgttttttttagtatgagcggtcggtaggagtgaggttttatcggttttttcgtattggaggaggtagcggtcgtttcggtagcgatagttatggcggtagagacgcgggtagagttggtgggtaagcggtttttgtgtgtggcggtcggcgacgaggtacgttcggagcgttgggagagcggacgcggttggcgaagttggcgagcgggggttattcgagtcgtgttatatagggatagtcgtaattcggatttggcggtaagagagttagcgtttttttttttttttgtcgcgttcgtattcggttttcgtagacgtattttgtaggtttttttttggcgtttcgtttagttcggttaattggcggttacgtttttttgttgaatttttggcgcgtttgttcgtattttttgtttgggtttttgcgttttttcgagcggttttttttgtggaggtggtgtcggagtaggattttcgggatagtcgcggaggttgttt

SEQ ID NO: 16494 - DNA, 934 bp, Artificial Sequence
  chemically treated genomic DNA (Homo sapiens) CpG-island No: 16494
aaacaacctccgcgactatcccgaaaatcctactccgacaccacctccacaaaaaaaaccgctcgaaaaaacgcaaaaacccaaacaaaaaatacgaacaaacgcgccaaaaattcaacaaaaaaacgtaaccgccaattaaccgaactaaacgaaacgccaaaaaaaaacctacaaaatacgtctacgaaaaccgaatacgaacgcgacaaaaaaaaaaaaaaacgctaactctcttaccgccaaatccgaattacgactatccctatataacacgactcgaataacccccgctcgccaacttcgccaaccgcgtccgctctcccaacgctccgaacgtacctcgtcgccgaccgccacacacaaaaaccgcttacccaccaactctacccgcgtctctaccgccataactatcgctaccgaaacgaccgctacctcctccaatacgaaaaaaccgataaaacctcactcctaccgaccgctcatactaaaaaaaacgaaccgaaacacaacaacgaacccgaaaaaacgcaaactcgaaacgaaccgaccgctctaccccgaacacaacgacctcgaaccctccccgcaaacactcctttaaactcccaaattcgcaaccttatactacaacgccacacaaaaaaactaaaacaaaacccaacgcgaccgtcgaaaaccccgaaacaacccaaccgccgccaccgcgccgcgaccaatactactccgtctccctccccgaacaacgacgacgcgcaacgcgtctccttccgccgacgcgaacgaaacaacaaccgcgaaaaaatcgacgaaaccaccgcaaacgaaaaataatacccgaccctacgaaaacgacaacgaccactaaatccgtccaaatccaaaaacgacgacgacgacgacaacgaaaaacgaaaaaataaaaaaaaccgcg

SEQ ID NO: 16495 - DNA, 934 bp, Artificial Sequence
  chemically treated genomic DNA (Homo sapiens) CpG-island No: 16495
gggtagttttcgcggttatttcgggagttttgtttcgatattatttttataggggaagtcgttcggagagacgtagggatttaggtaagggatgcgggtaaacgcgttaagggtttagtagaggggcgtgatcgttagttggtcgggttgagcgaggcgttagagggaagtttgtaaggtacgtttgcgagagtcgggtgcgggcgcggtaggggaaaaggggggcgttgatttttttatcgttaggttcggattgcggttgtttttgtgtgatacggttcggatgattttcgttcgttagtttcgttagtcgcgttcgtttttttagcgtttcgaacgtgtttcgtcgtcgatcgttatatataggaatcgtttatttattagttttgttcgcgtttttatcgttatagttgtcgttgtcgaagcggtcgttgttttttttagtgcgagggaatcgatgaaattttatttttatcggtcgtttatgttgaggagagcggatcgggatatagtagcggattcgaaagagcgtagattcgggacgaatcggtcgttttgtttcggatatagcgatttcgggtttttttcgtaaatatttttttggatttttagattcgtagttttgtgttgtagcgttatataagaaaattgaaataaaatttaacgcggtcgtcgaagatttcgaggtagtttagtcgtcgttatcgcgtcgcggttagtattgtttcgttttttttttcgggtagcggcggcgcgtagcgcgttttttttcgtcggcgcgggcggggtagtagtcgcgggagggtcggcggaattatcgtagacggaaagtagtgttcggttttgcggaggcggtagcggttattgggttcgtttagatttagaggcggcggcggcggcggtagcgggagacgaaaaaatgaagagggtcgcg

SEQ ID NO: 16496 - DNA, 934 bp, Artificial Sequence
  chemically treated genomic DNA (Homo sapiens) CpG-island No: 16496
cgcgaccctcttcattttttcgtctcccgctaccgccgccgccgccgcctctaaatctaaacgaacccaataaccgctaccgcctccgcaaaaccgaacactactttccgtctacgataattccgccgaccctcccgcgactactaccccgcccgcgccgacgaaaaaaaacgcgctacgcgccgccgctacccgaaaaaaaaaacgaaacaatactaaccgcgacgcgataacgacgactaaactacctcgaaatcttcgacgaccgcgttaaattttatttcaattttcttatataacgctacaacacaaaactacgaatctaaaaatccaaaaaaatatttacgaaaaaaacccgaaatcgctatatccgaaacaaaacgaccgattcgtcccgaatctacgctctttcgaatccgctactatatcccgatccgctctcctcaacataaacgaccgataaaaataaaatttcatcgattccctcgcactaaaaaaaacaacgaccgcttcgacaacgacaactataacgataaaaacgcgaacaaaactaataaataaacgattcctatatataacgatcgacgacgaaacacgttcgaaacgctaaaaaaacgaacgcgactaacgaaactaacgaacgaaaatcatccgaaccgtatcacacaaaaacaaccgcaatccgaacctaacgataaaaaaatcaacgccccccttttcccctaccgcgcccgcacccgactctcgcaaacgtaccttacaaacttccctctaacgcctcgctcaacccgaccaactaacgatcacgcccctctactaaacccttaacgcgtttacccgcatcccttacctaaatccctacgtctctccgaacgacttcccctataaaaataatatcgaaacaaaactcccgaaataaccgcgaaaactaccc

SEQ ID NO: 16497 - DNA, 531 bp, Artificial Sequence
  chemically treated genomic DNA (Homo sapiens) CpG-island No: 16497
gttttcggcgtcggtttcgcgcgtcgtttttttcgttttcgttttcgtttttcgattttcgcgcgcgcggttttgtgggtaacgcggggtcgttaggtgatagttaatggcggcggtcgtttgaggcgggcgggcggtatagagcgggcggtaggaggtaagtagcgaaattttttcggtcgtcgttttcgtttcgacggcggtttttttaaggcggtaggattcggcgcgttatggataggtcggcggcggcggcggcggcgggttgcgagggcggcgggggttcgaattcggggtcggcgggcggtaggaggttttttcgggtcgcggggggcgttatcgtcggttttcggtagtttagcgtggagattttggataggtaagcggggttcgggttgtttcggtttttcgcgtttcgattttcgagggtttcgcgcgaggttagttcgtttttttttcgcgcgttgcgtagggtttggcggtggcggggtgggcggtttttttttattttttttgggttttttttttttt

SEQ ID NO: 16498 - DNA, 531 bp, Artificial Sequence
  chemically treated genomic DNA (Homo sapiens) CpG-island No: 16498
aaaaaaaaaaaaacccaaaaaaaataaaaaaaaaccgcccaccccgccaccgccaaaccctacgcaacgcgcgaaaaaaaaacgaactaacctcgcgcgaaaccctcgaaaatcgaaacgcgaaaaaccgaaacaacccgaaccccgcttacctatccaaaatctccacgctaaactaccgaaaaccgacgataacgccccccgcgacccgaaaaaacctcctaccgcccgccgaccccgaattcgaacccccgccgccctcgcaacccgccgccgccgccgccgccgacctatccataacgcgccgaatcctaccgccttaaaaaaaccgccgtcgaaacgaaaacgacgaccgaaaaaatttcgctacttacctcctaccgcccgctctataccgcccgcccgcctcaaacgaccgccgccattaactatcacctaacgaccccgcgttacccacaaaaccgcgcgcgcgaaaatcgaaaaacgaaaacgaaaacgaaaaaaacgacgcgcgaaaccgacgccgaaaac

SEQ ID NO: 16499 - DNA, 531 bp, Artificial Sequence
  chemically treated genomic DNA (Homo sapiens) CpG-island No: 16499
ggggggaggagggtttagaggggatgaagaggggtcgtttatttcgttatcgttaggttttgcgtagcgcgcggggagggggcgggttggtttcgcgcggggttttcgggagtcggggcgcgggaggtcggggtagttcgggtttcgtttatttgtttagggtttttacgttgggttgtcgggagtcggcggtggcgtttttcgcggttcgaggaggttttttgtcgttcgtcggtttcgggttcgggttttcgtcgttttcgtagttcgtcgtcgtcgtcgtcgtcggtttgtttatggcgcgtcgagttttgtcgttttggggaagtcgtcgtcgggacgggagcggcggtcgggaaggtttcgttgtttgttttttgtcgttcgttttatatcgttcgttcgttttaggcggtcgtcgttattagttgttatttggcggtttcgcgttatttataaggtcgcgcgcgcgggggtcggggggcgggagcgggggcggggagggcggcgcgcggggtcggcgtcgggaat

SEQ ID NO: 16500 - DNA, 531 bp, Artificial Sequence
  chemically treated genomic DNA (Homo sapiens) CpG-island No: 16500
attcccgacgccgaccccgcgcgccgccctccccgcccccgctcccgccccccgacccccgcgcgcgcgaccttataaataacgcgaaaccgccaaataacaactaataacgacgaccgcctaaaacgaacgaacgatataaaacgaacgacaaaaaacaaacaacgaaaccttcccgaccgccgctcccgtcccgacgacgacttccccaaaacgacaaaactcgacgcgccataaacaaaccgacgacgacgacgacgacgaactacgaaaacgacgaaaacccgaacccgaaaccgacgaacgacaaaaaacctcctcgaaccgcgaaaaacgccaccgccgactcccgacaacccaacgtaaaaaccctaaacaaataaacgaaacccgaactaccccgacctcccgcgccccgactcccgaaaaccccgcgcgaaaccaacccgccccctccccgcgcgctacgcaaaacctaacgataacgaaataaacgacccctcttcatcccctctaaaccctcctcccccc

SEQ ID NO: 16501 - DNA, 619 bp, Artificial Sequence
  chemically treated genomic DNA (Homo sapiens) CpG-island No: 16501
ttttggtgacgcgcgattataaggcgttttttttacgtggacgtttattattggcggagatcgtattgacgtttcggaattcgttttgacgcgaacggcggtaaaggttttttttttttgaaagttggcgaggcgcgcgcgttttcgcggtacgtcgcgttttcgtttttcgttcgttaattcgttggtttagttttttttcgcgttcgtttggtttcgttttttttttaattcgttttttttttaatagattggcggcgcgcggaaaacgcgttacgtgacgattggtttcgtttttttttttcggttttatattgaattcgagttggaagaggcgagttcggttttaaaatggaggtaaaatcgtcgttcggtcgtttttagttcgatttcggtcgtcgtcgtcgtcgtcggggggaggaggtattagggggagagcggggggttggtggggaatggtcggcgttgggggtttggttcggtgggagcggggaggtcgggtggatcgggtcggtcgtttcgcgtttttgcgttgagataggttgtgggagggggaggggagcgagagttggagatttttttggggtttttcgttcgtttcgtttttattttcggttgt

SEQ ID NO: 16502 - DNA, 619 bp, Artificial Sequence
  chemically treated genomic DNA (Homo sapiens) CpG-island No: 16502
acaaccgaaaataaaaacgaaacgaacgaaaaaccccaaaaaaatctccaactctcgctcccctccccctcccacaacctatctcaacgcaaaaacgcgaaacgaccgacccgatccacccgacctccccgctcccaccgaaccaaacccccaacgccgaccattccccaccaaccccccgctctccccctaatacctcctccccccgacgacgacgacgacgaccgaaatcgaactaaaaacgaccgaacgacgattttacctccattttaaaaccgaactcgcctcttccaactcgaattcaatataaaaccgaaaaaaaaaaacgaaaccaatcgtcacgtaacgcgttttccgcgcgccgccaatctattaaaaaaaaaacgaattaaaaaaaaaacgaaaccaaacgaacgcgaaaaaaaactaaaccaacgaattaacgaacgaaaaacgaaaacgcgacgtaccgcgaaaacgcgcgcgcctcgccaactttcaaaaaaaaaaaacctttaccgccgttcgcgtcaaaacgaattccgaaacgtcaatacgatctccgccaataataaacgtccacgtaaaaaaaacgccttataatcgcgcgtcaccaaaa

SEQ ID NO: 16503 - DNA, 619 bp, Artificial Sequence
  chemically treated genomic DNA (Homo sapiens) CpG-island No: 16503
gtagtcgaaggtgaaggcgaggcgggcgaggggttttaaggaggtttttaattttcgttttttttttttttttatagtttgttttaacgtaagagcgcgggacggtcgattcggtttattcggttttttcgtttttatcgaattaggtttttaacgtcggttattttttattaatttttcgttttttttttaatatttttttttttcggcggcgacggcgacggtcggagtcgggttgggggcgatcgggcggcggttttatttttattttgagatcggattcgttttttttaattcgagtttaatatgggatcgagaggaagaggcggggttagtcgttacgtgacgcgtttttcgcgcgtcgttagtttgttgggggaggagcgaattgggaagggggcggagttaagcgggcgcgaagagggattggattagcgggttggcgggcggagggcggaggcgcggcgtgtcgcgggagcgcgcgcgtttcgttagtttttaggggaagagggtttttgtcgtcgttcgcgttagggcgagtttcgggacgttagtgcggttttcgttaatggtgagcgtttacgtagagggaacgttttgtgatcgcgcgttattagag

SEQ ID NO: 16504 - DNA, 619 bp, Artificial Sequence
  chemically treated genomic DNA (Homo sapiens) CpG-island No: 16504
ctctaataacgcgcgatcacaaaacgttccctctacgtaaacgctcaccattaacgaaaaccgcactaacgtcccgaaactcgccctaacgcgaacgacgacaaaaaccctcttcccctaaaaactaacgaaacgcgcgcgctcccgcgacacgccgcgcctccgccctccgcccgccaacccgctaatccaatccctcttcgcgcccgcttaactccgcccccttcccaattcgctcctcccccaacaaactaacgacgcgcgaaaaacgcgtcacgtaacgactaaccccgcctcttcctctcgatcccatattaaactcgaattaaaaaaaacgaatccgatctcaaaataaaaataaaaccgccgcccgatcgcccccaacccgactccgaccgtcgccgtcgccgccgaaaaaaaaaaatattaaaaaaaaaacgaaaaattaataaaaaataaccgacgttaaaaacctaattcgataaaaacgaaaaaaccgaataaaccgaatcgaccgtcccgcgctcttacgttaaaacaaactataaaaaaaaaaaaaaaacgaaaattaaaaacctccttaaaacccctcgcccgcctcgccttcaccttcgactac

SEQ ID NO: 16505 - DNA, 549 bp, Artificial Sequence
  chemically treated genomic DNA (Homo sapiens) CpG-island No: 16505
agtgacggtaaagttcggggttttcggggagagttgcgcgtttggagagtcgagcggcggagaagcgttaggggaaagcgtcggtagtttttttttgggtagagtcgatttcgggaaaatttcggagcgttttttttttgcggtttggaggcgcgtttttatttgttcgtcgttcgcgaagttgagggggttagtaaggcgggggtttcggtcggcggaggtagcgagtgggtggtggaggagggcgcgtaacggcgggaagtagttttcggattgtcgagggaggttcgcgggggtatcggcgacgtcggtttttttggcgatgttgtggaaagtcgtttttcgcggttttcgcgtttttttcgaagtcgggttattggttttgggttgaggcggggacgcgcggttgtcgggaaaggcggagaagattgggagggtacggaaatttacggatttttttttttatattttttattcgttttagtagttttcggttgaagcgtagcgggagagggagggagaaaaaggtataaggcgtcggggatgggg

SEQ ID NO: 16506 - DNA, 549 bp, Artificial Sequence
  chemically treated genomic DNA (Homo sapiens) CpG-island No: 16506
ccccatccccgacgccttatacctttttctccctccctctcccgctacgcttcaaccgaaaactactaaaacgaataaaaaatataaaaaaaaaaatccgtaaatttccgtaccctcccaatcttctccgcctttcccgacaaccgcgcgtccccgcctcaacccaaaaccaataacccgacttcgaaaaaaacgcgaaaaccgcgaaaaacgactttccacaacatcgccaaaaaaaccgacgtcgccgatacccccgcgaacctccctcgacaatccgaaaactacttcccgccgttacgcgccctcctccaccacccactcgctacctccgccgaccgaaacccccgccttactaaccccctcaacttcgcgaacgacgaacaaataaaaacgcgcctccaaaccgcaaaaaaaaaacgctccgaaattttcccgaaatcgactctacccaaaaaaaaactaccgacgctttcccctaacgcttctccgccgctcgactctccaaacgcgcaactctccccgaaaaccccgaactttaccgtcact

SEQ ID NO: 16507 - DNA, 549 bp, Artificial Sequence
  chemically treated genomic DNA (Homo sapiens) CpG-island No: 16507
ttttattttcggcgttttgtgtttttttttttttttttttttcgttgcgttttagtcgagggttgttggagcgaatgggggatgtagaggaaggagttcgtaggttttcgtgtttttttaatttttttcgtttttttcgatagtcgcgcgttttcgttttagtttaaggttagtggttcggtttcgaggaaggcgcgggggtcgcgagagacgattttttatagtatcgttaaggaaatcggcgtcgtcggtgttttcgcgggtttttttcggtagttcgggggttgtttttcgtcgttgcgcgtttttttttattatttattcgttgttttcgtcggtcggagttttcgttttattaatttttttaatttcgcgggcggcgggtaggtgggggcgcgtttttaggtcgtaagaagggagcgtttcgagattttttcggggtcggttttgtttaggagggagttatcgacgtttttttttggcgttttttcgtcgttcggttttttaggcgcgtagtttttttcgagagtttcgaattttatcgttatt

SEQ ID NO: 16508 - DNA, 549 bp, Artificial Sequence
  chemically treated genomic DNA (Homo sapiens) CpG-island No: 16508
aataacgataaaattcgaaactctcgaaaaaaactacgcgcctaaaaaaccgaacgacgaaaaaacgccaaaaaaaaacgtcgataactccctcctaaacaaaaccgaccccgaaaaaatctcgaaacgctcccttcttacgacctaaaaacgcgcccccacctacccgccgcccgcgaaattaaaaaaattaataaaacgaaaactccgaccgacgaaaacaacgaataaataataaaaaaaaacgcgcaacgacgaaaaacaacccccgaactaccgaaaaaaacccgcgaaaacaccgacgacgccgatttccttaacgatactataaaaaatcgtctctcgcgacccccgcgccttcctcgaaaccgaaccactaaccttaaactaaaacgaaaacgcgcgactatcgaaaaaaacgaaaaaaattaaaaaaacacgaaaacctacgaactccttcctctacatcccccattcgctccaacaaccctcgactaaaacgcaacgaaaaaaaaaaaaaaaaaaaaacacaaaacgccgaaaataaaa

SEQ ID NO: 16509 - DNA, 1081 bp, Artificial Sequence
  chemically treated genomic DNA (Homo sapiens) CpG-island No: 16509
tcgggtcgtagggcggggttaggatgtttaggaaggcggtaggtttttttacggcgtcgatttggtgtaggttgtttcggtgcggtgtgaggatgtaggggtcgttggtttcggtgtattcggttcgcgaacgtagtacgttcggtcgtacggtttttcgttttcggggttgtagcggcggttcgaattgttgttcgggcggtaaggttcgcggtcgttgttcgtcgttcgcgtttagtttgtttatgtagttgatgcgtacggtgtcgtatagtattttgagtatgtcgtgtatgttcgggtggtcgtgtagcgggatggacgtgtcgtttttgagtaggaatacgtttaggttgaagtcgttcgtttcgtagatgtgtatgtaggtgattggcggtaggttgggcggtagcggttgtagtgtggttttgcgcggggcgatgtttaagttttcggcgcggagttgggttaggaggttttttagtttgtttaggttttcggggaagttcggttgtatcggcgttttcgggttagaagtcgcgtcgcgatcggaagcgtcgcggtcgttttcgttgtttcggaaggtgaggtaagtttggcgggcgattcgttggattaaggaggttatgttgtttcggggtatggtcggttgtttttttgcgtgtcgggatcggtttttttttttttttcgttttttgcggttttcggcggtcgttacggttgtttttagttcgggtcgaggcgggaggtttcgtaattatcggttcgtcgggcgcgcggtatcgtcgttaattttagtagttacgcgttcgtaattgttcggcgcgttcgttttgagttttttttgagcgcgtacgcgtacgttttatatttcgtatttacgtttcgggagtagatagcggtcgcgtagacggtgttaggttttgttttacgttcggcgttttatttatgcggttcgtatttacgacggtggtcgggcgttcggggattttgcggagtatgtcgggatttgtagttcggtttttcgtttgagttttgagatagtttagtttgttgattggaaaatagaggaattattata

SEQ ID NO: 16510 - DNA, 1081 bp, Artificial Sequence
  chemically treated genomic DNA (Homo sapiens) CpG-island No: 16510
tataataattcctctattttccaatcaacaaactaaactatctcaaaactcaaacgaaaaaccgaactacaaatcccgacatactccgcaaaatccccgaacgcccgaccaccgtcgtaaatacgaaccgcataaataaaacgccgaacgtaaaacaaaacctaacaccgtctacgcgaccgctatctactcccgaaacgtaaatacgaaatataaaacgtacgcgtacgcgctcaaaaaaaactcaaaacgaacgcgccgaacaattacgaacgcgtaactactaaaattaacgacgataccgcgcgcccgacgaaccgataattacgaaacctcccgcctcgacccgaactaaaaacaaccgtaacgaccgccgaaaaccgcaaaaaacgaaaaaaaaaaaaaaaccgatcccgacacgcaaaaaaacaaccgaccataccccgaaacaacataacctccttaatccaacgaatcgcccgccaaacttacctcaccttccgaaacaacgaaaacgaccgcgacgcttccgatcgcgacgcgacttctaacccgaaaacgccgatacaaccgaacttccccgaaaacctaaacaaactaaaaaacctcctaacccaactccgcgccgaaaacttaaacatcgccccgcgcaaaaccacactacaaccgctaccgcccaacctaccgccaatcacctacatacacatctacgaaacgaacgacttcaacctaaacgtattcctactcaaaaacgacacgtccatcccgctacacgaccacccgaacatacacgacatactcaaaatactatacgacaccgtacgcatcaactacataaacaaactaaacgcgaacgacgaacaacgaccgcgaaccttaccgcccgaacaacaattcgaaccgccgctacaaccccgaaaacgaaaaaccgtacgaccgaacgtactacgttcgcgaaccgaatacaccgaaaccaacgacccctacatcctcacaccgcaccgaaacaacctacaccaaatcgacgccgtaaaaaaacctaccgccttcctaaacatcctaaccccgccctacgacccga

SEQ ID NO: 16511 - DNA, 1081 bp, Artificial Sequence
  chemically treated genomic DNA (Homo sapiens) CpG-island No: 16511
tgtaatagtttttttattttttaattaataaattgaattattttagagtttaagcggaaggtcggattataagtttcggtatgtttcgtagggttttcgggcgttcggttatcgtcgtaggtgcgggtcgtatgaatggagcgtcgggcgtaaggtaaagtttggtatcgtttgcgcggtcgttatttgttttcggagcgtgagtgcggggtgtggggcgtgcgcgtgcgcgtttagagggggtttaaggcgagcgcgtcgggtagttgcgggcgcgtggttgttgaggttggcggcggtgtcgcgcgttcgacgggtcggtggttgcggggtttttcgtttcgattcgggttgggggtagtcgtggcggtcgtcggggatcgtaaggggcggaggaaaggagggggtcggtttcggtacgtagaggagtagtcgattatgtttcgagataatatggtttttttgatttaacggatcgttcgttaggtttgttttatttttcggggtagcgggggcggtcgcggcgttttcgatcgcgacgcggtttttggttcggaggcgtcgatgtagtcgggttttttcgagaatttgagtaagttgaagagttttttgatttagtttcgcgtcgaggatttgaatatcgtttcgcgtaaggttatattgtagtcgttgtcgtttaatttgtcgttagttatttatatgtatatttacgagacggacggttttagtttgggcgtgtttttgtttaagagcggtacgtttatttcgttgtacgattattcgggtatgtacggtatgtttaaggtgttgtacggtatcgtgcgtattagttgtatggataagttagacgcgggcggcgggtaacggtcgcgggttttgtcgttcgagtagtagttcgagtcgtcgttgtagtttcgggagcgagaagtcgtgcggtcgggcgtgttgcgttcgcgggtcgagtatatcgaggttagcggtttttgtatttttatatcgtatcgggataatttgtattagatcgacgtcgtggaagggtttgtcgtttttttggatattttggtttcgttttacgattcgg

SEQ ID NO: 16512 - DNA, 1081 bp, Artificial Sequence
  chemically treated genomic DNA (Homo sapiens) CpG-island No: 16512
ccgaatcgtaaaacgaaaccaaaatatccaaaaaaacgacaaacccttccacgacgtcgatctaatacaaattatcccgatacgatataaaaatacaaaaaccgctaacctcgatatactcgacccgcgaacgcaacacgcccgaccgcacgacttctcgctcccgaaactacaacgacgactcgaactactactcgaacgacaaaacccgcgaccgttacccgccgcccgcgtctaacttatccatacaactaatacgcacgataccgtacaacaccttaaacataccgtacatacccgaataatcgtacaacgaaataaacgtaccgctcttaaacaaaaacacgcccaaactaaaaccgtccgtctcgtaaatatacatataaataactaacgacaaattaaacgacaacgactacaatataaccttacgcgaaacgatattcaaatcctcgacgcgaaactaaatcaaaaaactcttcaacttactcaaattctcgaaaaaacccgactacatcgacgcctccgaaccaaaaaccgcgtcgcgatcgaaaacgccgcgaccgcccccgctaccccgaaaaataaaacaaacctaacgaacgatccgttaaatcaaaaaaaccatattatctcgaaacataatcgactactcctctacgtaccgaaaccgaccccctcctttcctccgccccttacgatccccgacgaccgccacgactacccccaacccgaatcgaaacgaaaaaccccgcaaccaccgacccgtcgaacgcgcgacaccgccgccaacctcaacaaccacgcgcccgcaactacccgacgcgctcgccttaaaccccctctaaacgcgcacgcgcacgccccacaccccgcactcacgctccgaaaacaaataacgaccgcgcaaacgataccaaactttaccttacgcccgacgctccattcatacgacccgcacctacgacgataaccgaacgcccgaaaaccctacgaaacataccgaaacttataatccgaccttccgcttaaactctaaaataattcaatttattaattaaaaaataaaaaaactattaca

SEQ ID NO: 16513 - DNA, 537 bp, Artificial Sequence
  chemically treated genomic DNA (Homo sapiens) CpG-island No: 16513
gcgttaaagtcgagaaaggcgtaggagaggcggcgtggtcgagttggggtttgggaagggtttagtcgttgggcgtggggcgcgatagagcggtagtatttattatagttaaaggagttcgttgtcggttgttaggtaatcgacgtgtatattgattcggcgtcgtttttatcgtttcgcgcgcgtagtttcgttttttattggtcgttcgttcgtcgtcgtttttttttattggtgtagggtcgaagagggtgggattaatttggtaaagtttcggtttagcgcggggaggggtacgttggcgatagagtttcgtttttattgggtaagattacgtcgtgagcgttaattggttgagtcgtcgtcgagttgggttaatttttttggtggaggaagttcggttgattttcggtttacgcgggaggggagtaaagggtggcggttcgggtttggagtttagtgggtgtagtttgtttgcgagttgaggttagataggggggcgtttacggacgggtaagagtcgtggttttgttattg

SEQ ID NO: 16514 - DNA, 537 bp, Artificial Sequence
  chemically treated genomic DNA (Homo sapiens) CpG-island No: 16514
caataacaaaaccacgactcttacccgtccgtaaacgcccccctatctaacctcaactcgcaaacaaactacacccactaaactccaaacccgaaccgccaccctttactcccctcccgcgtaaaccgaaaatcaaccgaacttcctccaccaaaaaaattaacccaactcgacgacgactcaaccaattaacgctcacgacgtaatcttacccaataaaaacgaaactctatcgccaacgtacccctccccgcgctaaaccgaaactttaccaaattaatcccaccctcttcgaccctacaccaataaaaaaaaacgacgacgaacgaacgaccaataaaaaacgaaactacgcgcgcgaaacgataaaaacgacgccgaatcaatatacacgtcgattacctaacaaccgacaacgaactcctttaactataataaatactaccgctctatcgcgccccacgcccaacgactaaacccttcccaaaccccaactcgaccacgccgcctctcctacgcctttctcgactttaacgc

SEQ ID NO: 16515 - DNA, 537 bp, Artificial Sequence
  chemically treated genomic DNA (Homo sapiens) CpG-island No: 16515
taatggtaaggttacgatttttattcgttcgtaggcgtttttttgtttggttttagttcgtaagtaggttgtatttattgaattttaggttcggatcgttattttttatttttttttcgcgtgagtcgagaattagtcgagttttttttattaagaggattggtttagttcggcgacgatttagttaattggcgtttacggcgtgattttgtttaataaagacggggttttgtcgttagcgtgttttttttcgcgttgggtcggggttttgttaggttagttttatttttttcggttttgtattaatagggagaggcggcgacgagcggacggttaatggggagcggggttgcgcgcgcggggcggtgggaacggcgtcgagttagtgtatacgtcggttgtttaataatcggtagcggatttttttggttatggtgagtgttgtcgttttgtcgcgttttacgtttagcggttgagttttttttaggttttagttcggttacgtcgttttttttgcgtttttttcggttttagcgt

SEQ ID NO: 16516 - DNA, 537 bp, Artificial Sequence
  chemically treated genomic DNA (Homo sapiens) CpG-island No: 16516
acgctaaaaccgaaaaaaacgcaaaaaaaacgacgtaaccgaactaaaacctaaaaaaaactcaaccgctaaacgtaaaacgcgacaaaacgacaacactcaccataaccaaaaaaatccgctaccgattattaaacaaccgacgtatacactaactcgacgccgttcccaccgccccgcgcgcgcaaccccgctccccattaaccgtccgctcgtcgccgcctctccctattaatacaaaaccgaaaaaaataaaactaacctaacaaaaccccgacccaacgcgaaaaaaaacacgctaacgacaaaaccccgtctttattaaacaaaatcacgccgtaaacgccaattaactaaatcgtcgccgaactaaaccaatcctcttaataaaaaaaactcgactaattctcgactcacgcgaaaaaaaaataaaaaataacgatccgaacctaaaattcaataaatacaacctacttacgaactaaaaccaaacaaaaaaacgcctacgaacgaataaaaatcgtaaccttaccatta

SEQ ID NO: 16517 - DNA, 549 bp, Artificial Sequence
  chemically treated genomic DNA (Homo sapiens) CpG-island No: 16517
gggggcgggggcgggggcgggggcgcgggcgttggcgcgggatgggcgagtggttgcgcgtgtacgcggttcgcgggaggtggcgggcgggggcgagcgttgttgtacgtgcgcggggcgtagcgcgtaggcggcgggtaaaggaaacggcggcgggcgggatcgtttttttcgcggggagacgttcgggtttagacggtttggtaaggtcggcggggttgagttatatgcgtttggagcgggaagcgagggcgttaggacgggaatacgaacgtgttcgttcggagggtcggtcgggggagggggcgttcgtttcgtttttttgttttgttcgagtttttcggtcgggtttgagttttagtttttgtttaattttcgttttttgtcgaggttttcgaagtttatcggaggggatggggcggggtcgtttttatacggagtttagcgaagttacgttatgggcgggaatgaattcgaattttatacgggtaaagagggtgggaaattggtttttattttgtttttatttcgattacggttttgtttttt

SEQ ID NO: 16518 - DNA, 549 bp, Artificial Sequence
  chemically treated genomic DNA (Homo sapiens) CpG-island No: 16518
aaaaaacaaaaccgtaatcgaaataaaaacaaaataaaaaccaatttcccaccctctttacccgtataaaattcgaattcattcccgcccataacgtaacttcgctaaactccgtataaaaacgaccccgccccatcccctccgataaacttcgaaaacctcgacaaaaaacgaaaattaaacaaaaactaaaactcaaacccgaccgaaaaactcgaacaaaacaaaaaaacgaaacgaacgccccctcccccgaccgaccctccgaacgaacacgttcgtattcccgtcctaacgccctcgcttcccgctccaaacgcatataactcaaccccgccgaccttaccaaaccgtctaaacccgaacgtctccccgcgaaaaaaacgatcccgcccgccgccgtttcctttacccgccgcctacgcgctacgccccgcgcacgtacaacaacgctcgcccccgcccgccacctcccgcgaaccgcgtacacgcgcaaccactcgcccatcccgcgccaacgcccgcgcccccgcccccgcccccgccccc

SEQ ID NO: 16519 - DNA, 549 bp, Artificial Sequence
  chemically treated genomic DNA (Homo sapiens) CpG-island No: 16519
agggagtagggtcgtggtcgggatgggggtagaataggggttagttttttattttttttgttcgtgtgaaattcgagtttattttcgtttatagcgtggtttcgttggatttcgtgtgaaagcggtttcgttttatttttttcggtgggtttcgaggatttcggtagggaacggaggttgggtagaagttggagtttaggttcggtcggggagttcgggtaaagtaagaaggcgaggcgggcgttttttttttcggtcggtttttcgagcgggtacgttcgtgttttcgttttggcgttttcgtttttcgttttagacgtatgtgatttagtttcgtcggttttgttaagtcgtttagattcgagcgttttttcgcggagggggcgatttcgttcgtcgtcgttttttttgttcgtcgtttgcgcgttgcgtttcgcgtacgtgtagtagcgttcgttttcgttcgttatttttcgcgagtcgcgtgtacgcgtagttattcgtttatttcgcgttagcgttcgcgttttcgttttcgttttcgttttt

SEQ ID NO: 16520 - DNA, 549 bp, Artificial Sequence
  chemically treated genomic DNA (Homo sapiens) CpG-island No: 16520
aaaaacgaaaacgaaaacgaaaacgcgaacgctaacgcgaaataaacgaataactacgcgtacacgcgactcgcgaaaaataacgaacgaaaacgaacgctactacacgtacgcgaaacgcaacgcgcaaacgacgaacaaaaaaaacgacgacgaacgaaatcgccccctccgcgaaaaaacgctcgaatctaaacgacttaacaaaaccgacgaaactaaatcacatacgtctaaaacgaaaaacgaaaacgccaaaacgaaaacacgaacgtacccgctcgaaaaaccgaccgaaaaaaaaaacgcccgcctcgccttcttactttacccgaactccccgaccgaacctaaactccaacttctacccaacctccgttccctaccgaaatcctcgaaacccaccgaaaaaaataaaacgaaaccgctttcacacgaaatccaacgaaaccacgctataaacgaaaataaactcgaatttcacacgaacaaaaaaaataaaaaactaacccctattctacccccatcccgaccacgaccctactccct

SEQ ID NO: 16521 - DNA, 701 bp, Artificial Sequence
  chemically treated genomic DNA (Homo sapiens) CpG-island No: 16521
gttttcgtggtgcgcggtagttcgaggatttttgtttcgtcggggtttgatgcggagggagtcggtattcgagcgggagagttaggcgattcgttcggggatagtaagtcgagtcggacgtcgtaagggcggtcgcgttgaggtagcgcggatcgaattgacgcggagggagtagcggggttgcgatttgttttgtgaaagttaagttcgcggcggtcgcggcggtttttattagagcgtaacgtagtggtttttttttagtcgggttaagagttcgttcgtcgcggttttggggttttaggacggttttcgggtagatttcgggcggcggagtatagattttcgcgttcgagaatcgagtagggaggtttgagttcgtcggagtcgagtttcgttcgttcgttttagggcgaacggtagagagaggtaagcggcgggtcgggtatagtaggcggtggtagcgacggcggcggtagcggagattttaaggttcgtaagcggggaattggggggtcgtagggcgggtcggttaagaggtttgggagttgggcgttgttgggggtggagggatagaaggtagtaaaatcgagtagggattggcgggagggcgacgggagagtttagaggcggcgatgggggatttagagaggttgtaaagggttggggtttgggagtcgtaggcgggatttttttcgttgtta

SEQ ID NO: 16522 - DNA, 701 bp, Artificial Sequence
  chemically treated genomic DNA (Homo sapiens) CpG-island No: 16522
taacaacgaaaaaaatcccgcctacgactcccaaaccccaaccctttacaacctctctaaatcccccatcgccgcctctaaactctcccgtcgccctcccgccaatccctactcgattttactaccttctatccctccacccccaacaacgcccaactcccaaacctcttaaccgacccgccctacgaccccccaattccccgcttacgaaccttaaaatctccgctaccgccgccgtcgctaccaccgcctactatacccgacccgccgcttacctctctctaccgttcgccctaaaacgaacgaacgaaactcgactccgacgaactcaaacctccctactcgattctcgaacgcgaaaatctatactccgccgcccgaaatctacccgaaaaccgtcctaaaaccccaaaaccgcgacgaacgaactcttaacccgactaaaaaaaaaccactacgttacgctctaataaaaaccgccgcgaccgccgcgaacttaactttcacaaaacaaatcgcaaccccgctactccctccgcgtcaattcgatccgcgctacctcaacgcgaccgcccttacgacgtccgactcgacttactatccccgaacgaatcgcctaactctcccgctcgaataccgactccctccgcatcaaaccccgacgaaacaaaaatcctcgaactaccgcgcaccacgaaaac

SEQ ID NO: 16523 - DNA, 701 bp, Artificial Sequence
  chemically treated genomic DNA (Homo sapiens) CpG-island No: 16523
tagtagcgggggaagtttcgtttgcggtttttagattttagttttttgtagtttttttgagttttttatcgtcgtttttgagttttttcgtcgttttttcgttaatttttattcggttttgttgttttttatttttttatttttagtaacgtttagtttttaagttttttggtcggttcgttttgcgattttttagtttttcgtttacggattttgggattttcgttgtcgtcgtcgtcgttgttatcgtttgttgtgttcgattcgtcgtttgtttttttttgtcgttcgttttgggacgggcggacggagttcggtttcggcgggtttagatttttttgttcgattttcgggcgcgggggtttgtgtttcgtcgttcgggatttgttcgggagtcgttttggagttttagggtcgcggcgagcgggtttttggttcggttagggagaggttattgcgttgcgttttggtaagggtcgtcgcggtcgtcgcgaatttaatttttatagagtaggtcgtagtttcgttgtttttttcgcgttagttcggttcgcgttgttttagcgcggtcgtttttgcggcgttcggttcggtttgttgttttcgggcgaatcgtttgattttttcgttcgggtgtcggtttttttcgtattaggtttcgacgggatagggattttcgggttgtcgcgtattacgggaat

SEQ ID NO: 16524 - DNA, 701 bp, Artificial Sequence
  chemically treated genomic DNA (Homo sapiens) CpG-island No: 16524
attcccgtaatacgcgacaacccgaaaatccctatcccgtcgaaacctaatacgaaaaaaaccgacacccgaacgaaaaaatcaaacgattcgcccgaaaacaacaaaccgaaccgaacgccgcaaaaacgaccgcgctaaaacaacgcgaaccgaactaacgcgaaaaaaacaacgaaactacgacctactctataaaaattaaattcgcgacgaccgcgacgacccttaccaaaacgcaacgcaataacctctccctaaccgaaccaaaaacccgctcgccgcgaccctaaaactccaaaacgactcccgaacaaatcccgaacgacgaaacacaaacccccgcgcccgaaaatcgaacaaaaaaatctaaacccgccgaaaccgaactccgtccgcccgtcccaaaacgaacgacaaaaaaaaacaaacgacgaatcgaacacaacaaacgataacaacgacgacgacgacaacgaaaatcccaaaatccgtaaacgaaaaactaaaaaatcgcaaaacgaaccgaccaaaaaacttaaaaactaaacgttactaaaaataaaaaaataaaaaacaacaaaaccgaataaaaattaacgaaaaaacgacgaaaaaactcaaaaacgacgataaaaaactcaaaaaaactacaaaaaactaaaatctaaaaaccgcaaacgaaacttcccccgctacta

SEQ ID NO: 16525 - DNA, 1198 bp, Artificial Sequence
  chemically treated genomic DNA (Homo sapiens) CpG-island No: 16525
ttaacgcgtttttcgagtttttcgttttcgggggtcggttttttcggcggacgttcgttcgtggcggttttaggggtcgtagtcgggaatttagggttttcgaggttagatgtttgggtagttgcggttgcggcggttgggcgagtagaggggcggttgcgggttgtgggcgttgggcggcggtagcgggaagggggtcgggagtttttcggttcgcgacggatttcgttggggaacgggcggtcggtgttcgtcgggggttgcgcggttggtgttcgtcgggggtcgtcgtacgggtaaatttcgttttcgggtttggttcggcgtcgcgcggtttcgtaggttacgtcgttggttttgcgttaatatggtcgtcgcggacgttcggtggttcgggggggcgcgggtcggtcgtttttttttcgtttttcgttcgttcggcgtcgtcgtcgtcgttaatatggttggcgcggcgttggttttcggcgagggtaggggaggcgggcggagcggtcggcggggcgttcggcgggtttcggtttcggtttcggcgttcgcggttcggggcgggcggttcggagggtcgggggcgtcgttgcgggttttggagcggtcgagcgttatggttgtacgggcgtttttgttatttcgaggagtgcgtttcgcgtcggggggcggggaggttcggttcgggttttcgagttttcgggcggttcgggcggggcggggcggggcggggtgggggtcgacgggcgggcggcggcggcggggttcgggtcgttttgtttgtcgttgtcgtcgtcgttcgcgtcggtcgcgcgcggattagttattttagcgagtgggatttcgaggcgcggcggacgtcgttattagtgtcgcggttgtcgtcggttcggtcgtatatttttcgcgtatcgttatcgtcgtcgttttcggtttcgcgcgtttttcggggatgatagcggcggattttaggggtatttttttttattaggaggtttttgataaaatggaaggtgaattacgggtgtttcggtgattcggtacgggggtcgaggcgggttgtttgttgtcggtcgggattttttcgttttcggtttcgtttcgttcgggtcgtcgttgcgggtttttgttgggtagttttttgggcggttgttgttaaggggagttttttagttttatatgatgattttgg

SEQ ID NO: 16526 - DNA, 1198 bp, Artificial Sequence
  chemically treated genomic DNA (Homo sapiens) CpG-island No: 16526
ccaaaatcatcatataaaactaaaaaactccccttaacaacaaccgcccaaaaaactacccaacaaaaacccgcaacgacgacccgaacgaaacgaaaccgaaaacgaaaaaatcccgaccgacaacaaacaacccgcctcgacccccgtaccgaatcaccgaaacacccgtaattcaccttccattttatcaaaaacctcctaataaaaaaaaatacccctaaaatccgccgctatcatccccgaaaaacgcgcgaaaccgaaaacgacgacgataacgatacgcgaaaaatatacgaccgaaccgacgacaaccgcgacactaataacgacgtccgccgcgcctcgaaatcccactcgctaaaataactaatccgcgcgcgaccgacgcgaacgacgacgacaacgacaaacaaaacgacccgaaccccgccgccgccgcccgcccgtcgacccccaccccgccccgccccgccccgcccgaaccgcccgaaaactcgaaaacccgaaccgaacctccccgccccccgacgcgaaacgcactcctcgaaataacaaaaacgcccgtacaaccataacgctcgaccgctccaaaacccgcaacgacgcccccgaccctccgaaccgcccgccccgaaccgcgaacgccgaaaccgaaaccgaaacccgccgaacgccccgccgaccgctccgcccgcctcccctaccctcgccgaaaaccaacgccgcgccaaccatattaacgacgacgacgacgccgaacgaacgaaaaacgaaaaaaaaacgaccgacccgcgcccccccgaaccaccgaacgtccgcgacgaccatattaacgcaaaaccaacgacgtaacctacgaaaccgcgcgacgccgaaccaaacccgaaaacgaaatttacccgtacgacgacccccgacgaacaccaaccgcgcaacccccgacgaacaccgaccgcccgttccccaacgaaatccgtcgcgaaccgaaaaactcccgacccccttcccgctaccgccgcccaacgcccacaacccgcaaccgcccctctactcgcccaaccgccgcaaccgcaactacccaaacatctaacctcgaaaaccctaaattcccgactacgacccctaaaaccgccacgaacgaacgtccgccgaaaaaaccgacccccgaaaacgaaaaactcgaaaaacgcgttaa

SEQ ID NO: 16527 - DNA, 1198 bp, Artificial Sequence
  chemically treated genomic DNA (Homo sapiens) CpG-island No: 16527
ttaaggttattatgtaaaattaaagagttttttttggtagtagtcgtttaggaggttgtttaatagagattcgtagcggcggttcgggcggggcgggatcgggagcgggggagtttcggtcggtagtaggtagttcgtttcggttttcgtgtcgggttatcgggatattcgtaatttattttttattttgttaaaagttttttgatgaaagaaagtgtttttgaaattcgtcgttgttattttcgggggacgcgcggggtcgggggcggcggcggtggcggtgcgcggggggtgtgcggtcgggtcggcggtagtcgcggtattggtggcggcgttcgtcgcgtttcggagttttattcgttaaaatggttgattcgcgcgcggtcggcgcgggcggcggcgatagcggtaaataaagcggttcgggtttcgtcgtcgtcgttcgttcgtcggtttttatttcgtttcgtttcgtttcgttcgggtcgttcgggggttcgggggttcgggtcggattttttcgtttttcggcgcggggcgtatttttcgggataataaaggcgttcgtgtagttatgacgttcggtcgttttagggttcgtagcggcgttttcggtttttcgagtcgttcgtttcgggtcgcgggcgtcggggtcgaggtcggagttcgtcgggcgtttcgtcgatcgtttcgttcgttttttttgttttcgtcggaggttagcgtcgcgttagttatgttagcggcggcggcggcgtcgggcgggcgggaggcgagaggggggcggtcggttcgcgttttttcgggttatcgggcgttcgcgacggttatgttaacgtagagttagcggcgtagtttgcgggatcgcgcggcgtcgggttaagttcgggagcgaagtttgttcgtgcggcggttttcggcgggtattagtcgcgtagttttcggcgggtatcggtcgttcgttttttagcggagttcgtcgcgggtcggggaattttcggtttttttttcgttgtcgtcgtttagcgtttatagttcgtagtcgtttttttgttcgtttagtcgtcgtagtcgtagttgtttaaatatttggtttcgggggttttgggttttcggttgcggtttttggggtcgttacgggcgggcgttcgtcgagggggtcgattttcgaaagcggggagttcggggaacgcgttgg

SEQ ID NO: 16528 - DNA, 1198 bp, Artificial Sequence
  chemically treated genomic DNA (Homo sapiens) CpG-island No: 16528
ccaacgcgttccccgaactccccgctttcgaaaatcgaccccctcgacgaacgcccgcccgtaacgaccccaaaaaccgcaaccgaaaacccaaaacccccgaaaccaaatatttaaacaactacgactacgacgactaaacgaacaaaaaaacgactacgaactataaacgctaaacgacgacaacgaaaaaaaaaccgaaaattccccgacccgcgacgaactccgctaaaaaacgaacgaccgatacccgccgaaaactacgcgactaatacccgccgaaaaccgccgcacgaacaaacttcgctcccgaacttaacccgacgccgcgcgatcccgcaaactacgccgctaactctacgttaacataaccgtcgcgaacgcccgataacccgaaaaaacgcgaaccgaccgcccccctctcgcctcccgcccgcccgacgccgccgccgccgctaacataactaacgcgacgctaacctccgacgaaaacaaaaaaaacgaacgaaacgatcgacgaaacgcccgacgaactccgacctcgaccccgacgcccgcgacccgaaacgaacgactcgaaaaaccgaaaacgccgctacgaaccctaaaacgaccgaacgtcataactacacgaacgcctttattatcccgaaaaatacgccccgcgccgaaaaacgaaaaaatccgacccgaacccccgaacccccgaacgacccgaacgaaacgaaacgaaacgaaataaaaaccgacgaacgaacgacgacgacgaaacccgaaccgctttatttaccgctatcgccgccgcccgcgccgaccgcgcgcgaatcaaccattttaacgaataaaactccgaaacgcgacgaacgccgccaccaataccgcgactaccgccgacccgaccgcacaccccccgcgcaccgccaccgccgccgcccccgaccccgcgcgtcccccgaaaataacaacgacgaatttcaaaaacactttctttcatcaaaaaacttttaacaaaataaaaaataaattacgaatatcccgataacccgacacgaaaaccgaaacgaactacctactaccgaccgaaactcccccgctcccgatcccgccccgcccgaaccgccgctacgaatctctattaaacaacctcctaaacgactactaccaaaaaaaactctttaattttacataataaccttaa

SEQ ID NO: 16529 - DNA, 662 bp, Artificial Sequence
  chemically treated genomic DNA (Homo sapiens) CpG-island No: 16529
ggggcggtcgggtgtttatttttagagtttgtttagcgttttgttgagtttagcgttgtgtaggtgcgggtattggttcgcgagttttttgcgcgttgtttgagtttatattatgaaggcgtttatgggtcgtttgacgtgcggtttgtttttgttggcgtcgttgacgcgtacgggtatgggtattagcgtttagtcgtagtcgttgagtatttggttgacggtttcgcggatgtatacggggaatttgttatcgttcgtttcgtcgttttgttgtttttttttgattttgtttagttcgtttggtttcgggttggttcgtaggttcgattcgtcgtcgtcgtcgtcgggttttagcgagggcgcgtttttcggggataggtagcggggttttttcgagtttacggggtttagttttattttcgataggttttgttttttcgttatgtcgttttcggtcgtcgtcgtcgtcgtttcggtcgtttttttcgggttagtcgtcggggttttcgtaaagagtttaacgtttatttggatggaaggagggcgcgatggagcggtcgcgcgcgtagtttcgagggcggttcgagataggacgtgggtatagtttcgaggtggcggttttttttgttttagttaaatttatttggtttttggggttt

SEQ ID NO: 16530 - DNA, 662 bp, Artificial Sequence
  chemically treated genomic DNA (Homo sapiens) CpG-island No: 16530
aaaccccaaaaaccaaataaatttaactaaaacaaaaaaaaccgccacctcgaaactatacccacgtcctatctcgaaccgccctcgaaactacgcgcgcgaccgctccatcgcgccctccttccatccaaataaacgttaaactctttacgaaaaccccgacgactaacccgaaaaaaacgaccgaaacgacgacgacgacgaccgaaaacgacataacgaaaaaacaaaacctatcgaaaataaaactaaaccccgtaaactcgaaaaaaccccgctacctatccccgaaaaacgcgccctcgctaaaacccgacgacgacgacgacgaatcgaacctacgaaccaacccgaaaccaaacgaactaaacaaaatcaaaaaaaaacaacaaaacgacgaaacgaacgataacaaattccccgtatacatccgcgaaaccgtcaaccaaatactcaacgactacgactaaacgctaatacccatacccgtacgcgtcaacgacgccaacaaaaacaaaccgcacgtcaaacgacccataaacgccttcataatataaactcaaacaacgcgcaaaaaactcgcgaaccaatacccgcacctacacaacgctaaactcaacaaaacgctaaacaaactctaaaaataaacacccgaccgcccc

SEQ ID NO: 16531 - DNA, 662 bp, Artificial Sequence
  chemically treated genomic DNA (Homo sapiens) CpG-island No: 16531
gggttttaggggttagatgggtttagttggagtaggaagggtcgttatttcggggttgtgtttacgttttgtttcgggtcgttttcggggttgcgcgcgcggtcgttttatcgcgttttttttttatttaggtgggcgttggattttttgcgaggatttcggcggttggttcgggggaggcggtcgaggcggcggcggcggcggtcgggggcgatatggcggaggagtaggatttatcggaggtggagttgagtttcgtgggttcggaggagtttcgttgtttgttttcggggagcgcgttttcgttagggttcgacggcggcggcggcggatcgggtttgcgagttagttcggggttaggcgagttgggtaaggttaagaaggagtagtaggacggcgaggcggacgatgataagtttttcgtgtgtattcgcgaggtcgttagttaggtgtttagcggttacgattggacgttggtgtttatgttcgtgcgcgttaacggcgttagtaaaagtaagtcgtacgttaagcggtttatgaacgtttttatggtgtgggtttaggtagcgcgtaggaagttcgcggattagtattcgtatttgtataacgttgagtttagtaagacgttgggtaagttttggaggtgagtattcgatcgtttt

SEQ ID NO: 16532 - DNA, 662 bp, Artificial Sequence
  chemically treated genomic DNA (Homo sapiens) CpG-island No: 16532
aaaacgatcgaatactcacctccaaaacttacccaacgtcttactaaactcaacgttatacaaatacgaatactaatccgcgaacttcctacgcgctacctaaacccacaccataaaaacgttcataaaccgcttaacgtacgacttacttttactaacgccgttaacgcgcacgaacataaacaccaacgtccaatcgtaaccgctaaacacctaactaacgacctcgcgaatacacacgaaaaacttatcatcgtccgcctcgccgtcctactactccttcttaaccttacccaactcgcctaaccccgaactaactcgcaaacccgatccgccgccgccgccgtcgaaccctaacgaaaacgcgctccccgaaaacaaacaacgaaactcctccgaacccacgaaactcaactccacctccgataaatcctactcctccgccatatcgcccccgaccgccgccgccgccgcctcgaccgcctcccccgaaccaaccgccgaaatcctcgcaaaaaatccaacgcccacctaaataaaaaaaaaacgcgataaaacgaccgcgcgcgcaaccccgaaaacgacccgaaacaaaacgtaaacacaaccccgaaataacgacccttcctactccaactaaacccatctaacccctaaaaccc

SEQ ID NO: 16533 - DNA, 850 bp, Artificial Sequence
  chemically treated genomic DNA (Homo sapiens) CpG-island No: 16533
tgtcgcgttttatttcgacgcgggttttgtcgttggttagttggtttatttgtcggcgtagttttcgtatttttttttcgtagaggttttttaggcgcgatttgttttggtttttgagttgttcgagttcggttagtaggattttattttgttgttttaggaagcgtattttgtcgatgtagttggcgaagcggttatttagtttttgtagttttattttttcgttggtgcgggtgtttttgaattcggtgttgatggcgtcggttagcgagaagtttatcgagttttgtaggagtcgtatttcgggtacgttgtttcgtaggcgtacggtagaggagcgcgtggtatatacgtcgttcggggacgaggcgtagaggttgcggttggtgttggggcgtagcgcgttgtttaggttgtaggtgcgggtggacgtagttacgtagtttcggttggagttcggtcggttcgcggtgttcgggtcgtcgaatattttgcggtaggaggacgaggatacggatttggtggatatggttgcggagggtggcgatggtttgggcggcggcggtggcgcggattggttttcggagaagaggcgaacgagggcgcggtgggtgtgggtggtgggagcgcggttgcgtttttggcgcggggatttcggagcgagagtggtagaggattggatttcgtcgagggcgttgtttttataatttcgttaggaaagagggtttttttttattgttattttagtcgcggagcgcgttagttaatagggatttagcgagaagcggggagggtgggcgggtggggtgggggcgttttcgagtttttttgtttcggggtttgggattgg

SEQ ID NO: 16534 - DNA, 850 bp, Artificial Sequence
  chemically treated genomic DNA (Homo sapiens) CpG-island No: 16534
ccaatcccaaaccccgaaacaaaaaaactcgaaaacgcccccaccccacccgcccaccctccccgcttctcgctaaatccctattaactaacgcgctccgcgactaaaataacaataaaaaaaaaccctctttcctaacgaaattataaaaacaacgccctcgacgaaatccaatcctctaccactctcgctccgaaatccccgcgccaaaaacgcaaccgcgctcccaccacccacacccaccgcgccctcgttcgcctcttctccgaaaaccaatccgcgccaccgccgccgcccaaaccatcgccaccctccgcaaccatatccaccaaatccgtatcctcgtcctcctaccgcaaaatattcgacgacccgaacaccgcgaaccgaccgaactccaaccgaaactacgtaactacgtccacccgcacctacaacctaaacaacgcgctacgccccaacaccaaccgcaacctctacgcctcgtccccgaacgacgtatataccacgcgctcctctaccgtacgcctacgaaacaacgtacccgaaatacgactcctacaaaactcgataaacttctcgctaaccgacgccatcaacaccgaattcaaaaacacccgcaccaacgaaaaaataaaactacaaaaactaaataaccgcttcgccaactacatcgacaaaatacgcttcctaaaacaacaaaataaaatcctactaaccgaactcgaacaactcaaaaaccaaaacaaatcgcgcctaaaaaacctctacgaaaaaaaaatacgaaaactacgccgacaaataaaccaactaaccaacgacaaaacccgcgtcgaaataaaacgcgaca

SEQ ID NO: 16535 - DNA, 850 bp, Artificial Sequence
  chemically treated genomic DNA (Homo sapiens) CpG-island No: 16535
ttagttttaggtttcggagtaggaaggttcgagggcgtttttattttattcgtttatttttttcgtttttcgttaggtttttattggttggcgcgtttcgcggttgggatggtagtgggaggggatttttttttttaacggggttataaaaatagcgttttcggcggggtttagttttttgttattttcgtttcgaggttttcgcgttagagacgtagtcgcgtttttattatttatatttatcgcgttttcgttcgtttttttttcgggagttagttcgcgttatcgtcgtcgtttaggttatcgttatttttcgtagttatgtttattaggttcgtgttttcgtttttttatcgtaggatgttcggcggttcgggtatcgcgagtcggtcgagttttagtcggagttacgtgattacgtttattcgtatttatagtttgggtagcgcgttgcgttttagtattagtcgtagtttttacgtttcgttttcgggcggcgtgtatgttacgcgtttttttgtcgtgcgtttgcggagtagcgtgttcggggtgcggtttttgtaggattcggtggatttttcgttggtcgacgttattaatatcgagtttaagaatattcgtattaacgagaaggtggagttgtaggagttgaatgatcgtttcgttaattatatcgataaggtgcgttttttggagtagtagaataagattttgttggtcgagttcgagtagtttaagggttaaggtaagtcgcgtttgggggatttttacgaggaggagatgcgggagttgcgtcggtaggtggattagttaattaacgataaagttcgcgtcgaggtggagcgcgata

SEQ ID NO: 16536 - DNA, 850 bp, Artificial Sequence
  chemically treated genomic DNA (Homo sapiens) CpG-island No: 16536
tatcgcgctccacctcgacgcgaactttatcgttaattaactaatccacctaccgacgcaactcccgcatctcctcctcgtaaaaatcccccaaacgcgacttaccttaacccttaaactactcgaactcgaccaacaaaatcttattctactactccaaaaaacgcaccttatcgatataattaacgaaacgatcattcaactcctacaactccaccttctcgttaatacgaatattcttaaactcgatattaataacgtcgaccaacgaaaaatccaccgaatcctacaaaaaccgcaccccgaacacgctactccgcaaacgcacgacaaaaaaacgcgtaacatacacgccgcccgaaaacgaaacgtaaaaactacgactaatactaaaacgcaacgcgctacccaaactataaatacgaataaacgtaatcacgtaactccgactaaaactcgaccgactcgcgatacccgaaccgccgaacatcctacgataaaaaaacgaaaacacgaacctaataaacataactacgaaaaataacgataacctaaacgacgacgataacgcgaactaactcccgaaaaaaaaacgaacgaaaacgcgataaatataaataataaaaacgcgactacgtctctaacgcgaaaacctcgaaacgaaaataacaaaaaactaaaccccgccgaaaacgctatttttataaccccgttaaaaaaaaaaatcccctcccactaccatcccaaccgcgaaacgcgccaaccaataaaaacctaacgaaaaacgaaaaaaataaacgaataaaataaaaacgccctcgaaccttcctactccgaaacctaaaactaa

SEQ ID NO: 16537 - DNA, 609 bp, Artificial Sequence
  chemically treated genomic DNA (Homo sapiens) CpG-island No: 16537
taaaggggcgtgggaggaggtgcgcggcggtttcggggttgcggttaggcggggagattcgcgggtaaaggagcgggaagaggaaagagtaaggaattttttagatttgaagtcgcggagaaagaaataaagagcgtttgagattggaacgcggggtgggggcgcgtatagcgtaggaacgtagggtttaggtttcgtcgtagtttcgcgcgtcgttcgtttggaaaggggggttgtttcggttcgcgtttttgtttatcgatttgttttggcggagagatgttggggggaggggaggttttgtcgagggatttaacgggtttagtttagtttcggacggcgggagttgcgagacggcggtggtagaggaaagttcgagggagaggggtggggtcgtttagttatcggcggtgatttatcgcgttttgttgtttcgtcgattgagggtttttagcggtttaggggaaatcgttagattagattgatttaagttttagcgggtttcgcgcgcgttgttagtttttagtgttattaatttatagttgggttatcgttttgttgtgtgcggtcgggttttgtgggggataagagcgtttttaagtttttaat

SEQ ID NO: 16538 - DNA, 609 bp, Artificial Sequence
  chemically treated genomic DNA (Homo sapiens) CpG-island No: 16538
attaaaaacttaaaaacgctcttatcccccacaaaacccgaccgcacacaacaaaacgataacccaactataaattaataacactaaaaactaacaacgcgcgcgaaacccgctaaaacttaaatcaatctaatctaacgatttcccctaaaccgctaaaaaccctcaatcgacgaaacaacaaaacgcgataaatcaccgccgataactaaacgaccccacccctctccctcgaactttcctctaccaccgccgtctcgcaactcccgccgtccgaaactaaactaaacccgttaaatccctcgacaaaacctcccctccccccaacatctctccgccaaaacaaatcgataaacaaaaacgcgaaccgaaacaacccccctttccaaacgaacgacgcgcgaaactacgacgaaacctaaaccctacgttcctacgctatacgcgcccccaccccgcgttccaatctcaaacgctctttatttctttctccgcgacttcaaatctaaaaaattccttactctttcctcttcccgctcctttacccgcgaatctccccgcctaaccgcaaccccgaaaccgccgcgcacctcctcccacgccccttta

SEQ ID NO: 16539 - DNA, 609 bp, Artificial Sequence
  chemically treated genomic DNA (Homo sapiens) CpG-island No: 16539
attaaaaatttaggggcgtttttgttttttatagggttcgatcgtatatagtaaggcgatggtttagttgtaagttggtagtattgagaattagtagcgcgcgcggagttcgttgagatttgaattaatttggtttaacggttttttttaaatcgttaggagtttttaatcggcgggatagtagggcgcggtgagttatcgtcggtgattaagcgattttatttttttttttcgggtttttttttgttatcgtcgtttcgtaattttcgtcgttcgaagttggattgagttcgttaggtttttcgatagaattttttttttttttaatattttttcgttaaggtaagtcgatggatagaggcgcgggtcggagtagtttttttttttaagcgggcggcgcgcgaggttgcggcgaggtttgagttttgcgtttttgcgttgtgcgcgtttttatttcgcgttttaattttaggcgttttttgttttttttttcgcgattttagatttgagggattttttattttttttttttttcgtttttttgttcgcgggttttttcgtttgatcgtagtttcgagatcgtcgcgtatttttttttacgtttttttg

SEQ ID NO: 16540 - DNA, 609 bp, Artificial Sequence
  chemically treated genomic DNA (Homo sapiens) CpG-island No: 16540
caaaaaaacgtaaaaaaaaatacgcgacgatctcgaaactacgatcaaacgaaaaaacccgcgaacaaaaaaacgaaaaaaaaaaaaaataaaaaatccctcaaatctaaaatcgcgaaaaaaaaaacaaaaaacgcctaaaattaaaacgcgaaataaaaacgcgcacaacgcaaaaacgcaaaactcaaacctcgccgcaacctcgcgcgccgcccgcttaaaaaaaaaaactactccgacccgcgcctctatccatcgacttaccttaacgaaaaaatattaaaaaaaaaaaaaattctatcgaaaaacctaacgaactcaatccaacttcgaacgacgaaaattacgaaacgacgataacaaaaaaaaacccgaaaaaaaaaaataaaatcgcttaatcaccgacgataactcaccgcgccctactatcccgccgattaaaaactcctaacgatttaaaaaaaaccgttaaaccaaattaattcaaatctcaacgaactccgcgcgcgctactaattctcaatactaccaacttacaactaaaccatcgccttactatatacgatcgaaccctataaaaaacaaaaacgcccctaaatttttaat

SEQ ID NO: 16541 - DNA, 527 bp, Artificial Sequence
  chemically treated genomic DNA (Homo sapiens) CpG-island No: 16541
cgacgtggggaaataagttttagttttcgaagcgcgattaaaaggagaaattaagtttttatcgttagggcgggggagggaagttgggtgtcggtaggcgtttcgttggagacgagatttttttcggttttagaagcgtttcgttagggttagagagggcgagcgtggcgggagggaagtttttgttttttagcggttaggcgattcgaagtcgagcgtcgtgttatacgtatttcgtttcgttttgtttgcggtattttcgtgtaatttttatgaaaatgttttttcgtttttgacgtttcgcggtgtaatttttattttttaacgaggagggggtcgtcgtaggattgggaatttagtggtcggcgttttagtattttcggacgcgtttcgtgttttttttagtatttttttgagggatcgtttattgcgattttacgtagtgtcggttatttcgttttagtcgtagggagtattaaataaaagaatttttgtaaatttttttttttggatattcgcgggttttt

SEQ ID NO: 16542 - DNA, 527 bp, Artificial Sequence
  chemically treated genomic DNA (Homo sapiens) CpG-island No: 16542
aaaaacccgcgaatatccaaaaaaaaaaatttacaaaaattcttttatttaatactccctacgactaaaacgaaataaccgacactacgtaaaatcgcaataaacgatccctcaaaaaaatactaaaaaaaacacgaaacgcgtccgaaaatactaaaacgccgaccactaaattcccaatcctacgacgaccccctcctcgttaaaaaataaaaattacaccgcgaaacgtcaaaaacgaaaaaacattttcataaaaattacacgaaaataccgcaaacaaaacgaaacgaaatacgtataacacgacgctcgacttcgaatcgcctaaccgctaaaaaacaaaaacttccctcccgccacgctcgccctctctaaccctaacgaaacgcttctaaaaccgaaaaaaatctcgtctccaacgaaacgcctaccgacacccaacttccctcccccgccctaacgataaaaacttaatttctccttttaatcgcgcttcgaaaactaaaacttatttccccacgtcg

SEQ ID NO: 16543 - DNA, 527 bp, Artificial Sequence
  chemically treated genomic DNA (Homo sapiens) CpG-island No: 16543
agagattcgcgagtgtttagagagaaaagtttgtaaaagtttttttgtttgatgttttttgcggttagggcgaggtaatcgatattacgtggaatcgtagtaggcgattttttaaggggatattgggggaggtacggaacgcgttcgaaaatgttgggacgtcggttattggatttttagttttgcggcgatttttttttcgttgaggggtggaggttgtatcgcggggcgttagggacgggaggatatttttataggagttatacgggagtgtcgtaagtagggcgaggcggggtacgtgtgatacggcgttcggtttcgggtcgtttggtcgttgggggatagaggtttttttttcgttacgttcgttttttttggttttggcggggcgtttttggggtcgggaggagtttcgtttttagcggagcgtttgtcggtatttagtttttttttttcgttttggcggtgggaatttgatttttttttttggtcgcgtttcgggggttggagtttgtttttttacgtcg

SEQ ID NO: 16544 - DNA, 527 bp, Artificial Sequence
  chemically treated genomic DNA (Homo sapiens) CpG-island No: 16544
cgacgtaaaaaaacaaactccaacccccgaaacgcgaccaaaaaaaaaaatcaaattcccaccgccaaaacgaaaaaaaaaaactaaataccgacaaacgctccgctaaaaacgaaactcctcccgaccccaaaaacgccccgccaaaaccaaaaaaaacgaacgtaacgaaaaaaaaacctctatcccccaacgaccaaacgacccgaaaccgaacgccgtatcacacgtaccccgcctcgccctacttacgacactcccgtataactcctataaaaatatcctcccgtccctaacgccccgcgatacaacctccacccctcaacgaaaaaaaaatcgccgcaaaactaaaaatccaataaccgacgtcccaacattttcgaacgcgttccgtacctcccccaatatccccttaaaaaatcgcctactacgattccacgtaatatcgattacctcgccctaaccgcaaaaaacatcaaacaaaaaaacttttacaaacttttctctctaaacactcgcgaatctct

SEQ ID NO: 16545 - DNA, 881 bp, Artificial Sequence
  chemically treated genomic DNA (Homo sapiens) CpG-island No: 16545
  unsure (1, 7, 22, 45..46, 48..49, 51..52, 54, 68, 70..71, 74, 103)
  unsure (174..175, 209, 216, 230, 232..233, 265, 340, 372, 376, 383)
  unsure (394, 456, 484, 491, 530, 532, 536, 545, 547, 550, 582..583)
  unsure (590, 606, 625, 628, 634, 649, 655..656, 668..669, 672, 677)
  unsure (683, 686, 688..689, 708, 714, 732, 739..740, 757, 772, 785)
  unsure (788, 801..802, 807, 838)
ngtcgtngtttttcgttttcgngggggggggggcgtttcgttttnnnnnnnngnggttcgtcggcggngnnggngggaaaaaaaaaaaaaagcgcggcgggtngcggcggttcgcgggcggcggggggcgcggcgcgtcgcgtcggtcgcgtcgtcggcgcggcgtcgcgtttnngggcggcgtcggcggtcgcgggcgcgggggcggncggcgtncgcgcggggcgcgngnngggggggcgcgcgcggcggcgggggcgttcgngtcgtttttcgggcgcgcgggtcgcgggcgcgcggcgcggggcggggcggggggcgcgcgcgcggcggggcgttngcgcggggcgcggcggttcggttcgtcgcggncggncgcggtngcgcgtcgttncgcggcgggcggtcgcggcggcgttcggtcggcgggggcgtcggcgggggggtcgcggcggnggcgcgggcgcgcgcgcggcgtcgtcgncgcgggngcgcggcggttcgcgcgcgcgcggcggtcgcggtcggtntncggnggcgcgggngncgncgcgcgcgcgcgcgcgtcgtcgggggggggtnncggcggncgcgtttcggggtcgncggcggcgcggcgcgcgtnttngcgttncgcggcgcggcggtntcgcgnncgtcgcgcgttnnttncgttntcgcgnggngnncgcgtcgcgggcgggcggngcgcgnggacggcgcgggcggcgngcgcggnngcgggcggcgggcgcgncgcgcgggcgtcggngtcgcgggcgcgnggngggcgcgcgcgtnncgcgngggggggcgcgcgggcgcgggggcgggcgtnggcgcgcgggaaaaaaaacgaatatataaaaaataaaaagaga

SEQ ID NO: 16546 - DNA, 881 bp, Artificial Sequence
  chemically treated genomic DNA (Homo sapiens) CpG-island No: 16546
  unsure (44, 75, 80..81, 94, 97, 110, 125, 142..143, 150, 168, 174)
  unsure (193..194, 196, 199, 205, 210, 213..214, 226..227, 233, 248)
  unsure (254, 257, 276, 292, 299..300, 332, 335, 337, 346, 350, 352)
  unsure (391, 398, 426, 488, 499, 506, 510, 542, 617, 649..650, 652)
  unsure (666, 673, 707..708, 779, 808, 811..812, 814, 828, 830..831)
  unsure (833..834, 836..837, 860, 875, 881)
tctctttttattttttatatattcgttttttttcccgcgcgccnacgcccgcccccgcgcccgcgcgcccccccncgcgnnacgcgcgcgcccnccncgcgcccgcgacnccgacgcccgcgcgncgcgcccgccgcccgcnnccgcgcncgccgcccgcgccgtccncgcgcnccgcccgcccgcgacgcgnncnccncgcganaacgnaannaacgcgcgacgnncgcganaccgccgcgccgcgnaacgcnaanacgcgcgccgcgccgccgncgaccccgaaacgcgnccgccgnnacccccccccgacgacgcgcgcgcgcgcgcgncgncncccgcgccnccgnanaccgaccgcgaccgccgcgcgcgcgcgaaccgccgcgcncccgcgncgacgacgccgcgcgcgcgcccgcgccnccgccgcgacccccccgccgacgcccccgccgaccgaacgccgccgcgaccgcccgccgcgnaacgacgcgcnaccgcgnccgnccgcgacgaaccgaaccgccgcgccccgcgcnaacgccccgccgcgcgcgcgccccccgccccgccccgcgccgcgcgcccgcgacccgcgcgcccgaaaaacgacncgaacgcccccgccgccgcgcgcgcccccccnncncgcgccccgcgcgnacgccgnccgcccccgcgcccgcgaccgccgacgccgcccnnaaacgcgacgccgcgccgacgacgcgaccgacgcgacgcgccgcgccccccgccgcccgcgaaccgccgcnacccgccgcgcttttttttttttttcccnccnncnccgccgacgaaccncnnnnnnnnaaaacgaaacgcccccccccccncgaaaacgaaaaacnacgacn

SEQ ID NO: 16547 - DNA, 881 bp, Artificial Sequence
  chemically treated genomic DNA (Homo sapiens) CpG-island No: 16547
  unsure (44, 75, 80..81, 94, 97, 110, 125, 142..143, 150, 168, 174)
  unsure (193..194, 196, 199, 205, 210, 213..214, 226..227, 233, 248)
  unsure (254, 257, 276, 292, 299..300, 332, 335, 337, 346, 350, 352)
  unsure (391, 398, 426, 488, 499, 506, 510, 542, 617, 649..650, 652)
  unsure (666, 673, 707..708, 779, 808, 811..812, 814, 828, 830..831)
  unsure (833..834, 836..837, 860, 875, 881)
tttttttttgttttttgtgtgttcgttttttttttcgcgcgttngcgttcgttttcgcgttcgcgcgtttttttncgcgnngcgcgcgcgtttnttncgcgttcgcggtntcggcgttcgcgcgncgcgttcgtcgttcgtnntcgcgtncgtcgttcgcgtcgtttncgcgtntcgttcgttcgcggcgcgnntnttncgcggnggcgnggnnggcgcgcggcgnncgcggngtcgtcgcgtcgcgnggcgtnggngcgcgcgtcgcgtcgtcgncggtttcggggcgcgntcgtcgnngttttttttcggcggcgcgcgcgcgcgcgcgncgntnttcgcgttntcgngngtcggtcgcggtcgtcgcgcgcgcgcgggtcgtcgcgtnttcgcgncggcggcgtcgcgcgcgcgttcgcgttntcgtcgcggttttttcgtcggcgttttcgtcggtcgggcgtcgtcgcggtcgttcgtcgcgnggcggcgcgtngtcgcgntcgntcgcggcgggtcgggtcgtcgcgtttcgcgtnggcgtttcgtcgcgcgcgcgtttttcgtttcgtttcgcgtcgcgcgttcgcggttcgcgcgttcggggggcggtncgggcgttttcgtcgtcgcgcgcgtttttttnntncgcgtttcgcgcgngcgtcgntcgttttcgcgttcgcggtcgtcggcgtcgtttnngggcgcggcgtcgcgtcggcggcgcggtcggcgcggcgcgtcgcgtttttcgtcgttcgcgggtcgtcgtngttcgtcgcgttttttttttttttttttnttnntntcgtcggcgggttntnnnnnnnnggggcggggcgtttttttttttncgggggcggggggtngcggtn

SEQ ID NO: 16548 - DNA, 881 bp, Artificial Sequence
  chemically treated genomic DNA (Homo sapiens) CpG-island No: 16548
  unsure (1, 7, 22, 45..46, 48..49, 51..52, 54, 68, 70..71, 74, 103)
  unsure (174..175, 209, 216, 230, 232..233, 265, 340, 372, 376, 383)
  unsure (394, 456, 484, 491, 530, 532, 536, 545, 547, 550, 582..583)
  unsure (590, 606, 625, 628, 634, 649, 655..656, 668..669, 672, 677)
  unsure (683, 686, 688..689, 708, 714, 732, 739..740, 757, 772, 785)
  unsure (788, 801..802, 807, 838)
naccgcnaccccccgcccccgnaaaaaaaaaaacgccccgccccnnnnnnnnanaacccgccgacganannaanaaaaaaaaaaaaaaaaaacgcgacgaacnacgacgacccgcgaacgacgaaaaacgcgacgcgccgcgccgaccgcgccgccgacgcgacgccgcgcccnnaaacgacgccgacgaccgcgaacgcgaaaacgancgacgcncgcgcgaaacgcgnannaaaaaaacgcgcgcgacgacgaaaacgcccgnaccgccccccgaacgcgcgaaccgcgaacgcgcgacgcgaaacgaaacgaaaaacgcgcgcgcgacgaaacgccnacgcgaaacgcgacgacccgacccgccgcgancgancgcgacnacgcgccgccncgcgacgaacgaccgcgacgacgcccgaccgacgaaaacgccgacgaaaaaaccgcgacganaacgcgaacgcgcgcgcgacgccgccgncgcgaanacgcgacgacccgcgcgcgcgcgacgaccgcgaccgacncncganaacgcgaanancgncgcgcgcgcgcgcgcgccgccgaaaaaaaacnncgacgancgcgccccgaaaccgncgacgacgcgacgcgcgcnccnacgccncgcgacgcgacgacnccgcgnncgccgcgcgccnnccncgccnccgcgnaananncgcgccgcgaacgaacganacgcgnaaacgacgcgaacgacgnacgcgannacgaacgacgaacgcgncgcgcgaacgccganaccgcgaacgcgnaanaaacgcgcgcgcnncgcgnaaaaaaacgcgcgaacgcgaaaacgaacgcnaacgcgcgaaaaaaaaaacgaacacacaaaaaacaaaaaaaaa

SEQ ID NO: 16549 - DNA, 849 bp, Artificial Sequence
  chemically treated genomic DNA (Homo sapiens) CpG-island No: 16549
  unsure (130, 191..192, 215..216, 239, 303, 306, 361, 363, 365, 416)
  unsure (424, 433..434, 446, 448..449, 517, 565, 578, 648, 788, 794)
  unsure (814)
ggcggtcgttcgtttttttttttttttttatataaaaaaaaaaagaaaaattttttttttttttttcgttcgggggtcgcgtttttttcggcgtttttcgtttcgcgcggttgttttgtttttttcgcgngttcgcgtcgtcgcgttttcgttcgttttttttcgtttttcgggggggcgcgttttttttnnttttcgtttttttttttttcgtnnggggggcgtaataggcggcgcgngtcgttcggttcgtttcggtcgtttttttttttcgggttcgcggcgttcgttcgcgttcgtcgncgntttcgtttttcgttcgcgtcgtttttttttttttttcgtttcgtcgttttcgttngngngttttcgttcgcgtttttttttttcgcgtttcggttcggtttcgcggcgtncgcgcgtncgtcgtcgnngtttcgtttttngnncgttttttttgcgttttttttcgcgttcgtcgcgttttttttttttttcgttcgtttcgtcgtttcgntttttttcgttgtcgcgcgtttgttttttttttcgttttgtttttcgnttttcgtttcgtntttgtcggcgtgcgggcggttcggtgcgttttcgtttcgtcgttcgcgttcgtttttcggtttttttttncgcggcgtgtgtttttttttttttttcgttcgcgtgtcgttttttttcgtttttcgtttggtttcgcgtcgttttgttttcgttcgtttttttttttttcgttttttttttttcgtcggcgtttatatgtgtttttttgncgtttnttttgttcgtttttcggttncgtcgtcgtttttttcgtttattattttttttttt

SEQ ID NO: 16550 - DNA, 849 bp, Artificial Sequence
  chemically treated genomic DNA (Homo sapiens) CpG-island No: 16550
  unsure (36, 56, 62, 202, 272, 285, 333, 401..402, 404, 416..417, 426)
  unsure (434, 485, 487, 489, 544, 547, 611, 634..635, 658..659, 720)
aaaaaaaaaaataataaacgaaaaaaacgacgacgnaaccgaaaaacgaacaaaanaaacgncaaaaaaacacatataaacgccgacgaaaaaaaaaaaacgaaaaaaaaaaaaacgaacgaaaacaaaacgacgcgaaaccaaacgaaaaacgaaaaaaaacgacacgcgaacgaaaaaaaaaaaaaaacacacgccgcgnaaaaaaaaaccgaaaaacgaacgcgaacgacgaaacgaaaacgcaccgaaccgcccgcacgccgacaaanacgaaacgaaaancgaaaaacaaaacgaaaaaaaaaacaaacgcgcgacaacgaaaaaaancgaaacgacgaaacgaacgaaaaaaaaaaaaaacgcgacgaacgcgaaaaaaaacgcaaaaaaaacgnncnaaaaacgaaacnncgacgacgnacgcgcgnacgccgcgaaaccgaaccgaaacgcgaaaaaaaaaaacgcgaacgaaaacncncnaacgaaaacgacgaaacgaaaaaaaaaaaaaaacgacgcgaacgaaaaacgaaancgncgacgaacgcgaacgaacgccgcgaacccgaaaaaaaaaaacgaccgaaacgaaccgaacgacncgcgccgcctattacgccccccnnacgaaaaaaaaaaaaacgaaaannaaaaaaaacgcgcccccccgaaaaacgaaaaaaaacgaacgaaaacgcgacgacgcgaacncgcgaaaaaaacaaaacaaccgcgcgaaacgaaaaacgccgaaaaaaacgcgacccccgaacgaaaaaaaaaaaaaaaatttttctttttttttttatataaaaaaaaaaaaaaaaacgaacgaccgcc

SEQ ID NO: 16551 - DNA, 849 bp, Artificial Sequence
  chemically treated genomic DNA (Homo sapiens) CpG-island No: 16551
  unsure (36, 56, 62, 202, 272, 285, 333, 401..402, 404, 416..417, 426)
  unsure (434, 485, 487, 489, 544, 547, 611, 634..635, 658..659, 720)
gggggggggggtggtgggcggggggagcggcgacgnggtcggggggcgagtagagnagacgntaaaagagtatatgtggacgtcggcggagagaaaaaggcgggggaaaaaggggcgggcggggatagggcggcgcggggttaggcggggggcgggagaagacgatacgcgggcggggggaagggagggatatacgtcgcgnggggaggaatcggggggcgggcgcgggcgacggggcgggggcgtatcggatcgttcgtacgtcgataaangcgaggcggaagncggggggtagagcgagaggaggggtaggcgcgcggtagcggggagggncggggcggcggggcgaacggaagaagaggggggcgcggcgggcgcgggggggagcgtaggagagacgnntngggggcggggtnncggcggcgngcgcgcgngcgtcgcggggtcgggtcggggcgcggggagggggggcgcgggcgggggtntntnggcgggggcggcggggcggggggggggggggggcggcgcgggcggggggcggggncgncggcgggcgcgggcgggcgtcgcgggttcggggggggggggcggtcggggcgggtcgggcggtncgcgtcgtttgttgcgttttttnngcggggggggggggggcgggggnnggggggggcgcgttttttcggggggcgggggggggcgggcgggggcgcggcggcgcgggtncgcgaaaaaaataaaatagtcgcgcggggcggggggcgtcggggggggcgcggttttcgggcggggggaaaaaaaaaaatttttttttttttttttgtgtgggggggggggggggggcgggcggtcgtt

SEQ ID NO: 16552 - DNA, 849 bp, Artificial Sequence
  chemically treated genomic DNA (Homo sapiens) CpG-island No: 16552
  unsure (130, 191..192, 215..216, 239, 303, 306, 361, 363, 365, 416)
  unsure (424, 433..434, 446, 448..449, 517, 565, 578, 648, 788, 794)
  unsure (814)
aacgaccgcccgcccccccccccccccccacacaaaaaaaaaaaaaaaaatttttttttttccccccgcccgaaaaccgcgccccccccgacgccccccgccccgcgcgactattttatttttttcgcgnacccgcgccgccgcgcccccgcccgcccccccccgccccccgaaaaaacgcgccccccccnncccccgccccccccccccccgcnnaaaaaacgcaacaaacgacgcgnaccgcccgacccgccccgaccgccccccccccccgaacccgcgacgcccgcccgcgcccgccgncgnccccgccccccgcccgcgccgccccccccccccccccgccccgccgcccccgccnananacccccgcccgcgccccccctccccgcgccccgacccgaccccgcgacgcncgcgcgcncgccgccgnnaccccgcccccnanncgtctctcctacgctcccccccgcgcccgccgcgcccccctcttcttccgttcgccccgccgccccgnccctccccgctaccgcgcgcctacccctcctctcgctctaccccccgncttccgcctcgcntttatcgacgtacgaacgatccgatacgcccccgccccgtcgcccgcgcccgccccccgattcctccccncgcgacgtatatccctcccttccccccgcccgcgtatcgtcttctcccgccccccgcctaaccccgcgccgccctatccccgcccgcccctttttcccccgcctttttctctccgccgacgtccacatatactcttttancgtctnctctactcgccccccgaccncgtcgccgctccccccgcccaccaccccccccccc

SEQ ID NO: 16553 - DNA, 558 bp, Artificial Sequence
  chemically treated genomic DNA (Homo sapiens) CpG-island No: 16553
  unsure (12, 23, 26, 94..95, 97..98, 229, 232, 277, 292..293, 313)
  unsure (315, 319..320, 373, 410, 433, 449, 461, 487, 518)
tcgcggttcggncgcgttcggtncgntcggttcgttttcgcgcgcgggtcggtttcggttttcgcggcgcgtcgtcgttcgcgtcgggttcgtnngnngtcgtttcgtttcggcgttcgcggtcgcgttttcgcggtcgcgggttcgcgttcggggtcgcggcgggggtcgcggcggtcggggtcggttcgtcgcgcggcgcgtcgcgtttcggttttcgcgtcgtttncgngcgcgtcgcgcgcggtttttcgtcggcgcgttcgcgtcggtcgtncggcgtcgcgttcgnntttcgttcgcgcgcggcgtngntttnntcggcgggcgggtcgcggcgcgtcggcgcgggcgtttcgcgttcgttcgggtngcgggggcgtcggtttcgtttttttcggcgtcgtttncggtcggcgcgcgtcgcgggggngtcgggcgcgggcggnggcgcggggcgncgtttttcgcggcgggcgtcgtcgtncgtttcgcgtttcgcgcggcggcgcgcgcgnggggggtagtcgtagaataaggaaagaagaagagagaaga

SEQ ID NO: 16554 - DNA, 558 bp, Artificial Sequence
  chemically treated genomic DNA (Homo sapiens) CpG-island No: 16554
  unsure (41, 72, 98, 110, 126, 149, 186, 239..240, 244, 246, 266..267)
  unsure (282, 327, 330, 461..462, 464..465, 533, 536, 547)
tcttctctcttcttctttccttattctacgactaccccccncgcgcgcgccgccgcgcgaaacgcgaaacgnacgacgacgcccgccgcgaaaaacgncgccccgcgccnccgcccgcgcccgacncccccgcgacgcgcgccgaccgnaaacgacgccgaaaaaaacgaaaccgacgcccccgcnacccgaacgaacgcgaaacgcccgcgccgacgcgccgcgacccgcccgccgannaaancnacgccgcgcgcgaacgaaanncgaacgcgacgccgnacgaccgacgcgaacgcgccgacgaaaaaccgcgcgcgacgcgcncgnaaacgacgcgaaaaccgaaacgcgacgcgccgcgcgacgaaccgaccccgaccgccgcgacccccgccgcgaccccgaacgcgaacccgcgaccgcgaaaacgcgaccgcgaacgccgaaacgaaacgacnncnnacgaacccgacgcgaacgacgacgcgccgcgaaaaccgaaaccgacccgcgcgcgaaaacgaaccgancgnaccgaacgcgnccgaaccgcga

SEQ ID NO: 16555 - DNA, 558 bp, Artificial Sequence
  chemically treated genomic DNA (Homo sapiens) CpG-island No: 16555
  unsure (41, 72, 98, 110, 126, 149, 186, 239..240, 244, 246, 266..267)
  unsure (282, 327, 330, 461..462, 464..465, 533, 536, 547)
ttttttttttttttttttttttgttttgcggttgttttttncgcgcgcgtcgtcgcgcggggcgcggggcgngcggcggcgttcgtcgcggggggcgncgtttcgcgttntcgttcgcgttcggtnttttcgcggcgcgcgtcggtcgngggcggcgtcggggggggcggggtcggcgttttcgtngttcgggcgggcgcggggcgttcgcgtcggcgcgtcgcggttcgttcgtcggnngggntngcgtcgcgcgcgggcggggnncgggcgcggcgtcgngcggtcggcgcgggcgcgtcggcggggggtcgcgcgcggcgcgtncgngggcggcgcgggggtcggggcgcggcgcgtcgcgcggcgggtcggtttcggtcgtcgcggttttcgtcgcggtttcgggcgcgggttcgcggtcgcgggggcgcggtcgcgggcgtcggggcggggcggtnntnngcgggttcggcgcgggcggcggcgcgtcgcgggggtcggggtcggttcgcgcgcgggggcgggtcggncgngtcgggcgcgntcgggtcgcgg

SEQ ID NO: 16556 - DNA, 558 bp, Artificial Sequence
  chemically treated genomic DNA (Homo sapiens) CpG-island No: 16556
  unsure (12, 23, 26, 94..95, 97..98, 229, 232, 277, 292..293, 313)
  unsure (315, 319..320, 373, 410, 433, 449, 461, 487, 518)
ccgcgacccgancgcgcccgacncgnccgacccgcccccgcgcgcgaaccgaccccgacccccgcgacgcgccgccgcccgcgccgaacccgcnnannaccgccccgccccgacgcccgcgaccgcgcccccgcgaccgcgaacccgcgcccgaaaccgcgacgaaaaccgcgacgaccgaaaccgacccgccgcgcgacgcgccgcgccccgacccccgcgccgcccncgnacgcgccgcgcgcgaccccccgccgacgcgcccgcgccgaccgcncgacgccgcgcccgnnccccgcccgcgcgcgacgcnancccnnccgacgaacgaaccgcgacgcgccgacgcgaacgccccgcgcccgcccgaacnacgaaaacgccgaccccgccccccccgacgccgcccncgaccgacgcgcgccgcgaaaanaccgaacgcgaacganaacgcgaaacgncgccccccgcgacgaacgccgccgcncgccccgcgccccgcgcgacgacgcgcgcgnaaaaaacaaccgcaaaacaaaaaaaaaaaaaaaaaaaaaa

SEQ ID NO: 16557 - DNA, 567 bp, Artificial Sequence
  chemically treated genomic DNA (Homo sapiens) CpG-island No: 16557
cggcgttagagtcgggggcgggcgggggttattcgagggtcgtttttcgatgattcgcgttcgttcgtttttagtacggggtcgcgtttcgcggtggttcgcgagttgtttttggttgcgttggaggaattgagttaagagtagttgaagcgttttcgttataagttgcgcgacgtgggttcggacggacgtagtatttcgtgggggcggttggagcgcgcggacgtcgtggatttcgcggagtagttggtttagttttacggttcggagtttgttttggaggtggttcgtaagatttttaagagggcggacgcgcgcgacgtggcggcgtagttttaggagcggcggttgtagcgtgagttttgcgcgggaggttttttttgtttgggtagaggttgggttgttttttttttcgtttttcggagaagtttcggcgcggttttcggttttcgcgcgttttatttataaattcgcgggttttaggggtaggattttgcgtgttttttagggtgattcggattttcgtggcgtttttttttgtttttattttcggcggaattttatttt

SEQ ID NO: 16558 - DNA, 567 bp, Artificial Sequence
  chemically treated genomic DNA (Homo sapiens) CpG-island No: 16558
aaaataaaattccgccgaaaataaaaacaaaaaaaaacgccacgaaaatccgaatcaccctaaaaaacacgcaaaatcctacccctaaaacccgcgaatttataaataaaacgcgcgaaaaccgaaaaccgcgccgaaacttctccgaaaaacgaaaaaaaaaacaacccaacctctacccaaacaaaaaaaacctcccgcgcaaaactcacgctacaaccgccgctcctaaaactacgccgccacgtcgcgcgcgtccgccctcttaaaaatcttacgaaccacctccaaaacaaactccgaaccgtaaaactaaaccaactactccgcgaaatccacgacgtccgcgcgctccaaccgcccccacgaaatactacgtccgtccgaacccacgtcgcgcaacttataacgaaaacgcttcaactactcttaactcaattcctccaacgcaaccaaaaacaactcgcgaaccaccgcgaaacgcgaccccgtactaaaaacgaacgaacgcgaatcatcgaaaaacgaccctcgaataacccccgcccgcccccgactctaacgccg

SEQ ID NO: 16559 - DNA, 567 bp, Artificial Sequence
  chemically treated genomic DNA (Homo sapiens) CpG-island No: 16559
ggggtgaggtttcgtcgagggtgggaataggggaaggcgttacgggggttcgagttattttgaggagtacgtagggttttatttttggggttcgcgaatttgtggataaaacgcgcgggggtcggggatcgcgtcggggttttttcgggaagcgggaaggagggtagtttagtttttgtttagataggagggatttttcgcgtagaatttacgttgtagtcgtcgtttttggagttgcgtcgttacgtcgcgcgcgttcgtttttttgagggttttgcgggttatttttagggtaggtttcgggtcgtagaattgggttagttgtttcgcgaggtttacggcgttcgcgcgttttagtcgtttttacgggatgttgcgttcgttcgggtttacgtcgcgtagtttgtggcggaagcgttttagttgtttttggtttagtttttttagcgtagttaggagtagttcgcgggttatcgcgaggcgcggtttcgtgttggaggcgggcgggcgcgggttatcggggagcggttttcgggtgattttcgttcgttttcgattttggcgtcg

SEQ ID NO: 16560 - DNA, 567 bp, Artificial Sequence
  chemically treated genomic DNA (Homo sapiens) CpG-island No: 16560
cgacgccaaaatcgaaaacgaacgaaaatcacccgaaaaccgctccccgataacccgcgcccgcccgcctccaacacgaaaccgcgcctcgcgataacccgcgaactactcctaactacgctaaaaaaactaaaccaaaaacaactaaaacgcttccgccacaaactacgcgacgtaaacccgaacgaacgcaacatcccgtaaaaacgactaaaacgcgcgaacgccgtaaacctcgcgaaacaactaacccaattctacgacccgaaacctaccctaaaaataacccgcaaaaccctcaaaaaaacgaacgcgcgcgacgtaacgacgcaactccaaaaacgacgactacaacgtaaattctacgcgaaaaatccctcctatctaaacaaaaactaaactaccctccttcccgcttcccgaaaaaaccccgacgcgatccccgacccccgcgcgttttatccacaaattcgcgaaccccaaaaataaaaccctacgtactcctcaaaataactcgaacccccgtaacgccttcccctattcccaccctcgacgaaacctcacccc

SEQ ID NO: 16561 - DNA, 704 bp, Artificial Sequence
  chemically treated genomic DNA (Homo sapiens) CpG-island No: 16561
tcgatcgcggcgcgtcggtgtcgtagatgttggtttagtcgtagcggttgttttttattttggacggcgcggacgagttgtcggcgttggggggtttcgaggtcgcgttttgtatagattttttcgaggcggcgagcggcgcgcgggtgttaggcgggttgttgagtaaggcgttgttgtttacggtttttttgttggtgattacgcgcgtcgtcgttttcgggaggttgtagggtcgtttgtgtttttcgtagtgcgtcgaggtgcgcggttttttcgataaggataagaagaagtatttttataagttttttcgggatgagaggagggtcgagcgcgtttatcgtttcgtgaaggagaacgagacgttgttcgcgttgtgtttcgtgtttttcgtgtgttggatcgtgtgtatcgtgttgcgttagtagttggagttcggtcgggatttgtcgcgtacgtttaagattattacgttagtgtatttgttttttattattagcgttttgagttcggtttcggtagtcgacgggtttcggttgtagggcgatttgcgtaatttgtgtcgtttggttcgcgagggcgttttcggacgtagggcgtagtttgtcgagaaggaattggagtaattggagtttcgtggttttaaagtgtagacgttgttttttagtaaaaaggagttgtcgggcgtgttggagatagag

SEQ ID NO: 16562 - DNA, 704 bp, Artificial Sequence
  chemically treated genomic DNA (Homo sapiens) CpG-island No: 16562
ctctatctccaacacgcccgacaactcctttttactaaaaaacaacgtctacactttaaaaccacgaaactccaattactccaattccttctcgacaaactacgccctacgtccgaaaacgccctcgcgaaccaaacgacacaaattacgcaaatcgccctacaaccgaaacccgtcgactaccgaaaccgaactcaaaacgctaataataaaaaacaaatacactaacgtaataatcttaaacgtacgcgacaaatcccgaccgaactccaactactaacgcaacacgatacacacgatccaacacacgaaaaacacgaaacacaacgcgaacaacgtctcgttctccttcacgaaacgataaacgcgctcgaccctcctctcatcccgaaaaaacttataaaaatacttcttcttatccttatcgaaaaaaccgcgcacctcgacgcactacgaaaaacacaaacgaccctacaacctcccgaaaacgacgacgcgcgtaatcaccaacaaaaaaaccgtaaacaacaacgccttactcaacaacccgcctaacacccgcgcgccgctcgccgcctcgaaaaaatctatacaaaacgcgacctcgaaaccccccaacgccgacaactcgtccgcgccgtccaaaataaaaaacaaccgctacgactaaaccaacatctacgacaccgacgcgccgcgatcga

SEQ ID NO: 16563 - DNA, 704 bp, Artificial Sequence
  chemically treated genomic DNA (Homo sapiens) CpG-island No: 16563
ttttgtttttagtacgttcggtagtttttttttgttgagaaatagcgtttgtattttggagttacgaagttttagttgttttagttttttttcggtaaattgcgttttgcgttcgaggacgttttcgcgggttaggcggtatagattgcgtaggtcgttttgtaatcggggttcgtcggttatcggagtcgagtttagaacgttggtgatgaaaagtaggtatattgacgtggtggttttggacgtgcgcgataggtttcgatcgagttttagttgttggcgtagtacggtgtatacgatttagtatacgaagggtacgaagtatagcgcgaatagcgtttcgtttttttttacgaagcggtaggcgcgttcggttttttttttatttcggaagaatttgtagaaatatttttttttgtttttgtcggagaagtcgcgtatttcggcgtattgcggggaatataggcggttttgtagtttttcgggggcggcggcgcgcgtggttattagtaggagggtcgtgggtagtagcgttttgtttagtagttcgtttagtattcgcgcgtcgttcgtcgtttcgaaggggtttgtgtagggcgcggtttcggggttttttagcgtcggtagttcgttcgcgtcgtttaggatgaagagtagtcgttgcggttgggttagtatttgcggtatcggcgcgtcgcggtcgg

SEQ ID NO: 16564 - DNA, 704 bp, Artificial Sequence
  chemically treated genomic DNA (Homo sapiens) CpG-island No: 16564
ccgaccgcgacgcgccgataccgcaaatactaacccaaccgcaacgactactcttcatcctaaacgacgcgaacgaactaccgacgctaaaaaaccccgaaaccgcgccctacacaaaccccttcgaaacgacgaacgacgcgcgaatactaaacgaactactaaacaaaacgctactacccacgaccctcctactaataaccacgcgcgccgccgcccccgaaaaactacaaaaccgcctatattccccgcaatacgccgaaatacgcgacttctccgacaaaaacaaaaaaaaatatttctacaaattcttccgaaataaaaaaaaaaccgaacgcgcctaccgcttcgtaaaaaaaaacgaaacgctattcgcgctatacttcgtacccttcgtatactaaatcgtatacaccgtactacgccaacaactaaaactcgatcgaaacctatcgcgcacgtccaaaaccaccacgtcaatatacctacttttcatcaccaacgttctaaactcgactccgataaccgacgaaccccgattacaaaacgacctacgcaatctataccgcctaacccgcgaaaacgtcctcgaacgcaaaacgcaatttaccgaaaaaaaactaaaacaactaaaacttcgtaactccaaaatacaaacgctatttctcaacaaaaaaaaactaccgaacgtactaaaaacaaaa

SEQ ID NO: 16565 - DNA, 875 bp, Artificial Sequence
  chemically treated genomic DNA (Homo sapiens) CpG-island No: 16565
taagtttcgtcgagcgcggcgggtttgtgttttcgtttcgtttttagtttttcgtttttttttgattcgatttcgagtttttttttcggacggtgtcgagaattcgggcgtcggttggggttggagtttcgttggtttcggagcgttttcgagttttcgggcgatagcgaggcgaggatttaggtggaggcggtcgggggcgcgggcggagggaggaggcgcgggagggaattttcggttcgcgggttttatttatagtcgtttcgggacgtagttcggggtttaggttcgagttttgtttatttagggcgtttcgtgtagggaacgttaggttttcggacgcgatttacgcggtcgttgttagcggggatcgaggggagtcggggtcgcggtcgcgagtttacgtttcgttttcgggttcggtttagcgatcgttttcgtcgtttagggatcgttttcgttttttagcgatcgttcgggttttcggggcggggatcgcggatttttttggtggcgcggtagtcgggcggttttttttttttttcggttttggcgtggagtagagggatataggtttttacgttggcgttcggcgatcgggtggggttgcggtgagttttataggttttcgtttcgtagttttcggtcgtttcggttcgtttttttagttttcggtcgttttatttttttttttttattcgcgtttgttttagtcgtttatattttcgagatttttattcgttcggcgtttcggtagtttcggatttttttttttatttcgtttagcgttttttttattttttatatacgttcgtttttacgtgttattaatagacgtaggtttcgattatagagggtgggggtaagatcggggt

SEQ ID NO: 16566 - DNA, 875 bp, Artificial Sequence
  chemically treated genomic DNA (Homo sapiens) CpG-island No: 16566
accccgatcttacccccaccctctataatcgaaacctacgtctattaataacacgtaaaaacgaacgtatataaaaaataaaaaaaacgctaaacgaaataaaaaaaaaaatccgaaactaccgaaacgccgaacgaataaaaatctcgaaaatataaacgactaaaacaaacgcgaataaaaaaaaaaaaataaaacgaccgaaaactaaaaaaacgaaccgaaacgaccgaaaactacgaaacgaaaacctataaaactcaccgcaaccccacccgatcgccgaacgccaacgtaaaaacctatatccctctactccacgccaaaaccgaaaaaaaaaaaaaaccgcccgactaccgcgccaccaaaaaaatccgcgatccccgccccgaaaacccgaacgatcgctaaaaaacgaaaacgatccctaaacgacgaaaacgatcgctaaaccgaacccgaaaacgaaacgtaaactcgcgaccgcgaccccgactcccctcgatccccgctaacaacgaccgcgtaaatcgcgtccgaaaacctaacgttccctacacgaaacgccctaaataaacaaaactcgaacctaaaccccgaactacgtcccgaaacgactataaataaaacccgcgaaccgaaaattccctcccgcgcctcctccctccgcccgcgcccccgaccgcctccacctaaatcctcgcctcgctatcgcccgaaaactcgaaaacgctccgaaaccaacgaaactccaaccccaaccgacgcccgaattctcgacaccgtccgaaaaaaaaactcgaaatcgaatcaaaaaaaaacgaaaaactaaaaacgaaacgaaaacacaaacccgccgcgctcgacgaaactta

SEQ ID NO: 16567 - DNA, 875 bp, Artificial Sequence
  chemically treated genomic DNA (Homo sapiens) CpG-island No: 16567
atttcggttttgtttttattttttgtggtcgggatttgcgtttgttggtggtacgtgggggcgggcgtgtgtggagggtggggggagcgttgggcgggatgggggagggagttcggggttgtcggggcgtcgggcgggtgggggtttcgggggtgtaggcggttggggtaggcgcgggtgggggagggaggatggggcgatcgggggttggggggacgggtcggggcggtcgggagttgcggggcgggggtttatgggatttatcgtagttttattcggtcgtcgggcgttagcgtgggaatttgtgtttttttgttttacgttagggtcgggaggaaggaggagtcgttcggttgtcgcgttattaggaaggttcgcggttttcgtttcgagggttcgggcggtcgttgggaggcgggggcggtttttgggcggcgggggcggtcgttgggtcgggttcgggggcgggacgtggattcgcggtcgcggtttcggtttttttcggttttcgttggtagcggtcgcgtgggtcgcgttcgggggtttggcgttttttgtacgaagcgttttgagtgagtaaagttcgagtttggatttcgagttgcgtttcggggcggttgtgggtggggttcgcgggtcgggggttttttttcgcgtttttttttttcgttcgcgttttcggtcgtttttatttgggttttcgtttcgttgtcgttcgagggttcgggggcgtttcgaggttagcgagattttagttttagtcggcgttcgggttttcgatatcgttcggagaaagaattcggggtcgggttagaaggaagcgagaggttggaagcgaagcgaaggtatagattcgtcgcgttcggcggagtttg

SEQ ID NO: 16568 - DNA, 875 bp, Artificial Sequence
  chemically treated genomic DNA (Homo sapiens) CpG-island No: 16568
caaactccgccgaacgcgacgaatctataccttcgcttcgcttccaacctctcgcttccttctaacccgaccccgaattctttctccgaacgatatcgaaaacccgaacgccgactaaaactaaaatctcgctaacctcgaaacgcccccgaaccctcgaacgacaacgaaacgaaaacccaaataaaaacgaccgaaaacgcgaacgaaaaaaaaaaacgcgaaaaaaaacccccgacccgcgaaccccacccacaaccgccccgaaacgcaactcgaaatccaaactcgaactttactcactcaaaacgcttcgtacaaaaaacgccaaacccccgaacgcgacccacgcgaccgctaccaacgaaaaccgaaaaaaaccgaaaccgcgaccgcgaatccacgtcccgcccccgaacccgacccaacgaccgcccccgccgcccaaaaaccgcccccgcctcccaacgaccgcccgaaccctcgaaacgaaaaccgcgaaccttcctaataacgcgacaaccgaacgactcctccttcctcccgaccctaacgtaaaacaaaaaaacacaaattcccacgctaacgcccgacgaccgaataaaactacgataaatcccataaacccccgccccgcaactcccgaccgccccgacccgtccccccaacccccgatcgccccatcctccctcccccacccgcgcctaccccaaccgcctacacccccgaaacccccacccgcccgacgccccgacaaccccgaactccctcccccatcccgcccaacgctccccccaccctccacacacgcccgcccccacgtaccaccaacaaacgcaaatcccgaccacaaaaaataaaaacaaaaccgaaat

SEQ ID NO: 16569 - DNA, 991 bp, Artificial Sequence
  chemically treated genomic DNA (Homo sapiens) CpG-island No: 16569
ttttttttcgttttttttttttttttttattcggtcgttttttttttttttttttttttttttttttttttcgtttttgaagagcgcgtcgcgtgggggacggttcggttattttttttagagattgacgagtgcggtgtcgttttagtttagagttttcggagtcgttcggttagcgttcggtttttttgatcgtttttggtcggcgttttcgttttcgttcggcgcgtatcgagtagtcgcgggcgtcgagtagttatcgtttcgattaagcgtcggttttgttcgtagcggtagggtaagagttgggttcgtagagagcgttcggcgcgcggttttagttttatggagggttattcggggtttgggcgggggtcgcggggggtattgatacgtagatttcggggcgttgtcgggggtgtaggtgggggtggcggttgttgcgaggattttaggggcgcgcgtttgagtttcgcgtcggttcgtttttcggttatggagtggttttcggggttggcggggtcggtcggggggtttttgcgtgttagggtcgttgttttcggggtcgtttagcggcgggcgcggttagggcgcgttggtttgtttcgttcgtttttgtttttaaaaggaaacgtaggtttggtagggggttttgtttagtggatgtttcggcgaatatgatttcgcgaacgggagtgggggtataggagagcgtgttcgaggtggtttggcgtttcggttttgagggtgattttttggagcggcgtcgggttcggaggatttggggcgtttaagatatttgaaggttgcggtatcgcgggaatttgcggggcgcggggtgttatggttatttgttcgtcgcgtttagggttcgggttggggatttttcggtcgtgcgaggagagcgtggggaatttgtcggaaatgagatttggttgcgttgggttgtttttattttttcgtttttatagtatttgaatgaagaggtaat

SEQ ID NO: 16570 - DNA, 991 bp, Artificial Sequence
  chemically treated genomic DNA (Homo sapiens) CpG-island No: 16570
attacctcttcattcaaatactataaaaacgaaaaaataaaaacaacccaacgcaaccaaatctcatttccgacaaattccccacgctctcctcgcacgaccgaaaaatccccaacccgaaccctaaacgcgacgaacaaataaccataacaccccgcgccccgcaaattcccgcgataccgcaaccttcaaatatcttaaacgccccaaatcctccgaacccgacgccgctccaaaaaatcaccctcaaaaccgaaacgccaaaccacctcgaacacgctctcctatacccccactcccgttcgcgaaatcatattcgccgaaacatccactaaacaaaaccccctaccaaacctacgtttccttttaaaaacaaaaacgaacgaaacaaaccaacgcgccctaaccgcgcccgccgctaaacgaccccgaaaacaacgaccctaacacgcaaaaaccccccgaccgaccccgccaaccccgaaaaccactccataaccgaaaaacgaaccgacgcgaaactcaaacgcgcgcccctaaaatcctcgcaacaaccgccacccccacctacacccccgacaacgccccgaaatctacgtatcaataccccccgcgacccccgcccaaaccccgaataaccctccataaaactaaaaccgcgcgccgaacgctctctacgaacccaactcttaccctaccgctacgaacaaaaccgacgcttaatcgaaacgataactactcgacgcccgcgactactcgatacgcgccgaacgaaaacgaaaacgccgaccaaaaacgatcaaaaaaaccgaacgctaaccgaacgactccgaaaactctaaactaaaacgacaccgcactcgtcaatctctaaaaaaaataaccgaaccgtcccccacgcgacgcgctcttcaaaaacgaaaaaaaaaaaaaaaaaaaaaaaaaaaaaaaaaacgaccgaataaaaaaaaaaaaaaaaaacgaaaaaaaa

SEQ ID NO: 16571 - DNA, 991 bp, Artificial Sequence
  chemically treated genomic DNA (Homo sapiens) CpG-island No: 16571
gttatttttttatttaaatgttgtaggaacgagaaaataaaggtagtttagcgtaattagattttattttcgataggttttttacgtttttttcgtacgatcgaggggtttttagttcgggttttggacgcggcgagtaggtgattatggtatttcgcgtttcgtaggttttcgcggtgtcgtagtttttaggtgttttgggcgttttagatttttcgggttcggcgtcgttttaggaagttatttttaaagtcggggcgttaggttatttcggatacgtttttttgtgtttttattttcgttcgcgaaattatgttcgtcgggatatttattgggtaggattttttattaggtttgcgtttttttttaaaaataaaagcgagcgaaataagttagcgcgttttggtcgcgttcgtcgttaggcgatttcgaagatagcggttttagtacgtaggaatttttcggtcgatttcgttagtttcggaggttattttataatcggaaaacgagtcggcgcggaatttagacgcgcgtttttagagttttcgtagtagtcgttatttttatttgtattttcggtagcgtttcgagatttgcgtgttagtgtttttcgcgattttcgtttaggtttcgggtgattttttatgggattggagtcgcgcgtcgggcgttttttgcgggtttagtttttattttgtcgttgcgggtagggtcggcgtttggtcgggacggtggttgttcggcgttcgcggttgttcggtgcgcgtcgggcgagggcgagggcgtcggttagagacgattagggaggtcggacgttggtcgggcggtttcgggagttttgagttggagcgatatcgtattcgttagtttttggaggaagtaatcgggtcgttttttacgcggcgcgttttttaggagcgggaggaggagggaggagggaggaggaaggagggacggtcgagtggaggggaggggaggaaacgagggagga

SEQ ID NO: 16572 - DNA, 991 bp, Artificial Sequence
  chemically treated genomic DNA (Homo sapiens) CpG-island No: 16572
tcctccctcgtttcctcccctcccctccactcgaccgtccctccttcctcctccctcctccctcctcctcccgctcctaaaaaacgcgccgcgtaaaaaacgacccgattacttcctccaaaaactaacgaatacgatatcgctccaactcaaaactcccgaaaccgcccgaccaacgtccgacctccctaatcgtctctaaccgacgccctcgccctcgcccgacgcgcaccgaacaaccgcgaacgccgaacaaccaccgtcccgaccaaacgccgaccctacccgcaacgacaaaataaaaactaaacccgcaaaaaacgcccgacgcgcgactccaatcccataaaaaatcacccgaaacctaaacgaaaatcgcgaaaaacactaacacgcaaatctcgaaacgctaccgaaaatacaaataaaaataacgactactacgaaaactctaaaaacgcgcgtctaaattccgcgccgactcgttttccgattataaaataacctccgaaactaacgaaatcgaccgaaaaattcctacgtactaaaaccgctatcttcgaaatcgcctaacgacgaacgcgaccaaaacgcgctaacttatttcgctcgcttttatttttaaaaaaaaacgcaaacctaataaaaaatcctacccaataaatatcccgacgaacataatttcgcgaacgaaaataaaaacacaaaaaaacgtatccgaaataacctaacgccccgactttaaaaataacttcctaaaacgacgccgaacccgaaaaatctaaaacgcccaaaacacctaaaaactacgacaccgcgaaaacctacgaaacgcgaaataccataatcacctactcgccgcgtccaaaacccgaactaaaaacccctcgatcgtacgaaaaaaacgtaaaaaacctatcgaaaataaaatctaattacgctaaactacctttattttctcgttcctacaacatttaaataaaaaaataac

SEQ ID NO: 16573 - DNA, 657 bp, Artificial Sequence
  chemically treated genomic DNA (Homo sapiens) CpG-island No: 16573
cgtttttcgcggggtatcgtaggttttttaggagagtgtgggttttatacgtcgagttttgaacgggtagtttgattcgtcgtggttgggattttaatttcgaaagtaacgttggagagcgcgtttttcgtatattttaagggttttgaagtgtttcgtattagacggttgcgtagtcgtttttttcgtaggagcgttgtttagtttagaatagcggcgggtcgaaggagcgtttattcgtagttttcgttttgtagtttttttattttgcgagtcgtcgttaacgcggttaaatttttagttcggggatagagtttttttcgttattatttcggcgttttttatagatatagttttaattagttcgtgcggcgacgacggttttattttagttattgttatagtacgtgattttcggtttcggtttcgttttcgttcgcgagggtcggtcgggttcgttgtttttgcgatcgcgggggtttttgggaaagcgagtttttcgtcgtggtcgaaggcggtcgttatggcgtcggtagtgttagcgggcgttttgcgattcggttcgggtttcgttattatttattgtgttttttaagttatttcggtattttaatttcgttttgttttttttagacgatttttaatatttgggaaagt

SEQ ID NO: 16574 - DNA, 657 bp, Artificial Sequence
  chemically treated genomic DNA (Homo sapiens) CpG-island No: 16574
actttcccaaatattaaaaatcgtctaaaaaaaacaaaacgaaattaaaataccgaaataacttaaaaaacacaataaataataacgaaacccgaaccgaatcgcaaaacgcccgctaacactaccgacgccataacgaccgccttcgaccacgacgaaaaactcgctttcccaaaaacccccgcgatcgcaaaaacaacgaacccgaccgaccctcgcgaacgaaaacgaaaccgaaaccgaaaatcacgtactataacaataactaaaataaaaccgtcgtcgccgcacgaactaattaaaactatatctataaaaaacgccgaaataataacgaaaaaaactctatccccgaactaaaaatttaaccgcgttaacgacgactcgcaaaataaaaaaactacaaaacgaaaactacgaataaacgctccttcgacccgccgctattctaaactaaacaacgctcctacgaaaaaaacgactacgcaaccgtctaatacgaaacacttcaaaacccttaaaatatacgaaaaacgcgctctccaacgttactttcgaaattaaaatcccaaccacgacgaatcaaactacccgttcaaaactcgacgtataaaacccacactctcctaaaaaacctacgataccccgcgaaaaacg

SEQ ID NO: 16575 - DNA, 657 bp, Artificial Sequence
  chemically treated genomic DNA (Homo sapiens) CpG-island No: 16575
atttttttaggtattaaaaatcgtttagagagagtagggcgaaattagagtgtcgaagtggtttgagaagtatagtgaatggtggcgaagttcgagtcgggtcgtaagacgttcgttggtattgtcggcgttatggcggtcgttttcggttacggcggaggattcgtttttttaggggttttcgcggtcgtaggggtaacgagttcggtcggttttcgcgagcggaggcggggtcggggtcggaagttacgtgttgtgatagtagttggggtgaggtcgtcgtcgtcgtacgggttggttggggttgtgtttgtgggaggcgtcggggtgatggcgaaaaagattttgttttcggattgggagtttgatcgcgttgacgacggttcgtagagtaagggagttgtagggcgagggttgcgggtggacgttttttcggttcgtcgttgttttgggttgggtagcgtttttgcgagagggacggttgcgtagtcgtttggtgcgggatattttagagtttttggggtgtgcgagggacgcgttttttagcgttattttcggggttggggttttagttacggcgggttaggttgttcgtttagggttcggcgtgtgaggtttatatttttttaaggagtttgcggtgtttcgcggggagcg

SEQ ID NO: 16576 - DNA, 657 bp, Artificial Sequence
  chemically treated genomic DNA (Homo sapiens) CpG-island No: 16576
cgctccccgcgaaacaccgcaaactccttaaaaaaatataaacctcacacgccgaaccctaaacgaacaacctaacccgccgtaactaaaaccccaaccccgaaaataacgctaaaaaacgcgtccctcgcacaccccaaaaactctaaaatatcccgcaccaaacgactacgcaaccgtccctctcgcaaaaacgctacccaacccaaaacaacgacgaaccgaaaaaacgtccacccgcaaccctcgccctacaactcccttactctacgaaccgtcgtcaacgcgatcaaactcccaatccgaaaacaaaatctttttcgccatcaccccgacgcctcccacaaacacaaccccaaccaacccgtacgacgacgacgacctcaccccaactactatcacaacacgtaacttccgaccccgaccccgcctccgctcgcgaaaaccgaccgaactcgttacccctacgaccgcgaaaacccctaaaaaaacgaatcctccgccgtaaccgaaaacgaccgccataacgccgacaataccaacgaacgtcttacgacccgactcgaacttcgccaccattcactatacttctcaaaccacttcgacactctaatttcgccctactctctctaaacgatttttaatacctaaaaaaat

SEQ ID NO: 16577 - DNA, 1039 bp, Artificial Sequence
  chemically treated genomic DNA (Homo sapiens) CpG-island No: 16577
aaggagtgttatagcgttaaattttgttggtttcgcgttaggtcgagttttatttttttagttcgcggttaatatttttatttcgttttatagttcgtcgcgttcgcggggcgatattttttattttattatttcggaggtggtgcggtcgagtttcggatttaattggcggaagcggggtcggttgtgtgcgcgcgtataaatgttcggatgcgtcgcgacgattcgcgcgtttttttcgggcggtagggggcgcgtatcgaggtatcgcggcgagtttggttgtttttggggtttgtgtggttttgtgtgtcggaaagatggagtaagaagtcgagttcgaggggcggtcgcgatttttttgatcgagattttgttgttttcgtagttaggagtatcgttttttttcggattagtgcgtacgagcgtttagtgttttggttcggagagtggaatgattttcgaggtttaaggcgtcgtgttttcgcgcgtttcgtgaaggaaattggggagttttgagggattttcgattttaagcgcgaaaatttcggatggggaggagtaggtattggttcggtagcgagcggttatttttgggtttgggttttgacggggtttttttatcgttgggcgtttagtttttggttcgttcgtagtttttgtgcggttcgtggttgggggttcggggttcggggcgtcggggtatggggtacgtggtttttgcggaggttttgttggattgggggttaggtagtcgtcgttagggaggagggcgggatttcggacggtttttttcgtcggtgggggtgggggtggttcggaggttttcgcgggagtttagggtaaaggttacgggggtcgggggttgcggggtcgtttcggcgcgggaggttcggatgatcgtaggtgtttgtcgggttattagtgtgaacgttgcgcgtagtttgggcgggattgggtcggtttagtgggtaggttgatttagtttttttttttgagttggttaagtttagatacgtttcgaaattgtagtaaaagg

SEQ ID NO: 16578 - DNA, 1039 bp, Artificial Sequence
  chemically treated genomic DNA (Homo sapiens) CpG-island No: 16578
ccttttactacaatttcgaaacgtatctaaacttaaccaactcaaaaaaaaaaactaaatcaacctacccactaaaccgacccaatcccgcccaaactacgcgcaacgttcacactaataacccgacaaacacctacgatcatccgaacctcccgcgccgaaacgaccccgcaacccccgacccccgtaacctttaccctaaactcccgcgaaaacctccgaaccacccccacccccaccgacgaaaaaaaccgtccgaaatcccgccctcctccctaacgacgactacctaacccccaatccaacaaaacctccgcaaaaaccacgtaccccataccccgacgccccgaaccccgaacccccaaccacgaaccgcacaaaaactacgaacgaaccaaaaactaaacgcccaacgataaaaaaaccccgtcaaaacccaaacccaaaaataaccgctcgctaccgaaccaatacctactcctccccatccgaaattttcgcgcttaaaatcgaaaatccctcaaaactccccaatttccttcacgaaacgcgcgaaaacacgacgccttaaacctcgaaaatcattccactctccgaaccaaaacactaaacgctcgtacgcactaatccgaaaaaaaacgatactcctaactacgaaaacaacaaaatctcgatcaaaaaaatcgcgaccgcccctcgaactcgacttcttactccatctttccgacacacaaaaccacacaaaccccaaaaacaaccaaactcgccgcgatacctcgatacgcgccccctaccgcccgaaaaaaacgcgcgaatcgtcgcgacgcatccgaacatttatacgcgcgcacacaaccgaccccgcttccgccaattaaatccgaaactcgaccgcaccacctccgaaataataaaataaaaaatatcgccccgcgaacgcgacgaactataaaacgaaataaaaatattaaccgcgaactaaaaaaataaaactcgacctaacgcgaaaccaacaaaatttaacgctataacactcctt

SEQ ID NO: 16579 - DNA, 1039 bp, Artificial Sequence
  chemically treated genomic DNA (Homo sapiens) CpG-island No: 16579
ttttttattgtagtttcggaacgtgtttgaatttgattagtttaagaggaaaagttgagttaatttgtttattgaatcggtttaatttcgtttagattacgcgtagcgtttatattagtgattcgataggtatttgcgattattcggatttttcgcgtcgaagcggtttcgtagttttcggttttcgtgatttttattttgaattttcgcggagattttcgaattatttttatttttatcggcggggagagtcgttcgaaatttcgtttttttttttggcggcgattgtttagtttttagtttaataaaattttcgtaaaggttacgtgttttatgtttcggcgtttcgagtttcgagtttttagttacgaatcgtataaaggttgcgaacgggttagaggttgggcgtttagcgatagaggggtttcgttaaagtttagatttaaaagtgatcgttcgttgtcgggttagtatttgtttttttttattcggggttttcgcgtttggagtcgggggttttttaagattttttagttttttttacggggcgcgcggaagtacgacgttttgggtttcggggattattttatttttcgggttagggtattgggcgttcgtacgtattaattcggggagggacggtgtttttggttgcgaaagtagtaggatttcggttagaggggtcgcggtcgtttttcgggttcggttttttgttttattttttcgatatatagggttatataggttttagaagtagttaagttcgtcgcggtgtttcggtgcgcgttttttatcgttcgaggggagcgcgcgggtcgtcgcggcgtattcgggtatttgtgcgcgcgtatataatcggtttcgttttcgttaattgggttcggggttcggtcgtattattttcgggatgatggagtggggggtgtcgtttcgcgggcgcggcgggttgtgaggcggggtgggggtgttggtcgcgagttgagagggtggggttcggtttggcgcggagttagtaaggtttggcgttgtgatatttttt

SEQ ID NO: 16580 - DNA, 1039 bp, Artificial Sequence
  chemically treated genomic DNA (Homo sapiens) CpG-island No: 16580
aaaaaatatcacaacgccaaaccttactaactccgcgccaaaccgaaccccaccctctcaactcgcgaccaacacccccaccccgcctcacaacccgccgcgcccgcgaaacgacaccccccactccatcatcccgaaaataatacgaccgaaccccgaacccaattaacgaaaacgaaaccgattatatacgcgcgcacaaatacccgaatacgccgcgacgacccgcgcgctcccctcgaacgataaaaaacgcgcaccgaaacaccgcgacgaacttaactacttctaaaacctatataaccctatatatcgaaaaaataaaacaaaaaaccgaacccgaaaaacgaccgcgacccctctaaccgaaatcctactactttcgcaaccaaaaacaccgtccctccccgaattaatacgtacgaacgcccaataccctaacccgaaaaataaaataatccccgaaacccaaaacgtcgtacttccgcgcgccccgtaaaaaaaactaaaaaatcttaaaaaacccccgactccaaacgcgaaaaccccgaataaaaaaaaacaaatactaacccgacaacgaacgatcacttttaaatctaaactttaacgaaacccctctatcgctaaacgcccaacctctaacccgttcgcaacctttatacgattcgtaactaaaaactcgaaactcgaaacgccgaaacataaaacacgtaacctttacgaaaattttattaaactaaaaactaaacaatcgccgccaaaaaaaaaaacgaaatttcgaacgactctccccgccgataaaaataaaaataattcgaaaatctccgcgaaaattcaaaataaaaatcacgaaaaccgaaaactacgaaaccgcttcgacgcgaaaaatccgaataatcgcaaatacctatcgaatcactaatataaacgctacgcgtaatctaaacgaaattaaaccgattcaataaacaaattaactcaacttttcctcttaaactaatcaaattcaaacacgttccgaaactacaataaaaaa

SEQ ID NO: 16581 - DNA, 931 bp, Artificial Sequence
  chemically treated genomic DNA (Homo sapiens) CpG-island No: 16581
cgggtggtcgcgtcgaggtacgggggacggtttaagcgcgggtgaagtggggattagaggagggtttcgtttttattgttttcgagggaggtttcggttatttatatttttcgtgtttcgttcgtttatcgtcggtaatggcgttcgggtcgatattttgtgcgggtagcggggtttggtcggggtttcgtcggtcgggttgtggtgcgggtttcggggggcgataggaaaggggtgcggacgcgagtataaggtcggggcgagcggttttcgtaggtcgcggggcggtgtaataagcggtttcggcgggggaaagagggaagaggacgcggaggaagaggagggggagtcgtttttcgcggcggcgtcgtcggggtatgcggatagtaacgagggagggtttcgggcgaggcggttgttcggcgttggcggggcggcgaggttggtaggatgaggcgtggaaggggagtcgggaggcggtggcgagtttcgttaggtttttcggattatgggtgaaggtgaagtcggtgttttaaattattgtttggttcgttttggcgagcgtttgggcgttaggaatcgcggttttgatagcgttattcgcgtcgcgtttcgtttttcgttttaggtgtacggcgtcgttcgatttagtcgtatttacgcgttcggggtttagcggcggcggcgttcgatttttcggcgcgaatgtttcggttcggttcgcgcggttatagttatcgtcgtcgtcgcgttttagttaggaggagcggttcgagtcggttgcgcgcggagtagcgggcgcggtacgtagcgtttagaggtatttggcggtcgtcgtcgggtgggcgggcgttagtcgagggggtttttttatttatttttttattagggatgcggggtcgttttttttttttttttttttttttttttt

SEQ ID NO: 16582 - DNA, 931 bp, Artificial Sequence
  chemically treated genomic DNA (Homo sapiens) CpG-island No: 16582
aaaaaaaaaaaaaaaaaaaaaaaaaaaaacgaccccgcatccctaataaaaaaataaataaaaaaaccccctcgactaacgcccgcccacccgacgacgaccgccaaatacctctaaacgctacgtaccgcgcccgctactccgcgcgcaaccgactcgaaccgctcctcctaactaaaacgcgacgacgacgataactataaccgcgcgaaccgaaccgaaacattcgcgccgaaaaatcgaacgccgccgccgctaaaccccgaacgcgtaaatacgactaaatcgaacgacgccgtacacctaaaacgaaaaacgaaacgcgacgcgaataacgctatcaaaaccgcgattcctaacgcccaaacgctcgccaaaacgaaccaaacaataatttaaaacaccgacttcaccttcacccataatccgaaaaacctaacgaaactcgccaccgcctcccgactccccttccacgcctcatcctaccaacctcgccgccccgccaacgccgaacaaccgcctcgcccgaaaccctccctcgttactatccgcataccccgacgacgccgccgcgaaaaacgactccccctcctcttcctccgcgtcctcttccctctttcccccgccgaaaccgcttattacaccgccccgcgacctacgaaaaccgctcgccccgaccttatactcgcgtccgcacccctttcctatcgccccccgaaacccgcaccacaacccgaccgacgaaaccccgaccaaaccccgctacccgcacaaaatatcgacccgaacgccattaccgacgataaacgaacgaaacacgaaaaatataaataaccgaaacctccctcgaaaacaataaaaacgaaaccctcctctaatccccacttcacccgcgcttaaaccgtcccccgtacctcgacgcgaccacccg

SEQ ID NO: 16583 - DNA, 931 bp, Artificial Sequence
  chemically treated genomic DNA (Homo sapiens) CpG-island No: 16583
gaaaaaggaggaggaggaggaggaggaggcggtttcgtatttttaatgagggaatgaatggagaggttttttcggttggcgttcgtttattcggcggcggtcgttaagtgtttttgggcgttgcgtgtcgcgttcgttgtttcgcgcgtagtcggttcgggtcgttttttttgattgaggcgcggcggcggcggtggttgtgatcgcgcggatcgagtcgagatattcgcgtcgggggatcgggcgtcgtcgtcgttgggtttcgggcgcgtggatgcggttgggtcgggcggcgtcgtatatttgaggcggagaacggggcgcggcgcgggtgacgttgttagggtcgcggtttttgacgtttaggcgttcgttaggacgagttaggtagtgatttgaggtatcggttttatttttatttatggttcggagagtttagcggggttcgttatcgtttttcggttttttttttacgttttattttgttagtttcgtcgtttcgttagcgtcgggtaatcgtttcgttcgaagttttttttcgttattgttcgtatatttcggcggcgtcgtcgcgggaagcggttttttttttttttttttcgcgtttttttttttttttttttcgtcggggtcgtttgttgtatcgtttcgcggtttgcgggagtcgttcgtttcggttttgtgttcgcgttcgtattttttttttgtcgtttttcggggttcgtattatagttcggtcggcgagatttcggttagatttcgttgttcgtataaaatgtcggttcggacgttattgtcgacggtgaacgagcgggatacggaaaatgtgagtaatcggagtttttttcgggagtagtgggggcgagatttttttttgatttttattttattcgcgtttgggtcgtttttcgtgtttcggcgcggttattcg

SEQ ID NO: 16584 - DNA, 931 bp, Artificial Sequence
  chemically treated genomic DNA (Homo sapiens) CpG-island No: 16584
cgaataaccgcgccgaaacacgaaaaacgacccaaacgcgaataaaataaaaatcaaaaaaaaatctcgcccccactactcccgaaaaaaactccgattactcacattttccgtatcccgctcgttcaccgtcgacaataacgtccgaaccgacattttatacgaacaacgaaatctaaccgaaatctcgccgaccgaactataatacgaaccccgaaaaacgacaaaaaaaaaatacgaacgcgaacacaaaaccgaaacgaacgactcccgcaaaccgcgaaacgatacaacaaacgaccccgacgaaaaaaaaaaaaaaaaaaacgcgaaaaaaaaaaaaaaaaaaccgcttcccgcgacgacgccgccgaaatatacgaacaataacgaaaaaaaacttcgaacgaaacgattacccgacgctaacgaaacgacgaaactaacaaaataaaacgtaaaaaaaaaaccgaaaaacgataacgaaccccgctaaactctccgaaccataaataaaaataaaaccgatacctcaaatcactacctaactcgtcctaacgaacgcctaaacgtcaaaaaccgcgaccctaacaacgtcacccgcgccgcgccccgttctccgcctcaaatatacgacgccgcccgacccaaccgcatccacgcgcccgaaacccaacgacgacgacgcccgatcccccgacgcgaatatctcgactcgatccgcgcgatcacaaccaccgccgccgccgcgcctcaatcaaaaaaaacgacccgaaccgactacgcgcgaaacaacgaacgcgacacgcaacgcccaaaaacacttaacgaccgccgccgaataaacgaacgccaaccgaaaaaacctctccattcattccctcattaaaaatacgaaaccgcctcctcctcctcctcctcctcctttttc

SEQ ID NO: 16585 - DNA, 760 bp, Artificial Sequence
  chemically treated genomic DNA (Homo sapiens) CpG-island No: 16585
gggaagcgttcggggttttcgggatttattttttagaggcgggtgtaggtgttcggtttttcgcggttttcgattttcgggcggcgcggagcggcgggagttaattagatgggttggcggtcggtttgggaatggggcggtcgcgtaggaacggtttttagtttttagcgtttcggtgtagtttttattcgggttcgcgttcgttgcgttcgggtttttagtagtcgttggatgcgttgtcgattcgttcggttcggcggagttgggttttggtattaattttcgcgttttaattagttttcgattcggcgttcggagagagtagggaggaggagatcgcgggagtagaaggagggagggggcggtgggggaggagttgtaagtaaagggagagaaggaggggagcgggagcgaaaaagaggagggggttggagtagatttgtcgcggcgggcgttgtattcgttagtttcgaggcgcgcggaggagcgcgagggggcgttttgtatttcgcggttgttcggtcgattttcgtttcgggtttgtcgagtgtggtgattagttcggtgggtcgaagtttttttttcggtcggtatttcggcggtaagatttaggatttcgagtatttgtcgtcgtttgttatatttcgttttgtcgttttcggttattttatttcgaatgtgatattttcgagggttatcggcgcggtttgtttattttaatatttagggtttgaggaagtttttttaaattttatttcgg

SEQ ID NO: 16586 - DNA, 760 bp, Artificial Sequence
  chemically treated genomic DNA (Homo sapiens) CpG-island No: 16586
ccgaaataaaatttaaaaaaacttcctcaaaccctaaatattaaaataaacaaaccgcgccgataaccctcgaaaatatcacattcgaaataaaataaccgaaaacgacaaaacgaaatataacaaacgacgacaaatactcgaaatcctaaatcttaccgccgaaataccgaccgaaaaaaaaacttcgacccaccgaactaatcaccacactcgacaaacccgaaacgaaaatcgaccgaacaaccgcgaaatacaaaacgccccctcgcgctcctccgcgcgcctcgaaactaacgaatacaacgcccgccgcgacaaatctactccaaccccctcctctttttcgctcccgctcccctccttctctccctttacttacaactcctcccccaccgccccctccctccttctactcccgcgatctcctcctccctactctctccgaacgccgaatcgaaaactaattaaaacgcgaaaattaataccaaaacccaactccgccgaaccgaacgaatcgacaacgcatccaacgactactaaaaacccgaacgcaacgaacgcgaacccgaataaaaactacaccgaaacgctaaaaactaaaaaccgttcctacgcgaccgccccattcccaaaccgaccgccaacccatctaattaactcccgccgctccgcgccgcccgaaaatcgaaaaccgcgaaaaaccgaacacctacacccgcctctaaaaaataaatcccgaaaaccccgaacgcttccc

SEQ ID NO: 16587 - DNA, 760 bp, Artificial Sequence
  chemically treated genomic DNA (Homo sapiens) CpG-island No: 16587
tcggagtggggtttgggggagtttttttaggttttgagtgttggggtgggtaggtcgcgtcgatggttttcggggatgttatattcgagatggggtgatcgagaacggtaaggcgggatgtggtaaacggcggtaagtgttcggagttttaggttttgtcgtcggaatgtcggtcggggaaggggtttcggtttatcgggttggttattatattcggtaggttcggggcgggagtcggtcgagtagtcgcgggatgtagggcgttttttcgcgttttttcgcgcgtttcgaggttggcgggtgtagcgttcgtcgcggtaggtttgttttagtttttttttttttttcgttttcgtttttttttttttttttttttgtttgtaattttttttttatcgttttttttttttttttgttttcgcggtttttttttttttgtttttttcgagcgtcgggtcgggagttagttggagcgcgggggttggtgttagagtttagtttcgtcgagtcgggcgggtcggtagcgtatttagcggttgttgggagttcgagcgtagcgggcgcgggttcgggtggggattgtatcggagcgttgagagttggaggtcgtttttgcgcggtcgttttatttttagatcggtcgttagtttatttggttagttttcgtcgtttcgcgtcgttcgggagtcgggagtcgcggggaatcgggtatttgtattcgtttttgggaggtgagtttcgggagtttcgggcgtttttt

SEQ ID NO: 16588 - DNA, 760 bp, Artificial Sequence
  chemically treated genomic DNA (Homo sapiens) CpG-island No: 16588
aaaaaacgcccgaaactcccgaaactcacctcccaaaaacgaatacaaatacccgattccccgcgactcccgactcccgaacgacgcgaaacgacgaaaactaaccaaataaactaacgaccgatctaaaaataaaacgaccgcgcaaaaacgacctccaactctcaacgctccgatacaatccccacccgaacccgcgcccgctacgctcgaactcccaacaaccgctaaatacgctaccgacccgcccgactcgacgaaactaaactctaacaccaacccccgcgctccaactaactcccgacccgacgctcgaaaaaaacaaaaaaaaaaaaaccgcgaaaacaaaaaaaaaaaaaaaacgataaaaaaaaaattacaaacaaaaaaaaaaaaaaaaaaaaacgaaaacgaaaaaaaaaaaaaaactaaaacaaacctaccgcgacgaacgctacacccgccaacctcgaaacgcgcgaaaaaacgcgaaaaaacgccctacatcccgcgactactcgaccgactcccgccccgaacctaccgaatataataaccaacccgataaaccgaaaccccttccccgaccgacattccgacgacaaaacctaaaactccgaacacttaccgccgtttaccacatcccgccttaccgttctcgatcaccccatctcgaatataacatccccgaaaaccatcgacgcgacctacccaccccaacactcaaaacctaaaaaaactcccccaaaccccactccga

SEQ ID NO: 16589 - DNA, 857 bp, Artificial Sequence
  chemically treated genomic DNA (Homo sapiens) CpG-island No: 16589
cgcgcggagagcggcgggattcggagcggcgtttttcggggttatttttttaggacgtttcgtagagttgggagcgttgttttatttcgttcgggtcgtttttggggatttcgttcggggtttcgcggtttttttgtttcgcgtcgcgtttattcgtttttaggatttacggtacgttttcgcgtcgttattttgttattttttgtcgtcggttttgtagtttcggtcgtcgtttcggggttgtttagattttatagtcgttcgggggtaggagtcgttaaggagggggtcgggtataatgcgtcgtcgttttcgtagtcgtcgtttcgttttttttgtgtcggcgcgaggttgtttgaggcggttacgggcgaagggcggttcgttgcgtttcgcgaatttcgcgggtcgtcgtcgtcgttagagttttttagaggtaacggtaacggttatcgttacggtcgagtcgttttagtcgggattgcggcgcgcgggggcggcgtttgtacgtcgttcggttgggggcgtagcgggttcggtttcgtttttgattcgtttttgttttcggtttcggtttcgttttaattcgcgcgttttcgtcgattttcggtcgcgcgttcgcgcgcgcgggtgttttaaggagtcggaggaacgcggtcgcgcgacgggtttcggacgtcgagggtggtgtttttttcgagttttcggtggtgaggtcgtttttagaaggttatggaagcgtaggggagagcgagacggtcgagtttaggtaaattttcgagaaaggtcgagtgcgcgacggttttgcggggaggatcgcgttttttcgaatgcggtggttttattagattatgata

SEQ ID NO: 16590 - DNA, 857 bp, Artificial Sequence
  chemically treated genomic DNA (Homo sapiens) CpG-island No: 16590
tatcataatctaataaaaccaccgcattcgaaaaaacgcgatcctccccgcaaaaccgtcgcgcactcgacctttctcgaaaatttacctaaactcgaccgtctcgctctcccctacgcttccataaccttctaaaaacgacctcaccaccgaaaactcgaaaaaaacaccaccctcgacgtccgaaacccgtcgcgcgaccgcgttcctccgactccttaaaacacccgcgcgcgcgaacgcgcgaccgaaaatcgacgaaaacgcgcgaattaaaacgaaaccgaaaccgaaaacaaaaacgaatcaaaaacgaaaccgaacccgctacgcccccaaccgaacgacgtacaaacgccgcccccgcgcgccgcaatcccgactaaaacgactcgaccgtaacgataaccgttaccgttacctctaaaaaactctaacgacgacgacgacccgcgaaattcgcgaaacgcaacgaaccgcccttcgcccgtaaccgcctcaaacaacctcgcgccgacacaaaaaaaacgaaacgacgactacgaaaacgacgacgcattatacccgaccccctccttaacgactcctacccccgaacgactataaaatctaaacaaccccgaaacgacgaccgaaactacaaaaccgacgacaaaaaataacaaaataacgacgcgaaaacgtaccgtaaatcctaaaaacgaataaacgcgacgcgaaacaaaaaaaccgcgaaaccccgaacgaaatccccaaaaacgacccgaacgaaataaaacaacgctcccaactctacgaaacgtcctaaaaaaataaccccgaaaaacgccgctccgaatcccgccgctctccgcgcg

SEQ ID NO: 16591 - DNA, 857 bp, Artificial Sequence
  chemically treated genomic DNA (Homo sapiens) CpG-island No: 16591
tattataatttaatgagattatcgtattcggggaggcgcggtttttttcgtagagtcgtcgcgtattcggtttttttcgaggatttgtttgggttcggtcgtttcgtttttttttgcgtttttatgattttttgagagcggttttattatcggaggttcggaggaagtattattttcggcgttcggggttcgtcgcgcggtcgcgttttttcgattttttggagtattcgcgcgcgcgggcgcgcggtcggggatcggcgggggcgcgcgggttggggcggggtcggggtcgggggtaggggcgggttaggggcggggtcgggttcgttgcgtttttagtcgagcggcgtgtaggcgtcgttttcgcgcgtcgtagtttcggttggagcgattcggtcgtggcggtggtcgttatcgttgtttttgggaggttttggcggcggcggcggttcgcggggttcgcggagcgtagcgggtcgtttttcgttcgtggtcgttttaagtagtttcgcgtcgatataggggaggcgagacggcggttgcggaggcggcggcgtattgtgttcggttttttttttggcggtttttgttttcgggcggttgtgggatttgggtagtttcggggcggcggtcgaggttatagagtcggcggtaggggatggtaagatagcggcgcgggagcgtatcgtgagttttgggggcgggtgggcgcggcgcggagtaggggagtcgcggagtttcgagcggggtttttaggggcggttcgggcggggtggggtagcgtttttagttttgcggagcgttttaggggagtgatttcggagagcgtcgtttcgggtttcgtcgtttttcgcgcg

SEQ ID NO: 16592 - DNA, 857 bp, Artificial Sequence
  chemically treated genomic DNA (Homo sapiens) CpG-island No: 16592
cgcgcgaaaaacgacgaaacccgaaacgacgctctccgaaatcactcccctaaaacgctccgcaaaactaaaaacgctaccccaccccgcccgaaccgcccctaaaaaccccgctcgaaactccgcgactcccctactccgcgccgcgcccacccgcccccaaaactcacgatacgctcccgcgccgctatcttaccatcccctaccgccgactctataacctcgaccgccgccccgaaactacccaaatcccacaaccgcccgaaaacaaaaaccgccaaaaaaaaaaccgaacacaatacgccgccgcctccgcaaccgccgtctcgcctcccctatatcgacgcgaaactacttaaaacgaccacgaacgaaaaacgacccgctacgctccgcgaaccccgcgaaccgccgccgccgccaaaacctcccaaaaacaacgataacgaccaccgccacgaccgaatcgctccaaccgaaactacgacgcgcgaaaacgacgcctacacgccgctcgactaaaaacgcaacgaacccgaccccgcccctaacccgcccctacccccgaccccgaccccgccccaacccgcgcgcccccgccgatccccgaccgcgcgcccgcgcgcgcgaatactccaaaaaatcgaaaaaacgcgaccgcgcgacgaaccccgaacgccgaaaataatacttcctccgaacctccgataataaaaccgctctcaaaaaatcataaaaacgcaaaaaaaaacgaaacgaccgaacccaaacaaatcctcgaaaaaaaccgaatacgcgacgactctacgaaaaaaaccgcgcctccccgaatacgataatctcattaaattataata

SEQ ID NO: 16593 - DNA, 527 bp, Artificial Sequence
  chemically treated genomic DNA (Homo sapiens) CpG-island No: 16593
aggaaggtcggatttttacgcgaggtttgttgggaagtgtagttcgttagtggaaggaagttatatggaagaggggcggtagttggttgtgggtattgggttagaggtattacgtgggggtattttcgttttagtttttggataagacgtaggcgtaaatttacggttgttgcgggggatttttgtggtttttttcggtcggtggaattaattcgtgtaatagagaagcggggcgaattgaggcgagtgaagtggattttgagggttatcgttatcgttattgttgcggtaggggcgtggagggtagagggtcgcggaggtcgtagttgtaaatatggtttagagtagagacggcggaaattcgttcgtcgagtttagcgagtttgataattttttttaggtgatttgcgttagtcggttttttttgggcggttaggttgatttttttcggttttgtagggtcgggttaatttgtatttttatttgtgatatttgattttgggaagagtcgttacgtggggtgatag

SEQ ID NO: 16594 - DNA, 527 bp, Artificial Sequence
  chemically treated genomic DNA (Homo sapiens) CpG-island No: 16594
ctatcaccccacgtaacgactcttcccaaaatcaaatatcacaaataaaaatacaaattaacccgaccctacaaaaccgaaaaaaatcaacctaaccgcccaaaaaaaaccgactaacgcaaatcacctaaaaaaaattatcaaactcgctaaactcgacgaacgaatttccgccgtctctactctaaaccatatttacaactacgacctccgcgaccctctaccctccacgcccctaccgcaacaataacgataacgataaccctcaaaatccacttcactcgcctcaattcgccccgcttctctattacacgaattaattccaccgaccgaaaaaaaccacaaaaatcccccgcaacaaccgtaaatttacgcctacgtcttatccaaaaactaaaacgaaaatacccccacgtaatacctctaacccaatacccacaaccaactaccgcccctcttccatataacttccttccactaacgaactacacttcccaacaaacctcgcgtaaaaatccgaccttcct

SEQ ID NO: 16595 - DNA, 527 bp, Artificial Sequence
  chemically treated genomic DNA (Homo sapiens) CpG-island No: 16595
ttgttattttacgtggcggttttttttaggattaaatgttataaatggggatataagttagttcgattttatagaatcgggaagaattaatttgatcgtttaaaagaggtcgattggcgtaagttatttgaaaggggttgttaagttcgttgggttcggcgaacgggttttcgtcgtttttgttttgagttatgtttgtaattgcggttttcgcggttttttgttttttacgtttttgtcgtagtagtggcggtagcggtagtttttagagtttattttattcgttttagttcgtttcgtttttttgttgtacggattggttttatcgatcggaaagggttataaggatttttcgtagtagtcgtgggtttgcgtttgcgttttgtttaaaagttaagacgaaagtgtttttacgtgatatttttaatttagtgtttataattaattatcgttttttttttatgtgatttttttttattaacgaattatattttttagtaggtttcgcgtaggaattcggttttttt

SEQ ID NO: 16596 - DNA, 527 bp, Artificial Sequence
  chemically treated genomic DNA (Homo sapiens) CpG-island No: 16596
aaaaaaaccgaattcctacgcgaaacctactaaaaaatataattcgttaataaaaaaaaatcacataaaaaaaaaacgataattaattataaacactaaattaaaaatatcacgtaaaaacactttcgtcttaacttttaaacaaaacgcaaacgcaaacccacgactactacgaaaaatccttataaccctttccgatcgataaaaccaatccgtacaacaaaaaaacgaaacgaactaaaacgaataaaataaactctaaaaactaccgctaccgccactactacgacaaaaacgtaaaaaacaaaaaaccgcgaaaaccgcaattacaaacataactcaaaacaaaaacgacgaaaacccgttcgccgaacccaacgaacttaacaacccctttcaaataacttacgccaatcgacctcttttaaacgatcaaattaattcttcccgattctataaaatcgaactaacttatatccccatttataacatttaatcctaaaaaaaaccgccacgtaaaataacaa

SEQ ID NO: 16597 - DNA, 751 bp, Artificial Sequence
  chemically treated genomic DNA (Homo sapiens) CpG-island No: 16597
ggagagggttgaggtcgcgggtcgttcgttttagtttttcggaagttcgggtttttgaagtatagatagttaagagcggttcgagttaagttttaggaataggggtttcgggaagagatttcgatcgggtcgtatagcggggaggtttggttcgagagtttttatttggtcggttgcgattttatattggaatttcggaaacgcgttttggtcgttttagtttaagtgggttttggggcggttttttgttttttattttcgaacgttagtttttttcgggcgattcgaaggttacgaggcgggtcgtatagtttcgcgtcgtcgggggcgtttcgggagtatcggggattgcgcgcggcgtttagggagggcggttgttgttttttggcgttcgttagagttcgcggcgcgtttcgatagtttcgcgtagttcgggttcgttcgggaaaggtttttacgttagttaatttcggtttttttttgcgttcgggttcgcggtaacgttcggggatagtttttgcgcggtagcggttatagtattttagttttgggggagggaggagcgggcgttaggggtttcgtgaggtcggcgagggattttcgcgtcggggagtttaattgaggggtttcgcggggattataaagtagttcgcggtggaacggggtcgggattcggggattgggttgtagtttcggggtggatgagaggtttcgggaggtgtagggttcggtagggagggcgtggagggat

SEQ ID NO: 16598 - DNA, 751 bp, Artificial Sequence
  chemically treated genomic DNA (Homo sapiens) CpG-island No: 16598
atccctccacgccctccctaccgaaccctacacctcccgaaacctctcatccaccccgaaactacaacccaatccccgaatcccgaccccgttccaccgcgaactactttataatccccgcgaaacccctcaattaaactccccgacgcgaaaatccctcgccgacctcacgaaacccctaacgcccgctcctccctcccccaaaactaaaatactataaccgctaccgcgcaaaaactatccccgaacgttaccgcgaacccgaacgcaaaaaaaaaccgaaattaactaacgtaaaaacctttcccgaacgaacccgaactacgcgaaactatcgaaacgcgccgcgaactctaacgaacgccaaaaaacaacaaccgccctccctaaacgccgcgcgcaatccccgatactcccgaaacgcccccgacgacgcgaaactatacgacccgcctcgtaaccttcgaatcgcccgaaaaaaactaacgttcgaaaataaaaaacaaaaaaccgccccaaaacccacttaaactaaaacgaccaaaacgcgtttccgaaattccaatataaaatcgcaaccgaccaaataaaaactctcgaaccaaacctccccgctatacgacccgatcgaaatctcttcccgaaacccctattcctaaaacttaactcgaaccgctcttaactatctatacttcaaaaacccgaacttccgaaaaactaaaacgaacgacccgcgacctcaaccctctcc

SEQ ID NO: 16599 - DNA, 751 bp, Artificial Sequence
  chemically treated genomic DNA (Homo sapiens) CpG-island No: 16599
gtttttttacgttttttttgtcgggttttgtatttttcggggttttttatttatttcggggttgtaatttagttttcggatttcggtttcgttttatcgcgggttgttttgtggttttcgcggagttttttaattaagtttttcggcgcgggggtttttcgtcgattttacggggtttttgacgttcgttttttttttttttagggttagggtgttgtggtcgttgtcgcgtagggattgttttcgggcgttgtcgcgggttcggacgtaggagggggtcggggttgattggcgtggaggtttttttcgggcgggttcggattgcgcggagttgtcgggacgcgtcgcgggttttggcggacgttagggggtagtagtcgttttttttggacgtcgcgcgtagttttcggtgttttcggaacgttttcgacggcgcggggttgtgcggttcgtttcgtggttttcgggtcgttcgggaagaattagcgttcgaggataaaagataggaagtcgttttagagtttatttgagttggaacggttaaggcgcgttttcgaggttttaatatagagtcgtagtcggttaggtggggattttcggattaggttttttcgttgtgcggttcggtcggggttttttttcgaagtttttgtttttggggtttgattcgggtcgtttttggttatttgtgttttaggagttcgggttttcggggggttaaggcgggcggttcgcggttttaatttttttt

SEQ ID NO: 16600 - DNA, 751 bp, Artificial Sequence
  chemically treated genomic DNA (Homo sapiens) CpG-island No: 16600
aaaaaaaattaaaaccgcgaaccgcccgccttaaccccccgaaaacccgaactcctaaaacacaaataaccaaaaacgacccgaatcaaaccccaaaaacaaaaacttcgaaaaaaaaccccgaccgaaccgcacaacgaaaaaacctaatccgaaaatccccacctaaccgactacgactctatattaaaacctcgaaaacgcgccttaaccgttccaactcaaataaactctaaaacgacttcctatcttttatcctcgaacgctaattcttcccgaacgacccgaaaaccacgaaacgaaccgcacaaccccgcgccgtcgaaaacgttccgaaaacaccgaaaactacgcgcgacgtccaaaaaaaacgactactaccccctaacgtccgccaaaacccgcgacgcgtcccgacaactccgcgcaatccgaacccgcccgaaaaaaacctccacgccaatcaaccccgaccccctcctacgtccgaacccgcgacaacgcccgaaaacaatccctacgcgacaacgaccacaacaccctaaccctaaaaaaaaaaaaaacgaacgtcaaaaaccccgtaaaatcgacgaaaaacccccgcgccgaaaaacttaattaaaaaactccgcgaaaaccacaaaacaacccgcgataaaacgaaaccgaaatccgaaaactaaattacaaccccgaaataaataaaaaaccccgaaaaatacaaaacccgacaaaaaaaacgtaaaaaaac

SEQ ID NO: 16601 - DNA, 1244 bp, Artificial Sequence
  chemically treated genomic DNA (Homo sapiens) CpG-island No: 16601
gcggggtcggagttggtagcgtacgtcggatcgggggcggggtttttcgagtttcgcgaaaatgttcgtagtatcgcggggatcggcgtagggggaagcggtcgttcgtacgcgaagtcggggtgggtttcgtatttggggtcgttcgagcgtacgggggcggggagaggagcgggggtcgttttcggggagtcggaggggagacgcggggttcgggtaggttgttcggttgttgcgggtgtcggcgttataaggttcgggagtaagtcgcgtggttgtttttaattttttttttagtcgcgcgtttttggggttttttttgattaggaaatttttcgttggtcgttgacgtacgtagtaagtgagacgcgcggagggatcgagtcgcggttcgggcgtagcggtaaaaaatatttattatagaaatcgatttaagggaagacgttgagagtaaacggtacgcgcggacgtcgttcggttttatgtaaggaattagcgtcgtttcgtcgtagttgatagtcggacggtgtaggagcgcggagtggttttttcgggtttcgcggttaaatcgtattttcgttttggaagcggaggtttggttttgggcggtcgcgtaggatttggggtcgttcgcgggttgtagtttcggttcgggagtttcgtggcggttattgcgtttgtttgtagcggttcgcggggtcgggttttttcgggtgcggcgcgtcggtcgggtttttttcgggtcggcggggtttgttttttttttttaggttttcggatcgtggttattcgcggagtcgtataagtttgcgtgtggttgcggaaaggggttcgtacgcgggcggggtttcgggttagtatgtaggtttggatgcggggcgcgggggtggttttcgatttttcgttcgggttgcgtatagtagcgcgcggcgcggcggcgggggcgcgcgggttaattttaggagtcggcggcggcgagtcgcgttttggttgatatcggaaaggtttgtgattggtcgtcggtcgtttttatgtaaacgagttgagggaatggaattttttcggtcgggtttatagtaaaagtacgtttatttttaggtatttttatttatagagttagcgggcgcgggcgggacgggcgtttcgcggtcggatttagttagggtattacgttgttcggttttgcgtcgttaggtattttttttcggggtttttagggacgttagaaggaagttaatttttgt

SEQ ID NO: 16602 - DNA, 1244 bp, Artificial Sequence
  chemically treated genomic DNA (Homo sapiens) CpG-island No: 16602
acaaaaattaacttccttctaacgtccctaaaaaccccgaaaaaaaatacctaacgacgcaaaaccgaacaacgtaataccctaactaaatccgaccgcgaaacgcccgtcccgcccgcgcccgctaactctataaataaaaatacctaaaaataaacgtacttttactataaacccgaccgaaaaaattccattccctcaactcgtttacataaaaacgaccgacgaccaatcacaaacctttccgatatcaaccaaaacgcgactcgccgccgccgactcctaaaattaacccgcgcgcccccgccgccgcgccgcgcgctactatacgcaacccgaacgaaaaatcgaaaaccacccccgcgccccgcatccaaacctacatactaacccgaaaccccgcccgcgtacgaacccctttccgcaaccacacgcaaacttatacgactccgcgaataaccacgatccgaaaacctaaaaaaaaaaaacaaaccccgccgacccgaaaaaaacccgaccgacgcgccgcacccgaaaaaacccgaccccgcgaaccgctacaaacaaacgcaataaccgccacgaaactcccgaaccgaaactacaacccgcgaacgaccccaaatcctacgcgaccgcccaaaaccaaacctccgcttccaaaacgaaaatacgatttaaccgcgaaacccgaaaaaaccactccgcgctcctacaccgtccgactatcaactacgacgaaacgacgctaattccttacataaaaccgaacgacgtccgcgcgtaccgtttactctcaacgtcttcccttaaatcgatttctataataaatattttttaccgctacgcccgaaccgcgactcgatccctccgcgcgtctcacttactacgtacgtcaacgaccaacgaaaaatttcctaatcaaaaaaaaccccaaaaacgcgcgactaaaaaaaaaattaaaaacaaccacgcgacttactcccgaaccttataacgccgacacccgcaacaaccgaacaacctacccgaaccccgcgtctcccctccgactccccgaaaacgacccccgctcctctccccgcccccgtacgctcgaacgaccccaaatacgaaacccaccccgacttcgcgtacgaacgaccgcttccccctacgccgatccccgcgatactacgaacattttcgcgaaactcgaaaaaccccgcccccgatccgacgtacgctaccaactccgaccccgc

SEQ ID NO: 16603 - DNA, 1244 bp, Artificial Sequence
  chemically treated genomic DNA (Homo sapiens) CpG-island No: 16603
gtagaggttgatttttttttggcgtttttaggagtttcggaaagaagtgtttggcggcgtagggtcgggtagcgtggtgttttggttgggttcggtcgcggggcgttcgtttcgttcgcgttcgttggttttatgaatgagagtgtttggaaatgaacgtgtttttattgtaagttcggtcggaggaattttatttttttagttcgtttgtataggggcggtcggcggttaattataggttttttcggtattagttagggcgcggttcgtcgtcgtcggtttttggaattggttcgcgcgttttcgtcgtcgcgtcgcgcgttattgtacgtagttcgggcggggagtcggaggttattttcgcgtttcgtatttaagtttgtatgttggttcggggtttcgttcgcgtgcggattttttttcgtagttatacgtaggtttgtgcggtttcgcgagtggttacggttcggagatttggaaaaagaaagtaggtttcgtcggttcgaggaggattcggtcggcgcgtcgtattcggagaggttcggtttcgcgagtcgttgtaggtaggcgtagtggtcgttacgaggttttcgaatcggggttgtagttcgcggacggttttagattttgcgcggtcgtttagggttaggttttcgtttttagggcgggggtgcgatttggtcgcggggttcgggggagttatttcgcgtttttgtatcgttcggttgttagttgcggcgaagcggcgttgattttttgtatgaggtcggacggcgttcgcgcgtgtcgtttgtttttagcgtttttttttgggtcggtttttgtaatgggtgttttttatcgttgcgttcgggtcgcggttcgattttttcgcgcgttttatttgttgcgtgcgttagcggttagcgaggagttttttagttaggaaagattttaagaacgcgcggttggaaggaaagttgaaagtagttacgcggtttgttttcgggttttgtagcgtcggtattcgtagtagtcggatagtttgttcgggtttcgcgtttttttttcggtttttcggaagcggttttcgttttttttttcgttttcgtgcgttcgagcggttttaggtgcggaatttatttcggtttcgcgtgcgggcggtcgtttttttttgcgtcggttttcgcggtgttgcgggtattttcgcggagttcggagggtttcgttttcggttcggcgtgcgttgttaatttcgatttcgt

SEQ ID NO: 16604 - DNA, 1244 bp, Artificial Sequence
  chemically treated genomic DNA (Homo sapiens) CpG-island No: 16604
acgaaatcgaaattaacaacgcacgccgaaccgaaaacgaaaccctccgaactccgcgaaaatacccgcaacaccgcgaaaaccgacgcaaaaaaaaacgaccgcccgcacgcgaaaccgaaataaattccgcacctaaaaccgctcgaacgcacgaaaacgaaaaaaaaaacgaaaaccgcttccgaaaaaccgaaaaaaaaacgcgaaacccgaacaaactatccgactactacgaataccgacgctacaaaacccgaaaacaaaccgcgtaactactttcaactttccttccaaccgcgcgttcttaaaatctttcctaactaaaaaactcctcgctaaccgctaacgcacgcaacaaataaaacgcgcgaaaaaatcgaaccgcgacccgaacgcaacgataaaaaacacccattacaaaaaccgacccaaaaaaaaacgctaaaaacaaacgacacgcgcgaacgccgtccgacctcatacaaaaaatcaacgccgcttcgccgcaactaacaaccgaacgatacaaaaacgcgaaataactcccccgaaccccgcgaccaaatcgcacccccgccctaaaaacgaaaacctaaccctaaacgaccgcgcaaaatctaaaaccgtccgcgaactacaaccccgattcgaaaacctcgtaacgaccactacgcctacctacaacgactcgcgaaaccgaacctctccgaatacgacgcgccgaccgaatcctcctcgaaccgacgaaacctactttctttttccaaatctccgaaccgtaaccactcgcgaaaccgcacaaacctacgtataactacgaaaaaaaatccgcacgcgaacgaaaccccgaaccaacatacaaacttaaatacgaaacgcgaaaataacctccgactccccgcccgaactacgtacaataacgcgcgacgcgacgacgaaaacgcgcgaaccaattccaaaaaccgacgacgacgaaccgcgccctaactaataccgaaaaaacctataattaaccgccgaccgcccctatacaaacgaactaaaaaaataaaattcctccgaccgaacttacaataaaaacacgttcatttccaaacactctcattcataaaaccaacgaacgcgaacgaaacgaacgccccgcgaccgaacccaaccaaaacaccacgctacccgaccctacgccgccaaacacttctttccgaaactcctaaaaacgccaaaaaaaaatcaacctctac

SEQ ID NO: 16605 - DNA, 1207 bp, Artificial Sequence
  chemically treated genomic DNA (Homo sapiens) CpG-island No: 16605
gttaacgttaatttcgattttttcgtgaaacgcgtagttcgcgtaggcgttcgtagtttttagttttcgggacggtttcgaacgagtttatcgttgacgcgtttaggaagaaacgatttcgtttttagtaaatttcggacggtggggcgcggggaagggcgtaggtagttttttaattcgagtttcgtaattcggcgggatcggagtttagcgttttacgtttttcgggaggaagtttcggatttcgggcgatttcgttttttttttcggatttcgttcgcgttttagtattcgggaggaaggcgaagatcggcgggaggagcgtttttttcggaaggggagaatcgggttcgaggcgtcgtggggcgggggtcgcgggcgtatttacgggggcgagtagttagtaggttagtagcgcgggaggtagtagcgttcgtatttcgagtttagcgtgtcgggggtcgtttagcgttcgtcgttttcgttttaggttttcgcggtttcgtcgtttttagtatgggtcgggagcgagtgcgcggagatttcgggtttcgtagttgtagtcgagcgttcgagcgcgggggtcgtttttttcgtttcggtagttggagcgcgtttaatgtacgttcgttttttacgcgtttcgtcgtttcgtttttcgtttttgttttcgtttcgcgttgttttaattttcgttttttttttttttcgagaattttcgtttcgcgtttttttttatcgttttttattttttttttcgttgcgtttcgcgtttttttttcgtttttgggttttttgttttcgtcgcgcgcgttttttttggttttttcgatttttttagttttttttttcgtttttttttttttttttttggtttacgtttttttttcggtcgcgttttttcgatttgtgggcggaggggttgggaagcggggtgtttagtgcgcgttcggtttcgagtagagagaattgggggagagcggtcggcgcggggtcgggagaggaggatcgggttaggtgtgcgttcggaaggggcggatgtttttgcggtcgtttgtatttgtttttttaaataattgcggaagtttaagaaagcggttagagattcgttcggggtgggcgcgtcgtttttgtagttagtggggttaggttggggtatttgaaaatggagaaaattagagtgttttttggtggggattttcgtagt

SEQ ID NO: 16606 - DNA, 1207 bp, Artificial Sequence
  chemically treated genomic DNA (Homo sapiens) CpG-island No: 16606
actacgaaaatccccaccaaaaaacactctaattttctccattttcaaataccccaacctaaccccactaactacaaaaacgacgcgcccaccccgaacgaatctctaaccgctttcttaaacttccgcaattatttaaaaaaacaaatacaaacgaccgcaaaaacatccgccccttccgaacgcacacctaacccgatcctcctctcccgaccccgcgccgaccgctctcccccaattctctctactcgaaaccgaacgcgcactaaacaccccgcttcccaacccctccgcccacaaatcgaaaaaacgcgaccgaaaaaaaaacgtaaaccaaaaaaaaaaaaaaaaaaacgaaaaaaaaaactaaaaaaatcgaaaaaaccaaaaaaaacgcgcgcgacgaaaacaaaaaacccaaaaacgaaaaaaaaacgcgaaacgcaacgaaaaaaaaaataaaaaacgataaaaaaaaacgcgaaacgaaaattctcgaaaaaaaaaaaaaacgaaaattaaaacaacgcgaaacgaaaacaaaaacgaaaaacgaaacgacgaaacgcgtaaaaaacgaacgtacattaaacgcgctccaactaccgaaacgaaaaaaacgacccccgcgctcgaacgctcgactacaactacgaaacccgaaatctccgcgcactcgctcccgacccatactaaaaacgacgaaaccgcgaaaacctaaaacgaaaacgacgaacgctaaacgacccccgacacgctaaactcgaaatacgaacgctactacctcccgcgctactaacctactaactactcgcccccgtaaatacgcccgcgacccccgccccacgacgcctcgaacccgattctccccttccgaaaaaaacgctcctcccgccgatcttcgccttcctcccgaatactaaaacgcgaacgaaatccgaaaaaaaaaacgaaatcgcccgaaatccgaaacttcctcccgaaaaacgtaaaacgctaaactccgatcccgccgaattacgaaactcgaattaaaaaactacctacgcccttccccgcgccccaccgtccgaaatttactaaaaacgaaatcgtttcttcctaaacgcgtcaacgataaactcgttcgaaaccgtcccgaaaactaaaaactacgaacgcctacgcgaactacgcgtttcacgaaaaaatcgaaattaacgttaac

SEQ ID NO: 16607 - DNA, 1207 bp, Artificial Sequence
  chemically treated genomic DNA (Homo sapiens) CpG-island No: 16607
gttgcggggatttttattaaaaagtattttgattttttttatttttagatgttttaatttagttttattggttataaagacggcgcgtttatttcggacgggtttttggtcgtttttttgggttttcgtagttgtttagaaaggtaggtataggcggtcgtaaaggtattcgtttttttcgagcgtatatttggttcggtttttttttttcggtttcgcgtcggtcgtttttttttagttttttttattcggagtcgggcgcgtattgagtatttcgttttttagttttttcgtttatagatcggggaggcgcggtcgggaggggggcgtgggttagggaagaggggaggagaacggagagagaggttgggggggtcgaggagattagagggagcgcgcgcggcggggatagagagtttaggggcgaggagagggcgcggggcgtagcggaaggggaagtggggggcggtgaggaggggcgcggagcgggggttttcgggggaggagggagacgaggattggggtagcgcggggcggggataggggcggggggcggagcggcggggcgcgtgggggacgggcgtgtattgagcgcgttttagttgtcgggacggagggggcggttttcgcgttcgggcgttcggttatagttgcggggttcgaggttttcgcgtattcgttttcggtttatgttggaggcggcggaatcgcggggatttaggacggaggcggcgggcgttgggcggttttcggtacgttgagttcgggatgcggacgttgttgtttttcgcgttgttgatttgttggttgttcgttttcgtgagtgcgttcgcgattttcgttttacggcgtttcggattcggtttttttttttcgagaagagcgtttttttcgtcggttttcgtttttttttcgggtgttggagcgcgggcggggttcgggagagggagcggggtcgttcggggttcggagttttttttcggagagcgtgaagcgttgagtttcggtttcgtcgggttgcgggattcgggttgggaggttgtttgcgttttttttcgcgttttatcgttcggggtttgttggaaacgggatcgtttttttttggacgcgttaacgatgagttcgttcggggtcgtttcgggagttgggagttgcgggcgtttgcgcgggttgcgcgttttacggggagatcggggttggcgttggt

SEQ ID NO: 16608 - DNA, 1207 bp, Artificial Sequence
  chemically treated genomic DNA (Homo sapiens) CpG-island No: 16608
accaacgccaaccccgatctccccgtaaaacgcgcaacccgcgcaaacgcccgcaactcccaactcccgaaacgaccccgaacgaactcatcgttaacgcgtccaaaaaaaaacgatcccgtttccaacaaaccccgaacgataaaacgcgaaaaaaaacgcaaacaacctcccaacccgaatcccgcaacccgacgaaaccgaaactcaacgcttcacgctctccgaaaaaaaactccgaaccccgaacgaccccgctccctctcccgaaccccgcccgcgctccaacacccgaaaaaaaaacgaaaaccgacgaaaaaaacgctcttctcgaaaaaaaaaaaccgaatccgaaacgccgtaaaacgaaaatcgcgaacgcactcacgaaaacgaacaaccaacaaatcaacaacgcgaaaaacaacaacgtccgcatcccgaactcaacgtaccgaaaaccgcccaacgcccgccgcctccgtcctaaatccccgcgattccgccgcctccaacataaaccgaaaacgaatacgcgaaaacctcgaaccccgcaactataaccgaacgcccgaacgcgaaaaccgccccctccgtcccgacaactaaaacgcgctcaatacacgcccgtcccccacgcgccccgccgctccgccccccgcccctatccccgccccgcgctaccccaatcctcgtctccctcctcccccgaaaacccccgctccgcgcccctcctcaccgccccccacttccccttccgctacgccccgcgccctctcctcgcccctaaactctctatccccgccgcgcgcgctccctctaatctcctcgacccccccaacctctctctccgttctcctcccctcttccctaacccacgcccccctcccgaccgcgcctccccgatctataaacgaaaaaactaaaaaacgaaatactcaatacgcgcccgactccgaataaaaaaaactaaaaaaaaacgaccgacgcgaaaccgaaaaaaaaaaaccgaaccaaatatacgctcgaaaaaaacgaatacctttacgaccgcctatacctacctttctaaacaactacgaaaacccaaaaaaacgaccaaaaacccgtccgaaataaacgcgccgtctttataaccaataaaactaaattaaaacatctaaaaataaaaaaaatcaaaatactttttaataaaaatccccgcaac

SEQ ID NO: 16609 - DNA, 1025 bp, Artificial Sequence
  chemically treated genomic DNA (Homo sapiens) CpG-island No: 16609
tcgtcggggttgttagagcggtattttttttttggttttcgtagtttttgggggtcggagtgattcgagcggattcggtagtaagagaggcgcgcgtcgtattttttcggtatcggcgttttttttttatatttatattttcgcgtttttcgtagtttagttcgggggatgtaggcgtcggcgggtttcgggcgcggcgggcgagcggcgtttatttttgtgatagttatgtagaaatttcgcggcggagcgggggcgcgggcgcggcgtgcgggggcggcggcggcggttcggggcggcggcggaagggggttcggtagttttcggttcgtttttcgcgtttcgtcggcggttcggtcgagtttgggggttgcgtttcgggcgggtagcgcgtagggatcgttcgtcggcgttcgttcgtcgttcgtcgttgatgttagtttcgaatgtgtatttataatagatgagtttttttcgtcgtaggaaggcgaggtaggaagaaagggagagagggagagggttcgggttggggggcggggggaggaagaggggtcgggaattcgttataaaggaggaggcggagggaggaggaggaggaagcgtagttcgttagcggtcgtgtttcgagtttttcgttcgatcgtcggtcgtcgggtatcgttgttttcggagttcggacgggcgttcgggttcgcggttttaattttttcgggtttgcggacgttacgcggttgggcgaggttggttttcggtatttgtcggttgggagaacgggcggcgtttcgggttttcgggtgtttcgttggttcggggacgttggtgaagttataggttggacggtcgaggcgttgcgcgggtaaagaaggcggtcgggttcgttttttggaggttcgtaaagtcggttcgtgggtcgtgagtgtggcgcggcgggttgggaggggcgtggtagtcgtaagttcgggagttttgttcgtatttttatttcgcgttggttcggggtatagggtggttagacggatttgtgt

SEQ ID NO: 16610 - DNA, 1025 bp, Artificial Sequence
  chemically treated genomic DNA (Homo sapiens) CpG-island No: 16610
acacaaatccgtctaaccaccctataccccgaaccaacgcgaaataaaaatacgaacaaaactcccgaacttacgactaccacgcccctcccaacccgccgcgccacactcacgacccacgaaccgactttacgaacctccaaaaaacgaacccgaccgccttctttacccgcgcaacgcctcgaccgtccaacctataacttcaccaacgtccccgaaccaacgaaacacccgaaaacccgaaacgccgcccgttctcccaaccgacaaataccgaaaaccaacctcgcccaaccgcgtaacgtccgcaaacccgaaaaaattaaaaccgcgaacccgaacgcccgtccgaactccgaaaacaacgatacccgacgaccgacgatcgaacgaaaaactcgaaacacgaccgctaacgaactacgcttcctcctcctcctccctccgcctcctcctttataacgaattcccgacccctcttcctccccccgccccccaacccgaaccctctccctctctccctttcttcctacctcgccttcctacgacgaaaaaaactcatctattataaatacacattcgaaactaacatcaacgacgaacgacgaacgaacgccgacgaacgatccctacgcgctacccgcccgaaacgcaacccccaaactcgaccgaaccgccgacgaaacgcgaaaaacgaaccgaaaactaccgaacccccttccgccgccgccccgaaccgccgccgccgcccccgcacgccgcgcccgcgcccccgctccgccgcgaaatttctacataactatcacaaaaataaacgccgctcgcccgccgcgcccgaaacccgccgacgcctacatcccccgaactaaactacgaaaaacgcgaaaatataaatataaaaaaaaaacgccgataccgaaaaaatacgacgcgcgcctctcttactaccgaatccgctcgaatcactccgacccccaaaaactacgaaaaccaaaaaaaaaataccgctctaacaaccccgacga

SEQ ID NO: 16611 - DNA, 1025 bp, Artificial Sequence
  chemically treated genomic DNA (Homo sapiens) CpG-island No: 16611
atataaattcgtttggttattttgtgtttcgggttagcgcgaggtgggggtgcgggtagggttttcgggtttgcggttgttacgttttttttagttcgtcgcgttatatttacggtttacgggtcgattttgcgagtttttagggggcgaattcgatcgttttttttgttcgcgtagcgtttcggtcgtttagtttgtgattttattagcgttttcgggttagcgggatattcgagagttcggggcgtcgttcgtttttttagtcggtaggtgtcgggagttagtttcgtttagtcgcgtggcgttcgtaggttcgaaggggttaaggtcgcggattcgggcgttcgttcggatttcgggagtagcggtgttcggcggtcggcgatcgagcgggaggttcggggtacggtcgttggcgggttgcgttttttttttttttttttttcgtttttttttttgtagcgagttttcggttttttttttttttttcgttttttagttcgggttttttttttttttttttttttttttgtttcgtttttttgcggcgaaggaggtttatttattataaatgtatattcggggttgatattagcgacgagcggcgggcgagcgtcgacgagcggtttttgcgcgttgttcgttcggagcgtagtttttaggttcggtcgagtcgtcggcggggcgcggggagcgagtcgggagttgtcggattttttttcgtcgtcgtttcgggtcgtcgtcgtcgttttcgtacgtcgcgttcgcgttttcgtttcgtcgcggagtttttgtatgattgttataaaggtaagcgtcgttcgttcgtcgcgttcgggattcgtcggcgtttgtatttttcgggttaggttgcggggggcgcgggggtgtgggtgtggggagggggcgtcggtgtcgggaaggtgcggcgcgcgttttttttgttgtcggattcgttcgagttatttcggtttttaaggattgcggaggttagggggaggatgtcgttttggtagtttcggcgg

SEQ ID NO: 16612 - DNA, 1025 bp, Artificial Sequence
  chemically treated genomic DNA (Homo sapiens) CpG-island No: 16612
ccgccgaaactaccaaaacgacatcctccccctaacctccgcaatccttaaaaaccgaaataactcgaacgaatccgacaacaaaaaaaacgcgcgccgcaccttcccgacaccgacgccccctccccacacccacacccccgcgccccccgcaacctaacccgaaaaatacaaacgccgacgaatcccgaacgcgacgaacgaacgacgcttacctttataacaatcatacaaaaactccgcgacgaaacgaaaacgcgaacgcgacgtacgaaaacgacgacgacgacccgaaacgacgacgaaaaaaaatccgacaactcccgactcgctccccgcgccccgccgacgactcgaccgaacctaaaaactacgctccgaacgaacaacgcgcaaaaaccgctcgtcgacgctcgcccgccgctcgtcgctaatatcaaccccgaatatacatttataataaataaacctccttcgccgcaaaaaaacgaaacaaaaaaaaaaaaaaaaaaaaaaaaaacccgaactaaaaaacgaaaaaaaaaaaaaaaaccgaaaactcgctacaaaaaaaaaaacgaaaaaaaaaaaaaaaaaaaacgcaacccgccaacgaccgtaccccgaacctcccgctcgatcgccgaccgccgaacaccgctactcccgaaatccgaacgaacgcccgaatccgcgaccttaaccccttcgaacctacgaacgccacgcgactaaacgaaactaactcccgacacctaccgactaaaaaaacgaacgacgccccgaactctcgaatatcccgctaacccgaaaacgctaataaaatcacaaactaaacgaccgaaacgctacgcgaacaaaaaaaacgatcgaattcgccccctaaaaactcgcaaaatcgacccgtaaaccgtaaatataacgcgacgaactaaaaaaaacgtaacaaccgcaaacccgaaaaccctacccgcacccccacctcgcgctaacccgaaacacaaaataaccaaacgaatttatat

SEQ ID NO: 16613 - DNA, 602 bp, Artificial Sequence
  chemically treated genomic DNA (Homo sapiens) CpG-island No: 16613
cgtataatcgttattttggggttacggtaatttttgcgttcgtttttggttttcgttgtttttgggatttttatgggcgggggatacgcgttagcgttataaagcgtcgcgatcgcgcgggagatcgagaggaggcgtggaaacgggaggaggaggaggtggtagtggaggagagttaggtacggtggggggaggggagggaggggtacgcgtacgcgcgtcgggtcgttagtcgttgagagtcgtttagtattcggcgtgcgttttttttttttttttttttttttttttttttttttgtttttcggtttcgttgttttcgcggcgcgaggcgttttcgttttttttttttttcgtcgtcgttttttttttcgcgtagttttcgtcgttatcgtcgcgagattttcgtacgtcgttttttttttatttttttttgtttcgcgcgttttcggttttgcggttttcgaagagaacgagagggcgagcgagcgcggcgttttcgggtcggttcggttttttttttttattatcgtcggtttttcgtcgttttttttcgtttttattttttttttttttttttaagttgaggtttttttcggggg

SEQ ID NO: 16614 - DNA, 602 bp, Artificial Sequence
  chemically treated genomic DNA (Homo sapiens) CpG-island No: 16614
cccccgaaaaaaacctcaacttaaaaaaaaaaaaaaaaaataaaaacgaaaaaaaacgacgaaaaaccgacgataataaaaaaaaaaaaccgaaccgacccgaaaacgccgcgctcgctcgccctctcgttctcttcgaaaaccgcaaaaccgaaaacgcgcgaaacaaaaaaaaataaaaaaaaaacgacgtacgaaaatctcgcgacgataacgacgaaaactacgcgaaaaaaaaaacgacgacgaaaaaaaaaaaaaacgaaaacgcctcgcgccgcgaaaacaacgaaaccgaaaaacaaaaaaaaaaaaaaaaaaaaaaaaaaaaaaaaaaaacgcacgccgaatactaaacgactctcaacgactaacgacccgacgcgcgtacgcgtacccctccctcccctccccccaccgtacctaactctcctccactaccacctcctcctcctcccgtttccacgcctcctctcgatctcccgcgcgatcgcgacgctttataacgctaacgcgtatcccccgcccataaaaatcccaaaaacaacgaaaaccaaaaacgaacgcaaaaattaccgtaaccccaaaataacgattatacg

SEQ ID NO: 16615 - DNA, 602 bp, Artificial Sequence
  chemically treated genomic DNA (Homo sapiens) CpG-island No: 16615
ttttcggagggggttttaatttggggggggggagaggaggtggaagcggaggaaggcggcggagggtcggcgatggtgaagggagggggtcgggtcggttcgggaacgtcgcgttcgttcgttttttcgtttttttcgggggtcgtagggtcggaggcgcgcggggtaggagagggtggggggagagcggcgtgcgggggtttcgcggcggtggcggcgggggttgcgcggggggaggggcgacggcggaggaggaggagagcgagagcgtttcgcgtcgcgggagtaacggagtcgagaagtagggagggagggagggagggagagagggaggaggggcgtacgtcgggtgttgggcggtttttagcggttggcggttcgacgcgcgtgcgcgtgttttttttttttttttttttatcgtgtttggtttttttttattattattttttttttttttcgtttttacgttttttttcggtttttcgcgcggtcgcggcgttttgtgacgttggcgcgtgtttttcgtttataaagattttagaagtagcggggattaagggcgggcgtagggattgtcgtggttttagagtgacggttgtgcg

SEQ ID NO: 16616 - DNA, 602 bp, Artificial Sequence
  chemically treated genomic DNA (Homo sapiens) CpG-island No: 16616
cgcacaaccgtcactctaaaaccacgacaatccctacgcccgcccttaatccccgctacttctaaaatctttataaacgaaaaacacgcgccaacgtcacaaaacgccgcgaccgcgcgaaaaaccgaaaaaaaacgtaaaaacgaaaaaaaaaaaaaataataataaaaaaaaaccaaacacgataaaaaaaaaaaaaaaaaaaacacgcgcacgcgcgtcgaaccgccaaccgctaaaaaccgcccaacacccgacgtacgcccctcctccctctctccctccctccctccctccctacttctcgactccgttactcccgcgacgcgaaacgctctcgctctcctcctcctccgccgtcgcccctccccccgcgcaacccccgccgccaccgccgcgaaacccccgcacgccgctctccccccaccctctcctaccccgcgcgcctccgaccctacgacccccgaaaaaaacgaaaaaacgaacgaacgcgacgttcccgaaccgacccgaccccctcccttcaccatcgccgaccctccgccgccttcctccgcttccacctcctctccccccccccaaattaaaaccccctccgaaaa

SEQ ID NO: 16617 - DNA, 1084 bp, Artificial Sequence
  chemically treated genomic DNA (Homo sapiens) CpG-island No: 16617
agggggcgtggtggcgttttcgagatttatgagaattaggcgtcgatttttttcgttgcgatatttaggttttttttaggtttttattgtttttgttgcggagagtttggttatagcggcggttttcgcgaagtattcgttagcgaggggcgtttcgagggcgttcgcgttttatatattcgttacgtaggatattttttcggttttacgtttcgcgttttcggggttattattatcgcgggttcgaggggtggtttttacgaggaggagtgggagtttcgcgtttggtttggggtcggttcggcgatatggggattttcgtttagatggggcgattcggagtcggtttttaattttttttttcgggttttaggatcgggtagtttcggtatcgtagttgcggggagttagtaagtatcggttatcggcgtcgttcgggtttcgcggatggtcgggggcggggtttgagcggcgtaagtgggggcgggagggggcggggttaggacgcgcgagggggggcggggtcggggttcgcggcgggggcgggggcggggcggggtcgggaggcgcgcgtttcgcgggcggaggggcgcgtcgcgttggggttgggtttggagcgcgcggagttcggttgtagagagtcgcgcggggacgcgtcgggatcgttaggagcgtaggagttttcgaggcggtgaacgagggagggagtttagttcgcgcgggttatgagttatcgggttcggggagttcggtcgcggttcgggtagcgtttagtcggcgttttagttcgttcggtcgtagttgcgcgtttgtaggtatggtttttttatatttaatttttcgttttttggtttttttttcgggatttttgtttgttttcggggacgtgcgttgtgtgcgtatcgttgttcgaaggagagcggtcgtacgcgttttggttcgcgcgtgtcgtttttgtgtgcgcgggtgggagggaggagggcgcgcgagggaggggaggcgttttcggttgggatttgtttttcgatttttatttcgggcggggcggggagtttttggaggggtcgagtcgtttttggagtat

SEQ ID NO: 16618 - DNA, 1084 bp, Artificial Sequence
  chemically treated genomic DNA (Homo sapiens) CpG-island No: 16618
atactccaaaaacgactcgacccctccaaaaactccccgccccgcccgaaataaaaatcgaaaaacaaatcccaaccgaaaacgcctcccctccctcgcgcgccctcctccctcccacccgcgcacacaaaaacgacacgcgcgaaccaaaacgcgtacgaccgctctccttcgaacaacgatacgcacacaacgcacgtccccgaaaacaaacaaaaatcccgaaaaaaaaaccaaaaaacgaaaaattaaatataaaaaaaccatacctacaaacgcgcaactacgaccgaacgaactaaaacgccgactaaacgctacccgaaccgcgaccgaactccccgaacccgataactcataacccgcgcgaactaaactccctccctcgttcaccgcctcgaaaactcctacgctcctaacgatcccgacgcgtccccgcgcgactctctacaaccgaactccgcgcgctccaaacccaaccccaacgcgacgcgcccctccgcccgcgaaacgcgcgcctcccgaccccgccccgcccccgcccccgccgcgaaccccgaccccgccccccctcgcgcgtcctaaccccgccccctcccgcccccacttacgccgctcaaaccccgcccccgaccatccgcgaaacccgaacgacgccgataaccgatacttactaactccccgcaactacgataccgaaactacccgatcctaaaacccgaaaaaaaaaattaaaaaccgactccgaatcgccccatctaaacgaaaatccccatatcgccgaaccgaccccaaaccaaacgcgaaactcccactcctcctcgtaaaaaccacccctcgaacccgcgataataataaccccgaaaacgcgaaacgtaaaaccgaaaaaatatcctacgtaacgaatatataaaacgcgaacgccctcgaaacgcccctcgctaacgaatacttcgcgaaaaccgccgctataaccaaactctccgcaacaaaaacaataaaaacctaaaaaaaacctaaatatcgcaacgaaaaaaatcgacgcctaattctcataaatctcgaaaacgccaccacgccccct

SEQ ID NO: 16619 - DNA, 1084 bp, Artificial Sequence
  chemically treated genomic DNA (Homo sapiens) CpG-island No: 16619
atgttttagaggcggttcggtttttttagaggtttttcgtttcgttcgggatggggatcggggagtagattttagtcgggggcgttttttttttttcgcgcgttttttttttttttattcgcgtatataaagacgatacgcgcggattaaggcgcgtgcggtcgttttttttcgggtagcggtgcgtatatagcgtacgttttcggggatagataggggtttcgggggaaggattagggagcgaggaattgggtataaggaggttatatttataggcgcgtagttgcggtcgagcgggttggggcgtcggttgagcgttgttcggatcgcggtcgggtttttcgggttcggtggtttatggttcgcgcggattgggttttttttttcgtttatcgtttcgaaggtttttgcgtttttggcggtttcggcgcgttttcgcgcggttttttgtagtcgagtttcgcgcgttttaagtttagttttagcgcggcgcgttttttcgttcgcgaggcgcgcgtttttcggtttcgtttcgttttcgttttcgtcgcgagtttcggtttcgttttttttcgcgcgttttggtttcgttttttttcgtttttatttgcgtcgtttaggtttcgttttcggttattcgcggagttcgagcggcgtcggtggtcggtgtttgttggtttttcgtagttgcggtgtcgagattgttcggttttggggttcggagagaggggttaggagtcggtttcgagtcgttttatttgggcgggggtttttatgtcgtcgagtcggttttaggttaggcgcgggatttttattttttttcgtggaggttatttttcgagttcgcggtggtggtggtttcgggagcgcggagcgtggggtcgggggaatgttttgcgtggcgggtgtatgggacgcggacgttttcgaagcgtttttcgttgacgggtgtttcgcgggagtcgtcgttgtggttagatttttcgtagtagggataatgggagtttggaggaggtttggatgtcgtaacggaggaagtcgacgtttggtttttataaatttcgagggcgttattacgtttttt

SEQ ID NO: 16620 - DNA, 1084 bp, Artificial Sequence
  chemically treated genomic DNA (Homo sapiens) CpG-island No: 16620
aaaaaacgtaataacgccctcgaaatttataaaaaccaaacgtcgacttcctccgttacgacatccaaacctcctccaaactcccattatccctactacgaaaaatctaaccacaacgacgactcccgcgaaacacccgtcaacgaaaaacgcttcgaaaacgtccgcgtcccatacacccgccacgcaaaacattcccccgaccccacgctccgcgctcccgaaaccaccaccaccgcgaactcgaaaaataacctccacgaaaaaaaataaaaatcccgcgcctaacctaaaaccgactcgacgacataaaaacccccgcccaaataaaacgactcgaaaccgactcctaacccctctctccgaaccccaaaaccgaacaatctcgacaccgcaactacgaaaaaccaacaaacaccgaccaccgacgccgctcgaactccgcgaataaccgaaaacgaaacctaaacgacgcaaataaaaacgaaaaaaaacgaaaccaaaacgcgcgaaaaaaaacgaaaccgaaactcgcgacgaaaacgaaaacgaaacgaaaccgaaaaacgcgcgcctcgcgaacgaaaaaacgcgccgcgctaaaactaaacttaaaacgcgcgaaactcgactacaaaaaaccgcgcgaaaacgcgccgaaaccgccaaaaacgcaaaaaccttcgaaacgataaacgaaaaaaaaaacccaatccgcgcgaaccataaaccaccgaacccgaaaaacccgaccgcgatccgaacaacgctcaaccgacgccccaacccgctcgaccgcaactacgcgcctataaatataacctccttatacccaattcctcgctccctaatccttcccccgaaacccctatctatccccgaaaacgtacgctatatacgcaccgctacccgaaaaaaaacgaccgcacgcgccttaatccgcgcgtatcgtctttatatacgcgaataaaaaaaaaaaaaacgcgcgaaaaaaaaaaaacgcccccgactaaaatctactccccgatccccatcccgaacgaaacgaaaaacctctaaaaaaaccgaaccgcctctaaaacat

SEQ ID NO: 16621 - DNA, 787 bp, Artificial Sequence
  chemically treated genomic DNA (Homo sapiens) CpG-island No: 16621
aggtggttgcgatgggacggaagttatgaatggtgtcggttttggtttcgtcgtagtcgtttcggttttagtttcggtttcggtttcggattggcggtagttttgcgagttgtatgcgtaggcggtcgtcgtggattttgcgtataagttttgtcgttttttgcgggataatttagtttacgatacgttcgacgtcggcgtttttttttttcgttatttcgtcgttaattttttggacgttttcggcgaggaggtgcgtcgcgtgttggtggttgggtcgacgattcggggcgcggtcgtgagcgtagaggttatggagtcggagttcgcggatatttttgtatttaaggcggcgtttacggttattcgcggagttcggaggacgtgtttacgtacgcggttattaaggttcgcgttcgtaagggtttttcgttgcgtaatatgagtttgtgcgtggtggacggcgtgcgcgatatgtggtatcggcgcgtttcgttcgagttcgacgcggtagttgtttcgcgtatcgtcgagtttcgcgataagtggacgcggcgtttgaggttgtcgcggacgttggttgttaaggtggagttggtggatatttaacgcgagggggcgttgcgttttatggtggtcgacgacgcggtcgcgggtttcgggggttcggtttagtggtagaagtgtcgtttgtttttgcgtagggttgtggtcgaggaacgttttcgtttggagtttttcgtgtcgtttaaagtgagttattttataattttatttagtttggggg

SEQ ID NO: 16622 - DNA, 787 bp, Artificial Sequence
  chemically treated genomic DNA (Homo sapiens) CpG-island No: 16622
cccccaaactaaataaaattataaaataactcactttaaacgacacgaaaaactccaaacgaaaacgttcctcgaccacaaccctacgcaaaaacaaacgacacttctaccactaaaccgaacccccgaaacccgcgaccgcgtcgtcgaccaccataaaacgcaacgccccctcgcgttaaatatccaccaactccaccttaacaaccaacgtccgcgacaacctcaaacgccgcgtccacttatcgcgaaactcgacgatacgcgaaacaactaccgcgtcgaactcgaacgaaacgcgccgataccacatatcgcgcacgccgtccaccacgcacaaactcatattacgcaacgaaaaacccttacgaacgcgaaccttaataaccgcgtacgtaaacacgtcctccgaactccgcgaataaccgtaaacgccgccttaaatacaaaaatatccgcgaactccgactccataacctctacgctcacgaccgcgccccgaatcgtcgacccaaccaccaacacgcgacgcacctcctcgccgaaaacgtccaaaaaattaacgacgaaataacgaaaaaaaaaaacgccgacgtcgaacgtatcgtaaactaaattatcccgcaaaaaacgacaaaacttatacgcaaaatccacgacgaccgcctacgcatacaactcgcaaaactaccgccaatccgaaaccgaaaccgaaactaaaaccgaaacgactacgacgaaaccaaaaccgacaccattcataacttccgtcccatcgcaaccacct

SEQ ID NO: 16623 - DNA, 787 bp, Artificial Sequence
  chemically treated genomic DNA (Homo sapiens) CpG-island No: 16623
tttttaggttaggtgggattatggggtaatttattttgggcggtacgaagaattttaggcggaagcgtttttcggttatagttttgcgtaggagtaggcggtatttttgttattgagtcgagttttcggagttcgcggtcgcgtcgtcggttattatgaagcgtagcgttttttcgcgttgaatgtttattagttttattttggtagttagcgttcgcgatagttttaggcgtcgcgtttatttgtcgcggggttcggcggtgcgcggggtagttgtcgcgtcgggttcgggcgaggcgcgtcggtgttatatgtcgcgtacgtcgtttattacgtataggtttatgttgcgtagcgagaagtttttgcgaacgcgggttttggtggtcgcgtgcgtggatacgtttttcgagtttcgcgagtggtcgtaggcgtcgttttgagtgtagaggtgttcgcgagtttcggttttatggtttttgcgtttacggtcgcgtttcgagtcgtcggtttagttattagtacgcggcgtattttttcgtcgaagacgtttaggaagttggcggcgaagtggcgggagaaggaggcgtcggcgtcgggcgtgtcgtaagttgggttgtttcgtaggaaacggtagaatttgtgcgtaaagtttacggcggtcgtttgcgtatgtagttcgtaaaattgtcgttagttcgggatcgggatcgggattgggatcggggcggttgcggcggggttagggtcggtattatttatggttttcgttttatcgtagttattt

SEQ ID NO: 16624 - DNA, 787 bp, Artificial Sequence
  chemically treated genomic DNA (Homo sapiens) CpG-island No: 16624
aaataactacgataaaacgaaaaccataaataataccgaccctaaccccgccgcaaccgccccgatcccaatcccgatcccgatcccgaactaacgacaattttacgaactacatacgcaaacgaccgccgtaaactttacgcacaaattctaccgtttcctacgaaacaacccaacttacgacacgcccgacgccgacgcctccttctcccgccacttcgccgccaacttcctaaacgtcttcgacgaaaaaatacgccgcgtactaataactaaaccgacgactcgaaacgcgaccgtaaacgcaaaaaccataaaaccgaaactcgcgaacacctctacactcaaaacgacgcctacgaccactcgcgaaactcgaaaaacgtatccacgcacgcgaccaccaaaacccgcgttcgcaaaaacttctcgctacgcaacataaacctatacgtaataaacgacgtacgcgacatataacaccgacgcgcctcgcccgaacccgacgcgacaactaccccgcgcaccgccgaaccccgcgacaaataaacgcgacgcctaaaactatcgcgaacgctaactaccaaaataaaactaataaacattcaacgcgaaaaaacgctacgcttcataataaccgacgacgcgaccgcgaactccgaaaactcgactcaataacaaaaataccgcctactcctacgcaaaactataaccgaaaaacgcttccgcctaaaattcttcgtaccgcccaaaataaattaccccataatcccacctaacctaaaaa

SEQ ID NO: 16625 - DNA, 517 bp, Artificial Sequence
  chemically treated genomic DNA (Homo sapiens) CpG-island No: 16625
gtgtttcgggaggcggattttcggtgtatttttgcgcgtgtgtatttttttttgcgtgcgtgttcgcgcgtgcgtgtttgtatatgcgcgttattttcgtattgttttggttttttgcgtttttttaggttatcgtttgttttcgtttttaggttttggtttttagtggacgagaattatcgagtttgcggggttggacgttgattgttcgggttagtatttaggcgggcgggagttgtgcggtttagggtttacgcgggtcgggtagaggttcgagtcgggattttcgagcgtgaatttcggagtcggcggcgttggggttagaggggtcgggcgggaggtggtggcggaggcgaaggggcgacgggatttgggtttggttcgtgtgtgttttcggcggtttggcgtcggtcgtcgttgtacggtgagttttagggaggcggatttgggtttcgagaaggattttcgtttggatttgtttcgtaggttcggttcgggtttttcgggagtagaatag

SEQ ID NO: 16626 - DNA, 517 bp, Artificial Sequence
  chemically treated genomic DNA (Homo sapiens) CpG-island No: 16626
ctattctactcccgaaaaacccgaaccgaacctacgaaacaaatccaaacgaaaatccttctcgaaacccaaatccgcctccctaaaactcaccgtacaacgacgaccgacgccaaaccgccgaaaacacacacgaaccaaacccaaatcccgtcgccccttcgcctccgccaccacctcccgcccgacccctctaaccccaacgccgccgactccgaaattcacgctcgaaaatcccgactcgaacctctacccgacccgcgtaaaccctaaaccgcacaactcccgcccgcctaaatactaacccgaacaatcaacgtccaaccccgcaaactcgataattctcgtccactaaaaaccaaaacctaaaaacgaaaacaaacgataacctaaaaaaacgcaaaaaaccaaaacaatacgaaaataacgcgcatatacaaacacgcacgcgcgaacacgcacgcaaaaaaaaatacacacgcgcaaaaatacaccgaaaatccgcctcccgaaacac

SEQ ID NO: 16627 - DNA, 517 bp, Artificial Sequence
  chemically treated genomic DNA (Homo sapiens) CpG-island No: 16627
ttgttttgttttcgagaggttcgggtcgggtttacggggtaaatttaggcgggggtttttttcggggtttagattcgtttttttggggtttatcgtatagcgacggtcggcgttaggtcgtcgaggatatatacgggttaggtttaggtttcgtcgttttttcgttttcgttattatttttcgttcggtttttttggttttagcgtcgtcggtttcggggtttacgttcgggggtttcggttcgagtttttattcggttcgcgtgaattttgggtcgtatagttttcgttcgtttaggtgttggttcgggtagttagcgtttagtttcgtagattcggtgattttcgtttattagaggttaaagtttgggaacgagagtaagcgatgatttgaagaggcgtaggaagttagggtagtgcggaggtggcgcgtatgtgtaagtacgtacgcgcgaatacgtacgtagggagaggtgtatacgcgtaggagtgtatcggaagttcgtttttcgggatat

SEQ ID NO: 16628 - DNA, 517 bp, Artificial Sequence
  chemically treated genomic DNA (Homo sapiens) CpG-island No: 16628
atatcccgaaaaacgaacttccgatacactcctacgcgtatacacctctccctacgtacgtattcgcgcgtacgtacttacacatacgcgccacctccgcactaccctaacttcctacgcctcttcaaatcatcgcttactctcgttcccaaactttaacctctaataaacgaaaatcaccgaatctacgaaactaaacgctaactacccgaaccaacacctaaacgaacgaaaactatacgacccaaaattcacgcgaaccgaataaaaactcgaaccgaaacccccgaacgtaaaccccgaaaccgacgacgctaaaaccaaaaaaaccgaacgaaaaataataacgaaaacgaaaaaacgacgaaacctaaacctaacccgtatatatcctcgacgacctaacgccgaccgtcgctatacgataaaccccaaaaaaacgaatctaaaccccgaaaaaaacccccgcctaaatttaccccgtaaacccgacccgaacctctcgaaaacaaaacaa

SEQ ID NO: 16629 - DNA, 793 bp, Artificial Sequence
  chemically treated genomic DNA (Homo sapiens) CpG-island No: 16629
tcgcgtttataggttgtgatgatgtttcgcgtacggagtagttgtaggtgcgtgaggatgtgtacgaggtcggttatacgggcgttgcggttgatttagggttataggacgttggtcgtgcgttgttcggagcgttcgtatagtcgtagttcggtttggtcgcgtacgattagggcggttgcggggcggggggcgttaggcgtcggcgttaggagttcgcgcgtttttcgtttttcggtagttcgtcgttatttatcgaattggtattagtcggcgggttttagggcgtttattattttgtagaagcggtatatgatttagggcggtatttcgtataagaagtgttgggcgtcgggggttgcgggttttttcgggttcggtttttcggttatggttgtcgtcgtcgggtcgggatttgtcggggttttttagggtcgcggcgggcgcgggtttgggtcggtcgggttcgcggatattgatttatttttttttcgagtcggtttcgtgcgacgttcggcggggcggaaggggcggtgttcgggttcgtcgttattttgcgcgtcgcggtcgcgcgttgggttatacgggggcgtttcgcgtcggggagggttcgggtttcggcgggtttcgcgagcggcgatcggtttttcgggttcgttcgggcggggttttggaggacgaacggcggttttcggcgttggggatagagggtagggcggaggttcgggttgttcggaaaggggtcggggtcgggtttttcgaaagtttttgggcggttttgtcggaattttgt

SEQ ID NO: 16630 - DNA, 793 bp, Artificial Sequence
  chemically treated genomic DNA (Homo sapiens) CpG-island No: 16630
acaaaattccgacaaaaccgcccaaaaactttcgaaaaacccgaccccgacccctttccgaacaacccgaacctccgccctaccctctatccccaacgccgaaaaccgccgttcgtcctccaaaaccccgcccgaacgaacccgaaaaaccgatcgccgctcgcgaaacccgccgaaacccgaaccctccccgacgcgaaacgcccccgtataacccaacgcgcgaccgcgacgcgcaaaataacgacgaacccgaacaccgccccttccgccccgccgaacgtcgcacgaaaccgactcgaaaaaaaaataaatcaatatccgcgaacccgaccgacccaaacccgcgcccgccgcgaccctaaaaaaccccgacaaatcccgacccgacgacgacaaccataaccgaaaaaccgaacccgaaaaaacccgcaacccccgacgcccaacacttcttatacgaaataccgccctaaatcatataccgcttctacaaaataataaacgccctaaaacccgccgactaataccaattcgataaataacgacgaactaccgaaaaacgaaaaacgcgcgaactcctaacgccgacgcctaacgccccccgccccgcaaccgccctaatcgtacgcgaccaaaccgaactacgactatacgaacgctccgaacaacgcacgaccaacgtcctataaccctaaatcaaccgcaacgcccgtataaccgacctcgtacacatcctcacgcacctacaactactccgtacgcgaaacatcatcacaacctataaacgcga

SEQ ID NO: 16631 - DNA, 793 bp, Artificial Sequence
  chemically treated genomic DNA (Homo sapiens) CpG-island No: 16631
gtagggtttcggtagggtcgtttaggagttttcggaaggttcggtttcggttttttttcgagtagttcgggttttcgttttgttttttgtttttaacgtcgggagtcgtcgttcgttttttagagtttcgttcgggcgagttcgggaggtcgatcgtcgttcgcggaattcgtcgggattcgggtttttttcggcgcggggcgttttcgtgtgatttagcgcgcggtcgcggcgcgtaagatggcggcgggttcgggtatcgtttttttcgtttcgtcgggcgtcgtacgaggtcggttcgaaggggaagtgagttagtgttcgcggattcggtcggtttaggttcgcgttcgtcgcggttttgagaggtttcggtaggtttcggttcggcggcggtagttatggtcggggggtcgggttcgggggagttcgtagttttcggcgtttagtattttttgtacgaggtgtcgttttgggttatgtgtcgtttttataaagtgatggacgttttggagttcgtcgattggtgttagttcggtgggtggcggcgggttgtcggggggcgggaggcgcgcgggtttttggcgtcgacgtttgacgtttttcgtttcgtagtcgttttgatcgtgcgcgattagatcgagttgcggttgtgcgagcgtttcgggtagcgtacggttagcgttttgtggttttggattaatcgtaacgttcgtgtggtcgatttcgtgtatatttttacgtatttgtagttgtttcgtgcgcgggatattattatagtttgtgagcgcgg

SEQ ID NO: 16632 - DNA, 793 bp, Artificial Sequence
  chemically treated genomic DNA (Homo sapiens) CpG-island No: 16632
ccgcgctcacaaactataataatatcccgcgcacgaaacaactacaaatacgtaaaaatatacacgaaatcgaccacacgaacgttacgattaatccaaaaccacaaaacgctaaccgtacgctacccgaaacgctcgcacaaccgcaactcgatctaatcgcgcacgatcaaaacgactacgaaacgaaaaacgtcaaacgtcgacgccaaaaacccgcgcgcctcccgccccccgacaacccgccgccacccaccgaactaacaccaatcgacgaactccaaaacgtccatcactttataaaaacgacacataacccaaaacgacacctcgtacaaaaaatactaaacgccgaaaactacgaactcccccgaacccgaccccccgaccataactaccgccgccgaaccgaaacctaccgaaacctctcaaaaccgcgacgaacgcgaacctaaaccgaccgaatccgcgaacactaactcacttccccttcgaaccgacctcgtacgacgcccgacgaaacgaaaaaaacgatacccgaacccgccgccatcttacgcgccgcgaccgcgcgctaaatcacacgaaaacgccccgcgccgaaaaaaacccgaatcccgacgaattccgcgaacgacgatcgacctcccgaactcgcccgaacgaaactctaaaaaacgaacgacgactcccgacgttaaaaacaaaaaacaaaacgaaaacccgaactactcgaaaaaaaaccgaaaccgaaccttccgaaaactcctaaacgaccctaccgaaaccctac

SEQ ID NO: 16633 - DNA, 1003 bp, Artificial Sequence
  chemically treated genomic DNA (Homo sapiens) CpG-island No: 16633
gaagtgcgtacgcgcgtcggtgggggggtcgagtaacgggagagggggcgcgcgagggagggagggggagagcgcgatttagggagaggtcggggtcgcgggcgcgcgacggcgtcgcggtttaaagtttcgagaagggtaggagcgcgcgtagtttcgataggcgaatttcggcgataggggcgttcgcggggtcgggggtcgggatgcgcgtcgagggcgggaggaagaggggcgttaggcgaaggcggttttagggaggtcgcgtcgaggacggttattcgcgagtacgggtgacgggtcgaggggagagtcgttatcggcggcggcgggagggggagggtagagaggagggacgttattcgttagtcgtgtcgttcgatttcgcgggtttttttcgcgttacgtttcgtttttgattttcgtttttcggtaagggttttcgttcgcggttacggcggttttatttatagtttttttttttcgttttttttttttttttcgttcggcgcggcggcggcggcggcggttatttttcggacggtttttattatagtttttttttcgagaggagggagcgcgcgcgtcgtcgacgtcgggatttcgtacggtcgacgtcgcgtttcgtttttttggtcggttcgcgcgttgttgtatttgcgcgttcgcgtttcgttttcggcgtcgttgcgagttcgttcgttattggttgtgatggtcgggttgggacggggaggacgggggaggggggaggttttagcggcgatgtcgttaattggcgagattttttgtttatttcggttagggaaaagggggcggatttttttagttgttgattggttgttttcggtcgtcgtttggggaaaagaggcggtttgggcgcggagggattggtttagtgggcggaatttgaatgttaaggattaatggatttttgcggatgttggggtaagtgaaggtttaggtttgggacgtttgtttgcgttgttttgaggggcgattg

SEQ ID NO: 16634 - DNA, 1003 bp, Artificial Sequence
  chemically treated genomic DNA (Homo sapiens) CpG-island No: 16634
caatcgcccctcaaaacaacgcaaacaaacgtcccaaacctaaaccttcacttaccccaacatccgcaaaaatccattaatccttaacattcaaattccgcccactaaaccaatccctccgcgcccaaaccgcctcttttccccaaacgacgaccgaaaacaaccaatcaacaactaaaaaaatccgcccccttttccctaaccgaaataaacaaaaaatctcgccaattaacgacatcgccgctaaaacctcccccctcccccgtcctccccgtcccaacccgaccatcacaaccaataacgaacgaactcgcaacgacgccgaaaacgaaacgcgaacgcgcaaatacaacaacgcgcgaaccgaccaaaaaaacgaaacgcgacgtcgaccgtacgaaatcccgacgtcgacgacgcgcgcgctccctcctctcgaaaaaaaaactataataaaaaccgtccgaaaaataaccgccgccgccgccgccgcgccgaacgaaaaaaaaaaaaaaaacgaaaaaaaaaaactataaataaaaccgccgtaaccgcgaacgaaaacccttaccgaaaaacgaaaatcaaaaacgaaacgtaacgcgaaaaaaacccgcgaaatcgaacgacacgactaacgaataacgtccctcctctctaccctccccctcccgccgccgccgataacgactctcccctcgacccgtcacccgtactcgcgaataaccgtcctcgacgcgacctccctaaaaccgccttcgcctaacgcccctcttcctcccgccctcgacgcgcatcccgacccccgaccccgcgaacgcccctatcgccgaaattcgcctatcgaaactacgcgcgctcctacccttctcgaaactttaaaccgcgacgccgtcgcgcgcccgcgaccccgacctctccctaaatcgcgctctccccctccctccctcgcgcgccccctctcccgttactcgacccccccaccgacgcgcgtacgcacttc

SEQ ID NO: 16635 - DNA, 1003 bp, Artificial Sequence
  chemically treated genomic DNA (Homo sapiens) CpG-island No: 16635
taatcgttttttagagtagcgtaaataggcgttttaagtttaggtttttatttgttttagtattcgtaagggtttattaatttttaatatttaaatttcgtttattaaattagttttttcgcgtttaagtcgttttttttttttaaacgacggtcgaaagtagttaattaatagttggaggggttcgtttttttttttttggtcgaaatggataggaaatttcgttaattgacggtatcgtcgttgagattttttttttttttcgtttttttcgttttagttcggttattatagttaatgacgggcgggttcgtagcggcgtcgagggcggggcgcgggcgcgtaggtgtagtagcgcgcgggtcggttaagagggcggggcgcgacgtcggtcgtgcggggtttcggcgtcggcggcgcgcgcgtttttttttttcggagagagggttgtggtaaaagtcgttcggaaaatggtcgtcgtcgtcgtcgtcgcgtcgagcggaggaggaggaggaggcgaggaggagagattgtgagtgggatcgtcgtggtcgcgggcggggatttttgtcggggggcgggggttaggggcgggacgtggcgcgggaggggttcgcggggtcggacgatacggttggcggatggcgttttttttttttattttttttttttcgtcgtcgtcggtggcgatttttttttcggttcgttattcgtgttcgcgggtgatcgttttcggcgcggtttttttggagtcgttttcgtttgacgtttttttttttttcgttttcgacgcgtatttcggttttcggtttcgcgggcgtttttgtcgtcggggttcgtttgtcggggttgcgcgcgtttttgtttttttcggggttttgggtcgcggcgtcgtcgcgcgttcgcggtttcggtttttttttggatcgcgttttttttttttttttttcgcgcgttttttttttcgttattcggtttttttatcggcgcgcgtgcgtatttt

SEQ ID NO: 16636 - DNA, 1003 bp, Artificial Sequence
  chemically treated genomic DNA (Homo sapiens) CpG-island No: 16636
aaaatacgcacgcgcgccgataaaaaaaccgaataacgaaaaaaaaaacgcgcgaaaaaaaaaaaaaaaaaacgcgatccaaaaaaaaaccgaaaccgcgaacgcgcgacgacgccgcgacccaaaaccccgaaaaaaacaaaaacgcgcgcaaccccgacaaacgaaccccgacgacaaaaacgcccgcgaaaccgaaaaccgaaatacgcgtcgaaaacgaaaaaaaaaaaaacgtcaaacgaaaacgactccaaaaaaaccgcgccgaaaacgatcacccgcgaacacgaataacgaaccgaaaaaaaaatcgccaccgacgacgacgaaaaaaaaaaaataaaaaaaaaaaacgccatccgccaaccgtatcgtccgaccccgcgaacccctcccgcgccacgtcccgcccctaacccccgccccccgacaaaaatccccgcccgcgaccacgacgatcccactcacaatctctcctcctcgcctcctcctcctcctccgctcgacgcgacgacgacgacgacgaccattttccgaacgacttttaccacaaccctctctccgaaaaaaaaaaacgcgcgcgccgccgacgccgaaaccccgcacgaccgacgtcgcgccccgccctcttaaccgacccgcgcgctactacacctacgcgcccgcgccccgccctcgacgccgctacgaacccgcccgtcattaactataataaccgaactaaaacgaaaaaaacgaaaaaaaaaaaaaatctcaacgacgataccgtcaattaacgaaatttcctatccatttcgaccaaaaaaaaaaaaacgaacccctccaactattaattaactactttcgaccgtcgtttaaaaaaaaaaaacgacttaaacgcgaaaaaactaatttaataaacgaaatttaaatattaaaaattaataaacccttacgaatactaaaacaaataaaaacctaaacttaaaacgcctatttacgctactctaaaaaacgatta

SEQ ID NO: 16637 - DNA, 647 bp, Artificial Sequence
  chemically treated genomic DNA (Homo sapiens) CpG-island No: 16637
gaaacggcggcgcgagaaataaagattagaaggcgttaagcggagtttagcgcgttttttcggggcggggttcggtagttaaaaggttagggggaggttcgcgtagtcggtcggtttcggggcgggattttgtatatttggaagcggcgggtggcgttttttttgtcgtttttatttattcggttcgggtgtatttgtagggatattttgtggtagtttcgtcggatttcgtcgtcggaggtttcgcgtcgtacgtttagtattcggtaaaggtcggcggtgtcgaatattttttcgtaaaggtttagtagttttatgtcgggcggagatacgatttcggaggaagtagtcgtttttagttgcgtcgggtataatttaggattgtttttttttcgcgtttaaaaagtttagggcgtttgcgttataagtattgaaggggcgtggttacgtcgcgtattcgcgttttacggcggtcgtaaaatgaggtgtggcgagttaggcgcgggttcgggtaagtaacgtcggtatgtggagttatagttttcggtcgcgcgtaggagttaggtttttagggaagtgatgttgttcgggttttttttttttttgttttggaaatttggcgttcgttttattttttagtgtttaag

SEQ ID NO: 16638 - DNA, 647 bp, Artificial Sequence
  chemically treated genomic DNA (Homo sapiens) CpG-island No: 16638
cttaaacactaaaaaataaaacgaacgccaaatttccaaaacaaaaaaaaaaaaaacccgaacaacatcacttccctaaaaacctaactcctacgcgcgaccgaaaactataactccacataccgacgttacttacccgaacccgcgcctaactcgccacacctcattttacgaccgccgtaaaacgcgaatacgcgacgtaaccacgccccttcaatacttataacgcaaacgccctaaactttttaaacgcgaaaaaaaaacaatcctaaattatacccgacgcaactaaaaacgactacttcctccgaaatcgtatctccgcccgacataaaactactaaacctttacgaaaaaatattcgacaccgccgacctttaccgaatactaaacgtacgacgcgaaacctccgacgacgaaatccgacgaaactaccacaaaatatccctacaaatacacccgaaccgaataaataaaaacgacaaaaaaaacgccacccgccgcttccaaatatacaaaatcccgccccgaaaccgaccgactacgcgaacctccccctaaccttttaactaccgaaccccgccccgaaaaaacgcgctaaactccgcttaacgccttctaatctttatttctcgcgccgccgtttc

SEQ ID NO: 16639 - DNA, 647 bp, Artificial Sequence
  chemically treated genomic DNA (Homo sapiens) CpG-island No: 16639
tttggatattaaaaggtaagacggacgttagatttttagagtaaggggaggagagattcgagtaatattatttttttgaagatttagtttttgcgcgcggtcggggattgtgattttatatgtcggcgttatttattcgggttcgcgtttgattcgttatattttattttgcggtcgtcgtaaagcgcggatgcgcggcgtggttacgtttttttagtgtttgtgacgtaggcgttttgggttttttgggcgcgaaaaagaagtagttttgggttgtattcggcgtagttgggagcggttgtttttttcggggtcgtattttcgttcggtatggggttgttggatttttgcgaggaagtgttcggtatcgtcgatttttatcgggtgttgggcgtgcgacgcgaggttttcgacggcgaggttcgacgaggttattataaggtgtttttgtaggtatattcggatcgggtgggtgagggcgataaggaggacgttattcgtcgtttttaggtatgtagggtttcgtttcgaagtcgatcggttgcgcgggtttttttttagttttttggttatcgggtttcgtttcgggggagcgcgttgagtttcgtttggcgttttttgatttttatttttcgcgtcgtcgtttt

SEQ ID NO: 16640 - DNA, 647 bp, Artificial Sequence
  chemically treated genomic DNA (Homo sapiens) CpG-island No: 16640
aaaacgacgacgcgaaaaataaaaatcaaaaaacgccaaacgaaactcaacgcgctcccccgaaacgaaacccgataaccaaaaaactaaaaaaaaacccgcgcaaccgatcgacttcgaaacgaaaccctacatacctaaaaacgacgaataacgtcctccttatcgccctcacccacccgatccgaatatacctacaaaaacaccttataataacctcgtcgaacctcgccgtcgaaaacctcgcgtcgcacgcccaacacccgataaaaatcgacgataccgaacacttcctcgcaaaaatccaacaaccccataccgaacgaaaatacgaccccgaaaaaaacaaccgctcccaactacgccgaatacaacccaaaactacttctttttcgcgcccaaaaaacccaaaacgcctacgtcacaaacactaaaaaaacgtaaccacgccgcgcatccgcgctttacgacgaccgcaaaataaaatataacgaatcaaacgcgaacccgaataaataacgccgacatataaaatcacaatccccgaccgcgcgcaaaaactaaatcttcaaaaaaataatattactcgaatctctcctccccttactctaaaaatctaacgtccgtcttaccttttaatatccaaa

SEQ ID NO: 16641 - DNA, 1048 bp, Artificial Sequence
  chemically treated genomic DNA (Homo sapiens) CpG-island No: 16641
tgtttttcgatttagtcgtcgcgttatattggaagttgttttttcgggttgttcgatttttagcgcgtttcgggaacgtgtgtaatcggtttttcggcgtttaaggttgtaggcggttcggttttttacgtttttatttttcgcgtagttttcgtttttttttttttttttcggaattcgcgttttgtttcgggttttcgggttttttttttttttttttttttcgagtaatgtttttttcggagggcggggtatgtagttatttaggttgcggggtcggcgggcgggtaggaggcggcggttcgggtttcgggatggagttgtagcgtttaggcgttagaggcggaggttcgaggtcgttatatagattgcggggttggcgggcgcggttcggcgttttgtatagcggtcggtagggtgtaggcggtcgggcggcgtagagttggttaggtaggtttcggggtttcgtgttttttttttcgttttttcgtttttttgtgttgtcgtttttttttttcgttgttttattttacggggcgaatatggcgtatagttgtcggtggcgttttttcgttcgattcgggattatcgggggcggcggcggcggggggcgtcggggtttagggggcgtttcgcggtaacgcgtttcggttttgttgttttttttcgggttttcggtcggcggtggcggtttcggggcgtttttttttttttcggttgtggcggtcgcggcggcggcggcgggaagtagcggggttggggttttagggggagcggtcgtcgttttagtagttttttcgtcgttcgtttcgttttcgttttcgttatcgtttttagtttttttagggtcggttttgtttcgggtgggttcgggtttcgacgcggcgttgtaggtttcggtcgttatcggtattaatttgcgtcggtttcgggtcgtgtttggggagagcggcgggggaggcggtagcggagaggtaagggggcgaggaatttttaagttcggggtttcgattttttgcggagatttttttttttttttattcgggat

SEQ ID NO: 16642 - DNA, 1048 bp, Artificial Sequence
  chemically treated genomic DNA (Homo sapiens) CpG-island No: 16642
atcccgaataaaaaaaaaaaaaaatctccgcaaaaaatcgaaaccccgaacttaaaaattcctcgcccccttacctctccgctaccgcctcccccgccgctctccccaaacacgacccgaaaccgacgcaaattaataccgataacgaccgaaacctacaacgccgcgtcgaaacccgaacccacccgaaacaaaaccgaccctaaaaaaactaaaaacgataacgaaaacgaaaacgaaacgaacgacgaaaaaactactaaaacgacgaccgctccccctaaaaccccaaccccgctacttcccgccgccgccgccgcgaccgccacaaccgaaaaaaaaaaaaacgccccgaaaccgccaccgccgaccgaaaacccgaaaaaaaacaacaaaaccgaaacgcgttaccgcgaaacgccccctaaaccccgacgccccccgccgccgccgcccccgataatcccgaatcgaacgaaaaaacgccaccgacaactatacgccatattcgccccgtaaaataaaacaacgaaaaaaaaaaacgacaacacaaaaaaacgaaaaaacgaaaaaaaaaacacgaaaccccgaaacctacctaaccaactctacgccgcccgaccgcctacaccctaccgaccgctatacaaaacgccgaaccgcgcccgccaaccccgcaatctatataacgacctcgaacctccgcctctaacgcctaaacgctacaactccatcccgaaacccgaaccgccgcctcctacccgcccgccgaccccgcaacctaaataactacataccccgccctccgaaaaaaacattactcgaaaaaaaaaaaaaaaaaaaaaacccgaaaacccgaaacaaaacgcgaattccgaaaaaaaaaaaaaaaaacgaaaactacgcgaaaaataaaaacgtaaaaaaccgaaccgcctacaaccttaaacgccgaaaaaccgattacacacgttcccgaaacgcgctaaaaatcgaacaacccgaaaaaacaacttccaatataacgcgacgactaaatcgaaaaaca

SEQ ID NO: 16643 - DNA, 1048 bp, Artificial Sequence
  chemically treated genomic DNA (Homo sapiens) CpG-island No: 16643
atttcggatgggggaggggaggggttttcgtagagggtcgagatttcggatttgggggtttttcgtttttttattttttcgttgtcgtttttttcgtcgttttttttaaatacggttcggaatcggcgtaggttggtgtcgatggcggtcgagatttgtagcgtcgcgtcgaagttcgggtttattcggagtagggtcggttttgaagaggttgaggacgatgacgaagacgaagacgaggcggacgacgaggaggttgttgaggcggcggtcgttttttttggaattttagtttcgttgtttttcgtcgtcgtcgtcgcggtcgttatagtcgggggggaggggggcgtttcggggtcgttatcgtcgatcgggggttcggggggaagtagtagggtcgggacgcgttgtcgcggggcgttttttaggtttcggcgtttttcgtcgtcgtcgttttcggtggtttcgggtcgggcggggaagcgttatcgatagttgtgcgttatgttcgtttcgtgaagtgaagtagcgagagggagaggcgataatataggggggcggggaggcggaggggggggtacggggtttcggaatttgtttaattagttttgcgtcgttcggtcgtttgtattttgtcggtcgttatgtagagcgtcgggtcgcgttcgttagtttcgtaatttgtatagcggtttcgggttttcgtttttgacgtttgggcgttgtaattttatttcgaggttcgggtcgtcgttttttgttcgttcgtcggtttcgtaatttggataattgtatgtttcgtttttcgggagaggtattgttcgggaaaaggaggggggaaggaagttcgggagttcggagtagagcgcgggtttcggagagagggggagggggcgaggattacgcggaggatggaggcgtagggagtcgggtcgtttgtagttttgagcgtcgagaggtcgattatatacgttttcgggacgcgttgggaatcgaatagttcgggagagtagtttttagtataacgcggcggttgggtcggggagta

SEQ ID NO: 16644 - DNA, 1048 bp, Artificial Sequence
  chemically treated genomic DNA (Homo sapiens) CpG-island No: 16644
tactccccgacccaaccgccgcgttatactaaaaactactctcccgaactattcgattcccaacgcgtcccgaaaacgtatataatcgacctctcgacgctcaaaactacaaacgacccgactccctacgcctccatcctccgcgtaatcctcgccccctccccctctctccgaaacccgcgctctactccgaactcccgaacttccttcccccctccttttcccgaacaatacctctcccgaaaaacgaaacatacaattatccaaattacgaaaccgacgaacgaacaaaaaacgacgacccgaacctcgaaataaaattacaacgcccaaacgtcaaaaacgaaaacccgaaaccgctatacaaattacgaaactaacgaacgcgacccgacgctctacataacgaccgacaaaatacaaacgaccgaacgacgcaaaactaattaaacaaattccgaaaccccgtacccccccctccgcctccccgcccccctatattatcgcctctccctctcgctacttcacttcacgaaacgaacataacgcacaactatcgataacgcttccccgcccgacccgaaaccaccgaaaacgacgacgacgaaaaacgccgaaacctaaaaaacgccccgcgacaacgcgtcccgaccctactacttccccccgaacccccgatcgacgataacgaccccgaaacgcccccctcccccccgactataacgaccgcgacgacgacgacgaaaaacaacgaaactaaaattccaaaaaaaacgaccgccgcctcaacaacctcctcgtcgtccgcctcgtcttcgtcttcgtcatcgtcctcaacctcttcaaaaccgaccctactccgaataaacccgaacttcgacgcgacgctacaaatctcgaccgccatcgacaccaacctacgccgattccgaaccgtatttaaaaaaaacgacgaaaaaaacgacaacgaaaaaataaaaaaacgaaaaacccccaaatccgaaatctcgaccctctacgaaaacccctcccctcccccatccgaaat

SEQ ID NO: 16645 - DNA, 1240 bp, Artificial Sequence
  chemically treated genomic DNA (Homo sapiens) CpG-island No: 16645
ttcgttcgcggtatcgacgtttttttcggttttcgggagggatttttgcggggtcgttagttttagcgttttcgcggatagtacgcgttttttttatcgagtttgcgaggaaggcgtttcgttttttattttttcgggagcgagttttagttttcgggacgtagtttatacgcgttagtttagtacgaatcggtttcgggtagggtcgtatttattttcgggattagttcgcgtttcgtatttcgtttttcggcgttcgttttggataggtgttttttgttttttcgggattttcgtatcgggatatcgcgcgtttttcgtttttttcgcgggcgtaggagtttgaggcggcggttcggggacgcggttaatttgggagagagcgggggcgggggtcggttggggaaggggtcgttcggaggcggaggggtcgtcgcgggagtttggaagttcgcggggtcgggtcggggcggcggggcgggtcggaggcgttggtcggggcgacggttatttatttttttgttcgggatttattgcggtttttttaggtcgaacgggttttcgaaggcgcggtgttcgggtattatgcgtaggtcgttcggggagcgtattagttttttggcgtcgcggcgcgcggatatttcggaggatatgacgtcgttttagtttttcggttagcggtttcgtattcggtttttcgtttagttcggggtatcgttcgtttcgtttcggttcgcgcgcggttgatagcgtcggcgtttaatcgttaagttcgttacggagcgcggattaatcggagtttgaatttcgttttatcgttgttttttttaattcgtgtaagggtatcgtttttgtaattttgaggtcgattattaatcggcggcgagggttggttcgggtacgtttcgttttttttagggagattgagattttggattggttagttagttagttacgttagcgtcgtttcgtttttgattggtgtagtttatttagggtgttaggcgtttattggaggagaaggtcgagaggagtaggacggcgggaagaggagtgcggaattcgcgggaggtgaggttcgtcgagtcgggttgcgagtcgggttgcgagtcgggcggtagcggggtcggaggtcgtgggcggtagcgggcgtgaggggtgaggtagggttaaggggcgggggcggtcgcgggtttttattgttcgagtttgtgggagtaggcgggtttggggttgtagt

SEQ ID NO: 16646 - DNA, 1240 bp, Artificial Sequence
  chemically treated genomic DNA (Homo sapiens) CpG-island No: 16646
actacaaccccaaacccgcctactcccacaaactcgaacaataaaaacccgcgaccgcccccgccccttaaccctacctcacccctcacgcccgctaccgcccacgacctccgaccccgctaccgcccgactcgcaacccgactcgcaacccgactcgacgaacctcacctcccgcgaattccgcactcctcttcccgccgtcctactcctctcgaccttctcctccaataaacgcctaacaccctaaataaactacaccaatcaaaaacgaaacgacgctaacgtaactaactaactaaccaatccaaaatctcaatctccctaaaaaaaacgaaacgtacccgaaccaaccctcgccgccgattaataatcgacctcaaaattacaaaaacgatacccttacacgaattaaaaaaaacaacgataaaacgaaattcaaactccgattaatccgcgctccgtaacgaacttaacgattaaacgccgacgctatcaaccgcgcgcgaaccgaaacgaaacgaacgataccccgaactaaacgaaaaaccgaatacgaaaccgctaaccgaaaaactaaaacgacgtcatatcctccgaaatatccgcgcgccgcgacgccaaaaaactaatacgctccccgaacgacctacgcataatacccgaacaccgcgccttcgaaaacccgttcgacctaaaaaaaccgcaataaatcccgaacaaaaaaataaataaccgtcgccccgaccaacgcctccgacccgccccgccgccccgacccgaccccgcgaacttccaaactcccgcgacgacccctccgcctccgaacgaccccttccccaaccgacccccgcccccgctctctcccaaattaaccgcgtccccgaaccgccgcctcaaactcctacgcccgcgaaaaaaacgaaaaacgcgcgatatcccgatacgaaaatcccgaaaaaacaaaaaacacctatccaaaacgaacgccgaaaaacgaaatacgaaacgcgaactaatcccgaaaataaatacgaccctacccgaaaccgattcgtactaaactaacgcgtataaactacgtcccgaaaactaaaactcgctcccgaaaaaataaaaaacgaaacgccttcctcgcaaactcgataaaaaaaacgcgtactatccgcgaaaacgctaaaactaacgaccccgcaaaaatccctcccgaaaaccgaaaaaaacgtcgataccgcgaacgaa

SEQ ID NO: 16647 - DNA, 1240 bp, Artificial Sequence
  chemically treated genomic DNA (Homo sapiens) CpG-island No: 16647
gttgtagttttaggttcgtttgtttttataggttcgggtaatggagattcgcggtcgttttcgttttttgattttgttttattttttacgttcgttgtcgtttacgattttcgatttcgttgtcgttcggttcgtagttcggttcgtagttcggttcggcgggttttatttttcgcgggtttcgtattttttttttcgtcgttttgtttttttcggtttttttttttaataggcgtttagtattttgagtgggttatattaattagagacgaagcggcgttaacgtgattgattaattaattaatttaaagttttaatttttttgagaggggcggagcgtattcgggttagttttcgtcgtcgattggtgatcgattttagggttgtaggggcggtgtttttatacggattggagagggtagcgatggggcggagtttaagtttcgattagttcgcgtttcgtggcgggtttggcgattggacgtcggcgttgttagtcgcgcgcggatcggggcggggcgggcggtgtttcgggttgggcgaggggtcgggtgcggggtcgttggtcgagaggttgaggcggcgttatgtttttcgaggtgttcgcgcgtcgcgacgttaagaagttggtgcgtttttcgagcggtttgcgtatggtgttcgaatatcgcgttttcggaagttcgttcggtttggaggagtcgtagtgggtttcggataaggaggtgggtggtcgtcgtttcggttagcgttttcgattcgtttcgtcgtttcggttcggtttcgcgggtttttaggttttcgcgacgattttttcgttttcgggcggttttttttttagtcggttttcgttttcgtttttttttaggttggtcgcgttttcgggtcgtcgttttaggtttttacgttcgcggggagggcgggaggcgcgcggtgtttcggtgcgggggtttcgggagggtaggaggtatttgtttagggcgggcgtcgggaggcggggtgcggggcgcgggttggtttcgggggtgggtgcggttttgttcgaggtcggttcgtgttgggttagcgcgtgtggattgcgtttcgagagttggggttcgttttcgagaaagtggaaggcggagcgtttttttcgtaggttcggtggggagggcgcgtgttgttcgcggaagcgttggagttggcggtttcgtaggggtttttttcgggaatcgggggaggcgtcggtgtcgcgggcggg

SEQ ID NO: 16648 - DNA, 1240 bp, Artificial Sequence
  chemically treated genomic DNA (Homo sapiens) CpG-island No: 16648
cccgcccgcgacaccgacgcctcccccgattcccgaaaaaaacccctacgaaaccgccaactccaacgcttccgcgaacaacacgcgccctccccaccgaacctacgaaaaaaacgctccgccttccactttctcgaaaacgaaccccaactctcgaaacgcaatccacacgcgctaacccaacacgaaccgacctcgaacaaaaccgcacccacccccgaaaccaacccgcgccccgcaccccgcctcccgacgcccgccctaaacaaatacctcctaccctcccgaaacccccgcaccgaaacaccgcgcgcctcccgccctccccgcgaacgtaaaaacctaaaacgacgacccgaaaacgcgaccaacctaaaaaaaaacgaaaacgaaaaccgactaaaaaaaaaaccgcccgaaaacgaaaaaatcgtcgcgaaaacctaaaaacccgcgaaaccgaaccgaaacgacgaaacgaatcgaaaacgctaaccgaaacgacgaccacccacctccttatccgaaacccactacgactcctccaaaccgaacgaacttccgaaaacgcgatattcgaacaccatacgcaaaccgctcgaaaaacgcaccaacttcttaacgtcgcgacgcgcgaacacctcgaaaaacataacgccgcctcaacctctcgaccaacgaccccgcacccgacccctcgcccaacccgaaacaccgcccgccccgccccgatccgcgcgcgactaacaacgccgacgtccaatcgccaaacccgccacgaaacgcgaactaatcgaaacttaaactccgccccatcgctaccctctccaatccgtataaaaacaccgcccctacaaccctaaaatcgatcaccaatcgacgacgaaaactaacccgaatacgctccgcccctctcaaaaaaattaaaactttaaattaattaattaatcaatcacgttaacgccgcttcgtctctaattaatataacccactcaaaatactaaacgcctattaaaaaaaaaaaccgaaaaaaacaaaacgacgaaaaaaaaaatacgaaacccgcgaaaaataaaacccgccgaaccgaactacgaaccgaactacgaaccgaacgacaacgaaatcgaaaatcgtaaacgacaacgaacgtaaaaaataaaacaaaatcaaaaaacgaaaacgaccgcgaatctccattacccgaacctataaaaacaaacgaacctaaaactacaac

SEQ ID NO: 16649 - DNA, 510 bp, Artificial Sequence
  chemically treated genomic DNA (Homo sapiens) CpG-island No: 16649
gacggacgtttgtgttttatgtttttagggttgtcgttttattacggttttttcggaaaacgggggcgttgagaagtttaatttttagttatatatgtcgttatcgtttatagggttttcgacggcgatgttggtgatagcgttttttgcgtgggcgttatttttttcgtgtttttcgcgtttgtagttaggtacgacggtgtgggtgtgttcgttcggggtagaggagttgtagggttcgcggtaggcggcgttgtgtaagtagcgacgtcgcggttcgaggaagtggaggcggtgaacgcgcgtgggcgcgtttttcgggatacggcgttggttttgcggcgttatttgttgggtattttttaatcgatggtgacgtcgtcgttgtcgttcggcgatcggtataaggagtttgcggtggtggcgggcgttgggtttacgtttttgaggcgttttaagttttttaagtttgttttgttggatcgcgtaggttattttgttcgttggttt

SEQ ID NO: 16650 - DNA, 510 bp, Artificial Sequence
  chemically treated genomic DNA (Homo sapiens) CpG-island No: 16650
aaaccaacgaacaaaataacctacgcgatccaacaaaacaaacttaaaaaacttaaaacgcctcaaaaacgtaaacccaacgcccgccaccaccgcaaactccttataccgatcgccgaacgacaacgacgacgtcaccatcgattaaaaaatacccaacaaataacgccgcaaaaccaacgccgtatcccgaaaaacgcgcccacgcgcgttcaccgcctccacttcctcgaaccgcgacgtcgctacttacacaacgccgcctaccgcgaaccctacaactcctctaccccgaacgaacacacccacaccgtcgtacctaactacaaacgcgaaaaacacgaaaaaaataacgcccacgcaaaaaacgctatcaccaacatcgccgtcgaaaaccctataaacgataacgacatatataactaaaaattaaacttctcaacgcccccgttttccgaaaaaaccgtaataaaacgacaaccctaaaaacataaaacacaaacgtccgtc

SEQ ID NO: 16651 - DNA, 510 bp, Artificial Sequence
  chemically treated genomic DNA (Homo sapiens) CpG-island No: 16651
gggttagcgggtagggtggtttacgcggtttagtagaataggtttagggggtttgaggcgttttaagagcgtgggtttagcgttcgttattatcgtaaattttttgtgtcggtcgtcgggcggtagcgacggcgttattatcgattagggagtgtttagtaggtagcgtcgtagagttagcgtcgtgtttcgggaggcgcgtttacgcgcgtttatcgtttttattttttcgggtcgcgacgtcgttgtttgtatagcgtcgtttgtcgcgagttttgtagtttttttgtttcgggcgggtatatttatatcgtcgtgtttggttgtaggcgcggggagtacggggagagtggcgtttacgtagggagcgttgttattagtatcgtcgtcgggggttttgtgggcggtggcgatatatatagttggaagttgggttttttagcgttttcgtttttcgagaaagtcgtgatgaagcggtagttttggaaatataaaatatagacgttcgtt

SEQ ID NO: 16652 - DNA, 510 bp, Artificial Sequence
  chemically treated genomic DNA (Homo sapiens) CpG-island No: 16652
aacgaacgtctatattttatatttccaaaactaccgcttcatcacgactttctcgaaaaacgaaaacgctaaaaaacccaacttccaactatatatatcgccaccgcccacaaaacccccgacgacgatactaataacaacgctccctacgtaaacgccactctccccgtactccccgcgcctacaaccaaacacgacgatataaatatacccgcccgaaacaaaaaaactacaaaactcgcgacaaacgacgctatacaaacaacgacgtcgcgacccgaaaaaataaaaacgataaacgcgcgtaaacgcgcctcccgaaacacgacgctaactctacgacgctacctactaaacactccctaatcgataataacgccgtcgctaccgcccgacgaccgacacaaaaaatttacgataataacgaacgctaaacccacgctcttaaaacgcctcaaaccccctaaacctattctactaaaccgcgtaaaccaccctacccgctaaccc

SEQ ID NO: 16653 - DNA, 695 bp, Artificial Sequence
  chemically treated genomic DNA (Homo sapiens) CpG-island No: 16653
cgtgggaggtcgcgattagcgatttcgtttattttttttagtcggttgttacgtaattgtaacgatagttagttagacgcggtagcgtcggatggcgggaggcgggagttggaggttaagggaagcgttgggcggaagtggttgtggttttgttttttggtttttgttggttgtgtggcggtttcgcggttcgtaggtcgttcgttgagcgtttttgtttagtcgcggttatgagtcggtatagtcggttgtagaggtaggttttgagtttgtatcgcgatttgttgcgcgtcgggcgtgggaagtcgggcgtcgaggcgcgagtgcgggtagagtttcggtagtatgcgggtttgtcgcggttcgacgtgttgcgtatcgagtatttgtatcgtcgcgggcggcgttagttgtagttgttacgttcgggttacgttatcgttatgggcgttttcgtacgttcgcgggtttcgatcggggagtttggcggcgtgggttgttagtttgacgacggcgatagtttaaggaatttttacgatagtacgggggtatcggagattcgtttcgacggacggtgataggcgaagagtcgaattcgttcgatggcgtggtggagttaggaggttcgtttgattgtatggggggattggggaattcgtttaaggtgagaggttttaagagattagtttgacgaa

SEQ ID NO: 16654 - DNA, 695 bp, Artificial Sequence
  chemically treated genomic DNA (Homo sapiens) CpG-island No: 16654
ttcgtcaaactaatctcttaaaacctctcaccttaaacgaattccccaatccccccatacaatcaaacgaacctcctaactccaccacgccatcgaacgaattcgactcttcgcctatcaccgtccgtcgaaacgaatctccgatacccccgtactatcgtaaaaattccttaaactatcgccgtcgtcaaactaacaacccacgccgccaaactccccgatcgaaacccgcgaacgtacgaaaacgcccataacgataacgtaacccgaacgtaacaactacaactaacgccgcccgcgacgatacaaatactcgatacgcaacacgtcgaaccgcgacaaacccgcatactaccgaaactctacccgcactcgcgcctcgacgcccgacttcccacgcccgacgcgcaacaaatcgcgatacaaactcaaaacctacctctacaaccgactataccgactcataaccgcgactaaacaaaaacgctcaacgaacgacctacgaaccgcgaaaccgccacacaaccaacaaaaaccaaaaaacaaaaccacaaccacttccgcccaacgcttcccttaacctccaactcccgcctcccgccatccgacgctaccgcgtctaactaactatcgttacaattacgtaacaaccgactaaaaaaaataaacgaaatcgctaatcgcgacctcccacg

SEQ ID NO: 16655 - DNA, 695 bp, Artificial Sequence
  chemically treated genomic DNA (Homo sapiens) CpG-island No: 16655
ttcgttaagttagttttttaagattttttattttaggcgggttttttagtttttttatgtagttaggcgagttttttggttttattacgttatcgagcgagttcggtttttcgtttgttatcgttcgtcggggcgggttttcggtgttttcgtgttgtcgtgggggttttttggattgtcgtcgtcgttaggttggtaatttacgtcgttaggtttttcggtcggggttcgcgggcgtacgaaggcgtttatggcggtggcgtggttcgagcgtagtagttgtagttggcgtcgttcgcggcggtataggtattcgatgcgtagtacgtcggatcgcggtaggttcgtatgttgtcggaattttgttcgtattcgcgtttcggcgttcggttttttacgttcggcgcgtagtagatcgcggtataggtttagaatttgtttttgtagtcggttgtgtcggtttatgatcgcggttaagtagagacgtttagcgaacgatttgcgaatcgcggagtcgttatatagttagtaaaggttaaagggtaaagttatagttattttcgtttagcgttttttttggtttttaattttcgtttttcgttattcggcgttgtcgcgtttgattggttgtcgttgtagttacgtaatagtcggttgggagaagtgggcggagtcgttggtcgcggttttttacg

SEQ ID NO: 16656 - DNA, 695 bp, Artificial Sequence
  chemically treated genomic DNA (Homo sapiens) CpG-island No: 16656
cgtaaaaaaccgcgaccaacgactccgcccacttctcccaaccgactattacgtaactacaacgacaaccaatcaaacgcgacaacgccgaataacgaaaaacgaaaattaaaaaccaaaaaaaacgctaaacgaaaataactataactttaccctttaacctttactaactatataacgactccgcgattcgcaaatcgttcgctaaacgtctctacttaaccgcgatcataaaccgacacaaccgactacaaaaacaaattctaaacctataccgcgatctactacgcgccgaacgtaaaaaaccgaacgccgaaacgcgaatacgaacaaaattccgacaacatacgaacctaccgcgatccgacgtactacgcatcgaatacctataccgccgcgaacgacgccaactacaactactacgctcgaaccacgccaccgccataaacgccttcgtacgcccgcgaaccccgaccgaaaaacctaacgacgtaaattaccaacctaacgacgacgacaatccaaaaaacccccacgacaacacgaaaacaccgaaaacccgccccgacgaacgataacaaacgaaaaaccgaactcgctcgataacgtaataaaaccaaaaaactcgcctaactacataaaaaaactaaaaaacccgcctaaaataaaaaatcttaaaaaactaacttaacgaa

SEQ ID NO: 16657 - DNA, 695 bp, Artificial Sequence
  chemically treated genomic DNA (Homo sapiens) CpG-island No: 16657
aagtcgttttttttgaagtgggagatggtcggggaggcgtagtttcgtcgtttttaagcggcggttttcgagcggcgattattttattattttttaatttagtttttttcggtttttcgtttttttttcgatttcgttttcgaaattattagtttaatttatttttttttattttagatattttgttaggcgatagttacgtcgattttggtgttcgcggggtttagtttaaagaagggagaagtcgtttgtttcgtgtagcgttcgttataacggtttttttaatcgtttttagcggtgataatcgtttacggagttgcgtagtatagttattggtttggggggatgggagggaacgagtaagaagtggggggcggagcgagaattgcgaaggcggtcggttttattttcgcgagacgggaaagtcggtttcgtatggcgttggcggtacgtagcgcgtttgcgcggtggcgggttgcgtagttgttgggggcgaggtagatcgagtagtagttgttttagttaaagagttgtagcgcgtatcgttttttttgtttacgttagaattatttagtttttagagcgtattattttgtcgtttcggcgcgatggtaatggttcgttttgttagtgtgtataacgaatcgtgtcgtttggagcgtatttttagtcgaggggaagatttttttaagtta

SEQ ID NO: 16658 - DNA, 695 bp, Artificial Sequence
  chemically treated genomic DNA (Homo sapiens) CpG-island No: 16658
taacttaaaaaaatcttcccctcgactaaaaatacgctccaaacgacacgattcgttatacacactaacaaaacgaaccattaccatcgcgccgaaacgacaaaataatacgctctaaaaactaaataattctaacgtaaacaaaaaaaacgatacgcgctacaactctttaactaaaacaactactactcgatctacctcgcccccaacaactacgcaacccgccaccgcgcaaacgcgctacgtaccgccaacgccatacgaaaccgactttcccgtctcgcgaaaataaaaccgaccgccttcgcaattctcgctccgccccccacttcttactcgttccctcccatccccccaaaccaataactatactacgcaactccgtaaacgattatcaccgctaaaaacgattaaaaaaaccgttataacgaacgctacacgaaacaaacgacttctcccttctttaaactaaaccccgcgaacaccaaaatcgacgtaactatcgcctaacaaaatatctaaaataaaaaaaaataaattaaactaataatttcgaaaacgaaatcgaaaaaaaaacgaaaaaccgaaaaaaactaaattaaaaaataataaaataatcgccgctcgaaaaccgccgcttaaaaacgacgaaactacgcctccccgaccatctcccacttcaaaaaaaacgactt

SEQ ID NO: 16659 - DNA, 695 bp, Artificial Sequence
  chemically treated genomic DNA (Homo sapiens) CpG-island No: 16659
taatttgaaggagtttttttttcggttggaaatgcgttttaaacggtacggttcgttgtatatattggtagaacgagttattgttatcgcgtcgaggcggtagaatggtacgttttgaaagttggatggttttaacgtaagtaagaaaaacggtgcgcgttgtagttttttaattggaatagttgttgttcggtttatttcgtttttaatagttgcgtaattcgttatcgcgtaggcgcgttgcgtgtcgttagcgttatgcgaaatcgattttttcgtttcgcgagagtggggtcggtcgttttcgtagttttcgtttcgttttttattttttgttcgtttttttttatttttttaagttagtagttgtgttgcgtagtttcgtaagcggttgttatcgttggagacggttgggagaatcgttgtggcgagcgttatacgaggtaaacgattttttttttttttgaattggatttcgcgagtattagagtcggcgtaattatcgtttgatagggtatttgaagtaaaagggggtaggttgggttggtggtttcgagagcggagtcgggagaaggacgaaaggtcgggaggggttgggttggggggtagtggggtggtcgtcgttcggaggtcgtcgtttggaagcggcggggttgcgttttttcgattattttttattttagggagggcggttt

SEQ ID NO: 16660 - DNA, 695 bp, Artificial Sequence
  chemically treated genomic DNA (Homo sapiens) CpG-island No: 16660
aaaccgccctccctaaaataaaaaataatcgaaaaaacgcaaccccgccgcttccaaacgacgacctccgaacgacgaccaccccactaccccccaacccaacccctcccgacctttcgtccttctcccgactccgctctcgaaaccaccaacccaacctacccccttttacttcaaataccctatcaaacgataattacgccgactctaatactcgcgaaatccaattcaaaaaaaaaaaaaatcgtttacctcgtataacgctcgccacaacgattctcccaaccgtctccaacgataacaaccgcttacgaaactacgcaacacaactactaacttaaaaaaataaaaaaaaacgaacaaaaaataaaaaacgaaacgaaaactacgaaaacgaccgaccccactctcgcgaaacgaaaaaatcgatttcgcataacgctaacgacacgcaacgcgcctacgcgataacgaattacgcaactattaaaaacgaaataaaccgaacaacaactattccaattaaaaaactacaacgcgcaccgtttttcttacttacgttaaaaccatccaactttcaaaacgtaccattctaccgcctcgacgcgataacaataactcgttctaccaatatatacaacgaaccgtaccgtttaaaacgcatttccaaccgaaaaaaaaactccttcaaatta

SEQ ID NO: 16661 - DNA, 589 bp, Artificial Sequence
  chemically treated genomic DNA (Homo sapiens) CpG-island No: 16661
tgtattgcgcgtttacgatgtcgtcgattatattgtcggtaaatttatcgtttatgatttttagtttattggttattacggcggttaggcgtagtttgtcgcgtaggtatttagtaaagaaagtaaagtcgtcggaggtaatcgttattttttagtttagcgtttttagtttgagtattagttgcgttaagtttggtattagcggtagatttttacgtatttgttgtagaatattggcgttagcgttttttagcgtcgttatacggttgcgtaggttggcggtaaaatcgagttcgtcgcgtatcgttcgttcggttattttcgttattatttcgttcgttttcgtttagttggttattttattaatatatttaatttggatggcggtggagtttatatttattattagtaaattcggcgtgcgtaggtgcgggattttttttagcggggcgatatttcgttgcgtttcgtggttaagcgtgtatttcgtgcggtgagtgaatttgttcgattaattaatttgataatttttacgtattaggcgggaataattattatgggcgtatttaagttgtttggtaatgggtta

SEQ ID NO: 16662 - DNA, 589 bp, Artificial Sequence
  chemically treated genomic DNA (Homo sapiens) CpG-island No: 16662
taacccattaccaaacaacttaaatacgcccataataattattcccgcctaatacgtaaaaattatcaaattaattaatcgaacaaattcactcaccgcacgaaatacacgcttaaccacgaaacgcaacgaaatatcgccccgctaaaaaaaatcccgcacctacgcacgccgaatttactaataataaatataaactccaccgccatccaaattaaatatattaataaaataaccaactaaacgaaaacgaacgaaataataacgaaaataaccgaacgaacgatacgcgacgaactcgattttaccgccaacctacgcaaccgtataacgacgctaaaaaacgctaacgccaatattctacaacaaatacgtaaaaatctaccgctaataccaaacttaacgcaactaatactcaaactaaaaacgctaaactaaaaaataacgattacctccgacgactttactttctttactaaatacctacgcgacaaactacgcctaaccgccgtaataaccaataaactaaaaatcataaacgataaatttaccgacaatataatcgacgacatcgtaaacgcgcaataca

SEQ ID NO: 16663 - DNA, 589 bp, Artificial Sequence
  chemically treated genomic DNA (Homo sapiens) CpG-island No: 16663
tgatttattattaagtaatttgggtgcgtttatggtaattgttttcgtttggtgcgtgaaaattattaagttgattggtcgggtaggtttatttatcgtacggggtatacgtttggttacgaagcgtagcggaatgtcgtttcgttggggaaaatttcgtatttgcgtacgtcgggtttgttggtgatggatatggattttatcgttatttagattgaatgtattgatgaaatggttaattgggcggaaacgggcgagatggtggcgaaagtaatcgaacgggcgatgcgcggcgaattcgattttatcgttagtttgcgtagtcgtgtggcgacgttgaaaggcgttgacgttaatattttgtaataggtgcgtgaaaatttgtcgttgatgttaggtttaacgtaattggtgtttaagttggaaacgttgggttggaaagtggcgattgttttcggcggttttattttttttgttgaatatttgcgcgataagttgcgtttgatcgtcgtggtagttaatgaattggagattatggacggtaaatttatcggtaatgtgatcggcgatatcgtagacgcgtagtata

SEQ ID NO: 16664 - DNA, 589 bp, Artificial Sequence
  chemically treated genomic DNA (Homo sapiens) CpG-island No: 16664
tatactacgcgtctacgatatcgccgatcacattaccgataaatttaccgtccataatctccaattcattaactaccacgacgatcaaacgcaacttatcgcgcaaatattcaacaaaaaaaataaaaccgccgaaaacaatcgccactttccaacccaacgtttccaacttaaacaccaattacgttaaacctaacatcaacgacaaattttcacgcacctattacaaaatattaacgtcaacgcctttcaacgtcgccacacgactacgcaaactaacgataaaatcgaattcgccgcgcatcgcccgttcgattactttcgccaccatctcgcccgtttccgcccaattaaccatttcatcaatacattcaatctaaataacgataaaatccatatccatcaccaacaaacccgacgtacgcaaatacgaaattttccccaacgaaacgacattccgctacgcttcgtaaccaaacgtataccccgtacgataaataaacctacccgaccaatcaacttaataattttcacgcaccaaacgaaaacaattaccataaacgcacccaaattacttaataataaatca

SEQ ID NO: 16665 - DNA, 1179 bp, Artificial Sequence
  chemically treated genomic DNA (Homo sapiens) CpG-island No: 16665
  unsure (1078)
cgcggtgatgttgcgtcgaggttgaggcgcggggttggagagtcgtcgcgaaggcgacggttgtggtacgagtttcgcggagtgtgcggttttgagagatcgattaggattcggcgcgaggatgggaggcgcgcgttttcggcggggaggggttgattattttattgttaggttaagtttgcgtttttttttcggttagatgagttttattcgggggttcgacggaatgtttatgggggttcgtatttattagtaacgtattgtttgttcggcgacggttttcggtgttttttttatgttcgcggtttatttttcgttttaatatattatagcgaaagttttattttttaattcgttttgggtttattttttttggttttttttaatcgtcgcgttatttttcgataaacgttttgcgttttgtagtagttcgcgtagttgatatttatttttagtggttattcggatttggtatagcgtgtttttggttttttttttatcgttgtgggtattcggttgtttcgtcgttcgtattttcggtttaatttgtttcgtacgatttttttaatttagttttaattatcgtttttatgatagcgtttatagttttttttgtttatattttcgttgtgttcgtacggtcggagcgtattggttaatttttttttattttgatattttttttatattatatcgttcgttggtatcggttgtttaatatgtgtcggatcgtcgtatagcggttattcgattttaattttacgatttgtattgatcggtttattttgtattagtacgattttcggcgatattaatgacgtggtgatcgtttgattagattgtttttggataatacgatcgtcggtgattagaggatgtgtttttaggagtttgagtagttatgcgttagattgtagagtacgttcggcgacgtttcgttatttttttgatgcgtgggttacgtagcgtgtgtattgggcgtggttagacgagacgattgtttgttgattattattttattttgcgcgtattgtatttacgaattacgaggtacgggcgtagtttattcgtttttatntagtgacggatggcgtcgattttttgttagttcgcgttattttttaggttcgggggggaagatttaaagtattttttttttttttggtttatggattatat

SEQ ID NO: 16666 - DNA, 1179 bp, Artificial Sequence
  chemically treated genomic DNA (Homo sapiens) CpG-island No: 16666
  unsure (102)
atataatccataaaccaaaaaaaaaaaaaatactttaaatcttcccccccgaacctaaaaaataacgcgaactaacaaaaaatcgacgccatccgtcactanataaaaacgaataaactacgcccgtacctcgtaattcgtaaatacaatacgcgcaaaataaaataataatcaacaaacaatcgtctcgtctaaccacgcccaatacacacgctacgtaacccacgcatcaaaaaaataacgaaacgtcgccgaacgtactctacaatctaacgcataactactcaaactcctaaaaacacatcctctaatcaccgacgatcgtattatccaaaaacaatctaatcaaacgatcaccacgtcattaatatcgccgaaaatcgtactaatacaaaataaaccgatcaatacaaatcgtaaaattaaaatcgaataaccgctatacgacgatccgacacatattaaacaaccgataccaacgaacgatataatataaaaaaaatatcaaaataaaaaaaaattaaccaatacgctccgaccgtacgaacacaacgaaaatataaacaaaaaaaactataaacgctatcataaaaacgataattaaaactaaattaaaaaaatcgtacgaaacaaattaaaccgaaaatacgaacgacgaaacaaccgaatacccacaacgataaaaaaaaaaccaaaaacacgctataccaaatccgaataaccactaaaaataaatatcaactacgcgaactactacaaaacgcaaaacgtttatcgaaaaataacgcgacgattaaaaaaaaccaaaaaaaataaacccaaaacgaattaaaaaataaaactttcgctataatatattaaaacgaaaaataaaccgcgaacataaaaaaaacaccgaaaaccgtcgccgaacaaacaatacgttactaataaatacgaacccccataaacattccgtcgaacccccgaataaaactcatctaaccgaaaaaaaaacgcaaacttaacctaacaataaaataatcaacccctccccgccgaaaacgcgcgcctcccatcctcgcgccgaatcctaatcgatctctcaaaaccgcacactccgcgaaactcgtaccacaaccgtcgccttcgcgacgactctccaaccccgcgcctcaacctcgacgcaacatcaccgcg

SEQ ID NO: 16667 - DNA, 1179 bp, Artificial Sequence
  chemically treated genomic DNA (Homo sapiens) CpG-island No: 16667
  unsure (102)
atatagtttatagattaagggaaaaagaaatattttgagttttttttttcgggtttgaaggataacgcgggttgatagaggatcgacgttattcgttattgnatagagacgagtgagttgcgttcgtgtttcgtagttcgtaggtatagtacgcgtagggtgagatagtaattagtaagtagtcgtttcgtttagttacgtttagtatatacgttgcgtaatttacgtattaagaagatgacgggacgtcgtcgggcgtgttttgtagtttggcgtatagttgtttaagtttttggaaatatattttttggttatcggcggtcgtattatttaggagtagtttgattaggcgattattacgttattggtatcgtcggaggtcgtattagtatagagtgagtcgattaatataaatcgtgaggttaggatcggatgatcgttgtacgacggttcggtatatgttgggtagtcggtgttagcgggcggtgtagtgtaggaggaatgttagggtgaggaagggttgattagtgcgtttcgatcgtgcgaatatagcgaaggtatgaatagaagaggttgtaggcgttattatgggggcggtgattgaggttggattagaaggatcgtgcggggtaggttagatcggaagtgcgagcgacgaggtagtcggatatttatagcggtagaggggaggttaaaggtacgttatgttaagttcgagtgattattgagagtggatattagttacgcgggttgttgtaaggcgtaaagcgtttatcggaggatggcgcgacgattagaggaaattaggagagatggatttagagcgagttgagagatgaaattttcgttgtggtgtattagggcgaagagtgaatcgcgggtatagggagaatatcgagggtcgtcgtcgagtaggtagtacgttgttggtaagtgcgaatttttatgagtatttcgtcgaattttcgaatgggatttatttgatcgagggaggagcgtagatttgatttggtagtaagatagttaattttttttcgtcgggagcgcgcgttttttattttcgcgtcgggttttgatcggttttttagagtcgtatatttcgcggagttcgtgttatagtcgtcgttttcgcggcggttttttagtttcgcgttttagtttcggcgtagtattatcgcg

SEQ ID NO: 16668 - DNA, 1179 bp, Artificial Sequence
  chemically treated genomic DNA (Homo sapiens) CpG-island No: 16668
  unsure (1078)
cgcgataatactacgccgaaactaaaacgcgaaactaaaaaaccgccgcgaaaacgacgactataacacgaactccgcgaaatatacgactctaaaaaaccgatcaaaacccgacgcgaaaataaaaaacgcgcgctcccgacgaaaaaaaattaactatcttactaccaaatcaaatctacgctcctccctcgatcaaataaatcccattcgaaaattcgacgaaatactcataaaaattcgcacttaccaacaacgtactacctactcgacgacgaccctcgatattctccctatacccgcgattcactcttcgccctaatacaccacaacgaaaatttcatctctcaactcgctctaaatccatctctcctaatttcctctaatcgtcgcgccatcctccgataaacgctttacgccttacaacaacccgcgtaactaatatccactctcaataatcactcgaacttaacataacgtacctttaacctcccctctaccgctataaatatccgactacctcgtcgctcgcacttccgatctaacctaccccgcacgatccttctaatccaacctcaatcaccgcccccataataacgcctacaacctcttctattcataccttcgctatattcgcacgatcgaaacgcactaatcaacccttcctcaccctaacattcctcctacactacaccgcccgctaacaccgactacccaacatataccgaaccgtcgtacaacgatcatccgatcctaacctcacgatttatattaatcgactcactctatactaatacgacctccgacgataccaataacgtaataatcgcctaatcaaactactcctaaataatacgaccgccgataaccaaaaaatatatttccaaaaacttaaacaactatacgccaaactacaaaacacgcccgacgacgtcccgtcatcttcttaatacgtaaattacgcaacgtatatactaaacgtaactaaacgaaacgactacttactaattactatctcaccctacgcgtactatacctacgaactacgaaacacgaacgcaactcactcgtctctatncaataacgaataacgtcgatcctctatcaacccgcgttatccttcaaacccgaaaaaaaaaactcaaaatatttctttttcccttaatctataaactatat

SEQ ID NO: 16669 - DNA, 590 bp, Artificial Sequence
  chemically treated genomic DNA (Homo sapiens) CpG-island No: 16669
ggggggcgagttggggtgtgaggattcgaaagggtcgatgcgggtggtataggggcggcgttcgttgcggtggtattagtgtggaaggggggggaggggtttagggagggagtcggtgtcggggggaatggtggggaggggaaggggtgggttgggatcggaggtggggggatcgagggagtggggttggggtgaggggaggtggatttgcgggatggtggggtggtgggggtgggcgtgaagacgaggggtcgtcggagggagggaatgggttacggacgtgggtgtagtcggtggggggggacgcgagtttggggtaggggggggacggtagggggggtttggaaggtgggcgggggtgggggggatggggggtcggtggggggggagggaggcggggtttgaggaggtttggggggggggggcggagggttgggattgtaggcgtgaggtatcgtgtcgggtcgaaatagggtagtggtggtgtggttcgggttggagagtaggggtgtagttcggggttcgtcggggtgcgatttgtttggtagaaaaaagaaaatagtaaaaaaaaatatttatattgtgggatt

SEQ ID NO: 16670 - DNA, 590 bp, Artificial Sequence
  chemically treated genomic DNA (Homo sapiens) CpG-island No: 16670
aatcccacaatataaatatttttttttactattttcttttttctaccaaacaaatcgcaccccgacgaaccccgaactacacccctactctccaacccgaaccacaccaccactaccctatttcgacccgacacgatacctcacgcctacaatcccaaccctccgccccccccccccaaacctcctcaaaccccgcctccctccccccccaccgaccccccatcccccccacccccgcccaccttccaaaccccccctaccgtcccccccctaccccaaactcgcgtccccccccaccgactacacccacgtccgtaacccattccctccctccgacgacccctcgtcttcacgcccacccccaccaccccaccatcccgcaaatccacctcccctcaccccaaccccactccctcgatccccccacctccgatcccaacccaccccttcccctccccaccattccccccgacaccgactccctccctaaacccctccccccccttccacactaataccaccgcaacgaacgccgcccctataccacccgcatcgaccctttcgaatcctcacaccccaactcgcccccc

SEQ ID NO: 16671 - DNA, 590 bp, Artificial Sequence
  chemically treated genomic DNA (Homo sapiens) CpG-island No: 16671
aattttataatgtaagtgtttttttttgttatttttttttttttgttaagtaggtcgtatttcgacggatttcgaattgtatttttgttttttagttcgggttatattattattattttgtttcggttcggtacggtgttttacgtttgtaattttagtttttcgttttttttttttaagtttttttagatttcgtttttttttttttttatcggttttttattttttttattttcgtttattttttagattttttttatcgttttttttttattttaagttcgcgtttttttttatcggttatatttacgttcgtagtttatttttttttttcggcgatttttcgtttttacgtttatttttattattttattatttcgtaaatttatttttttttattttagttttattttttcggtttttttattttcgattttaatttatttttttttttttttattatttttttcgatatcgattttttttttaggtttttttttttttttttatattagtgttatcgtaacggacgtcgtttttatattattcgtatcggttttttcgaatttttatattttaattcgtttttt

SEQ ID NO: 16672 - DNA, 590 bp, Artificial Sequence
  chemically treated genomic DNA (Homo sapiens) CpG-island No: 16672
aaaaaacgaattaaaatataaaaattcgaaaaaaccgatacgaataatataaaaacgacgtccgttacgataacactaatataaaaaaaaaaaaaaaaacctaaaaaaaaaatcgatatcgaaaaaaataataaaaaaaaaaaaaaataaattaaaatcgaaaataaaaaaaccgaaaaaataaaactaaaataaaaaaaaataaatttacgaaataataaaataataaaaataaacgtaaaaacgaaaaatcgccgaaaaaaaaaaataaactacgaacgtaaatataaccgataaaaaaaaacgcgaacttaaaataaaaaaaaaacgataaaaaaaatctaaaaaataaacgaaaataaaaaaaataaaaaaccgataaaaaaaaaaaaaaacgaaatctaaaaaaacttaaaaaaaaaaaacgaaaaactaaaattacaaacgtaaaacaccgtaccgaaccgaaacaaaataataataatataacccgaactaaaaaacaaaaatacaattcgaaatccgtcgaaatacgacctacttaacaaaaaaaaaaaaataacaaaaaaaaacacttacattataaaatt

SEQ ID NO: 16673 - DNA, 554 bp, Artificial Sequence
  chemically treated genomic DNA (Homo sapiens) CpG-island No: 16673
acgggaggtcgttggttgcgtattttgggcgtcgagtgttcgggatgagtttacgttcgcgtttgcggttttttttatttgtcgatttgtcgggggtttattgagttgacggcgtatttgggtttcggtcgtagcgtggggcgcggcgttcgggagtaggtgtgtaggagcgtagcgcgcggcgagcgtagttttcgtttcggagttcggtcgcgtcgcgtgttcgggcggttaggtagcggcggcggcggcggcgggcggcgggcgggcggcggttttcgggtaggtgtcgagcggcgagcggagtcgggtcgggcggagcgcggggggcgaggtcggcgcgtcgttcgcgggaggtcggggagcggtaggggtatgtggatattggttttttttttgttttagagtttcgcgaatggtgagtttttcggtttgtgatgaatttcgtttttttattattgatcgggggggcgggggggtggggggtggtattggatgtatgggtaaagtttttttttttttttcgttttatttgtgtttaaaatttcgtgttt

SEQ ID NO: 16674 - DNA, 554 bp, Artificial Sequence
  chemically treated genomic DNA (Homo sapiens) CpG-island No: 16674
aaacacgaaattttaaacacaaataaaacgaaaaaaaaaaaaaaactttacccatacatccaataccaccccccacccccccgcccccccgatcaataataaaaaaacgaaattcatcacaaaccgaaaaactcaccattcgcgaaactctaaaacaaaaaaaaaaccaatatccacatacccctaccgctccccgacctcccgcgaacgacgcgccgacctcgccccccgcgctccgcccgacccgactccgctcgccgctcgacacctacccgaaaaccgccgcccgcccgccgcccgccgccgccgccgccgctacctaaccgcccgaacacgcgacgcgaccgaactccgaaacgaaaactacgctcgccgcgcgctacgctcctacacacctactcccgaacgccgcgccccacgctacgaccgaaacccaaatacgccgtcaactcaataaacccccgacaaatcgacaaataaaaaaaaccgcaaacgcgaacgtaaactcatcccgaacactcgacgcccaaaatacgcaaccaacgacctcccgt

SEQ ID NO: 16675 - DNA, 554 bp, Artificial Sequence
  chemically treated genomic DNA (Homo sapiens) CpG-island No: 16675
aagtacgaaattttaaatatagatgaagcggaaaaagaaagaagattttatttatgtatttaatgttattttttattttttcgttttttcggttaatgataaggaaacgaaatttattataaatcgaaaggtttattattcgcgaagttttggaataaggagagagttagtatttatatgtttttgtcgtttttcggtttttcgcgagcgacgcgtcggtttcgtttttcgcgtttcgttcggttcggtttcgttcgtcgttcggtatttgttcgggggtcgtcgttcgttcgtcgttcgtcgtcgtcgtcgtcgttgtttagtcgttcgggtacgcggcgcggtcgggtttcggagcgagggttgcgttcgtcgcgcgttgcgtttttgtatatttgttttcgggcgtcgcgttttacgttgcggtcggagtttaggtgcgtcgttagtttagtgggttttcggtaggtcggtaggtggagagagtcgtagacgcgggcgtgagtttatttcgggtattcggcgtttagaatgcgtagttagcggtttttcgt

SEQ ID NO: 16676 - DNA, 554 bp, Artificial Sequence
  chemically treated genomic DNA (Homo sapiens) CpG-island No: 16676
acgaaaaaccgctaactacgcattctaaacgccgaatacccgaaataaactcacgcccgcgtctacgactctctccacctaccgacctaccgaaaacccactaaactaacgacgcacctaaactccgaccgcaacgtaaaacgcgacgcccgaaaacaaatatacaaaaacgcaacgcgcgacgaacgcaaccctcgctccgaaacccgaccgcgccgcgtacccgaacgactaaacaacgacgacgacgacgacgaacgacgaacgaacgacgacccccgaacaaataccgaacgacgaacgaaaccgaaccgaacgaaacgcgaaaaacgaaaccgacgcgtcgctcgcgaaaaaccgaaaaacgacaaaaacatataaatactaactctctccttattccaaaacttcgcgaataataaacctttcgatttataataaatttcgtttccttatcattaaccgaaaaaacgaaaaaataaaaaataacattaaatacataaataaaatcttctttctttttccgcttcatctatatttaaaatttcgtactt

SEQ ID NO: 16677 - DNA, 503 bp, Artificial Sequence
  chemically treated genomic DNA (Homo sapiens) CpG-island No: 16677
ggcgttttgtgtaaacggggtaggtttcgcggggattttatcgggacgtggtttcgttttcgcgcgttttggtaggcggggggttgcgtgtgtttgttttttttttttttttttttttttcgtttttttttttcggtgacgattcgtcgtaatgtggtggtaggaagtatgacgtcgtgggtcgaggttgtttttgttttcgtcgttttcggcggttgtaggtagcgggcgcgtagcgcgggcggtagtcgagttatttggcgggggtagggtcggagcgcggcgttgtttttattttcgtttaggtgtagggggagttcgcgcggggcggggggtcgagggcggtcgcgggattttcggttttgttgttcgttgttagttggtcggagtttttgttagttcgagtttacgttcgtttttttgaacggtagttggcgtttttcgtttgttttataagaggttaatttttgttggtgttgtagtttttttgtggtttttttagg

SEQ ID NO: 16678 - DNA, 503 bp, Artificial Sequence
  chemically treated genomic DNA (Homo sapiens) CpG-island No: 16678
cctaaaaaaaccacaaaaaaactacaacaccaacaaaaattaacctcttataaaacaaacgaaaaacgccaactaccgttcaaaaaaacgaacgtaaactcgaactaacaaaaactccgaccaactaacaacgaacaacaaaaccgaaaatcccgcgaccgccctcgaccccccgccccgcgcgaactccccctacacctaaacgaaaataaaaacaacgccgcgctccgaccctacccccgccaaataactcgactaccgcccgcgctacgcgcccgctacctacaaccgccgaaaacgacgaaaacaaaaacaacctcgacccacgacgtcatacttcctaccaccacattacgacgaatcgtcaccgaaaaaaaaaaacgaaaaaaaaaaaaaaaaaaaaaaaacaaacacacgcaaccccccgcctaccaaaacgcgcgaaaacgaaaccacgtcccgataaaatccccgcgaaacctaccccgtttacacaaaacgcc

SEQ ID NO: 16679 - DNA, 503 bp, Artificial Sequence
  chemically treated genomic DNA (Homo sapiens) CpG-island No: 16679
tttggggaagttataaagaagttgtaatattaataaagattaattttttgtggggtagacgaaaagcgttagttgtcgtttaggggggcgaacgtgggttcgggttggtagaggtttcggttagttggtagcggatagtagggtcgggggtttcgcggtcgttttcggtttttcgtttcgcgcggattttttttgtatttgagcgggggtgaggatagcgtcgcgtttcggttttgttttcgttaggtagttcggttgtcgttcgcgttgcgcgttcgttgtttgtagtcgtcgggagcgacgagagtagaggtagtttcggtttacggcgttatgttttttgttattatattacggcgaatcgttatcgggagaggggagcgaggggagagggggagggaggggagtagatatacgtagtttttcgtttgttaaaacgcgcggagacggggttacgtttcggtggagttttcgcgggatttgtttcgtttgtataaagcgtt

SEQ ID NO: 16680 - DNA, 503 bp, Artificial Sequence
  chemically treated genomic DNA (Homo sapiens) CpG-island No: 16680
aacgctttatacaaacgaaacaaatcccgcgaaaactccaccgaaacgtaaccccgtctccgcgcgttttaacaaacgaaaaactacgtatatctactcccctccctccccctctcccctcgctcccctctcccgataacgattcgccgtaatataataacaaaaaacataacgccgtaaaccgaaactacctctactctcgtcgctcccgacgactacaaacaacgaacgcgcaacgcgaacgacaaccgaactacctaacgaaaacaaaaccgaaacgcgacgctatcctcacccccgctcaaatacaaaaaaaatccgcgcgaaacgaaaaaccgaaaacgaccgcgaaacccccgaccctactatccgctaccaactaaccgaaacctctaccaacccgaacccacgttcgcccccctaaacgacaactaacgcttttcgtctaccccacaaaaaattaatctttattaatattacaacttctttataacttccccaaa

SEQ ID NO: 16681 - DNA, 1312 bp, Artificial Sequence
  chemically treated genomic DNA (Homo sapiens) CpG-island No: 16681
  unsure (468)
tcgtcgtttcgggtaggtcgtgcgtttatttttcgtcgtaagttcgggtggggtagtcgcggggatacgcgggggtcgttttcgatttcggtttaaggttgtggggttggaggggcgggcgggtcggttttagttcggagtttcgcgtgaatttcggggaggaattcggttggcgtcggggtttcgtacgtttttttttcgcggtttcgagcgtttttttacggttacgtttttcgcgtttagaatttttcggcgatttcgcgttttttgcgcgtttttcggaggtggtcgcggtacgggaggcgggtagtacggggttcggttcggtttaagcgttttcgtttcgtatttcgcggagggggtcgcgttcgaatcgggcggggcggggcgggggcgttttcggggcgcgggcgcggcggtaggtgggcgcgtttttcggcggggggggttcggcgggtcgcgcgtttntttcggaattcggtcgtgttatttttatgatgtttagttacgggtacggttttcggagtgcggtcgtcgtcgttatcgttcggtaggtcgcggggagggggcggtttgggggggtcgtttcgtttttcgtttcgttttttttttttcgcgttttttacggcgcggttcgggcgcggggcggcggtagcggcggcgcgcggggaggcggggaggcggggggttcggtcggacgtttttgcgtttttttttcgcgtttcggtcgagggcggagcgcgttggttttgtagttttcggttcgttttcggttcgtcgtttttttcgggacgtgggacgcgggcgtaggcggggttcgcgcggcgggcggcgggggacgggcggaggtgagcgggtgtagggtcggggtcggggggttcgggggttgggaagttggggggtcggggataggagggttagttaggtcggggtcggcgcgtcgtgtaggtcgcggcgggcgggcggcgggggtttttcgaggtaggcggacggggatcggcgtcggggttgtttcgtttttcgggcggggattttgtttttggttttcgtgcgattttcggttcgcgcgtttcgcgtttttggagttttaggtgaggcgtaggtgagggttcgcggtggggagttttggttcggttcggggcggtcgttgtttttcgagaatggtcgcggttcggtcggtttggagattgcggtttacgttttgcgttaggcggagttttcgggagggtggtcgttttttcgggttttaagttcgttagttttcggattttagaaatataatttcgggggtgtagatttgtttggaggttcg

SEQ ID NO: 16682 - DNA, 1312 bp, Artificial Sequence
  chemically treated genomic DNA (Homo sapiens) CpG-island No: 16682
  unsure (845)
cgaacctccaaacaaatctacacccccgaaattatatttctaaaatccgaaaactaacgaacttaaaacccgaaaaaacgaccaccctcccgaaaactccgcctaacgcaaaacgtaaaccgcaatctccaaaccgaccgaaccgcgaccattctcgaaaaacaacgaccgccccgaaccgaaccaaaactccccaccgcgaaccctcacctacgcctcacctaaaactccaaaaacgcgaaacgcgcgaaccgaaaatcgcacgaaaaccaaaaacaaaatccccgcccgaaaaacgaaacaaccccgacgccgatccccgtccgcctacctcgaaaaacccccgccgcccgcccgccgcgacctacacgacgcgccgaccccgacctaactaaccctcctatccccgaccccccaacttcccaacccccgaaccccccgaccccgaccctacacccgctcacctccgcccgtcccccgccgcccgccgcgcgaaccccgcctacgcccgcgtcccacgtcccgaaaaaaacgacgaaccgaaaacgaaccgaaaactacaaaaccaacgcgctccgccctcgaccgaaacgcgaaaaaaaaacgcaaaaacgtccgaccgaaccccccgcctccccgcctccccgcgcgccgccgctaccgccgccccgcgcccgaaccgcgccgtaaaaaacgcgaaaaaaaaaaaacgaaacgaaaaacgaaacgacccccccaaaccgccccctccccgcgacctaccgaacgataacgacgacgaccgcactccgaaaaccgtacccgtaactaaacatcataaaaataacacgaccgaattccgaaanaaacgcgcgacccgccgaaccccccccgccgaaaaacgcgcccacctaccgccgcgcccgcgccccgaaaacgcccccgccccgccccgcccgattcgaacgcgaccccctccgcgaaatacgaaacgaaaacgcttaaaccgaaccgaaccccgtactacccgcctcccgtaccgcgaccacctccgaaaaacgcgcaaaaaacgcgaaatcgccgaaaaattctaaacgcgaaaaacgtaaccgtaaaaaaacgctcgaaaccgcgaaaaaaaaacgtacgaaaccccgacgccaaccgaattcctccccgaaattcacgcgaaactccgaactaaaaccgacccgcccgcccctccaaccccacaaccttaaaccgaaatcgaaaacgacccccgcgtatccccgcgactaccccacccgaacttacgacgaaaaataaacgcacgacctacccgaaacgacga

SEQ ID NO: 16683 - DNA, 1312 bp, Artificial Sequence
  chemically treated genomic DNA (Homo sapiens) CpG-island No: 16683
  unsure (845)
cgggtttttaagtaggtttgtattttcggagttatgtttttgggattcgaggattagcgagtttggggttcgggagagcggttattttttcggaagtttcgtttggcgtagggcgtgaatcgtagtttttaggtcggtcgggtcgcggttattttcggagggtagcggtcgtttcgggtcgggttaaagttttttatcgcgggtttttatttgcgttttatttggggttttaggagcgcggggcgcgcgggtcgagagtcgtacggaggttagagataggattttcgttcggggaacggagtagtttcggcgtcgattttcgttcgtttgtttcggggagttttcgtcgttcgttcgtcgcggtttgtacggcgcgtcggtttcggtttggttggtttttttgttttcgattttttagttttttagttttcgagtttttcggtttcggttttgtattcgtttattttcgttcgtttttcgtcgttcgtcgcgcggatttcgtttgcgttcgcgttttacgtttcgggggaggcggcgggtcgggggcgggtcggaggttgtagggttagcgcgtttcgttttcggtcggggcgcggggagggggcgtaggggcgttcggtcgggtttttcgttttttcgttttttcgcgcgtcgtcgttgtcgtcgtttcgcgttcgggtcgcgtcgtgggaagcgcgggaggggaggggcggggcggggggcggggcgatttttttaagtcgtttttttttcgcgatttatcggacggtggcggcggcggtcgtatttcggaagtcgtgttcgtggttgggtattatgggaatggtacggtcgagtttcggggnaggcgcgcggttcgtcggatttttttcgtcggagagcgcgtttatttgtcgtcgcgttcgcgtttcggggacgttttcgtttcgtttcgttcggttcggacgcggtttttttcgcggggtgcggggcgaaggcgtttgggtcgggtcgagtttcgtgttgttcgtttttcgtatcgcggttattttcggggggcgcgtagggggcgcggggtcgtcgggaagttttgggcgcggggggcgtggtcgtgggaaagcgttcggagtcgcgggaagggagcgtgcggggtttcggcgttaatcgagttttttttcgaagtttacgcggggtttcgggttgagatcggttcgttcgtttttttagttttatagttttgggtcggggtcgggggcggttttcgcgtgttttcgcggttgttttattcgagtttgcggcggggagtggacgtacgatttgttcggggcggcgg

SEQ ID NO: 16684 - DNA, 1312 bp, Artificial Sequence
  chemically treated genomic DNA (Homo sapiens) CpG-island No: 16684
  unsure (468)
ccgccgccccgaacaaatcgtacgtccactccccgccgcaaactcgaataaaacaaccgcgaaaacacgcgaaaaccgcccccgaccccgacccaaaactataaaactaaaaaaacgaacgaaccgatctcaacccgaaaccccgcgtaaacttcgaaaaaaaactcgattaacgccgaaaccccgcacgctcccttcccgcgactccgaacgctttcccacgaccacgccccccgcgcccaaaacttcccgacgaccccgcgccccctacgcgccccccgaaaataaccgcgatacgaaaaacgaacaacacgaaactcgacccgacccaaacgccttcgccccgcaccccgcgaaaaaaaccgcgtccgaaccgaacgaaacgaaacgaaaacgtccccgaaacgcgaacgcgacgacaaataaacgcgctctccgacgaaaaaaatccgacgaaccgcgcgcctnccccgaaactcgaccgtaccattcccataatacccaaccacgaacacgacttccgaaatacgaccgccgccgccaccgtccgataaatcgcgaaaaaaaaacgacttaaaaaaatcgccccgccccccgccccgcccctcccctcccgcgcttcccacgacgcgacccgaacgcgaaacgacgacaacgacgacgcgcgaaaaaacgaaaaaacgaaaaacccgaccgaacgcccctacgccccctccccgcgccccgaccgaaaacgaaacgcgctaaccctacaacctccgacccgcccccgacccgccgcctcccccgaaacgtaaaacgcgaacgcaaacgaaatccgcgcgacgaacgacgaaaaacgaacgaaaataaacgaatacaaaaccgaaaccgaaaaactcgaaaactaaaaaactaaaaaatcgaaaacaaaaaaaccaaccaaaccgaaaccgacgcgccgtacaaaccgcgacgaacgaacgacgaaaactccccgaaacaaacgaacgaaaatcgacgccgaaactactccgttccccgaacgaaaatcctatctctaacctccgtacgactctcgacccgcgcgccccgcgctcctaaaaccccaaataaaacgcaaataaaaacccgcgataaaaaactttaacccgacccgaaacgaccgctaccctccgaaaataaccgcgacccgaccgacctaaaaactacgattcacgccctacgccaaacgaaacttccgaaaaaataaccgctctcccgaaccccaaactcgctaatcctcgaatcccaaaaacataactccgaaaatacaaacctacttaaaaacccg

SEQ ID NO: 16685 - DNA, 746 bp, Artificial Sequence
  chemically treated genomic DNA (Homo sapiens) CpG-island No: 16685
gtattgcggtttcgcgcggatggcgacggaaggggaggtcgttcggtttggtttggagggagatttcgttttgtttcgcgttttagttatggcgatattttcggtcgcgttgtttcgaatattcggcgcgggtgagcgcgcgtttgcgggattttggggaggagtatgcgaggaggatgcggaggggcgcggggattcgatggagcggcggggacgtggaggggattcggggcgagcgcggaggggattcggggagggcgcggggacgcggaggggattcgttagggacgcggaggggttcgttggggatgcggtggggagcgggcgtggtgtattcgggattcggcgttaggatttttatttatttttttttaggtgttcgggtttcgtcgcgttggttgggttttttcgggaaggcgattttttcggtttgttcggtcgagtcgtaggacgtttggaagcgcgacggtttttatgattcgcgagtcggaggatagtatcggtaatattgggcgtttagtcgagttgggtgggaacgaggagaggtcggtagtcgcgggggatgcgaattttagaggggtttgggcgttgtacgcggtcgaaattgcgcgtttcgttgggttttttttattttcgtgttcgtcgtcgttcggttttgtttgacgtagtatagcgggttgaggttatcgttttattatggatagggtgagagggagcgggcgggttagtggttagtataggtttcg

SEQ ID NO: 16686 - DNA, 746 bp, Artificial Sequence
  chemically treated genomic DNA (Homo sapiens) CpG-island No: 16686
cgaaacctatactaaccactaacccgcccgctccctctcaccctatccataataaaacgataacctcaacccgctatactacgtcaaacaaaaccgaacgacgacgaacacgaaaataaaaaaaacccaacgaaacgcgcaatttcgaccgcgtacaacgcccaaacccctctaaaattcgcatcccccgcgactaccgacctctcctcgttcccacccaactcgactaaacgcccaatattaccgatactatcctccgactcgcgaatcataaaaaccgtcgcgcttccaaacgtcctacgactcgaccgaacaaaccgaaaaaatcgccttcccgaaaaaacccaaccaacgcgacgaaacccgaacacctaaaaaaaaataaataaaaatcctaacgccgaatcccgaatacaccacgcccgctccccaccgcatccccaacgaacccctccgcgtccctaacgaatcccctccgcgtccccgcgccctccccgaatcccctccgcgctcgccccgaatcccctccacgtccccgccgctccatcgaatccccgcgcccctccgcatcctcctcgcatactcctccccaaaatcccgcaaacgcgcgctcacccgcgccgaatattcgaaacaacgcgaccgaaaatatcgccataactaaaacgcgaaacaaaacgaaatctccctccaaaccaaaccgaacgacctccccttccgtcgccatccgcgcgaaaccgcaatac

SEQ ID NO: 16687 - DNA, 746 bp, Artificial Sequence
  chemically treated genomic DNA (Homo sapiens) CpG-island No: 16687
cgaagtttgtgttaattattggttcgttcgtttttttttattttatttatggtgaggcggtggttttagttcgttgtgttacgttaggtaggatcgagcggcggcgagtacgggagtgggaggagtttagcggagcgcgtagtttcgatcgcgtgtagcgtttaggtttttttagggttcgtatttttcgcggttgtcggttttttttcgtttttatttaattcggttgggcgtttagtgttatcggtgttgtttttcgattcgcggattataagggtcgtcgcgtttttaagcgttttgcggttcggtcgagtaggtcgggggggtcgttttttcgagaaagtttaattagcgcgacggggttcgggtatttggggggaagtagatagaggttttggcgtcgagtttcgaatgtattacgttcgttttttatcgtatttttaacgggttttttcgcgtttttaacgggtttttttcgcgttttcgcgtttttttcgagtttttttcgcgttcgtttcgggttttttttacgttttcgtcgttttatcgggttttcgcgttttttcgtatttttttcgtatgtttttttttagggtttcgtaagcgcgcgtttattcgcgtcgagtattcggggtagcgcggtcgaggatgtcgttatggttgggacgcggggtagagcgaggtttttttttaggttaggtcgagcggttttttttttcgtcgttattcgcgcggggtcgtagtgt

SEQ ID NO: 16688 - DNA, 746 bp, Artificial Sequence
  chemically treated genomic DNA (Homo sapiens) CpG-island No: 16688
acactacgaccccgcgcgaataacgacgaaaaaaaaaaccgctcgacctaacctaaaaaaaaacctcgctctaccccgcgtcccaaccataacgacatcctcgaccgcgctaccccgaatactcgacgcgaataaacgcgcgcttacgaaaccctaaaaaaaaacatacgaaaaaaatacgaaaaaacgcgaaaacccgataaaacgacgaaaacgtaaaaaaaacccgaaacgaacgcgaaaaaaactcgaaaaaaacgcgaaaacgcgaaaaaaacccgttaaaaacgcgaaaaaacccgttaaaaatacgataaaaaacgaacgtaatacattcgaaactcgacgccaaaacctctatctacttccccccaaatacccgaaccccgtcgcgctaattaaactttctcgaaaaaacgacccccccgacctactcgaccgaaccgcaaaacgcttaaaaacgcgacgacccttataatccgcgaatcgaaaaacaacaccgataacactaaacgcccaaccgaattaaataaaaacgaaaaaaaaccgacaaccgcgaaaaatacgaaccctaaaaaaacctaaacgctacacgcgatcgaaactacgcgctccgctaaactcctcccactcccgtactcgccgccgctcgatcctacctaacgtaacacaacgaactaaaaccaccgcctcaccataaataaaataaaaaaaaacgaacgaaccaataattaacacaaacttcg

SEQ ID NO: 16689 - DNA, 635 bp, Artificial Sequence
  chemically treated genomic DNA (Homo sapiens) CpG-island No: 16689
ttattacgggatagcgttaggtagtattttttatagtcggagttcgaattgtcgcgagaatagcggtcggtttggaagtcgttcggcgcgggagcgcgaattttcgcgagaatgtcgttagtttcggaggcgattgcggtaggagttcgagttttcgcgcgataggtattaattcgttagacgcgcgttgtaggagcgcggaatatggcgcggtacgggttatcggggagtcggtggacgcgtagtaggagcgcgacgtgcgggagttcgttcggggtgtcgtcggtttttaggacgaggtagattttaatttttagttcgttttaaatttcgtttggtttaattttaggtgtggggtacggcgcgcgggcgggttttcggttatagttcggagttcgcgcgtgggtttcgtatagttcggggtcggggcgcgttggggtagggtatggggcggaggcgggcgcggttttagggagttttcgtaggttttgttatcgtttgtttttcgtcggttagcgttttcggcgcggtgttttgcgtattatagggcgtgttattcgggacgcgttttgatcgttacggggaaagcgtgaattgggttttttgtcggtcggcgcgcgcgtttgtaattttag

SEQ ID NO: 16690 - DNA, 635 bp, Artificial Sequence
  chemically treated genomic DNA (Homo sapiens) CpG-island No: 16690
ctaaaattacaaacgcgcgcgccgaccgacaaaaaacccaattcacgctttccccgtaacgatcaaaacgcgtcccgaataacacgccctataatacgcaaaacaccgcgccgaaaacgctaaccgacgaaaaacaaacgataacaaaacctacgaaaactccctaaaaccgcgcccgcctccgccccataccctaccccaacgcgccccgaccccgaactatacgaaacccacgcgcgaactccgaactataaccgaaaacccgcccgcgcgccgtaccccacacctaaaattaaaccaaacgaaatttaaaacgaactaaaaattaaaatctacctcgtcctaaaaaccgacgacaccccgaacgaactcccgcacgtcgcgctcctactacgcgtccaccgactccccgataacccgtaccgcgccatattccgcgctcctacaacgcgcgtctaacgaattaatacctatcgcgcgaaaactcgaactcctaccgcaatcgcctccgaaactaacgacattctcgcgaaaattcgcgctcccgcgccgaacgacttccaaaccgaccgctattctcgcgacaattcgaactccgactataaaaaatactacctaacgctatcccgtaataa

SEQ ID NO: 16691 - DNA, 635 bp, Artificial Sequence
  chemically treated genomic DNA (Homo sapiens) CpG-island No: 16691
ttggggttgtaggcgcgcgcgtcggtcggtaagaaatttagtttacgtttttttcgtgacgattaggacgcgtttcgggtaatacgttttgtggtgcgtagggtatcgcgtcgagagcgttggtcggcggggagtaggcggtggtagggtttgcgaaggttttttgaggtcgcgttcgttttcgttttatgttttgttttagcgcgtttcgatttcgggttgtgcgggatttacgcgcgggtttcgggttgtggtcgggaattcgttcgcgcgtcgtgttttatatttgaagttggattaggcgaagtttagggcgagttggaagttggggtttgtttcgttttggaggtcggcgatatttcggacgagttttcgtacgtcgcgtttttgttgcgcgtttatcgatttttcggtggttcgtgtcgcgttatgtttcgcgtttttgtagcgcgcgtttaacgaattggtgtttgtcgcgcgagagttcgggtttttgtcgtagtcgttttcggagttggcggtattttcgcgagagttcgcgttttcgcgtcgggcgatttttaagtcgatcgttattttcgcgatagttcgagtttcggttgtggagggtattgtttggcgttgtttcgtggtgg

SEQ ID NO: 16692 - DNA, 635 bp, Artificial Sequence
  chemically treated genomic DNA (Homo sapiens) CpG-island No: 16692
ccaccacgaaacaacgccaaacaataccctccacaaccgaaactcgaactatcgcgaaaataacgatcgacttaaaaatcgcccgacgcgaaaacgcgaactctcgcgaaaataccgccaactccgaaaacgactacgacaaaaacccgaactctcgcgcgacaaacaccaattcgttaaacgcgcgctacaaaaacgcgaaacataacgcgacacgaaccaccgaaaaatcgataaacgcgcaacaaaaacgcgacgtacgaaaactcgtccgaaatatcgccgacctccaaaacgaaacaaaccccaacttccaactcgccctaaacttcgcctaatccaacttcaaatataaaacacgacgcgcgaacgaattcccgaccacaacccgaaacccgcgcgtaaatcccgcacaacccgaaatcgaaacgcgctaaaacaaaacataaaacgaaaacgaacgcgacctcaaaaaaccttcgcaaaccctaccaccgcctactccccgccgaccaacgctctcgacgcgataccctacgcaccacaaaacgtattacccgaaacgcgtcctaatcgtcacgaaaaaaacgtaaactaaatttcttaccgaccgacgcgcgcgcctacaaccccaa

SEQ ID NO: 16693 - DNA, 547 bp, Artificial Sequence
  chemically treated genomic DNA (Homo sapiens) CpG-island No: 16693
gggcgtttcggtcgtagtgagggtatcggtattatatttttattggttttacgagtgtatatttgttacggttcgcgtttatttatagcgtgattcgtttttttaggtttcgtgtttgtagatttagatattatttggaaaatcgttggttattcgtagggaaaaggtagtatgcgtggggttttcgcgggtttcggtttggtcgggattttgtcgttaagttgttaagtatagtaatgtgcgtattgtattaggtattatcgcggtttcgattacgttttatttcggagttcgacggacgattgtaagaaatattatcgttttcggcgtagttacggtgtttttcgtcgttagaaaataaacgttttcgagttttagtttttagcggcgattacgcggcgttgggtttaattagtattcggtttttttgttggatttaatagcgtagttgatttcgtttagacgttttttttagtttaaattacgttttattaacgtcgttttttaattatttttgtattttttttgttatatttataatgtgttg

SEQ ID NO: 16694 - DNA, 547 bp, Artificial Sequence
  chemically treated genomic DNA (Homo sapiens) CpG-island No: 16694
caacacattataaatataacaaaaaaaatacaaaaataattaaaaaacgacgttaataaaacgtaatttaaactaaaaaaaacgtctaaacgaaatcaactacgctattaaatccaacaaaaaaaccgaatactaattaaacccaacgccgcgtaatcgccgctaaaaactaaaactcgaaaacgtttattttctaacgacgaaaaacaccgtaactacgccgaaaacgataatatttcttacaatcgtccgtcgaactccgaaataaaacgtaatcgaaaccgcgataatacctaatacaatacgcacattactatacttaacaacttaacgacaaaatcccgaccaaaccgaaacccgcgaaaaccccacgcatactaccttttccctacgaataaccaacgattttccaaataatatctaaatctacaaacacgaaacctaaaaaaacgaatcacgctataaataaacgcgaaccgtaacaaatatacactcgtaaaaccaataaaaatataataccgataccctcactacgaccgaaacgccc

SEQ ID NO: 16695 - DNA, 547 bp, Artificial Sequence
  chemically treated genomic DNA (Homo sapiens) CpG-island No: 16695
tagtatattgtgggtgtgataagaagggtgtaagaataattgggaaacggcgttgatggaacgtgatttaagttgagaggggcgtttggacggagttagttgcgttattaagtttagtaagggagtcgggtgttgattgagtttagcgtcgcgtggtcgtcgttggggattgaggttcgggagcgtttgttttttggcggcggagggtatcgtggttgcgtcgggagcggtggtgttttttgtagtcgttcgtcggatttcggaatgaggcgtggtcggagtcgcggtgatgtttggtgtagtgcgtatattgttatgtttgatagtttggcggtagagtttcggttaggtcgggattcgcgggggttttacgtatgttgttttttttttgcgggtggttagcggttttttaagtgatgtttagatttgtaggtacggagtttggaagaacgagttacgttgtgagtgggcgcgggtcgtagtaggtgtgtattcgtagggttagtagggatatagtgtcggtgtttttattgcgatcgaggcgttt

SEQ ID NO: 16696 - DNA, 547 bp, Artificial Sequence
  chemically treated genomic DNA (Homo sapiens) CpG-island No: 16696
aaacgcctcgatcgcaataaaaacaccgacactatatccctactaaccctacgaatacacacctactacgacccgcgcccactcacaacgtaactcgttcttccaaactccgtacctacaaatctaaacatcacttaaaaaaccgctaaccacccgcaaaaaaaaaacaacatacgtaaaacccccgcgaatcccgacctaaccgaaactctaccgccaaactatcaaacataacaatatacgcactacaccaaacatcaccgcgactccgaccacgcctcattccgaaatccgacgaacgactacaaaaaacaccaccgctcccgacgcaaccacgataccctccgccgccaaaaaacaaacgctcccgaacctcaatccccaacgacgaccacgcgacgctaaactcaatcaacacccgactcccttactaaacttaataacgcaactaactccgtccaaacgcccctctcaacttaaatcacgttccatcaacgccgtttcccaattattcttacacccttcttatcacacccacaatatacta

SEQ ID NO: 16697 - DNA, 764 bp, Artificial Sequence
  chemically treated genomic DNA (Homo sapiens) CpG-island No: 16697
atagtttgcggaggaggaagttcgcgcgggcgggggagggggtagggtgttggcggtggcgggcggtgttagtagcgggcgcggttttagttcgggcggacgcggtcggcggggagggggttaacgcgcgcggtttttatgataatgagttgtatggtgaaatagggaggtcggcgtttagggttttttcgtcgtcgtcgtcgtcgtcgtcgtcgtcgttatcgcgggagttagagttgtcgggaggagcggtattcgcgttagattggagcgggagggcggcggagggtagttgttgggaattttttagtcgagagggcgagcgattcggagagagatttcgagagtttgggagcggtagggcgtgcgagcgtcgtagttagcggagtaaatttcgaaatagatttggaaagttaggttttcggaggaaatgggattgtgaacgaatcggagagtaagaagggaaggaagcgtcgggattgttgatgttagaggagttcggaaagtcgcgttggaaaaatttgaagatagtcggggttttgttttttttttaggagagatatcgtcggtcgtttttatacgttttttcggcgttttcgggtgttttttgagagtcggcgatagcgtttagtcgggttgttgcggggcgacggaggattgaggggcgcgcggagcggagatcgaggagcgattttaggaatatagataagtgtttggtggtttgacgtggattttaatgaatttggattttatgtggatttggt

SEQ ID NO: 16698 - DNA, 764 bp, Artificial Sequence
  chemically treated genomic DNA (Homo sapiens) CpG-island No: 16698
accaaatccacataaaatccaaattcattaaaatccacgtcaaaccaccaaacacttatctatattcctaaaatcgctcctcgatctccgctccgcgcgcccctcaatcctccgtcgccccgcaacaacccgactaaacgctatcgccgactctcaaaaaacacccgaaaacgccgaaaaaacgtataaaaacgaccgacgatatctctcctaaaaaaaaaacaaaaccccgactatcttcaaatttttccaacgcgactttccgaactcctctaacatcaacaatcccgacgcttccttcccttcttactctccgattcgttcacaatcccatttcctccgaaaacctaactttccaaatctatttcgaaatttactccgctaactacgacgctcgcacgccctaccgctcccaaactctcgaaatctctctccgaatcgctcgccctctcgactaaaaaattcccaacaactaccctccgccgccctcccgctccaatctaacgcgaataccgctcctcccgacaactctaactcccgcgataacgacgacgacgacgacgacgacgacgacgaaaaaaccctaaacgccgacctccctatttcaccatacaactcattatcataaaaaccgcgcgcgttaaccccctccccgccgaccgcgtccgcccgaactaaaaccgcgcccgctactaacaccgcccgccaccgccaacaccctaccccctcccccgcccgcgcgaacttcctcctccgcaaactat

SEQ ID NO: 16699 - DNA, 764 bp, Artificial Sequence
  chemically treated genomic DNA (Homo sapiens) CpG-island No: 16699
attaaatttatatggagtttaaatttattaaaatttacgttaagttattagatatttatttgtatttttgaagtcgtttttcggttttcgtttcgcgcgttttttagtttttcgtcgtttcgtagtagttcggttgggcgttgtcgtcggtttttagggggtattcggaggcgtcgagggggcgtgtgggggcggtcggcggtgttttttttgaggaagaagtagagtttcggttgtttttagatttttttagcgcgatttttcgggtttttttgatattagtaatttcggcgtttttttttttttttgtttttcggttcgtttatagttttatttttttcgggagtttggttttttagatttatttcgaggtttgtttcgttggttgcggcgttcgtacgttttatcgtttttaagttttcggggttttttttcggatcgttcgttttttcggttgaaaaatttttagtaattgtttttcgtcgttttttcgttttagtttggcgcggatgtcgtttttttcggtagttttggttttcgcggtggcggcggcggcggcggcggcggcggcggcggaggagttttgagcgtcggtttttttattttattatgtagtttattattatagaggtcgcgcgcgttaatttttttttcgtcggtcgcgttcgttcgggttggggtcgcgttcgttgttggtatcgttcgttatcgttagtattttgttttttttttcgttcgcgcggattttttttttcgtaagttgt

SEQ ID NO: 16700 - DNA, 764 bp, Artificial Sequence
  chemically treated genomic DNA (Homo sapiens) CpG-island No: 16700
acaacttacgaaaaaaaaaatccgcgcgaacgaaaaaaaaaacaaaatactaacgataacgaacgataccaacaacgaacgcgaccccaacccgaacgaacgcgaccgacgaaaaaaaaattaacgcgcgcgacctctataataataaactacataataaaataaaaaaaccgacgctcaaaactcctccgccgccgccgccgccgccgccgccgccgccaccgcgaaaaccaaaactaccgaaaaaaacgacatccgcgccaaactaaaacgaaaaaacgacgaaaaacaattactaaaaatttttcaaccgaaaaaacgaacgatccgaaaaaaaaccccgaaaacttaaaaacgataaaacgtacgaacgccgcaaccaacgaaacaaacctcgaaataaatctaaaaaaccaaactcccgaaaaaaataaaactataaacgaaccgaaaaacaaaaaaaaaaaaaaacgccgaaattactaatatcaaaaaaacccgaaaaatcgcgctaaaaaaatctaaaaacaaccgaaactctacttcttcctcaaaaaaaacaccgccgaccgcccccacacgccccctcgacgcctccgaataccccctaaaaaccgacgacaacgcccaaccgaactactacgaaacgacgaaaaactaaaaaacgcgcgaaacgaaaaccgaaaaacgacttcaaaaatacaaataaatatctaataacttaacgtaaattttaataaatttaaactccatataaatttaat

SEQ ID NO: 16701 - DNA, 641 bp, Artificial Sequence
  chemically treated genomic DNA (Homo sapiens) CpG-island No: 16701
gggcgtaggcgcgggtttttgatttgcgtgtggtttttgagcgcgtcgtcgttttgtaggtataggttcgcgagttcgcgttttcgggcgcgtagtcgttttattttttcgcgtagtcgtcgcggttttagttcggcgcgtagttgcgtttagagggtgcggttgaaatgttcgtataggcgttagtttagcgcgtattagtttcgcgcgcgttttcgggtttcgggcgataggcgggttacggagcgcgcgttgcgggagttgagtttgaaggttattatgttgtttagcgtttagcgtagtcggcgtcgtagtagtattagggattcgtttaggtgttcggcgatgagtattagtcggaagcgtcgttttatttcggcgatgcgcgcgcgtacgtagtttttttcgtattgcgcgttggggtcgaagtcgaagtcgaattatatgttgtttttggcgtagacgtttttgaggtggcggttgtcgttgtagaacgttcgcggcgaggttaggaacgcgtttaggttcggggcgtttcggaaggcgggggcgtaggttttgtagtagatgaaggaggattttagttggaatacggggttttttaggatggagaagtagaaggtgtcgttgggtatgatttt

SEQ ID NO: 16702 - DNA, 641 bp, Artificial Sequence
  chemically treated genomic DNA (Homo sapiens) CpG-island No: 16702
aaaatcatacccaacgacaccttctacttctccatcctaaaaaaccccgtattccaactaaaatcctccttcatctactacaaaacctacgcccccgccttccgaaacgccccgaacctaaacgcgttcctaacctcgccgcgaacgttctacaacgacaaccgccacctcaaaaacgtctacgccaaaaacaacatataattcgacttcgacttcgaccccaacgcgcaatacgaaaaaaactacgtacgcgcgcgcatcgccgaaataaaacgacgcttccgactaatactcatcgccgaacacctaaacgaatccctaatactactacgacgccgactacgctaaacgctaaacaacataataaccttcaaactcaactcccgcaacgcgcgctccgtaacccgcctatcgcccgaaacccgaaaacgcgcgcgaaactaatacgcgctaaactaacgcctatacgaacatttcaaccgcaccctctaaacgcaactacgcgccgaactaaaaccgcgacgactacgcgaaaaaataaaacgactacgcgcccgaaaacgcgaactcgcgaacctatacctacaaaacgacgacgcgctcaaaaaccacacgcaaatcaaaaacccgcgcctacgccc

SEQ ID NO: 16703 - DNA, 641 bp, Artificial Sequence
  chemically treated genomic DNA (Homo sapiens) CpG-island No: 16703
aaagttatgtttaacgatattttttatttttttattttgaggaatttcgtgttttagttggagtttttttttatttattataaaatttacgttttcgtttttcggggcgtttcgagtttggacgcgtttttggtttcgtcgcggacgttttataacgatagtcgttattttaggaacgtttacgttaagaataatatgtggttcgatttcggtttcgattttaacgcgtagtgcgaggagggttacgtgcgcgcgcgtatcgtcgaggtggaacggcgttttcggttggtgtttatcgtcgagtatttggacgaatttttggtgttgttgcggcgtcggttgcgttgggcgttggataatatggtggtttttaggtttaattttcgtagcgcgcgtttcgtggttcgtttgtcgttcgagattcgggagcgcgcgcggagttggtgcgcgttggattggcgtttgtacgagtattttaatcgtattttttgggcgtagttgcgcgtcgagttggggtcgcggcggttgcgcggggaggtggagcggttgcgcgttcggaggcgcgaattcgcgagtttgtgtttgtaggacggcggcgcgtttaagaattatacgtagattagagattcgcgtttgcgttt

SEQ ID NO: 16704 - DNA, 641 bp, Artificial Sequence
  chemically treated genomic DNA (Homo sapiens) CpG-island No: 16704
aaacgcaaacgcgaatctctaatctacgtataattcttaaacgcgccgccgtcctacaaacacaaactcgcgaattcgcgcctccgaacgcgcaaccgctccacctccccgcgcaaccgccgcgaccccaactcgacgcgcaactacgcccaaaaaatacgattaaaatactcgtacaaacgccaatccaacgcgcaccaactccgcgcgcgctcccgaatctcgaacgacaaacgaaccacgaaacgcgcgctacgaaaattaaacctaaaaaccaccatattatccaacgcccaacgcaaccgacgccgcaacaacaccaaaaattcgtccaaatactcgacgataaacaccaaccgaaaacgccgttccacctcgacgatacgcgcgcgcacgtaaccctcctcgcactacgcgttaaaatcgaaaccgaaatcgaaccacatattattcttaacgtaaacgttcctaaaataacgactatcgttataaaacgtccgcgacgaaaccaaaaacgcgtccaaactcgaaacgccccgaaaaacgaaaacgtaaattttataataaataaaaaaaaactccaactaaaacacgaaattcctcaaaataaaaaaataaaaaatatcgttaaacataacttt

SEQ ID NO: 16705 - DNA, 636 bp, Artificial Sequence
  chemically treated genomic DNA (Homo sapiens) CpG-island No: 16705
tgatgggtaacgaaaggggtgggtttaaggtaattgtttcgttaagaggtgatgagggtattgtgggtaacgaggagtagcgtagggttcgtagaatagattagaattttttcgaggtattttgggaagggttagtattttcggttttaggtcggttatttcgaattagaggtggggtgggggttcggttgtcgcggtgtttggtgggacgcgaggtttgattttgttgtttagtcgtttttgtcgcgtaatttatttttatttgtttttcgattttggaacgttagttaatgagagtattaagttgatacgttattaaggtcgatttcgtatacgttggagttaattaaaatgttgtaagggttaaagtcgattaattattatagtaatttcgtcgcggggcggaattaaaagagggttttttttaggagagaggcggggcgatgttttagcgggcgtggtaaaatgtttagtatagattaatggcgggttagtatcggaattcgcggcgacgcgagttaataggcgtaggcgttgcgagttaatgggaagggtgggaggggcgtcgtggttattttgcgagtgagaattaatataaaaggatattttagggaaagtgggcgggattttatgtat

SEQ ID NO: 16706 - DNA, 636 bp, Artificial Sequence
  chemically treated genomic DNA (Homo sapiens) CpG-island No: 16706
atacataaaatcccgcccactttccctaaaatatccttttatattaattctcactcgcaaaataaccacgacgcccctcccacccttcccattaactcgcaacgcctacgcctattaactcgcgtcgccgcgaattccgatactaacccgccattaatctatactaaacattttaccacgcccgctaaaacatcgccccgcctctctcctaaaaaaaaccctcttttaattccgccccgcgacgaaattactataataattaatcgactttaacccttacaacattttaattaactccaacgtatacgaaatcgaccttaataacgtatcaacttaatactctcattaactaacgttccaaaatcgaaaaacaaataaaaataaattacgcgacaaaaacgactaaacaacaaaatcaaacctcgcgtcccaccaaacaccgcgacaaccgaacccccaccccacctctaattcgaaataaccgacctaaaaccgaaaatactaacccttcccaaaatacctcgaaaaaattctaatctattctacgaaccctacgctactcctcgttacccacaataccctcatcacctcttaacgaaacaattaccttaaacccacccctttcgttacccatca

SEQ ID NO: 16707 - DNA, 636 bp, Artificial Sequence
  chemically treated genomic DNA (Homo sapiens) CpG-island No: 16707
gtgtataaagtttcgtttattttttttgaaatgtttttttgtattggtttttattcgtagggtagttacggcgttttttttattttttttattggttcgtagcgtttgcgtttattggttcgcgtcgtcgcgggtttcggtgttaattcgttattggtttgtgttgagtattttgttacgttcgttgaggtatcgtttcgttttttttttggaggaggtttttttttgatttcgtttcgcggcgaggttgttgtgataattggtcggttttgatttttgtagtattttgattggttttagcgtgtacggggtcgattttggtggcgtattagtttggtatttttattggttaacgttttagggtcgaaggataggtaaaggtgggttgcgcggtagaggcggttaggtagtaaggttaggtttcgcgttttattaggtatcgcggtagtcgggtttttattttatttttggttcggagtagtcgatttaaaatcggaagtgttggttttttttagagtgtttcgggagaattttaatttgttttgcgaattttgcgttgtttttcgttatttataatgtttttattattttttagcgaaatagttgttttagatttatttttttcgttatttatta

SEQ ID NO: 16708 - DNA, 636 bp, Artificial Sequence
  chemically treated genomic DNA (Homo sapiens) CpG-island No: 16708
taataaataacgaaaaaaataaatctaaaacaactatttcgctaaaaaataataaaaacattataaataacgaaaaacaacgcaaaattcgcaaaacaaattaaaattctcccgaaacactctaaaaaaaaccaacacttccgattttaaatcgactactccgaaccaaaaataaaataaaaacccgactaccgcgatacctaataaaacgcgaaacctaaccttactacctaaccgcctctaccgcgcaacccacctttacctatccttcgaccctaaaacgttaaccaataaaaataccaaactaatacgccaccaaaatcgaccccgtacacgctaaaaccaatcaaaatactacaaaaatcaaaaccgaccaattatcacaacaacctcgccgcgaaacgaaatcaaaaaaaaacctcctccaaaaaaaaaacgaaacgatacctcaacgaacgtaacaaaatactcaacacaaaccaataacgaattaacaccgaaacccgcgacgacgcgaaccaataaacgcaaacgctacgaaccaataaaaaaaataaaaaaaacgccgtaactaccctacgaataaaaaccaatacaaaaaaacatttcaaaaaaaataaacgaaactttatacac

SEQ ID NO: 16709 - DNA, 612 bp, Artificial Sequence
  chemically treated genomic DNA (Homo sapiens) CpG-island No: 16709
cgttcgtttttcggtttttgatgaaacggcgatttattattttttttttagattttggttcgtagtcggattatttcgggcgcgttgtcgattacgtggcgaagcggtgttttttagcgtcgtggttgcgcgtttattggtcggcggttggagtttcgggcgcgtttattggttgcggggggcgtttacgtggtagggggtttgggatggatttcggggtttcgagagttggtaggaaagttaaagggggtagcgcggtcgcggggagttcgagtttcgggtgattgttggagggaggaggtgatcgcgtagttttcgtgtacggacggatttcgtcgttcgcggggggcgcgaattcgagttcgggtttagtttttgtcgttacggtagttgtttttgtttttttagggcggatgttgtcgcgggttggcgcgtttgttttcgggatttatgagttgaattcggtacgtagttttttaagtttcgagttcgagggaagggttggggataataaggcgagggcgtgtagcggggatttttttgggtttttgttatttatatttttatcgtgcgatttgtattggtatatcggggttggaatattttaggtag

SEQ ID NO: 16710 - DNA, 612 bp, Artificial Sequence
  chemically treated genomic DNA (Homo sapiens) CpG-island No: 16710
ctacctaaaatattccaaccccgatataccaatacaaatcgcacgataaaaatataaataacaaaaacccaaaaaaatccccgctacacgccctcgccttattatccccaacccttccctcgaactcgaaacttaaaaaactacgtaccgaattcaactcataaatcccgaaaacaaacgcgccaacccgcgacaacatccgccctaaaaaaacaaaaacaactaccgtaacgacaaaaactaaacccgaactcgaattcgcgccccccgcgaacgacgaaatccgtccgtacacgaaaactacgcgatcacctcctccctccaacaatcacccgaaactcgaactccccgcgaccgcgctaccccctttaactttcctaccaactctcgaaaccccgaaatccatcccaaaccccctaccacgtaaacgccccccgcaaccaataaacgcgcccgaaactccaaccgccgaccaataaacgcgcaaccacgacgctaaaaaacaccgcttcgccacgtaatcgacaacgcgcccgaaataatccgactacgaaccaaaatctaaaaaaaaaataataaatcgccgtttcatcaaaaaccgaaaaacgaacg

SEQ ID NO: 16711 - DNA, 612 bp, Artificial Sequence
  chemically treated genomic DNA (Homo sapiens) CpG-island No: 16711
ttatttagagtgttttagtttcggtgtgttagtgtaagtcgtacggtgaaaatgtaggtgataggaatttaaagaggttttcgttgtacgttttcgttttgttgtttttagtttttttttcggattcgagatttggggagttacgtatcgggtttagtttataagtttcgagggtagacgcgttagttcgcggtagtattcgttttgggggaatagggatagttgtcgtgacggtaggagttgggttcgggttcgggttcgcgtttttcgcgggcggcgaagttcgttcgtgtacgagagttgcgcggttattttttttttttagtagttattcgggattcgagtttttcgcggtcgcgttgttttttttaatttttttgttagttttcgggatttcggggtttattttaggttttttgttacgtgaacgtttttcgtagttaatgggcgcgttcgggattttagtcgtcgattaatgggcgcgtagttacggcgttggggagtatcgtttcgttacgtgatcggtagcgcgttcggagtgattcggttgcgggttagggtttgggaagggggtggtgggtcgtcgttttattagaagtcggaggacgggcg

SEQ ID NO: 16712 - DNA, 612 bp, Artificial Sequence
  chemically treated genomic DNA (Homo sapiens) CpG-island No: 16712
cgcccgtcctccgacttctaataaaacgacgacccaccacccccttcccaaaccctaacccgcaaccgaatcactccgaacgcgctaccgatcacgtaacgaaacgatactccccaacgccgtaactacgcgcccattaatcgacgactaaaatcccgaacgcgcccattaactacgaaaaacgttcacgtaacaaaaaacctaaaataaaccccgaaatcccgaaaactaacaaaaaaattaaaaaaaacaacgcgaccgcgaaaaactcgaatcccgaataactactaaaaaaaaaaaataaccgcgcaactctcgtacacgaacgaacttcgccgcccgcgaaaaacgcgaacccgaacccgaacccaactcctaccgtcacgacaactatccctattcccccaaaacgaatactaccgcgaactaacgcgtctaccctcgaaacttataaactaaacccgatacgtaactccccaaatctcgaatccgaaaaaaaaactaaaaacaacaaaacgaaaacgtacaacgaaaacctctttaaattcctatcacctacattttcaccgtacgacttacactaacacaccgaaactaaaacactctaaataa

SEQ ID NO: 16713 - DNA, 1478 bp, Artificial Sequence
  chemically treated genomic DNA (Homo sapiens) CpG-island No: 16713
gcgttttcgtggttttattatttaagttttttattttattggggagaagcgttttttttcggtatttatattaaataataaattcgatacggtttttgaggaaagcgggagtcgtcgtttgggagagacgtaggggtttaaggcgtaggtaaattaatagtttttcgcgttgtttcgcgcggtcgttcgcgtcgtttgatatattttttttggtcgggttttttttcggcgtcgttgatcgttttcggttaggcgttttgtttcggggttcgggttcgttttttttttcgggttggcgggttttacgcgcgttatcgcgtttaatacgtatttttaacgcgtttcgggtcgggtttttggggattgcgtggtcgggttcgaggggtacgaaacgtttttcgtcgttttcgtcgttttcgtcgtcgtttattatttcgacgattattttttcgtttttttttttttcgtcgttatttttttttttcgcgttttttcggggttttttttttatacgttcgagtttttttcgtcgtttgttttcgtttttttcgttttcgttttttttttttagaagtagtagtatcggcgacgaggcggcggcggcggtttcggtggttcgaggggggtcggtttcggcgttgcgcggcggcggcggtagcggcggtttttagtttttcggggcgggcgtcggggtcgggttcgggatagggggcgggagttcgggtagggcggtttttttggcgggcgcgggcgtcggttcggtaggttgtagcgcggcgttttttcggcggttgtttaggttggagcgtttggttagacgtcgcgtttgtatgtttgagcgcggggttgcgggtcgcggcgcggggtcggagagtttgttatttttttttttttttttgttttcgtcggtggtcgtagggtcggggattcgcggtcgtaaggggttgtaggagtcgtcggttaggattcgcggttgttattggttgtagaggcgcgggcgtcgttttcgttggatcggtcggcggggacgtcggcggtcggcggttacggcggggcggcgcggcggtcgcgggcgggggtgggtgtgagcgagcggcgcgttgtcgttttcgtcgtcgtcgtcgtcgttcgggagtcgcgggtcgcgttgcgttttatgcggtcggcggtcgagttcgcgcgcgtttttttcggtcggttgcgttcgcgcgtttcgggtttatcgttgtcgtgtttcggcgcgagttgtttgtgttgtatgttttttattatcgttttttttttcgcgagttattttttataatttttcggttttttcgtttagataaaattcggattggatttttttttttttttatttatagttttcgaaagtttggcgtttcgaagtagttggttttgatattagggtaaacgtttaatcgtagtttattttttttttcggagggaggggagtagatttcgttggaagtaaggtt

SEQ ID NO: 16714 - DNA, 1478 bp, Artificial Sequence
  chemically treated genomic DNA (Homo sapiens) CpG-island No: 16714
aaccttacttccaacgaaatctactcccctccctccgaaaaaaaaaataaactacgattaaacgtttaccctaatatcaaaaccaactacttcgaaacgccaaactttcgaaaactataaataaaaaaaaaaaaaaatccaatccgaattttatctaaacgaaaaaaccgaaaaattataaaaaataactcgcgaaaaaaaaaacgataataaaaaacatacaacacaaacaactcgcgccgaaacacgacaacgataaacccgaaacgcgcgaacgcaaccgaccgaaaaaaacgcgcgcgaactcgaccgccgaccgcataaaacgcaacgcgacccgcgactcccgaacgacgacgacgacgacgaaaacgacaacgcgccgctcgctcacacccacccccgcccgcgaccgccgcgccgccccgccgtaaccgccgaccgccgacgtccccgccgaccgatccaacgaaaacgacgcccgcgcctctacaaccaataacaaccgcgaatcctaaccgacgactcctacaaccccttacgaccgcgaatccccgaccctacgaccaccgacgaaaacaaaaaaaaaaaaaaaaataacaaactctccgaccccgcgccgcgacccgcaaccccgcgctcaaacatacaaacgcgacgtctaaccaaacgctccaacctaaacaaccgccgaaaaaacgccgcgctacaacctaccgaaccgacgcccgcgcccgccaaaaaaaccgccctacccgaactcccgccccctatcccgaacccgaccccgacgcccgccccgaaaaactaaaaaccgccgctaccgccgccgccgcgcaacgccgaaaccgacccccctcgaaccaccgaaaccgccgccgccgcctcgtcgccgatactactacttctaaaaaaaaaaaacgaaaacgaaaaaaacgaaaacaaacgacgaaaaaaactcgaacgtataaaaaaaaaaccccgaaaaaacgcgaaaaaaaaaaataacgacgaaaaaaaaaaaaacgaaaaaataatcgtcgaaataataaacgacgacgaaaacgacgaaaacgacgaaaaacgtttcgtacccctcgaacccgaccacgcaatccccaaaaacccgacccgaaacgcgttaaaaatacgtattaaacgcgataacgcgcgtaaaacccgccaacccgaaaaaaaaaacgaacccgaaccccgaaacaaaacgcctaaccgaaaacgatcaacgacgccgaaaaaaaacccgaccaaaaaaaatatatcaaacgacgcgaacgaccgcgcgaaacaacgcgaaaaactattaatttacctacgccttaaacccctacgtctctcccaaacgacgactcccgctttcctcaaaaaccgtatcgaatttattatttaatataaataccgaaaaaaaacgcttctccccaataaaataaaaaacttaaataataaaaccacgaaaacgc

SEQ ID NO: 16715 - DNA, 1478 bp, Artificial Sequence
  chemically treated genomic DNA (Homo sapiens) CpG-island No: 16715
aattttatttttagcgaagtttattttttttttttcggagggaagaatgggttgcggttaagcgtttgttttggtgttagggttaattgtttcgaagcgttagattttcggagattgtgggtaagagaaaaaaaaaatttagttcgggttttgtttgagcggggggatcggagggttgtgaggaatggttcgcgaagaggggggcggtggtggaaaatatataatataaatagttcgcgtcgaggtacggtagcggtaggttcggagcgcgcgggcgtagtcggtcgggagaggcgcgcgcgggttcggtcgtcggtcgtatggagcgtagcgcggttcgcggttttcgggcggcggcggcggcggcggaggcggtagcgcgtcgttcgtttatatttattttcgttcgcggtcgtcgcgtcgtttcgtcgtagtcgtcggtcgtcggcgttttcgtcggtcggtttagcgaaggcggcgttcgcgtttttgtagttagtggtagtcgcgggttttggtcggcggtttttgtagttttttgcggtcgcgagttttcggttttgcggttatcggcggaggtagaggaggaagaggaggtgataaatttttcggtttcgcgtcgcggttcgtaatttcgcgtttaggtatgtaggcgcggcgtttagttaagcgttttagtttgggtagtcgtcgggggggcgtcgcgttgtagtttgtcgggtcggcgttcgcgttcgttaaggaagtcgttttattcgggttttcgttttttgtttcgggttcggtttcggcgttcgtttcggagagttggaggtcgtcgttgtcgtcgtcgtcgcgtagcgtcgggatcggtttttttcgggttatcggggtcgtcgtcgtcgtttcgtcgtcggtgttgttgtttttaggggaggaagacgaggacgaggagggcgggagtaggcggcggagggggttcgggcgtgtggaggagaagtttcgagggggcgcggaggaggaggatgacgacgaggaagaggaggacgaggaggtggtcgtcgaggtggtggacggcgacgaagacgacgaggacggcgaggagcgtttcgtgtttttcggattcggttacgtagtttttaggggttcggttcggggcgcgttgaaggtgcgtgttgggcgcggtggcgcgcgtgggattcgttagttcggggagggggacgggttcgggtttcggggtaaggcgtttggtcgaggacggttagcggcgtcggggagagattcggttaggaggggtgtgttaggcggcgcgggcggtcgcgcggggtagcgcgaggaattgttgatttgtttgcgttttgggtttttgcgttttttttaggcggcggttttcgttttttttaaaggtcgtgtcgggtttgttgtttggtgtgggtgtcgggaaagggcgtttttttttagtgaggtggggaatttgggtgatgggattacggaggcgt

SEQ ID NO: 16716 - DNA, 1478 bp, Artificial Sequence
  chemically treated genomic DNA (Homo sapiens) CpG-island No: 16716
acgcctccgtaatcccatcacccaaattccccacctcactaaaaaaaaacgccctttcccgacacccacaccaaacaacaaacccgacacgacctttaaaaaaaacgaaaaccgccgcctaaaaaaaacgcaaaaacccaaaacgcaaacaaatcaacaattcctcgcgctaccccgcgcgaccgcccgcgccgcctaacacacccctcctaaccgaatctctccccgacgccgctaaccgtcctcgaccaaacgccttaccccgaaacccgaacccgtccccctccccgaactaacgaatcccacgcgcgccaccgcgcccaacacgcaccttcaacgcgccccgaaccgaacccctaaaaactacgtaaccgaatccgaaaaacacgaaacgctcctcgccgtcctcgtcgtcttcgtcgccgtccaccacctcgacgaccacctcctcgtcctcctcttcctcgtcgtcatcctcctcctccgcgccccctcgaaacttctcctccacacgcccgaaccccctccgccgcctactcccgccctcctcgtcctcgtcttcctcccctaaaaacaacaacaccgacgacgaaacgacgacgacgaccccgataacccgaaaaaaaccgatcccgacgctacgcgacgacgacgacaacgacgacctccaactctccgaaacgaacgccgaaaccgaacccgaaacaaaaaacgaaaacccgaataaaacgacttccttaacgaacgcgaacgccgacccgacaaactacaacgcgacgcccccccgacgactacccaaactaaaacgcttaactaaacgccgcgcctacatacctaaacgcgaaattacgaaccgcgacgcgaaaccgaaaaatttatcacctcctcttcctcctctacctccgccgataaccgcaaaaccgaaaactcgcgaccgcaaaaaactacaaaaaccgccgaccaaaacccgcgactaccactaactacaaaaacgcgaacgccgccttcgctaaaccgaccgacgaaaacgccgacgaccgacgactacgacgaaacgacgcgacgaccgcgaacgaaaataaatataaacgaacgacgcgctaccgcctccgccgccgccgccgccgcccgaaaaccgcgaaccgcgctacgctccatacgaccgacgaccgaacccgcgcgcgcctctcccgaccgactacgcccgcgcgctccgaacctaccgctaccgtacctcgacgcgaactatttatattatatattttccaccaccgcccccctcttcgcgaaccattcctcacaaccctccgatccccccgctcaaacaaaacccgaactaaattttttttttctcttacccacaatctccgaaaatctaacgcttcgaaacaattaaccctaacaccaaaacaaacgcttaaccgcaacccattcttccctccgaaaaaaaaaaaataaacttcgctaaaaataaaatt

SEQ ID NO: 16717 - DNA, 636 bp, Artificial Sequence
  chemically treated genomic DNA (Homo sapiens) CpG-island No: 16717
ttttcgcggtcgtcgggttcggagtttaaagttggggggcgggcggggaggcgtttttcggacgcgcgatttttaggtttcggaatattcgtcgtttatacggtatcgttcggtttagacgtcgtaggtttcggaggcgggcgaggttcggggcgttcgtcgatttatttttttaagaagtttaggaatagtttttggtatttttcggttatttcgtcgcggatttttaggtgttggttgtcggcgttcggtttcgttgtcgtcgcgaggtttatatttgtttagtgtcgaggattcgtttgcgttacgttcgatcgttataagtcgtttttttttagacgttgtagttttgcgcgcgtcgtcgtcgttttcgtttcgttttttttttcgatttgtacggtcggaattaatcgtgatataggagttggagatttcgcgttaaatttgattaatgaacggcgtttttttaagagttttagtttacggaaagggatttcgcgttaaatgtaaagtttttttggagaaagtttatttgtttttgcgtttgcgtagtgtagtcgtggttcgcgggtatttttggttgttggaataagttcgaatttgagggttttgttcgagtggttttttaaatgtttt

SEQ ID NO: 16718 - DNA, 636 bp, Artificial Sequence
  chemically treated genomic DNA (Homo sapiens) CpG-island No: 16718
aaaacatttaaaaaaccactcgaacaaaaccctcaaattcgaacttattccaacaaccaaaaatacccgcgaaccacgactacactacgcaaacgcaaaaacaaataaactttctccaaaaaaactttacatttaacgcgaaatccctttccgtaaactaaaactcttaaaaaaacgccgttcattaatcaaatttaacgcgaaatctccaactcctatatcacgattaattccgaccgtacaaatcgaaaaaaaaaacgaaacgaaaacgacgacgacgcgcgcaaaactacaacgtctaaaaaaaaacgacttataacgatcgaacgtaacgcaaacgaatcctcgacactaaacaaatataaacctcgcgacgacaacgaaaccgaacgccgacaaccaacacctaaaaatccgcgacgaaataaccgaaaaataccaaaaactattcctaaacttcttaaaaaaataaatcgacgaacgccccgaacctcgcccgcctccgaaacctacgacgtctaaaccgaacgataccgtataaacgacgaatattccgaaacctaaaaatcgcgcgtccgaaaaacgcctccccgcccgccccccaactttaaactccgaacccgacgaccgcgaaaa

SEQ ID NO: 16719 - DNA, 636 bp, Artificial Sequence
  chemically treated genomic DNA (Homo sapiens) CpG-island No: 16719
agaatatttgaaaaattattcggataaaatttttagattcgaatttgttttagtagttaaaaatattcgcgggttacggttatattgcgtaggcgtaaaggtagatgggttttttttagaagggttttgtatttggcgcgaaattttttttcgtgggttggggtttttggagaggcgtcgtttattggttaggtttggcgcgaaatttttagtttttgtgttacgattggtttcggtcgtgtaggtcggaagagggggcggggcggaagcggcggcggcgcgcgtaaagttgtagcgtttggaaaaaagcgatttgtggcggtcgagcgtggcgtaggcgaattttcggtattaagtaaatatggatttcgcggcggtagcggagtcgggcgtcggtagttagtatttggaggttcgcgacgaggtggtcgagaagtgttagaaattgtttttggattttttggaggagtaagtcggcgagcgtttcgggtttcgttcgttttcggagtttgcggcgtttgggtcgggcggtgtcgtgtgggcggcgggtgtttcggaatttgggggtcgcgcgttcgggaagcgttttttcgttcgttttttaattttaggtttcgagttcggcggtcgcgagga

SEQ ID NO: 16720 - DNA, 636 bp, Artificial Sequence
  chemically treated genomic DNA (Homo sapiens) CpG-island No: 16720
tcctcgcgaccgccgaactcgaaacctaaaattaaaaaacgaacgaaaaaacgcttcccgaacgcgcgacccccaaattccgaaacacccgccgcccacacgacaccgcccgacccaaacgccgcaaactccgaaaacgaacgaaacccgaaacgctcgccgacttactcctccaaaaaatccaaaaacaatttctaacacttctcgaccacctcgtcgcgaacctccaaatactaactaccgacgcccgactccgctaccgccgcgaaatccatatttacttaataccgaaaattcgcctacgccacgctcgaccgccacaaatcgcttttttccaaacgctacaactttacgcgcgccgccgccgcttccgccccgccccctcttccgacctacacgaccgaaaccaatcgtaacacaaaaactaaaaatttcgcgccaaacctaaccaataaacgacgcctctccaaaaaccccaacccacgaaaaaaaatttcgcgccaaatacaaaacccttctaaaaaaaacccatctacctttacgcctacgcaatataaccgtaacccgcgaatatttttaactactaaaacaaattcgaatctaaaaattttatccgaataatttttcaaatattct

SEQ ID NO: 16721 - DNA, 549 bp, Artificial Sequence
  chemically treated genomic DNA (Homo sapiens) CpG-island No: 16721
gggggggagacgagtgggagaggtagggggacgggcggggaagcgggtcggacgagagtgaggtggttttaggggcgggttgtgtgagacggtgcgtgtggagaggcgggttcggagcggaggcgttgcgacgtcgggtacggcgcgaagcggagaagggcgagagatttgggcgagtagggtaatcgcgttacgcgcgagtcgtgtggattcgaggggcgcggagttcgcgtaggcggggtggttcgtgagcgtcgggagcgcggagagcgtgagtatacggatcggtgggatcgtagagatgtgtggcgcggagaggggcggtcgagttgaaagtggagacggcggggacgggagagcggggtagtttcggaattgtgagaggcgagacgtcgcgaacgttcggagcgcgggaatttcggagtcgcgagattgtagtagcggcggtcgcgggacgtcggagagggagggtcgcggatgggtgaagtcggaagggtggaaagcggagtgttcgtgtgaggagacgttgagattgggggaggtcgagtt

SEQ ID NO: 16722 - DNA, 549 bp, Artificial Sequence
  chemically treated genomic DNA (Homo sapiens) CpG-island No: 16722
aactcgacctcccccaatctcaacgtctcctcacacgaacactccgctttccacccttccgacttcacccatccgcgaccctccctctccgacgtcccgcgaccgccgctactacaatctcgcgactccgaaattcccgcgctccgaacgttcgcgacgtctcgcctctcacaattccgaaactaccccgctctcccgtccccgccgtctccactttcaactcgaccgcccctctccgcgccacacatctctacgatcccaccgatccgtatactcacgctctccgcgctcccgacgctcacgaaccaccccgcctacgcgaactccgcgcccctcgaatccacacgactcgcgcgtaacgcgattaccctactcgcccaaatctctcgcccttctccgcttcgcgccgtacccgacgtcgcaacgcctccgctccgaacccgcctctccacacgcaccgtctcacacaacccgcccctaaaaccacctcactctcgtccgacccgcttccccgcccgtccccctacctctcccactcgtctccccccc

SEQ ID NO: 16723 - DNA, 549 bp, Artificial Sequence
  chemically treated genomic DNA (Homo sapiens) CpG-island No: 16723
aattcgattttttttagttttagcgtttttttatacgggtatttcgttttttattttttcggttttatttattcgcggtttttttttttcgacgtttcgcgatcgtcgttattatagtttcgcgatttcggaattttcgcgtttcgggcgttcgcgacgtttcgttttttatagtttcgaggttgtttcgttttttcgttttcgtcgtttttatttttaattcggtcgttttttttcgcgttatatatttttgcggttttatcgattcgtgtatttacgtttttcgcgttttcggcgtttacggattatttcgtttgcgcggatttcgcgtttttcgggtttatacggttcgcgcgtaacgcggttgttttgttcgtttagatttttcgttttttttcgtttcgcgtcgtgttcggcgtcgtagcgttttcgtttcgaattcgtttttttatacgtatcgttttatataattcgtttttgggattattttattttcgttcgattcgttttttcgttcgtttttttattttttttattcgtttttttttt

SEQ ID NO: 16724 - DNA, 549 bp, Artificial Sequence
  chemically treated genomic DNA (Homo sapiens) CpG-island No: 16724
aaaaaaaaaacgaataaaaaaaataaaaaaacgaacgaaaaaacgaatcgaacgaaaataaaataatcccaaaaacgaattatataaaacgatacgtataaaaaaacgaattcgaaacgaaaacgctacgacgccgaacacgacgcgaaacgaaaaaaaacgaaaaatctaaacgaacaaaacaaccgcgttacgcgcgaaccgtataaacccgaaaaacgcgaaatccgcgcaaacgaaataatccgtaaacgccgaaaacgcgaaaaacgtaaatacacgaatcgataaaaccgcaaaaatatataacgcgaaaaaaaacgaccgaattaaaaataaaaacgacgaaaacgaaaaaacgaaacaacctcgaaactataaaaaacgaaacgtcgcgaacgcccgaaacgcgaaaattccgaaatcgcgaaactataataacgacgatcgcgaaacgtcgaaaaaaaaaaaccgcgaataaataaaaccgaaaaaataaaaaacgaaatacccgtataaaaaaacgctaaaactaaaaaaaatcgaatt

SEQ ID NO: 16725 - DNA, 774 bp, Artificial Sequence
  chemically treated genomic DNA (Homo sapiens) CpG-island No: 16725
atattaggcgattaatttgtcgtaaggtttttttgattttgatggttcgcgttatttataggagcggttggcgtattacgttgtatagggggtaaattaatacgcgtttatgatcggcgtgtaggttttgcgcgaggcgattgtttagaaaacggaacgtttgtatggttattaattagatgtcgatagcgatattatcgtaacggtaggggcgacggaagcgttatacgcggcgattatcgtattggtgcgtaatggcgatgaagtgatttgttttgattttagttatgatagttacgttttcgttatcgcgttttttgggggaatagtgaagcgtatggtattgtaattatcgtattttcgcgttgattggtaggaatttgtcgtattattaagcgagcgtattagattggtgatttttaatatttcgtataattttagtgtaattgtttggtagtaggttgatttcgtcgttttgtggtaggcgatcgtcgggtacgagatttttgttattagcgatgaagtttacgagtatattaattttttataatagggttatgttagtgtgttggcgtattcgtagttgcgtgagcgggtagtggcggtttttttatttggtaagatttattatatgatcggttggaaagtgggttattgtgttgcgttagcgtttattagcgtcgaaattcgtaaggtatattagtatttgattttttcggtgaaaaatttcggtataagatggcgtttggttgatatgttacgtgtagaatttga

SEQ ID NO: 16726 - DNA, 774 bp, Artificial Sequence
  chemically treated genomic DNA (Homo sapiens) CpG-island No: 16726
tcaaattctacacgtaacatatcaaccaaacgccatcttataccgaaatttttcaccgaaaaaatcaaatactaatataccttacgaatttcgacgctaataaacgctaacgcaacacaataacccactttccaaccgatcatataataaatcttaccaaataaaaaaaccgccactacccgctcacgcaactacgaatacgccaacacactaacataaccctattataaaaaattaatatactcgtaaacttcatcgctaataacaaaaatctcgtacccgacgatcgcctaccacaaaacgacgaaatcaacctactaccaaacaattacactaaaattatacgaaatattaaaaatcaccaatctaatacgctcgcttaataatacgacaaattcctaccaatcaacgcgaaaatacgataattacaataccatacgcttcactattcccccaaaaaacgcgataacgaaaacgtaactatcataactaaaatcaaaacaaatcacttcatcgccattacgcaccaatacgataatcgccgcgtataacgcttccgtcgcccctaccgttacgataatatcgctatcgacatctaattaataaccatacaaacgttccgttttctaaacaatcgcctcgcgcaaaacctacacgccgatcataaacgcgtattaatttaccccctatacaacgtaatacgccaaccgctcctataaataacgcgaaccatcaaaatcaaaaaaaccttacgacaaattaatcgcctaatat

SEQ ID NO: 16727 - DNA, 774 bp, Artificial Sequence
  chemically treated genomic DNA (Homo sapiens) CpG-island No: 16727
ttaggttttgtacgtagtatattagttaagcgttattttgtgtcggggttttttatcgaaaaggttagatattgatgtattttgcgaatttcggcgttgatgggcgttggcgtaatataataatttattttttagtcggttatatgataggttttgttaaatgaagaaatcgttattgttcgtttacgtagttgcggatgcgttagtatattggtatggttttgttgtgaaaagttgatgtgttcgtagattttatcgttaatgataaaaatttcgtgttcggcgatcgtttgttataaagcggcgaaattagtttgttgttagatagttgtattggggttatgcggagtgttgaggattattagtttggtgcgttcgtttaataatgcggtaaatttttgttagttaacgcgaaaatgcggtggttgtagtgttatacgttttattatttttttagaaagcgcgatggcgggggcgtaattgttatagttgggattaaaataaattattttatcgttattgcgtattagtgcggtaatcgtcgcgtataacgttttcgtcgtttttgtcgttacggtgatatcgttatcggtatttggttgatagttatataaacgtttcgttttttgagtaatcgtttcgcgtaaggtttgtacgtcggttatgggcgcgtattggtttgttttttgtgtaacgtggtgcgttagtcgtttttgtaaatagcgcggattattaaaattaggaaagttttgcgataggttaatcgtttggtgt

SEQ ID NO: 16728 - DNA, 774 bp, Artificial Sequence
  chemically treated genomic DNA (Homo sapiens) CpG-island No: 16728
acaccaaacgattaacctatcgcaaaactttcctaattttaataatccgcgctatttacaaaaacgactaacgcaccacgttacacaaaaaacaaaccaatacgcgcccataaccgacgtacaaaccttacgcgaaacgattactcaaaaaacgaaacgtttatataactatcaaccaaataccgataacgatatcaccgtaacgacaaaaacgacgaaaacgttatacgcgacgattaccgcactaatacgcaataacgataaaataatttattttaatcccaactataacaattacgcccccgccatcgcgctttctaaaaaaataataaaacgtataacactacaaccaccgcattttcgcgttaactaacaaaaatttaccgcattattaaacgaacgcaccaaactaataatcctcaacactccgcataaccccaatacaactatctaacaacaaactaatttcgccgctttataacaaacgatcgccgaacacgaaatttttatcattaacgataaaatctacgaacacatcaacttttcacaacaaaaccataccaatatactaacgcatccgcaactacgtaaacgaacaataacgatttcttcatttaacaaaacctatcatataaccgactaaaaaataaattattatattacgccaacgcccatcaacgccgaaattcgcaaaatacatcaatatctaaccttttcgataaaaaaccccgacacaaaataacgcttaactaatatactacgtacaaaacctaa

SEQ ID NO: 16729 - DNA, 627 bp, Artificial Sequence
  chemically treated genomic DNA (Homo sapiens) CpG-island No: 16729
acgtgtcgcggcggtttggaaattgtaggcggttagtgtcgttttcgtttcgcggttttcgtggggcgtttcgagggtgcgttattgtggcgcggcggatttagggcgttcgggggatgcgggtttaagcgttgcgtcgtaggtaaagttcgttttcggttttggggaagtttgtgattagcggaatagaagggtattatttttttgtttcgaggcggttttgcgttcgcggtgttagaatttggggttattcgagcggcgtgggcgcgggcggtagtcggcgtcgcgagaagcgatttttagaaatcgcgggtttttagtttcggggtagcgcgttaagagcgtagagtgggaaagtgaattgatcgtttaagtagcgggtggttaattcgcgtgttatgttcgggttttcggggattttattttatttatttacggtttttttttcgatattttttacggtcgtcgttttatttgttcgggtatttgttcgggtttttttttgggcgttgcgtattttacggcgttttcggcgggtgtttcggaggtaggttgtgtgcgcgtgtaaagtggtttttcggaaggtttaataataataatatataaaattttaggtttttacggata

SEQ ID NO: 16730 - DNA, 627 bp, Artificial Sequence
  chemically treated genomic DNA (Homo sapiens) CpG-island No: 16730
tatccgtaaaaacctaaaattttatatattattattattaaaccttccgaaaaaccactttacacgcgcacacaacctacctccgaaacacccgccgaaaacgccgtaaaatacgcaacgcccaaaaaaaaacccgaacaaatacccgaacaaataaaacgacgaccgtaaaaaatatcgaaaaaaaaaccgtaaataaataaaataaaatccccgaaaacccgaacataacacgcgaattaaccacccgctacttaaacgatcaattcactttcccactctacgctcttaacgcgctaccccgaaactaaaaacccgcgatttctaaaaatcgcttctcgcgacgccgactaccgcccgcgcccacgccgctcgaataaccccaaattctaacaccgcgaacgcaaaaccgcctcgaaacaaaaaaataatacccttctattccgctaatcacaaacttccccaaaaccgaaaacgaactttacctacgacgcaacgcttaaacccgcatcccccgaacgccctaaatccgccgcgccacaataacgcaccctcgaaacgccccacgaaaaccgcgaaacgaaaacgacactaaccgcctacaatttccaaaccgccgcgacacgt

SEQ ID NO: 16731 - DNA, 627 bp, Artificial Sequence
  chemically treated genomic DNA (Homo sapiens) CpG-island No: 16731
tgttcgtaagaatttagagttttatgtattattattattaagtttttcgagggattattttgtacgcgtatataatttgttttcgggatattcgtcgggggcgtcgtggggtgcgtagcgtttaaggggagattcgggtaggtattcgagtaggtggagcggcgatcgtggagggtgtcgggagggaaatcgtaggtggatagagtgggattttcgagagttcggatatgatacgcgggttgattattcgttgtttaggcgattagtttatttttttattttgcgtttttggcgcgttgtttcggggttggagattcgcggtttttgagagtcgtttttcgcggcgtcggttgtcgttcgcgtttacgtcgttcggataattttaggttttggtatcgcgagcgtaaagtcgtttcggagtagggaaatggtgtttttttgtttcgttggttataagtttttttaaagtcgagaacgaattttgtttacgacgtaacgtttgggttcgtatttttcgggcgttttggattcgtcgcgttatagtagcgtattttcggggcgttttacggagatcgcgaggcgagagcggtattggtcgtttgtagtttttaaatcgtcgcggtacgt

SEQ ID NO: 16732 - DNA, 627 bp, Artificial Sequence
  chemically treated genomic DNA (Homo sapiens) CpG-island No: 16732
acgtaccgcgacgatttaaaaactacaaacgaccaataccgctctcgcctcgcgatctccgtaaaacgccccgaaaatacgctactataacgcgacgaatccaaaacgcccgaaaaatacgaacccaaacgttacgtcgtaaacaaaattcgttctcgactttaaaaaaacttataaccaacgaaacaaaaaaacaccatttccctactccgaaacgactttacgctcgcgataccaaaacctaaaattatccgaacgacgtaaacgcgaacgacaaccgacgccgcgaaaaacgactctcaaaaaccgcgaatctccaaccccgaaacaacgcgccaaaaacgcaaaataaaaaaataaactaatcgcctaaacaacgaataatcaacccgcgtatcatatccgaactctcgaaaatcccactctatccacctacgatttccctcccgacaccctccacgatcgccgctccacctactcgaatacctacccgaatctccccttaaacgctacgcaccccacgacgcccccgacgaatatcccgaaaacaaattatatacgcgtacaaaataatccctcgaaaaacttaataataataatacataaaactctaaattcttacgaaca

SEQ ID NO: 16733 - DNA, 785 bp, Artificial Sequence
  chemically treated genomic DNA (Homo sapiens) CpG-island No: 16733
tttagggcgatgtaatttttgtcgtcgtaggcgtattggtggtattcgcggaggaagcgttagttcgattttacgtcgtagttatatattttttggacggtgtgagaatttggttcggatttcgcggttagttcggtttttcgagtttcgtttcgtttcgattaatttggggggatttttggtttaaattgaaaatgaaatcgggtaaaggcgtttgggtttttttcggggtaagggtttcggggtttcgcggtttcggggcggatttcggattcggagattgtgggcgatttggttcgttcgtgggggatgagaggtcgtgatttgcgtttcgggtcggggttatttatcggtttcgttttggttgtagtagtcgcgtagggtttttaggtttattcggtgagtttgtgagtgggtttttatttttcgtgttttttcgttttaatatttcggatttttttgttttatttacggcgttcgcggttttattttttggttcgcggcgtcgttgtcgaatcgtacgaattgcgtgtcgtttacgtagtttattgcgatgaagcggggtttttcgcggtcgggtcgggatacggatgtgaagaaatattttatggagtgagagtttggggacgaggagtggttgagattcgttcgatttttttttcggcgcggtttttcgggttttgcgttttcgttaggcgggttcgttgtttttttttatagaggtcgtttttttttcgatttcgtatttattcgtttaggtttgggttagggttagagttttcgag

SEQ ID NO: 16734 - DNA, 785 bp, Artificial Sequence
  chemically treated genomic DNA (Homo sapiens) CpG-island No: 16734
ctcgaaaactctaaccctaacccaaacctaaacgaataaatacgaaatcgaaaaaaaaacgacctctataaaaaaaaacaacgaacccgcctaacgaaaacgcaaaacccgaaaaaccgcgccgaaaaaaaaatcgaacgaatctcaaccactcctcgtccccaaactctcactccataaaatatttcttcacatccgtatcccgacccgaccgcgaaaaaccccgcttcatcgcaataaactacgtaaacgacacgcaattcgtacgattcgacaacgacgccgcgaaccaaaaaataaaaccgcgaacgccgtaaataaaacaaaaaaatccgaaatattaaaacgaaaaaacacgaaaaataaaaacccactcacaaactcaccgaataaacctaaaaaccctacgcgactactacaaccaaaacgaaaccgataaataaccccgacccgaaacgcaaatcacgacctctcatcccccacgaacgaaccaaatcgcccacaatctccgaatccgaaatccgccccgaaaccgcgaaaccccgaaacccttaccccgaaaaaaacccaaacgcctttacccgatttcattttcaatttaaaccaaaaatccccccaaattaatcgaaacgaaacgaaactcgaaaaaccgaactaaccgcgaaatccgaaccaaattctcacaccgtccaaaaaatatataactacgacgtaaaatcgaactaacgcttcctccgcgaataccaccaatacgcctacgacgacaaaaattacatcgccctaaa

SEQ ID NO: 16735 - DNA, 785 bp, Artificial Sequence
  chemically treated genomic DNA (Homo sapiens) CpG-island No: 16735
ttcgggggttttggttttgatttagatttgggcgggtgagtgcggggtcgggagggaaacggtttttgtggggagaagtaacgggttcgtttggcgggggcgtaggattcgggaagtcgcgtcgggaggagggtcgggcgggttttagttatttttcgtttttaggtttttattttatgaggtatttttttatattcgtgtttcggttcggtcgcggggagtttcgttttatcgtagtgggttacgtggacgatacgtagttcgtgcggttcgatagcgacgtcgcgagttagaggatggagtcgcgggcgtcgtggatagagtaggagggttcggagtattgggacggggagatacggaaagtgaaggtttatttatagatttatcgagtggatttggggattttgcgcggttattataattagagcgaggtcggtgagtgatttcggttcggggcgtaggttacgattttttattttttacggacgggttaggtcgtttatagttttcgggttcgagattcgtttcgaagtcgcgggatttcgagatttttgtttcgggagaggtttaggcgtttttattcggttttatttttagtttaggttaaaaatttttttaggttggtcggggcggggcggggttcgggggatcgggttgatcgcggggttcgggttaggtttttatatcgtttagaggatgtatggttgcgacgtggggtcggattggcgtttttttcgcgggtattattagtacgtttacgacggtaaggattatatcgttttgaa

SEQ ID NO: 16736 - DNA, 785 bp, Artificial Sequence
  chemically treated genomic DNA (Homo sapiens) CpG-island No: 16736
ttcaaaacgatataatccttaccgtcgtaaacgtactaataatacccgcgaaaaaaacgccaatccgaccccacgtcgcaaccatacatcctctaaacgatataaaaacctaacccgaaccccgcgatcaacccgatcccccgaaccccgccccgccccgaccaacctaaaaaaatttttaacctaaactaaaaataaaaccgaataaaaacgcctaaacctctcccgaaacaaaaatctcgaaatcccgcgacttcgaaacgaatctcgaacccgaaaactataaacgacctaacccgtccgtaaaaaataaaaaatcgtaacctacgccccgaaccgaaatcactcaccgacctcgctctaattataataaccgcgcaaaatccccaaatccactcgataaatctataaataaaccttcactttccgtatctccccgtcccaatactccgaaccctcctactctatccacgacgcccgcgactccatcctctaactcgcgacgtcgctatcgaaccgcacgaactacgtatcgtccacgtaacccactacgataaaacgaaactccccgcgaccgaaccgaaacacgaatataaaaaaatacctcataaaataaaaacctaaaaacgaaaaataactaaaacccgcccgaccctcctcccgacgcgacttcccgaatcctacgcccccgccaaacgaacccgttacttctccccacaaaaaccgtttccctcccgaccccgcactcacccgcccaaatctaaatcaaaaccaaaacccccgaa

SEQ ID NO: 16737 - DNA, 571 bp, Artificial Sequence
  chemically treated genomic DNA (Homo sapiens) CpG-island No: 16737
tttatcgttatagttattcgtttgatggcgagacgtggtatatcgtgtcggtgacgtatgaggcgtggaagttgtcggacgattatatcggcgggcgcggtttttttatcggcgcgtttgtgggtttgtattgcgaggatattagcggcgacggttgttacgcggatttcgattattttattttacgaagttttcggtttttaatcgcgtttaggttcgggttagtttagcgcgcgcgagagcgcgagttcggtttgttgaagttgttcgcggaaattagtttagtttcgcgtcgtttacgcgggaggttagcgtcgataggtttagggcggcgatgacgcgggattcgtggttttatatcggtatcgttacgtagcgtacgttttgttcgtttttttcgttgtttagcgcgtagttttgttcgcgggtttgcgttagggcgtttattacggtttcgtagagacgcgtagcggtggcggcgcgttttacgtagttgtattgatagttttttagtgtattgtatttattttgttggacgatgaaatggaatagtttttaatatgttaaagtt

SEQ ID NO: 16738 - DNA, 571 bp, Artificial Sequence
  chemically treated genomic DNA (Homo sapiens) CpG-island No: 16738
aactttaacatattaaaaactattccatttcatcgtccaacaaaataaatacaatacactaaaaaactatcaatacaactacgtaaaacgcgccgccaccgctacgcgtctctacgaaaccgtaataaacgccctaacgcaaacccgcgaacaaaactacgcgctaaacaacgaaaaaaacgaacaaaacgtacgctacgtaacgataccgatataaaaccacgaatcccgcgtcatcgccgccctaaacctatcgacgctaacctcccgcgtaaacgacgcgaaactaaactaatttccgcgaacaacttcaacaaaccgaactcgcgctctcgcgcgcgctaaactaacccgaacctaaacgcgattaaaaaccgaaaacttcgtaaaataaaataatcgaaatccgcgtaacaaccgtcgccgctaatatcctcgcaatacaaacccacaaacgcgccgataaaaaaaccgcgcccgccgatataatcgtccgacaacttccacgcctcatacgtcaccgacacgatataccacgtctcgccatcaaacgaataactataacgataaa

SEQ ID NO: 16739 - DNA, 571 bp, Artificial Sequence
  chemically treated genomic DNA (Homo sapiens) CpG-island No: 16739
ggttttgatatattaggggttattttattttatcgtttaataaaatgggtgtagtatattggagggttattagtatagttacgtggagcgcgtcgttatcgttgcgcgtttttgcgaagtcgtaatgagcgttttggcgtagattcgcgagtaaggttacgcgttggatagcgaagagaacgagtagggcgtgcgttgcgtggcggtgtcggtgtggaattacgagtttcgcgttatcgtcgttttgagtttgtcgacgttgatttttcgcgtggacgacgcggagttgggttaattttcgcgagtagttttagtaggtcgggttcgcgttttcgcgcgcgttgggttagttcgggtttgagcgcggttaggagtcgggggtttcgtagggtgaagtagtcgaagttcgcgtagtagtcgtcgtcgttgatgttttcgtagtgtaggtttataaacgcgtcggtgaagaagtcgcgttcgtcgatgtagtcgttcgatagtttttacgttttatacgttatcggtacggtgtgttacgtttcgttattaaacgagtagttgtagcggtaga

SEQ ID NO: 16740 - DNA, 571 bp, Artificial Sequence
  chemically treated genomic DNA (Homo sapiens) CpG-island No: 16740
tctaccgctacaactactcgtttaataacgaaacgtaacacaccgtaccgataacgtataaaacgtaaaaactatcgaacgactacatcgacgaacgcgacttcttcaccgacgcgtttataaacctacactacgaaaacatcaacgacgacgactactacgcgaacttcgactacttcaccctacgaaacccccgactcctaaccgcgctcaaacccgaactaacccaacgcgcgcgaaaacgcgaacccgacctactaaaactactcgcgaaaattaacccaactccgcgtcgtccacgcgaaaaatcaacgtcgacaaactcaaaacgacgataacgcgaaactcgtaattccacaccgacaccgccacgcaacgcacgccctactcgttctcttcgctatccaacgcgtaaccttactcgcgaatctacgccaaaacgctcattacgacttcgcaaaaacgcgcaacgataacgacgcgctccacgtaactatactaataaccctccaatatactacacccattttattaaacgataaaataaaataacccctaatatatcaaaacc

SEQ ID NO: 16741 - DNA, 508 bp, Artificial Sequence
  chemically treated genomic DNA (Homo sapiens) CpG-island No: 16741
ttagcgcgagagcgttcgaaggggaggtcgaggaggagcgggaggaggagtttcgtcgtttttgtagggtttcgtttaaagttcgcgcgcgcgcgcggcgcggtttcgggaagatggaggtcgggcgcgttagagagtcggcgtttgagggcgtttgggttggggttaggtcggggggcggggcgaggttgtagtatcgggggcggggtcgcgttttggaggcggggtttcgggcgaggggcgtggtttgcgggtattcggtgggtggggaggtttgggttgggttgggttgggtttagcggtagcgcgcggttcgtagattttgttttatttcggttttcgagatcgaagtttcggaggtggtttcgcggatttggagtagtgagttattagtgtcggggagcgggaggcggtagcgtcggtgggcgtcgattttttttcgggtgattttgagaagggtttttttttttttggttttggtgttttttcggtgaagggttgttttttt

SEQ ID NO: 16742 - DNA, 508 bp, Artificial Sequence
  chemically treated genomic DNA (Homo sapiens) CpG-island No: 16742
aaaaaaacaacccttcaccgaaaaaacaccaaaaccaaaaaaaaaaaaacccttctcaaaatcacccgaaaaaaaatcgacgcccaccgacgctaccgcctcccgctccccgacactaataactcactactccaaatccgcgaaaccacctccgaaacttcgatctcgaaaaccgaaataaaacaaaatctacgaaccgcgcgctaccgctaaacccaacccaacccaacccaaacctccccacccaccgaatacccgcaaaccacgcccctcgcccgaaaccccgcctccaaaacgcgaccccgcccccgatactacaacctcgccccgccccccgacctaaccccaacccaaacgccctcaaacgccgactctctaacgcgcccgacctccatcttcccgaaaccgcgccgcgcgcgcgcgcgaactttaaacgaaaccctacaaaaacgacgaaactcctcctcccgctcctcctcgacctccccttcgaacgctctcgcgctaa

SEQ ID NO: 16743 - DNA, 508 bp, Artificial Sequence
  chemically treated genomic DNA (Homo sapiens) CpG-island No: 16743
aagggaataattttttatcgggagaatattaaggttagaaggggaagagttttttttaaggttattcgggaggaaatcggcgtttatcggcgttgtcgtttttcgtttttcggtattggtgatttattgttttaggttcgcggggttattttcgagatttcggtttcgaggatcgaggtgggatagggtttgcggatcgcgcgttgtcgttggatttagtttaatttaatttaggtttttttatttatcgggtgttcgtaggttacgtttttcgttcggagtttcgtttttagaacgcggtttcgttttcgatattgtagtttcgtttcgtttttcggtttaattttagtttaggcgtttttaggcgtcggttttttagcgcgttcgatttttattttttcggggtcgcgtcgcgcgcgcgcgcgggttttgggcgggattttgtagaggcggcggggttttttttttcgttttttttcggtttttttttcgggcgttttcgcgttaa

SEQ ID NO: 16744 - DNA, 508 bp, Artificial Sequence
  chemically treated genomic DNA (Homo sapiens) CpG-island No: 16744
ttaacgcgaaaacgcccgaaaaaaaaaccgaaaaaaaacgaaaaaaaaaaccccgccgcctctacaaaatcccgcccaaaacccgcgcgcgcgcgcgacgcgaccccgaaaaaataaaaatcgaacgcgctaaaaaaccgacgcctaaaaacgcctaaactaaaattaaaccgaaaaacgaaacgaaactacaatatcgaaaacgaaaccgcgttctaaaaacgaaactccgaacgaaaaacgtaacctacgaacacccgataaataaaaaaacctaaattaaattaaactaaatccaacgacaacgcgcgatccgcaaaccctatcccacctcgatcctcgaaaccgaaatctcgaaaataaccccgcgaacctaaaacaataaatcaccaataccgaaaaacgaaaaacgacaacgccgataaacgccgatttcctcccgaataaccttaaaaaaaactcttccccttctaaccttaatattctcccgataaaaaattattccctt

SEQ ID NO: 16745 - DNA, 1158 bp, Artificial Sequence
  chemically treated genomic DNA (Homo sapiens) CpG-island No: 16745
  unsure (1091, 1093, 1097..1098, 1156)
tgtcgtttcggggtcgtaggagttattcgggttttcgcgttttaaggtttttgtgtcggtggggcgcgggaagatcggtttcgggggttggggttgcggtttaaaggttaaaaatgcgggagaggcgtgggcgcgaggcgggataagtttcgtatagtcgtcgtttcgtaagggtaaaaaagtagaaaaagtcgtttggggttaaattttcgggtttgagaaattacgttttcgaggacgaattcgcggtgggaggatatatggggtataggggatattgttcgcggcgtttgttcggttcgtcgtgggtgcgagtcgtcgttttcgtttcggtagttagcgcggtttacgtggagttattgcgttggtcgagtcgtcgggtcgtttgggtttcgggagtgcgcgttcgagtttttcgtcgcggtcgtttacgttcgagcgtcgtcgtcgtcggtttcgcgtgtgtttcgttgaagggaaggggcgggtcgggggtgggggcggaggggttgtggttttattgtagcgggggtttttgtgtttttgtgcggaaatgatatacggagtttcgttacgttacgcgagagtaggtatcggatatatataaagagaggggaaaatatacggcgttcgtcgttcgtcgtttttagcgttttttcgggtcgttttggtaggtttttcgcgcgcggtttttatttttcggttttgcgtttttttttttatgtggcgtttaaattcggcgcgggttcgtcggtataagtatagaattcgcgttttaggtaagtgcggggcggattaagtcggtcgcgcgcgggaagtcgtatggcggtttcgggtcgagtcggtcggtagagtggttgtaatatttatgtcggggtgggggcgggacgaggggagggtatacggagaggtgttgtttcgagcgcgtttagcggtagtagcgcgtattttcggtgcggtttgagcgatcggagcggtgcgagggtattcgtggttcgtcgcgttttatttgtggtgtgcggttttttttgtgtacgttcggaacgcggcggtttttataggcgtttttggggagtatcgtgcgttcgcgngncggnngggggttcgtcgcggtgaaatagttcggcgtcgtcggtagttgttcggtttaaatttngt

SEQ ID NO: 16746 - DNA, 1158 bp, Artificial Sequence
  chemically treated genomic DNA (Homo sapiens) CpG-island No: 16746
  unsure (3, 61..62, 66, 68)
acnaaatttaaaccgaacaactaccgacgacgccgaactatttcaccgcgacgaacccccnnccgncncgcgaacgcacgatactccccaaaaacgcctataaaaaccgccgcgttccgaacgtacacaaaaaaaaccgcacaccacaaataaaacgcgacgaaccacgaataccctcgcaccgctccgatcgctcaaaccgcaccgaaaatacgcgctactaccgctaaacgcgctcgaaacaacacctctccgtataccctcccctcgtcccgcccccaccccgacataaatattacaaccactctaccgaccgactcgacccgaaaccgccatacgacttcccgcgcgcgaccgacttaatccgccccgcacttacctaaaacgcgaattctatacttataccgacgaacccgcgccgaatttaaacgccacataaaaaaaaaaacgcaaaaccgaaaaataaaaaccgcgcgcgaaaaacctaccaaaacgacccgaaaaaacgctaaaaacgacgaacgacgaacgccgtatattttcccctctctttatatatatccgatacctactctcgcgtaacgtaacgaaactccgtatatcatttccgcacaaaaacacaaaaacccccgctacaataaaaccacaacccctccgcccccacccccgacccgccccttcccttcaacgaaacacacgcgaaaccgacgacgacgacgctcgaacgtaaacgaccgcgacgaaaaactcgaacgcgcactcccgaaacccaaacgacccgacgactcgaccaacgcaataactccacgtaaaccgcgctaactaccgaaacgaaaacgacgactcgcacccacgacgaaccgaacaaacgccgcgaacaatatcccctataccccatatatcctcccaccgcgaattcgtcctcgaaaacgtaatttctcaaacccgaaaatttaaccccaaacgactttttctacttttttacccttacgaaacgacgactatacgaaacttatcccgcctcgcgcccacgcctctcccgcatttttaacctttaaaccgcaaccccaacccccgaaaccgatcttcccgcgccccaccgacacaaaaaccttaaaacgcgaaaacccgaataactcctacgaccccgaaacgaca

SEQ ID NO: 16747 - DNA, 1158 bp, Artificial Sequence
  chemically treated genomic DNA (Homo sapiens) CpG-island No: 16747
  unsure (3, 61..62, 66, 68)
gtnaaatttgggtcgggtagttgtcggcggcgtcggattgttttatcgcggcgaatttttnntcgntncgcgggcgtacggtgttttttaagaacgtttatggaagtcgtcgcgtttcgagcgtgtataaaaggggtcgtatattataaatgagacgcggcgagttacggatgttttcgtatcgtttcggtcgtttaggtcgtatcgggggtgcgcgttattatcgttgggcgcgttcggagtagtattttttcgtatatttttttttcgtttcgtttttatttcggtatggatgttgtagttattttatcggtcggttcgattcggagtcgttatacgatttttcgcgcgcggtcggtttgattcgtttcgtatttatttgggacgcgagttttgtatttatgtcggcgggttcgcgtcgagtttgggcgttatatgggggggagggcgtagggtcggggagtgggggtcgcgcgcggagggtttgttagggcggttcggggaggcgttgggggcggcgggcggcgagcgtcgtgtatttttttttttttttgtgtgtgttcgatgtttgttttcgcgtgacgtgacgggatttcgtgtgttattttcgtataaggatataggagttttcgttgtagtggaattataattttttcgtttttattttcggttcgttttttttttttagcggggtatacgcgggatcggcggcggcggcgttcgggcgtgaacggtcgcggcggggagttcgggcgcgtattttcgggatttaggcggttcggcggttcggttagcgtagtggttttacgtgggtcgcgttggttgtcggggcgggggcggcggttcgtatttacggcgggtcgggtaggcgtcgcgaataatgttttttgtattttatgtgtttttttatcgcgagttcgttttcggaaacgtggttttttagattcgagagtttggttttaaacggttttttttatttttttgtttttgcgggacggcgattgtgcggagtttgtttcgtttcgcgtttacgtttttttcgtatttttggtttttgggtcgtagttttagttttcggggtcggttttttcgcgttttatcggtataaagattttggggcgcgagggttcgggtggtttttgcggtttcggggcggta

SEQ ID NO: 16748 - DNA, 1158 bp, Artificial Sequence
  chemically treated genomic DNA (Homo sapiens) CpG-island No: 16748
  unsure (1091, 1093, 1097..1098, 1156)
taccgccccgaaaccgcaaaaaccacccgaaccctcgcgccccaaaatctttataccgataaaacgcgaaaaaaccgaccccgaaaactaaaactacgacccaaaaaccaaaaatacgaaaaaaacgtaaacgcgaaacgaaacaaactccgcacaatcgccgtcccgcaaaaacaaaaaaataaaaaaaaccgtttaaaaccaaactctcgaatctaaaaaaccacgtttccgaaaacgaactcgcgataaaaaaacacataaaatacaaaaaacattattcgcgacgcctacccgacccgccgtaaatacgaaccgccgcccccgccccgacaaccaacgcgacccacgtaaaaccactacgctaaccgaaccgccgaaccgcctaaatcccgaaaatacgcgcccgaactccccgccgcgaccgttcacgcccgaacgccgccgccgccgatcccgcgtataccccgctaaaaaaaaaaaacgaaccgaaaataaaaacgaaaaaattataattccactacaacgaaaactcctatatccttatacgaaaataacacacgaaatcccgtcacgtcacgcgaaaacaaacatcgaacacacacaaaaaaaaaaaaaaatacacgacgctcgccgcccgccgcccccaacgcctccccgaaccgccctaacaaaccctccgcgcgcgacccccactccccgaccctacgccctcccccccatataacgcccaaactcgacgcgaacccgccgacataaatacaaaactcgcgtcccaaataaatacgaaacgaatcaaaccgaccgcgcgcgaaaaatcgtataacgactccgaatcgaaccgaccgataaaataactacaacatccataccgaaataaaaacgaaacgaaaaaaaaatatacgaaaaaatactactccgaacgcgcccaacgataataacgcgcacccccgatacgacctaaacgaccgaaacgatacgaaaacatccgtaactcgccgcgtctcatttataatatacgaccccttttatacacgctcgaaacgcgacgacttccataaacgttcttaaaaaacaccgtacgcccgcgnancgannaaaaattcgccgcgataaaacaatccgacgccgccgacaactacccgacccaaatttnac

SEQ ID NO: 16749 - DNA, 581 bp, Artificial Sequence
  chemically treated genomic DNA (Homo sapiens) CpG-island No: 16749
atcgtcgttaatttttggtgtttcgtgaaagatgttttttttttcggggtttcggagtcggagtatttgtagatagtttttgtttttttattcggttgtcggtttgggggtttcgtcgtttttcggagtcgttcgtcgcgttttttagttcgcgtcgttttgcgcggttcgtcggtttttttatttattagattttttgtgcgtatcgtcgcgcgttttttttattttttaaatgcggagcggagcggggagtaaaattattttcggtttggatttagcgttttcggggatcggtcgcgcgttttttgcgttcgcgggtcgggatgcggttttgagttagcggcggtttttagttcgattgggtttgtcggggttgtttcgcgtacggtaaggttcggggttggggcgcggggcgcggggagcgttggtcgggagcggggggtcgggttttgcggcgcgcgggggcgtgggtgtcgggcgtaggggatcgcggcgcggtcgcgtattgtaggcgtgtttttttgttttttttttcgttttttttaaatgaagggaaagaaaattgttatagattaaatgtt

SEQ ID NO: 16750 - DNA, 581 bp, Artificial Sequence
  chemically treated genomic DNA (Homo sapiens) CpG-island No: 16750
aacatttaatctataacaattttctttcccttcatttaaaaaaaacgaaaaaaaaaacaaaaaaacacgcctacaatacgcgaccgcgccgcgatcccctacgcccgacacccacgcccccgcgcgccgcaaaacccgaccccccgctcccgaccaacgctccccgcgccccgcgccccaaccccgaaccttaccgtacgcgaaacaaccccgacaaacccaatcgaactaaaaaccgccgctaactcaaaaccgcatcccgacccgcgaacgcaaaaaacgcgcgaccgatccccgaaaacgctaaatccaaaccgaaaataattttactccccgctccgctccgcatttaaaaaataaaaaaaacgcgcgacgatacgcacaaaaaatctaataaataaaaaaaccgacgaaccgcgcaaaacgacgcgaactaaaaaacgcgacgaacgactccgaaaaacgacgaaacccccaaaccgacaaccgaataaaaaaacaaaaactatctacaaatactccgactccgaaaccccgaaaaaaaaaacatctttcacgaaacaccaaaaattaacgacgat

SEQ ID NO: 16751 - DNA, 581 bp, Artificial Sequence
  chemically treated genomic DNA (Homo sapiens) CpG-island No: 16751
gatatttggtttgtaataattttttttttttttatttaaaaggaacgaaggagaaaatagaagagtacgtttgtagtgcgcggtcgcgtcgcggttttttgcgttcggtatttacgttttcgcgcgtcgtaggattcggtttttcgttttcggttagcgtttttcgcgtttcgcgttttagtttcgggttttatcgtgcgcggggtagtttcggtaggtttagtcgggttggaagtcgtcgttggtttagagtcgtatttcggttcgcggacgtagggggcgcgcggtcggttttcggaggcgttgggtttaggtcgaggatggttttgtttttcgtttcgtttcgtatttaggaggtgggaggagcgcgcggcgatgcgtataggaaatttgataggtgaggaggtcggcgggtcgcgtagggcggcgcgggttgggggacgcggcgggcggtttcgggaggcgacgggatttttaggtcggtagtcgagtgaagaggtaggaattgtttataaatgtttcggtttcgaagtttcgagggaaagagtattttttacggagtattaggaattgacgacggt

SEQ ID NO: 16752 - DNA, 581 bp, Artificial Sequence
  chemically treated genomic DNA (Homo sapiens) CpG-island No: 16752
accgtcgtcaattcctaatactccgtaaaaaatactctttccctcgaaacttcgaaaccgaaacatttataaacaattcctacctcttcactcgactaccgacctaaaaatcccgtcgcctcccgaaaccgcccgccgcgtcccccaacccgcgccgccctacgcgacccgccgacctcctcacctatcaaatttcctatacgcatcgccgcgcgctcctcccacctcctaaatacgaaacgaaacgaaaaacaaaaccatcctcgacctaaacccaacgcctccgaaaaccgaccgcgcgccccctacgtccgcgaaccgaaatacgactctaaaccaacgacgacttccaacccgactaaacctaccgaaactaccccgcgcacgataaaacccgaaactaaaacgcgaaacgcgaaaaacgctaaccgaaaacgaaaaaccgaatcctacgacgcgcgaaaacgtaaataccgaacgcaaaaaaccgcgacgcgaccgcgcactacaaacgtactcttctattttctccttcgttccttttaaataaaaaaaaaaaaaattattacaaaccaaatatc

SEQ ID NO: 16753 - DNA, 540 bp, Artificial Sequence
  chemically treated genomic DNA (Homo sapiens) CpG-island No: 16753
gttcgcgtaataggcgtttggcgtaggcgttaattggatgattattatttgcgtcgcgtcgttcgcgacggtagaaaaaggttacgtaatggtataacgttgcgggggtgaaatttagatagagttgttcggtaattggacgttggacgacgttcgcgattggtatcgtattggcgtgcggtaggttatttattatcgcggtcgtgatgtataggttagcgggtaatagtggggcgaagtcgatttggtacgtatgaaggcgtttttagatatcggttttgagttttttattattggcgggattatttttgttgatttgtcgttgtttaaagatattcgcgtgaaagcgtttattgtcgggcgggtattggtaggcgcggtaaattcggcgtaagtggttggcgatttttatgcgtaaatcgacgttatttggggaggtgcgcgtgcgtaattattagttagggatttatgaaaaagcgttggcgaaagattttttttggtcggagcggttggtgttggtaaaaagttgcggttttgatt

SEQ ID NO: 16754 - DNA, 540 bp, Artificial Sequence
  chemically treated genomic DNA (Homo sapiens) CpG-island No: 16754
aatcaaaaccgcaactttttaccaacaccaaccgctccgaccaaaaaaaatctttcgccaacgctttttcataaatccctaactaataattacgcacgcgcacctccccaaataacgtcgatttacgcataaaaatcgccaaccacttacgccgaatttaccgcgcctaccaatacccgcccgacaataaacgctttcacgcgaatatctttaaacaacgacaaatcaacaaaaataatcccgccaataataaaaaactcaaaaccgatatctaaaaacgccttcatacgtaccaaatcgacttcgccccactattacccgctaacctatacatcacgaccgcgataataaataacctaccgcacgccaatacgataccaatcgcgaacgtcgtccaacgtccaattaccgaacaactctatctaaatttcacccccgcaacgttataccattacgtaacctttttctaccgtcgcgaacgacgcgacgcaaataataatcatccaattaacgcctacgccaaacgcctattacgcgaac

SEQ ID NO: 16755 - DNA, 540 bp, Artificial Sequence
  chemically treated genomic DNA (Homo sapiens) CpG-island No: 16755
aattaaaatcgtagttttttgttagtattagtcgtttcggttaggagagatttttcgttagcgtttttttataaatttttaattgatgattacgtacgcgtatttttttagatagcgtcgatttgcgtatggaaatcgttagttatttgcgtcggatttgtcgcgtttgttagtgttcgttcggtaataaacgtttttacgcggatatttttaaatagcggtaggttagtaggggtaatttcgttagtaatggaaagtttaaggtcgatatttgaaagcgtttttatgcgtgttagatcggtttcgttttattgttgttcgttggtttgtgtattacgatcgcgatgataaatggtttgtcgtacgttaatacgatgttagtcgcgggcgtcgtttagcgtttagttatcgaatagttttatttgaattttattttcgtagcgttgtgttattgcgtggtttttttttatcgtcgcgagcggcgcggcgtagatgatggttatttagttagcgtttgcgttaaacgtttgttgcgcgagt

SEQ ID NO: 16756 - DNA, 540 bp, Artificial Sequence
  chemically treated genomic DNA (Homo sapiens) CpG-island No: 16756
actcgcgcaacaaacgtttaacgcaaacgctaactaaataaccatcatctacgccgcgccgctcgcgacgataaaaaaaaaccacgcaataacacaacgctacgaaaataaaattcaaataaaactattcgataactaaacgctaaacgacgcccgcgactaacatcgtattaacgtacgacaaaccatttatcatcgcgatcgtaatacacaaaccaacgaacaacaataaaacgaaaccgatctaacacgcataaaaacgctttcaaatatcgaccttaaactttccattactaacgaaattacccctactaacctaccgctatttaaaaatatccgcgtaaaaacgtttattaccgaacgaacactaacaaacgcgacaaatccgacgcaaataactaacgatttccatacgcaaatcgacgctatctaaaaaaatacgcgtacgtaatcatcaattaaaaatttataaaaaaacgctaacgaaaaatctctcctaaccgaaacgactaatactaacaaaaaactacgattttaatt

SEQ ID NO: 16757 - DNA, 884 bp, Artificial Sequence
  chemically treated genomic DNA (Homo sapiens) CpG-island No: 16757
ttttattttttatgttcgtcgtattgttattgtttgtggtgttgtggttcgattttttcgtgcggatatttttattagtaatcgaaggtcgcgattttaattcgatgttgtaatatttcggttttattttttatttatcgttgttttattttggttatggcggtttgatggtagcggcgagcgtggcgttggcgagtttattgcgcggcgagtttgatggtgtttgcgttcgaatttgttggcgttgggcgttatttggttggagtgtattaacggcggggattattttcggtttttggtgggtttattgcgaattcggttggggcggttggtggttttgggattcggtggaaaacgtttttttattattttggttttttgttattgcgttgttgtatagtttgtttttgatacgttagcgggggattttttgttattggtcgttgttgttggcgatagttattttgatgttgtcgttgttgggtattttaattgttcgttttggtattttggtttcggtttatgcgttcgcgttggataacgttcgcgtcgtgtcgttgtttagtttgtttgtattgattagttttgcgtttttggttttgtatgggttgggaacgtcgggacggtgggttcggcgggtgtattttatcgggcggataaacgtcggggaaaatgtttaaatattttcgggaaaggcgggtgggtaggttatgcgtttaggggtttatgagtatcggatcggtggggaaatatttttttaattcggcggaaataaaagggtcgtatttgagagcggggatagtattttttttttcggagggcgtatcgttaatttataatcgcggtagaagtattatagacgggaggtagtaaatcgacggcgg

SEQ ID NO: 16758 - DNA, 884 bp, Artificial Sequence
  chemically treated genomic DNA (Homo sapiens) CpG-island No: 16758
ccgccgtcgatttactacctcccgtctataatacttctaccgcgattataaattaacgatacgccctccgaaaaaaaaaatactatccccgctctcaaatacgacccttttatttccgccgaattaaaaaaatatttccccaccgatccgatactcataaacccctaaacgcataacctacccacccgcctttcccgaaaatatttaaacattttccccgacgtttatccgcccgataaaatacacccgccgaacccaccgtcccgacgttcccaacccatacaaaaccaaaaacgcaaaactaatcaatacaaacaaactaaacaacgacacgacgcgaacgttatccaacgcgaacgcataaaccgaaaccaaaataccaaaacgaacaattaaaatacccaacaacgacaacatcaaaataactatcgccaacaacaacgaccaataacaaaaaatcccccgctaacgtatcaaaaacaaactatacaacaacgcaataacaaaaaaccaaaataataaaaaaacgttttccaccgaatcccaaaaccaccaaccgccccaaccgaattcgcaataaacccaccaaaaaccgaaaataatccccgccgttaatacactccaaccaaataacgcccaacgccaacaaattcgaacgcaaacaccatcaaactcgccgcgcaataaactcgccaacgccacgctcgccgctaccatcaaaccgccataaccaaaataaaacaacgataaataaaaaataaaaccgaaatattacaacatcgaattaaaatcgcgaccttcgattactaataaaaatatccgcacgaaaaaatcgaaccacaacaccacaaacaataacaatacgacgaacataaaaaataaaa

SEQ ID NO: 16759 - DNA, 884 bp, Artificial Sequence
  chemically treated genomic DNA (Homo sapiens) CpG-island No: 16759
tcgtcgtcggtttattgtttttcgtttgtggtatttttgtcgcggttataaattggcggtgcgtttttcgaggggagaggtgttgttttcgtttttaggtgcggtttttttattttcgtcggattaaaggggtgtttttttatcggttcggtgtttatgagtttttgggcgtataatttgtttattcgtttttttcgagggtatttaagtatttttttcggcgtttattcgttcggtaaaatgtattcgtcgggtttatcgtttcggcgtttttagtttatatagagttagagacgtaaggttaattagtgtaaataggttgaataacggtacggcgcggacgttatttagcgcgaacgtatgaatcgaaattagaatgttagaacggataattaaggtgtttagtagcgatagtattagagtaattatcgttagtaatagcgattagtggtaaaaaatttttcgttggcgtgttagggataaattgtgtagtagcgtagtggtagaaagttagggtaataaagaggcgttttttatcggattttagaattattagtcgttttagtcgagttcgtagtaggtttattaggaatcgaggatgattttcgtcgttaatgtattttagttaggtaacgtttagcgttagtaaattcgggcgtaggtattattaaattcgtcgcgtagtagattcgttagcgttacgttcgtcgttattattaaatcgttatagttaaggtaaagtagcggtggatgaaagataagatcgggatgttgtagtatcggattgagatcgcggttttcgattgttggtggaaatattcgtacgaagggatcggattatagtattataaatagtagtagtgcggcgagtatgagagataaaa

SEQ ID NO: 16760 - DNA, 884 bp, Artificial Sequence
  chemically treated genomic DNA (Homo sapiens) CpG-island No: 16760
ttttatctctcatactcgccgcactactactatttataatactataatccgatcccttcgtacgaatatttccaccaacaatcgaaaaccgcgatctcaatccgatactacaacatcccgatcttatctttcatccaccgctactttaccttaactataacgatttaataataacgacgaacgtaacgctaacgaatctactacgcgacgaatttaataatacctacgcccgaatttactaacgctaaacgttacctaactaaaatacattaacgacgaaaatcatcctcgattcctaataaacctactacgaactcgactaaaacgactaataattctaaaatccgataaaaaacgcctctttattaccctaactttctaccactacgctactacacaatttatccctaacacgccaacgaaaaattttttaccactaatcgctattactaacgataattactctaatactatcgctactaaacaccttaattatccgttctaacattctaatttcgattcatacgttcgcgctaaataacgtccgcgccgtaccgttattcaacctatttacactaattaaccttacgtctctaactctatataaactaaaaacgccgaaacgataaacccgacgaatacattttaccgaacgaataaacgccgaaaaaaatacttaaataccctcgaaaaaaacgaataaacaaattatacgcccaaaaactcataaacaccgaaccgataaaaaaacacccctttaatccgacgaaaataaaaaaaccgcacctaaaaacgaaaacaacacctctcccctcgaaaaacgcaccgccaatttataaccgcgacaaaaataccacaaacgaaaaacaataaaccgacgacga

SEQ ID NO: 16761 - DNA, 586 bp, Artificial Sequence
  chemically treated genomic DNA (Homo sapiens) CpG-island No: 16761
cgttggtcgtatttgtcgttttttttttatttcggatggaagaattcgttgaacgtcgttcggcggtagttgtaatacgcgtcgtttgtttatagggattatggcgggtcgattatggataagagtaagcgttatttggcgtggtgggttgtcgggttattggcggtggcggttatcgtggcgtggtggttgttgcgttcggtaggtgtgtcggaaggttttgttgttagtaatgggcgtattgaagcgacggaagtggatattgttagtaaaattgtcgggcgtatcgatattattttggtgaaagaaggtaagtagttcgcgaaggtgaagtgttggcgaagatggatattcgcgtgttgtaggaatagcgattggaagttatcgcgtaaattaaagaggtataaagcgttttgattgacgcgataagtttgttgtagtatcgataaaaggaaaaatcgaggtcggtaacgtagataggggaaatatacggattagcggtaaattggatttcgaagtaaagacgtataatagacggtattagggaataatcggatttaattaaggggataatatagataaataa

SEQ ID NO: 16762 - DNA, 586 bp, Artificial Sequence
  chemically treated genomic DNA (Homo sapiens) CpG-island No: 16762
ttatttatctatattatccccttaattaaatccgattattccctaataccgtctattatacgtctttacttcgaaatccaatttaccgctaatccgtatatttcccctatctacgttaccgacctcgatttttccttttatcgatactacaacaaacttatcgcgtcaatcaaaacgctttatacctctttaatttacgcgataacttccaatcgctattcctacaacacgcgaatatccatcttcgccaacacttcaccttcgcgaactacttaccttctttcaccaaaataatatcgatacgcccgacaattttactaacaatatccacttccgtcgcttcaatacgcccattactaacaacaaaaccttccgacacacctaccgaacgcaacaaccaccacgccacgataaccgccaccgccaataacccgacaacccaccacgccaaataacgcttactcttatccataatcgacccgccataatccctataaacaaacgacgcgtattacaactaccgccgaacgacgttcaacgaattcttccatccgaaataaaaaaaaaacgacaaatacgaccaacg

SEQ ID NO: 16763 - DNA, 586 bp, Artificial Sequence
  chemically treated genomic DNA (Homo sapiens) CpG-island No: 16763
ttgtttgtttatattgtttttttggttgggttcgattgttttttggtatcgtttattatgcgtttttgtttcggagtttagtttgtcgttggttcgtgtgttttttttgtttgcgttgtcggtttcgatttttttttttgtcggtgttgtagtaagtttgtcgcgttagttaaggcgttttgtgtttttttgatttgcgcgatggtttttagtcgttgtttttgtaatacgcgagtatttattttcgttagtattttattttcgcgaattatttgtttttttttattagaatggtgtcgatacgttcggtaattttgttggtaatatttattttcgtcgttttaatgcgtttattattgatagtaaagtttttcggtatatttgtcgggcgtaatagttattacgttacgatagtcgttatcgttagtaattcgataatttattacgttagatggcgtttatttttatttataatcgattcgttataatttttgtaagtaaacgacgcgtgttataattgtcgtcgaacgacgtttagcggatttttttattcgggataagaaggaaacggtaaatacgattagcg

SEQ ID NO: 16764 - DNA, 586 bp, Artificial Sequence
  chemically treated genomic DNA (Homo sapiens) CpG-island No: 16764
cgctaatcgtatttaccgtttccttcttatcccgaataaaaaaatccgctaaacgtcgttcgacgacaattataacacgcgtcgtttacttacaaaaattataacgaatcgattataaataaaaataaacgccatctaacgtaataaattatcgaattactaacgataacgactatcgtaacgtaataactattacgcccgacaaatataccgaaaaactttactatcaataataaacgcattaaaacgacgaaaataaatattaccaacaaaattaccgaacgtatcgacaccattctaataaaaaaaaacaaataattcgcgaaaataaaatactaacgaaaataaatactcgcgtattacaaaaacaacgactaaaaaccatcgcgcaaatcaaaaaaacacaaaacgccttaactaacgcgacaaacttactacaacaccgacaaaaaaaaaaatcgaaaccgacaacgcaaacaaaaaaaacacacgaaccaacgacaaactaaactccgaaacaaaaacgcataataaacgataccaaaaaacaatcgaacccaaccaaaaaaacaatataaacaaacaa

SEQ ID NO: 16765 - DNA, 2006 bp, Artificial Sequence
  chemically treated genomic DNA (Homo sapiens) CpG-island No: 16765
cgagttataagcgcggtggagcggggaagcgaatgaaatcgtttagttgaatggttggttgcgtacgttatattttcgtagaggcggtcgtatttggagttttatttttgtcgtaggattttcgcgagtcgtttttatcgtttcgtttcgcgtcgtttttaatgattgttttttgttaaaataaatttggtcgttttaaaaataaaataaaatttttagtcgggaacgtagttattttcgggtcgttttttagtgcgggttatattttgtattttacgggtcggggttttcgcgaggggaaggggcgggggcggggggcggtgtacggaaaattcggggagtaaacgtgtttaatgtttattaatttttcgtagtttttgttgtgttcgttgtttttttagtttaattttttcggtaataattggaaagatacgaaacgtatacgagtgattattttttcggcgcggggggggcggggggcggggggtcgggggcgggcggcgggcggcgggcggggggcgcgggcgagtattttttagggtaaggtcggtaggaggaattcgagggagcgcggggacgggcgcgtatagatttggtattgttttagtttttgtattagtatttgcggtcgagagacgcgcggttaggggtggggtcgggttcggggcgtttttgttttattttcgtttattattcgcgattttcggcggcggggatattggggacgttaagttcgtagtcgttcgcgggttcgtatttatttgggtcgtttttcgatacgggttcgtcgataggtatcgggcgataaggaagtatagttttgcgggaagataaggagttaggttaagtttcggcggggaggggagggggacggggttaggggagtcgggggagttcggggagtcggggaagtcgaagtagtcgggagcgttagggcgggggtggtacggtttcgcgttttattcgattcgatgagaggtatcgggcgtcgggcggacgacggtttcgttatggtcgggcgcggggcgggaggcgggagcgagcgagcgagcggagcgtgtaggtcgcgtcgaggtttgatcgggttggcgttttttttttttaggcgcgcgtcgtcgtcgtcgtcgtcgtcgttatatcgtgcgcgtcgtttggatcgacgttttcgcgggggaggaagtagttttttcgcgggagacgaaaagtagttttttcgcggggggcgggggtttgcgttaagagaggatcggagttcgtgtttcgttcggggaggcgaatttcgtttagttttttgttttcggggattcgatgaggagaaagtgacgcggaggtaaagatttgggcgtcgtagtagcgagtgggggaggggagggcgcgtggttcgaatttttgcgcgtaatgaggcggttgttcgggttttgtgaggcggtagcgcgacgtcgggtggtttagtagcgggcgggtgtcgggggcggaagcgcggttataagagggggcgatttatcgtcgtttttcgtgggatttgggttttttacgcgggatcgtaggggtttcgagtcgcgggttgggtaaggtcgttcgtttcgggtcgttcggaagggttattttacggatcggtcgtttggggttagtgcgttttgtttcgtacggaagatttttcgtttcgaggataggaaagtttttaaagtgaggattggttcgtcgcgtttttcgtagaggggaacgtcgttcggattcgcgtttttggggcgggggtttcgtatgttggcgttgtcggagcgtttgcggcgttgaaggttgtcgagatttagttatattttttataagttagtagttcggtagaaaattatataaaatgtagcgtttcgtcgagggggtgcgagtcgggggagtagcgcgtagttgcggttgacggttcggttggatttatttaagtatggataggaaaacgggattgtggggagagggtggtgtagacgggtcgtagattttttttaggaagagaa

SEQ ID NO: 16766 - DNA, 2006 bp, Artificial Sequence
  chemically treated genomic DNA (Homo sapiens) CpG-island No: 16766
ttctcttcctaaaaaaaatctacgacccgtctacaccaccctctccccacaatcccgttttcctatccatacttaaataaatccaaccgaaccgtcaaccgcaactacgcgctactcccccgactcgcaccccctcgacgaaacgctacattttatataattttctaccgaactactaacttataaaaaatataactaaatctcgacaaccttcaacgccgcaaacgctccgacaacgccaacatacgaaacccccgccccaaaaacgcgaatccgaacgacgttcccctctacgaaaaacgcgacgaaccaatcctcactttaaaaactttcctatcctcgaaacgaaaaatcttccgtacgaaacaaaacgcactaaccccaaacgaccgatccgtaaaataacccttccgaacgacccgaaacgaacgaccttacccaacccgcgactcgaaacccctacgatcccgcgtaaaaaacccaaatcccacgaaaaacgacgataaatcgccccctcttataaccgcgcttccgcccccgacacccgcccgctactaaaccacccgacgtcgcgctaccgcctcacaaaacccgaacaaccgcctcattacgcgcaaaaattcgaaccacgcgccctcccctcccccactcgctactacgacgcccaaatctttacctccgcgtcactttctcctcatcgaatccccgaaaacaaaaaactaaacgaaattcgcctccccgaacgaaacacgaactccgatcctctcttaacgcaaacccccgccccccgcgaaaaaactacttttcgtctcccgcgaaaaaactacttcctcccccgcgaaaacgtcgatccaaacgacgcgcacgatataacgacgacgacgacgacgacgacgcgcgcctaaaaaaaaaaaacgccaacccgatcaaacctcgacgcgacctacacgctccgctcgctcgctcgctcccgcctcccgccccgcgcccgaccataacgaaaccgtcgtccgcccgacgcccgatacctctcatcgaatcgaataaaacgcgaaaccgtaccacccccgccctaacgctcccgactacttcgacttccccgactccccgaactcccccgactcccctaaccccgtccccctcccctccccgccgaaacttaacctaactccttatcttcccgcaaaactatacttccttatcgcccgatacctatcgacgaacccgtatcgaaaaacgacccaaataaatacgaacccgcgaacgactacgaacttaacgtccccaatatccccgccgccgaaaatcgcgaataataaacgaaaataaaacaaaaacgccccgaacccgaccccacccctaaccgcgcgtctctcgaccgcaaatactaatacaaaaactaaaacaataccaaatctatacgcgcccgtccccgcgctccctcgaattcctcctaccgaccttaccctaaaaaatactcgcccgcgccccccgcccgccgcccgccgcccgcccccgaccccccgccccccgccccccccgcgccgaaaaaataatcactcgtatacgtttcgtatctttccaattattaccgaaaaaattaaactaaaaaaacaacgaacacaacaaaaactacgaaaaattaataaacattaaacacgtttactccccgaattttccgtacaccgccccccgcccccgccccttcccctcgcgaaaaccccgacccgtaaaatacaaaatataacccgcactaaaaaacgacccgaaaataactacgttcccgactaaaaattttattttatttttaaaacgaccaaatttattttaacaaaaaacaatcattaaaaacgacgcgaaacgaaacgataaaaacgactcgcgaaaatcctacgacaaaaataaaactccaaatacgaccgcctctacgaaaatataacgtacgcaaccaaccattcaactaaacgatttcattcgcttccccgctccaccgcgcttataactcg

SEQ ID NO: 16767 - DNA, 2006 bp, Artificial Sequence
  chemically treated genomic DNA (Homo sapiens) CpG-island No: 16767
ttttttttttaaggagggtttgcggttcgtttgtattattttttttttatagtttcgtttttttgtttatgtttggatggatttagtcgagtcgttagtcgtagttgcgcgttgttttttcgattcgtattttttcggcgaagcgttgtattttatgtaattttttgtcgggttgttggtttgtgggggatgtggttgggtttcggtagtttttagcgtcgtagacgtttcggtaacgttagtatacgaggttttcgttttaggagcgcgggttcgggcggcgtttttttttgcgggaggcgcggcgagttaatttttattttaaaagtttttttgttttcgaagcgaggggtttttcgtgcggggtaagacgtattggttttagacgatcggttcgtgaaatgattttttcgagcgattcggagcgggcgattttgtttaattcgcgattcggggtttttgcggtttcgcgtagaggatttaggttttacggggggcggcggtgaatcgtttttttttgtggtcgcgttttcgttttcggtattcgttcgttgttgggttattcggcgtcgcgttgtcgttttataaagttcgggtagtcgttttattgcgcgtagggattcggattacgcgttttttttttttttattcgttgttgcggcgtttaggtttttgttttcgcgttattttttttttatcgagttttcggaggtagagagttgagcgaggttcgttttttcgggcgggatacgagtttcggtttttttttggcgtaaattttcgtttttcgcggagggattatttttcgtttttcgcggaggaattattttttttttcgcggaggcgtcggtttaggcggcgcgtacggtatggcggcggcggcggcggcggcggcgcgcgtttgagaagaggggacgttagttcggttaggtttcggcgcggtttatacgtttcgttcgttcgttcgttttcgtttttcgtttcgcgttcggttatggcggagtcgtcgttcgttcgacgttcggtgttttttatcgagtcgggtaagacgcgaggtcgtgttattttcgttttggcgttttcggttgtttcggttttttcggtttttcgggttttttcggtttttttggtttcgtttttttttttttttcgtcggggtttgatttgattttttgttttttcgtagagttgtatttttttatcgttcggtatttatcggcgggttcgtgtcggagagcggtttaggtgagtgcgggttcgcgggcggttgcggatttggcgtttttagtgttttcgtcgtcgggggtcgcgggtggtgggcgggggtgaaataggagcgtttcgggttcgattttatttttgatcgcgcgtttttcggtcgtaggtgttggtgtaggagttggagtagtattaggtttgtgcgcgttcgttttcgcgttttttcgggttttttttgtcgattttgttttgagggatgttcgttcgcgtttttcgttcgtcgttcgtcgttcgttttcggtttttcgtttttcgtttttttcgcgtcggaggggtggttattcgtgtgcgtttcgtgtttttttagttgttgtcgaagagattggattgggagggtaacgagtataataggagttacgaggagttggtgagtattgggtacgtttgtttttcgggtttttcgtgtatcgtttttcgttttcgtttttttttttcgcggggatttcggttcgtggggtgtaaagtgtgattcgtattggggggcggttcggggatagttgcgttttcggttgaagattttgttttgtttttgaggcggttaggtttgttttggtaggaaatagttattgggggcggcgcggggcggagcggtgggggcgattcgcggaggttttgcggtaggggtggggttttaggtgcggtcgtttttgcgggggtgtggcgtgcgtagttagttatttaattgggcggttttattcgttttttcgttttatcgcgtttgtaattcg

SEQ ID NO: 16768 - DNA, 2006 bp, Artificial Sequence
  chemically treated genomic DNA (Homo sapiens) CpG-island No: 16768
cgaattacaaacgcgataaaacgaaaaaacgaataaaaccgcccaattaaataactaactacgcacgccacacccccgcaaaaacgaccgcacctaaaaccccacccctaccgcaaaacctccgcgaatcgcccccaccgctccgccccgcgccgcccccaataactatttcctaccaaaacaaacctaaccgcctcaaaaacaaaacaaaatcttcaaccgaaaacgcaactatccccgaaccgccccccaatacgaatcacactttacaccccacgaaccgaaatccccgcgaaaaaaaaaaacgaaaacgaaaaacgatacacgaaaaacccgaaaaacaaacgtacccaatactcaccaactcctcgtaactcctattatactcgttaccctcccaatccaatctcttcgacaacaactaaaaaaacacgaaacgcacacgaataaccacccctccgacgcgaaaaaaacgaaaaacgaaaaaccgaaaacgaacgacgaacgacgaacgaaaaacgcgaacgaacatccctcaaaacaaaatcgacaaaaaaaacccgaaaaaacgcgaaaacgaacgcgcacaaacctaatactactccaactcctacaccaacacctacgaccgaaaaacgcgcgatcaaaaataaaatcgaacccgaaacgctcctatttcacccccgcccaccacccgcgacccccgacgacgaaaacactaaaaacgccaaatccgcaaccgcccgcgaacccgcactcacctaaaccgctctccgacacgaacccgccgataaataccgaacgataaaaaaatacaactctacgaaaaaacaaaaaatcaaatcaaaccccgacgaaaaaaaaaaaaaaacgaaaccaaaaaaaccgaaaaaacccgaaaaaccgaaaaaaccgaaacaaccgaaaacgccaaaacgaaaataacacgacctcgcgtcttacccgactcgataaaaaacaccgaacgtcgaacgaacgacgactccgccataaccgaacgcgaaacgaaaaacgaaaacgaacgaacgaacgaaacgtataaaccgcgccgaaacctaaccgaactaacgtcccctcttctcaaacgcgcgccgccgccgccgccgccgccgccataccgtacgcgccgcctaaaccgacgcctccgcgaaaaaaaaaataattcctccgcgaaaaacgaaaaataatccctccgcgaaaaacgaaaatttacgccaaaaaaaaaccgaaactcgtatcccgcccgaaaaaacgaacctcgctcaactctctacctccgaaaactcgataaaaaaaaaataacgcgaaaacaaaaacctaaacgccgcaacaacgaataaaaaaaaaaaaaacgcgtaatccgaatccctacgcgcaataaaacgactacccgaactttataaaacgacaacgcgacgccgaataacccaacaacgaacgaataccgaaaacgaaaacgcgaccacaaaaaaaaacgattcaccgccgccccccgtaaaacctaaatcctctacgcgaaaccgcaaaaaccccgaatcgcgaattaaacaaaatcgcccgctccgaatcgctcgaaaaaatcatttcacgaaccgatcgtctaaaaccaatacgtcttaccccgcacgaaaaacccctcgcttcgaaaacaaaaaaacttttaaaataaaaattaactcgccgcgcctcccgcaaaaaaaaacgccgcccgaacccgcgctcctaaaacgaaaacctcgtatactaacgttaccgaaacgtctacgacgctaaaaactaccgaaacccaaccacatcccccacaaaccaacaacccgacaaaaaattacataaaatacaacgcttcgccgaaaaaatacgaatcgaaaaaacaacgcgcaactacgactaacgactcgactaaatccatccaaacataaacaaaaaaacgaaactataaaaaaaaaataatacaaacgaaccgcaaaccctccttaaaaaaaaaa

SEQ ID NO: 16769 - DNA, 788 bp, Artificial Sequence
  chemically treated genomic DNA (Homo sapiens) CpG-island No: 16769
ttggcggcgttttcggcggagttgatttgcggagacggagacgtacgaatagaggcgggtcgtagttttaggattcgcgggttcgttcggtttcgagaataatgttcggtcgcgtgacgttacggtttttcgtcgtttcgttcgaatagtttttttagttttttcggtcgttaaacgttttagaacgttcgttttcgcggtcgtcgagcgttcgtttgttcgttcgtcggtttttaagcgtttttcgggttcgtcgttatcgtgggtgtaacggggtttgggtttcgcggggttcggcggggcgtcggcggcggttttagggggcgtgtgcgggtcgcggtcgtcgtttattttttttttgggtatcgtggcggcggggaaggcgcgtgtcgggtgtttgcggggaaggcgcgtgtcgggtgtttgcgggtcgcggcgcgtcgatagttttcgcgaaattgggttgttttgtcgttgttatttttttcgtcgttcgagttgttgagatttatagcgggggcggtgggagaatcggatggaatcggattgggagttcgttttttttttttttcgcgttttcggtcgcgggtttttttttttcgtcggtcgggtcgttttttattttcgtttattggttacgggatttagttcgcgttcggaataggtgaggcgggtttttaattgatttcggatttcgttttttttcgggggtttttttttttttttcgggcgtttttattttttttcgtcgtttcgcggggttttagatttaggcgaagggggcgggg

SEQ ID NO: 16770 - DNA, 788 bp, Artificial Sequence
  chemically treated genomic DNA (Homo sapiens) CpG-island No: 16770
ccccgcccccttcgcctaaatctaaaaccccgcgaaacgacgaaaaaaaataaaaacgcccgaaaaaaaaaaaaaaacccccgaaaaaaaacgaaatccgaaatcaattaaaaacccgcctcacctattccgaacgcgaactaaatcccgtaaccaataaacgaaaataaaaaacgacccgaccgacgaaaaaaaaaaacccgcgaccgaaaacgcgaaaaaaaaaaaaaacgaactcccaatccgattccatccgattctcccaccgcccccgctataaatctcaacaactcgaacgacgaaaaaaataacaacgacaaaacaacccaatttcgcgaaaactatcgacgcgccgcgacccgcaaacacccgacacgcgccttccccgcaaacacccgacacgcgccttccccgccgccacgatacccaaaaaaaaaataaacgacgaccgcgacccgcacacgccccctaaaaccgccgccgacgccccgccgaaccccgcgaaacccaaaccccgttacacccacgataacgacgaacccgaaaaacgcttaaaaaccgacgaacgaacaaacgaacgctcgacgaccgcgaaaacgaacgttctaaaacgtttaacgaccgaaaaaactaaaaaaactattcgaacgaaacgacgaaaaaccgtaacgtcacgcgaccgaacattattctcgaaaccgaacgaacccgcgaatcctaaaactacgacccgcctctattcgtacgtctccgtctccgcaaatcaactccgccgaaaacgccgccaa

SEQ ID NO: 16771 - DNA, 788 bp, Artificial Sequence
  chemically treated genomic DNA (Homo sapiens) CpG-island No: 16771
tttcgtttttttcgtttgggtttggggtttcgcgagacggcggaaaggggtgggggcgttcggggggggggggggggttttcggaagggggcggggttcgggattaattaagggttcgttttatttatttcgggcgcgggttgagtttcgtagttaatgggcgggggtggggggcggttcggtcggcggggagggggagttcgcggtcggggacgcggggggaggaggaggcgggtttttaattcggttttattcggtttttttatcgttttcgttgtgggttttagtagttcgggcggcgggaggagtggtagcggtaaggtagtttagtttcgcgaaggttgtcggcgcgtcgcggttcgtaggtattcggtacgcgtttttttcgtaggtattcggtacgcgtttttttcgtcgttacgatgtttaagaggaaggtgagcggcggtcgcggttcgtatacgttttttggagtcgtcgtcggcgtttcgtcgggtttcgcgaggtttaggtttcgttgtatttacggtggcgacgggttcgggaggcgtttggagatcggcgggcgggtaggcgagcgttcggcggtcgcgggggcgggcgttttggaacgtttggcggtcgggggagttgagggggttattcgaacggggcggcgggaagtcgtgacgttacgcggtcgggtattgttttcggggtcgggcgggttcgcgagttttgggattgcggttcgtttttattcgtgcgttttcgttttcgtaggttagtttcgtcgaaggcgtcgttaa

SEQ ID NO: 16772 - DNA, 788 bp, Artificial Sequence
  chemically treated genomic DNA (Homo sapiens) CpG-island No: 16772
ttaacgacgccttcgacgaaactaacctacgaaaacgaaaacgcacgaataaaaacgaaccgcaatcccaaaactcgcgaacccgcccgaccccgaaaacaatacccgaccgcgtaacgtcacgacttcccgccgccccgttcgaataaccccctcaactcccccgaccgccaaacgttccaaaacgcccgcccccgcgaccgccgaacgctcgcctacccgcccgccgatctccaaacgcctcccgaacccgtcgccaccgtaaatacaacgaaacctaaacctcgcgaaacccgacgaaacgccgacgacgactccaaaaaacgtatacgaaccgcgaccgccgctcaccttcctcttaaacatcgtaacgacgaaaaaaacgcgtaccgaatacctacgaaaaaaacgcgtaccgaatacctacgaaccgcgacgcgccgacaaccttcgcgaaactaaactaccttaccgctaccactcctcccgccgcccgaactactaaaacccacaacgaaaacgataaaaaaaccgaataaaaccgaattaaaaacccgcctcctcctccccccgcgtccccgaccgcgaactccccctccccgccgaccgaaccgccccccacccccgcccattaactacgaaactcaacccgcgcccgaaataaataaaacgaacccttaattaatcccgaaccccgcccccttccgaaaaccccccccccccccccgaacgcccccacccctttccgccgtctcgcgaaaccccaaacccaaacgaaaaaaacgaaa

SEQ ID NO: 16773 - DNA, 551 bp, Artificial Sequence
  chemically treated genomic DNA (Homo sapiens) CpG-island No: 16773
ttttgatttcgttagttatattattttataggatattgtggtcgatggcggtttaacgttgggggtataagtatgatttggaaacgttatttaacgttcgacgaattgaacgttattagcgataatataatggtggcgtatttgggaattgtgtatattcgtttgggcgatgatgtgttggaagtcgaaatgtcggttgatattcgtatttattagtcgttcggtttattatatggcggcgcgtcggcggcgttggcggaaacgttgggatcgatggtcggatttatgatgattcgcgacggatagtgtgtggtaggtatagaatttaatgtaatatattatcgttcggtgtttgagggaaaggtacgcggcgtttgttagtcgttgtattttggtcggtaaaattagagttgggatatcgtcgtttttcgattgaattaggcggcgttgggtcgtttggtttggtaattttggtttttcgggtttttggcggggttattcggggtaacgattttttcgggggcgtattttcggatttaagtttttttatt

SEQ ID NO: 16774 - DNA, 551 bp, Artificial Sequence
  chemically treated genomic DNA (Homo sapiens) CpG-island No: 16774
aataaaaaaacttaaatccgaaaatacgcccccgaaaaaatcgttaccccgaataaccccgccaaaaacccgaaaaaccaaaattaccaaaccaaacgacccaacgccgcctaattcaatcgaaaaacgacgatatcccaactctaattttaccgaccaaaatacaacgactaacaaacgccgcgtacctttccctcaaacaccgaacgataatatattacattaaattctatacctaccacacactatccgtcgcgaatcatcataaatccgaccatcgatcccaacgtttccgccaacgccgccgacgcgccgccatataataaaccgaacgactaataaatacgaatatcaaccgacatttcgacttccaacacatcatcgcccaaacgaatatacacaattcccaaatacgccaccattatattatcgctaataacgttcaattcgtcgaacgttaaataacgtttccaaatcatacttatacccccaacgttaaaccgccatcgaccacaatatcctataaaataatataactaacgaaatcaaaa

SEQ ID NO: 16775 - DNA, 551 bp, Artificial Sequence
  chemically treated genomic DNA (Homo sapiens) CpG-island No: 16775
ggtgggggggtttgggttcgaaggtgcgttttcggagaaatcgttgtttcgggtaatttcgttaagggttcggggagttaaggttgttaagttaaacggtttagcgtcgtttggtttaatcggaaaacgacgatgttttagttttgattttgtcgattaagatgtagcggttggtagacgtcgcgtattttttttttagatatcgggcgatggtgtgttgtattaagttttgtgtttattatatattgttcgtcgcgggttattataaattcggttatcgattttagcgttttcgttagcgtcgtcgacgcgtcgttatgtagtaaatcgaacggttgatgagtacgggtattaatcggtatttcggtttttagtatattatcgtttagacgggtatatataatttttagatgcgttattattgtgttatcgttggtggcgtttagttcgtcgagcgttaaatggcgtttttagattatgtttatgtttttagcgttgagtcgttatcgattataatattttgtagggtaatatggttggcgaggttagag

SEQ ID NO: 16776 - DNA, 551 bp, Artificial Sequence
  chemically treated genomic DNA (Homo sapiens) CpG-island No: 16776
ctctaacctcgccaaccatattaccctacaaaatattataatcgataacgactcaacgctaaaaacataaacataatctaaaaacgccatttaacgctcgacgaactaaacgccaccaacgataacacaataataacgcatctaaaaattatatatacccgtctaaacgataatatactaaaaaccgaaataccgattaatacccgtactcatcaaccgttcgatttactacataacgacgcgtcgacgacgctaacgaaaacgctaaaatcgataaccgaatttataataacccgcgacgaacaatatataataaacacaaaacttaatacaacacaccatcgcccgatatctaaaaaaaaaatacgcgacgtctaccaaccgctacatcttaatcgacaaaatcaaaactaaaacatcgtcgttttccgattaaaccaaacgacgctaaaccgtttaacttaacaaccttaactccccgaacccttaacgaaattacccgaaacaacgatttctccgaaaacgcaccttcgaacccaaacccccccacc

SEQ ID NO: 16777 - DNA, 514 bp, Artificial Sequence
  chemically treated genomic DNA (Homo sapiens) CpG-island No: 16777
  unsure (182)
cgcggcgttttttagttttatcgtttttagtggtagcggtaagcgtagcgttatcggcgggtttttttaacgttaggtaggtttttcgcgtcgttgggtgtgtatggtgtgtagtggattaaaggcgttgcgcgggttttgggtatgatggtggtaattttgatgtcgcgtagggcgtaagngcgaaatcggtttgttatcggttaaaatttttttcgtcgtttgagcgaacgttagcgggtaaaatgtttagcgttgcggcgtaggttatatgatttttcgattgtcgttatcgtcgattaacgttagtacgcgttcggcgttgtagggtttaacgatatatcgtgtattagcggttgcgcggtttgtagcgcgatattacgtagtttaatttgttgcggtattagtgtgcgtgtttcgttattagatgagggtttagatgatcgcgtagtgcgttatttagttagtgattttgtgtttttgggaaataagttatattgatacggatacgtat

SEQ ID NO: 16778 - DNA, 514 bp, Artificial Sequence
  chemically treated genomic DNA (Homo sapiens) CpG-island No: 16778
  unsure (333)
atacgtatccgtatcaatataacttatttcccaaaaacacaaaatcactaactaaataacgcactacgcgatcatctaaaccctcatctaataacgaaacacgcacactaataccgcaacaaattaaactacgtaatatcgcgctacaaaccgcgcaaccgctaatacacgatatatcgttaaaccctacaacgccgaacgcgtactaacgttaatcgacgataacgacaatcgaaaaatcatataacctacgccgcaacgctaaacattttacccgctaacgttcgctcaaacgacgaaaaaaattttaaccgataacaaaccgatttcgcncttacgccctacgcgacatcaaaattaccaccatcatacccaaaacccgcgcaacgcctttaatccactacacaccatacacacccaacgacgcgaaaaacctacctaacgttaaaaaaacccgccgataacgctacgcttaccgctaccactaaaaacgataaaactaaaaaacgccgcg

SEQ ID NO: 16779 - DNA, 514 bp, Artificial Sequence
  chemically treated genomic DNA (Homo sapiens) CpG-island No: 16779
  unsure (333)
atacgtattcgtattagtgtaatttattttttaaaagtataaagttattggttgggtgacgtattgcgcgattatttggatttttatttggtgacggagtacgtatattaatgtcgtaatagattgaattacgtaatatcgcgttataggtcgcgtagtcgttggtatacggtgtatcgttaagttttgtaacgtcgggcgcgtgttggcgttagtcggcggtagcggtagtcgggaaattatgtaatttgcgtcgtaacgttgggtattttgttcgttggcgttcgtttagacggcgggggaaattttagtcgatggtaaatcggtttcgtntttgcgttttgcgcggtattaaaattgttattattatgtttagaattcgcgtagcgtttttaatttattgtatattatgtatatttagcggcgcgggaaatttgtttggcgttagggaaattcgtcgatgacgttacgtttatcgttgttattagaagcggtggggttggaaaacgtcgcg

SEQ ID NO: 16780 - DNA, 514 bp, Artificial Sequence
  chemically treated genomic DNA (Homo sapiens) CpG-island No: 16780
  unsure (182)
cgcgacgttttccaaccccaccgcttctaataacaacgataaacgtaacgtcatcgacgaatttccctaacgccaaacaaatttcccgcgccgctaaatatacataatatacaataaattaaaaacgctacgcgaattctaaacataataataacaattttaataccgcgcaaaacgcaaanacgaaaccgatttaccatcgactaaaatttcccccgccgtctaaacgaacgccaacgaacaaaatacccaacgttacgacgcaaattacataatttcccgactaccgctaccgccgactaacgccaacacgcgcccgacgttacaaaacttaacgatacaccgtataccaacgactacgcgacctataacgcgatattacgtaattcaatctattacgacattaatatacgtactccgtcaccaaataaaaatccaaataatcgcgcaatacgtcacccaaccaataactttatacttttaaaaaataaattacactaatacgaatacgtat

SEQ ID NO: 16781 - DNA, 1011 bp, Artificial Sequence
  chemically treated genomic DNA (Homo sapiens) CpG-island No: 16781
  unsure (227)
tgcggtcggtataggagtagtaagggtcgaggttatcgataattagcggcgtatcggaaacggtgttgtcgcgtagtatgtagcgtagggtcggttagttcgcgtaggtcgcggtacggtagcgttagcggtatagtttttggttgtcgtcggttatgttttagtggatattatcgtcgcgcggcgtttcggtaaagtttagcgtaaagcggtgcggaatgtaggtnaagttttttattattagtgggttattcggtaggttatttagatcgtagtcgattatgtttagcgcggtatagatttcgttgatacgtatttttagacgggaaataacgtcgtagttttgttcgttgtggatttttattggtagtaggttatagtcgataaacgggtgatcggcgcgggtattacgggcgtgatcgttggtacggattatcgggtcgacgttattgaagtcgcgagcgattttcgggtttagacgattaatgtcgatagtgcgttgttttatgttcggagtgtttagtagtatatttattagtttttgtattttacgacgtatttgttgtgttagttggcgggtttggattatgtcgttttttagtagatcgcgacgaatttcgtcgattaagtttaggtcgtaggttttacgcgtatcggtaaggatttttgttatttttatggaggttttacgtacgcggaagaattgtataaagtcggagtcgaagtcggtaaagtgataggttaggttaaggttgagtagatgcgagtgtaagcgttttatttttagtagaatggcgcggattatttgcgtacgttttggtatttgaatatttatcgcgttttttatcgacgtggtgtaggcggtgttgtgggtaaagtcgtagatttcgtatatacggttagagaggaaggttatttcgttataatttatacgggttttcgttagtttttttatgtcgcgatggacgtagaatagacggtagtcggcgtcgatatgttttcgttatcgat

SEQ ID NO: 16782 - DNA, 1011 bp, Artificial Sequence
  chemically treated genomic DNA (Homo sapiens) CpG-island No: 16782
  unsure (785)
atcgataacgaaaacatatcgacgccgactaccgtctattctacgtccatcgcgacataaaaaaactaacgaaaacccgtataaattataacgaaataaccttcctctctaaccgtatatacgaaatctacgactttacccacaacaccgcctacaccacgtcgataaaaaacgcgataaatattcaaataccaaaacgtacgcaaataatccgcgccattctactaaaaataaaacgcttacactcgcatctactcaaccttaacctaacctatcactttaccgacttcgactccgactttatacaattcttccgcgtacgtaaaacctccataaaaataacaaaaatccttaccgatacgcgtaaaacctacgacctaaacttaatcgacgaaattcgtcgcgatctactaaaaaacgacataatccaaacccgccaactaacacaacaaatacgtcgtaaaatacaaaaactaataaatatactactaaacactccgaacataaaacaacgcactatcgacattaatcgtctaaacccgaaaatcgctcgcgacttcaataacgtcgacccgataatccgtaccaacgatcacgcccgtaatacccgcgccgatcacccgtttatcgactataacctactaccaataaaaatccacaacgaacaaaactacgacgttatttcccgtctaaaaatacgtatcaacgaaatctataccgcgctaaacataatcgactacgatctaaataacctaccgaataacccactaataataaaaaacttnacctacattccgcaccgctttacgctaaactttaccgaaacgccgcgcgacgataatatccactaaaacataaccgacgacaaccaaaaactataccgctaacgctaccgtaccgcgacctacgcgaactaaccgaccctacgctacatactacgcgacaacaccgtttccgatacgccgctaattatcgataacctcgacccttactactcctataccgaccgca

SEQ ID NO: 16783 - DNA, 1011 bp, Artificial Sequence
  chemically treated genomic DNA (Homo sapiens) CpG-island No: 16783
  unsure (785)
gtcgatggcgaaaatatatcgacgtcgattatcgtttgttttacgtttatcgcggtatggaaaaattggcggaaattcgtatgggttataacgaagtgatttttttttttgatcgtgtgtgcgggatttgcggttttgtttatagtatcgtttatattacgtcggtggaaaacgcgatgggtatttaggtgttagaacgtgcgtagatgattcgcgttattttgttggaggtagaacgtttgtattcgtatttgtttaattttggtttggtttgttattttatcggtttcgatttcggttttatgtagttttttcgcgtgcgtgaaatttttatgaaaatggtagagatttttatcggtgcgcgtaaaatttacggtttgaatttgatcggcgggattcgtcgcgatttgttgaaagacgatatgatttagattcgttagttggtataatagatgcgtcgtgaagtgtaggagttggtggatgtgttgttgagtatttcgaatatggaatagcgtattgtcggtattggtcgtttggattcggaaatcgttcgcgattttagtaacgtcggttcgatggttcgtgttagcggttacgttcgtgatattcgcgtcgattattcgtttgtcggttatggtttgttgttaatggaagtttatagcgagtagggttgcgacgttatttttcgtttgaaagtgcgtattaacgaagtttatatcgcgttgaatatgatcgattacggtttggataatttgtcgggtggtttattgatggtggaaggtttnatttatatttcgtatcgttttgcgttgggttttgtcgaagcgtcgcgcggcgatgatatttattggagtatgatcggcgataattagaagttgtatcgttggcgttgtcgtgtcgcgatttacgcgaattggtcgattttgcgttatatgttgcgcggtaatatcgttttcgatgcgtcgttgattatcggtagtttcgatttttgttatttttgtatcgatcgta

SEQ ID NO: 16784 - DNA, 1011 bp, Artificial Sequence
  chemically treated genomic DNA (Homo sapiens) CpG-island No: 16784
  unsure (227)
tacgatcgatacaaaaataacaaaaatcgaaactaccgataatcaacgacgcatcgaaaacgatattaccgcgcaacatataacgcaaaatcgaccaattcgcgtaaatcgcgacacgacaacgccaacgatacaacttctaattatcgccgatcatactccaataaatatcatcgccgcgcgacgcttcgacaaaacccaacgcaaaacgatacgaaatataaatnaaaccttccaccatcaataaaccacccgacaaattatccaaaccgtaatcgatcatattcaacgcgatataaacttcgttaatacgcactttcaaacgaaaaataacgtcgcaaccctactcgctataaacttccattaacaacaaaccataaccgacaaacgaataatcgacgcgaatatcacgaacgtaaccgctaacacgaaccatcgaaccgacgttactaaaatcgcgaacgatttccgaatccaaacgaccaataccgacaatacgctattccatattcgaaatactcaacaacacatccaccaactcctacacttcacgacgcatctattataccaactaacgaatctaaatcatatcgtctttcaacaaatcgcgacgaatcccgccgatcaaattcaaaccgtaaattttacgcgcaccgataaaaatctctaccattttcataaaaatttcacgcacgcgaaaaaactacataaaaccgaaatcgaaaccgataaaataacaaaccaaaccaaaattaaacaaatacgaatacaaacgttctacctccaacaaaataacgcgaatcatctacgcacgttctaacacctaaatacccatcgcgttttccaccgacgtaatataaacgatactataaacaaaaccgcaaatcccgcacacacgatcaaaaaaaaaaatcacttcgttataacccatacgaatttccgccaatttttccataccgcgataaacgtaaaacaaacgataatcgacgtcgatatattttcgccatcgac

SEQ ID NO: 16785 - DNA, 512 bp, Artificial Sequence
  chemically treated genomic DNA (Homo sapiens) CpG-island No: 16785
taggtattcgttcggtttgaaaagtcggatcggaattattcgcgagttttttttttgtcgattgaagcggggattttcgtattgcgcgatttagggggattttttagtcggatttcgtttttttcgttcgtcgcgttttagcgttaggtttttacgtcggacgttcgtcgtcgttttttatttttatttacgggttatgtcgattattaacggagtttggaagaagagtaattcggaaaagtaacggttttttggtattttgggatatcgttattatcgttgatcgggaaggttgagttttcgtgggtttttcgttcggttgcgttttcgttttgtttcgttaacggtttcgttcgttggaggttcgataatagtcgtcggtatggtcggcgcgttattgcgcgtgcgcggtcggggttgggtcggggtttcgaagttcggtcggggtttcgagtttgttgaattatattttttttatgttatattagtattaattttaaaagggatatata

SEQ ID NO: 16786 - DNA, 512 bp, Artificial Sequence
  chemically treated genomic DNA (Homo sapiens) CpG-island No: 16786
tatatatcccttttaaaattaatactaatataacataaaaaaaatataattcaacaaactcgaaaccccgaccgaacttcgaaaccccgacccaaccccgaccgcgcacgcgcaataacgcgccgaccataccgacgactattatcgaacctccaacgaacgaaaccgttaacgaaacaaaacgaaaacgcaaccgaacgaaaaacccacgaaaactcaaccttcccgatcaacgataataacgatatcccaaaataccaaaaaaccgttacttttccgaattactcttcttccaaactccgttaataatcgacataacccgtaaataaaaataaaaaacgacgacgaacgtccgacgtaaaaacctaacgctaaaacgcgacgaacgaaaaaaacgaaatccgactaaaaaatccccctaaatcgcgcaatacgaaaatccccgcttcaatcgacaaaaaaaaaactcgcgaataattccgatccgacttttcaaaccgaacgaataccta

SEQ ID NO: 16787 - DNA, 512 bp, Artificial Sequence
  chemically treated genomic DNA (Homo sapiens) CpG-island No: 16787
tgtatattttttttaaaattagtgttaatgtagtatgagggaaatgtaatttaataagttcggagtttcggtcgagtttcggagtttcggtttagtttcggtcgcgtacgcgtagtgacgcgtcggttatgtcggcggttgttgtcgggtttttagcgggcggggtcgttggcggagtagagcggaggcgtagtcgggcggagggtttacgagggtttagttttttcggttagcggtggtgacggtattttagagtgttagagaatcgttgttttttcgagttgttttttttttaggtttcgttggtggtcggtatggttcgtgagtgggggtgggaagcggcggcgagcgttcggcgtgggagtttagcgttgaggcgcggcgggcgggggaggcggagttcggttggagaatttttttgggtcgcgtagtgcggggattttcgttttagtcggtagagagagagttcgcgggtggtttcggttcggttttttaggtcggacgggtgtttg

SEQ ID NO: 16788 - DNA, 512 bp, Artificial Sequence
  chemically treated genomic DNA (Homo sapiens) CpG-island No: 16788
caaacacccgtccgacctaaaaaaccgaaccgaaaccacccgcgaactctctctctaccgactaaaacgaaaatccccgcactacgcgacccaaaaaaattctccaaccgaactccgcctcccccgcccgccgcgcctcaacgctaaactcccacgccgaacgctcgccgccgcttcccacccccactcacgaaccataccgaccaccaacgaaacctaaaaaaaaaacaactcgaaaaaacaacgattctctaacactctaaaataccgtcaccaccgctaaccgaaaaaactaaaccctcgtaaaccctccgcccgactacgcctccgctctactccgccaacgaccccgcccgctaaaaacccgacaacaaccgccgacataaccgacgcgtcactacgcgtacgcgaccgaaactaaaccgaaactccgaaactcgaccgaaactccgaacttattaaattacatttccctcatactacattaacactaattttaaaaaaaatataca

SEQ ID NO: 16789 - DNA, 840 bp, Artificial Sequence
  chemically treated genomic DNA (Homo sapiens) CpG-island No: 16789
ttttggttttttgtggcgcggtattttgtcgtaatgcggtatcgatgacgaagtgtttgtattttattcgacgtgttcgcgtcgatcgttcgaggttattgtggttcgttattttttcgttattcgtattttgtttagagtgtgttatttgttttaggtagatttgcgataggtgttagcgttatcgattcgttgattatggttcgtattcgtgagtttattcgtttcgcgttttatttttttatttattacgtgtggttttggtgttgttgtttgttcgacgttgttgtagaagttgtatttcggtgatgtttcgggtgtttgtaaagaattgtagcgttggatttatgttggcggtaagtagtggaaagggtttgattattcggcgcgagattgagcgtgaagtttgcgagtggggttagaaatgagtcgattaatcgtaattatttgcgttgtcgttatttgtttgttggtttttatggtttgggttattaattattatcgcgataacgttattatttataaagattagcgcgataaagttattaaaagttttcgtttggttaacgatattattaaagatatgtagattcgttagcgtgatgtcgttgtattggatgttaaatatatcggagaattggttgatgcgaaagaaattattgagcgtttgtatagcgatgttattgttggtcgtaagcggttgtaagtcgtcgttatttgtgtaaagttaacgatcggagttagtagtatgggcgatggagaaagtttaagatttatagtagatgttgaatttaattattatcgttttcgaagtggaatcgataggataatcgcgtaggt

SEQ ID NO: 16790 - DNA, 840 bp, Artificial Sequence
  chemically treated genomic DNA (Homo sapiens) CpG-island No: 16790
acctacgcgattatcctatcgattccacttcgaaaacgataataattaaattcaacatctactataaatcttaaactttctccatcgcccatactactaactccgatcgttaactttacacaaataacgacgacttacaaccgcttacgaccaacaataacatcgctatacaaacgctcaataatttctttcgcatcaaccaattctccgatatatttaacatccaatacaacgacatcacgctaacgaatctacatatctttaataatatcgttaaccaaacgaaaacttttaataactttatcgcgctaatctttataaataataacgttatcgcgataataattaataacccaaaccataaaaaccaacaaacaaataacgacaacgcaaataattacgattaatcgactcatttctaaccccactcgcaaacttcacgctcaatctcgcgccgaataatcaaaccctttccactacttaccgccaacataaatccaacgctacaattctttacaaacacccgaaacatcaccgaaatacaacttctacaacaacgtcgaacaaacaacaacaccaaaaccacacgtaataaataaaaaaataaaacgcgaaacgaataaactcacgaatacgaaccataatcaacgaatcgataacgctaacacctatcgcaaatctacctaaaacaaataacacactctaaacaaaatacgaataacgaaaaaataacgaaccacaataacctcgaacgatcgacgcgaacacgtcgaataaaatacaaacacttcgtcatcgataccgcattacgacaaaataccgcgccacaaaaaaccaaaa

SEQ ID NO: 16791 - DNA, 840 bp, Artificial Sequence
  chemically treated genomic DNA (Homo sapiens) CpG-island No: 16791
atttgcgcggttattttgtcgattttatttcggagacggtaataattgagtttagtatttgttgtaagttttgggttttttttatcgtttatgttgttggtttcggtcgttgattttgtataggtggcggcgatttgtagtcgtttacggttagtaatgatatcgttatgtagacgtttaatggtttttttcgtattagttagtttttcggtgtatttggtatttagtgtagcgatattacgttgacgggtttgtatgtttttgatggtgtcgttagttaggcggagatttttggtggttttgtcgcgttggtttttgtaggtgatggcgttgtcgcggtagtggttaatggtttaggttatggaaattagtaggtagataacgatagcgtagatgattgcggttaatcggtttatttttggttttattcgtagattttacgtttaatttcgcgtcgggtgattagattttttttattgtttgtcgttagtataagtttagcgttgtagttttttataagtattcggaatattatcggagtatagtttttatagtagcgtcgagtaggtaatagtattagagttatacgtaataggtgaaggagtaaagcgcggagcgggtaggtttacggatgcgaattatgattagcgggtcgatggcgttggtatttatcgtagatttgtttaaagtaggtggtatattttagataggatacggatgacgagggaatgacggattatagtggtttcgaacggtcgacgcgaatacgtcggatagggtataagtatttcgttatcgatgtcgtattgcgataagatgtcgcgttataagggattaaga

SEQ ID NO: 16792 - DNA, 840 bp, Artificial Sequence
  chemically treated genomic DNA (Homo sapiens) CpG-island No: 16792
tcttaatcccttataacgcgacatcttatcgcaatacgacatcgataacgaaatacttataccctatccgacgtattcgcgtcgaccgttcgaaaccactataatccgtcattccctcgtcatccgtatcctatctaaaatataccacctactttaaacaaatctacgataaataccaacgccatcgacccgctaatcataattcgcatccgtaaacctacccgctccgcgctttactccttcacctattacgtataactctaatactattacctactcgacgctactataaaaactatactccgataatattccgaatacttataaaaaactacaacgctaaacttatactaacgacaaacaataaaaaaaatctaatcacccgacgcgaaattaaacgtaaaatctacgaataaaaccaaaaataaaccgattaaccgcaatcatctacgctatcgttatctacctactaatttccataacctaaaccattaaccactaccgcgacaacgccatcacctacaaaaaccaacgcgacaaaaccaccaaaaatctccgcctaactaacgacaccatcaaaaacatacaaacccgtcaacgtaatatcgctacactaaataccaaatacaccgaaaaactaactaatacgaaaaaaaccattaaacgtctacataacgatatcattactaaccgtaaacgactacaaatcgccgccacctatacaaaatcaacgaccgaaaccaacaacataaacgataaaaaaaacccaaaacttacaacaaatactaaactcaattattaccgtctccgaaataaaatcgacaaaataaccgcgcaaat

SEQ ID NO: 16793 - DNA, 573 bp, Artificial Sequence
  chemically treated genomic DNA (Homo sapiens) CpG-island No: 16793
ggcgtacgttttttggtcgttagtaattgtattaggattattagtggatgcgtgatttcggtgaaagtttgttggtttatcgttcgtcgatcgatattcggttcggtgaaagaagtgataggttagaaatttaacggtaattaggaaaaagcgtttaattttttgacgtcgtattagaagtggggtatttattttatttatagcgataatttgttgatgttgattttaggtcgcggtggttcggtggtttggttgagtgaagtcgatgttaaagatttgggtatcgtcgataacgattggattgaagtttttaatagtaacggtgttttgattgttcgtgcggttgttagttagcgtgtttcggtagggatgattatgatgtattacgcgtaggaacgtatcgttaatttgtttggttcggaaattatttaatagcgtggtggtatttataattcggttattcgtattacgtcgaaatcgacgtatatgatcggcggttatgtttatttggtatacggttttaattattatggtatcgtaggttttaatcgcgatgagtttgttgtagtgcgt

SEQ ID NO: 16794 - DNA, 573 bp, Artificial Sequence
  chemically treated genomic DNA (Homo sapiens) CpG-island No: 16794
acgcactacaacaaactcatcgcgattaaaacctacgataccataataattaaaaccgtataccaaataaacataaccgccgatcatatacgtcgatttcgacgtaatacgaataaccgaattataaataccaccacgctattaaataatttccgaaccaaacaaattaacgatacgttcctacgcgtaatacatcataatcatccctaccgaaacacgctaactaacaaccgcacgaacaatcaaaacaccgttactattaaaaacttcaatccaatcgttatcgacgatacccaaatctttaacatcgacttcactcaaccaaaccaccgaaccaccgcgacctaaaatcaacatcaacaaattatcgctataaataaaataaataccccacttctaatacgacgtcaaaaaattaaacgctttttcctaattaccgttaaatttctaacctatcacttctttcaccgaaccgaatatcgatcgacgaacgataaaccaacaaactttcaccgaaatcacgcatccactaataatcctaatacaattactaacgaccaaaaaacgtacgcc

SEQ ID NO: 16795 - DNA, 573 bp, Artificial Sequence
  chemically treated genomic DNA (Homo sapiens) CpG-island No: 16795
acgtattataataaatttatcgcggttagaatttacggtgttatagtagttaaagtcgtatgttagatgggtatagtcgtcgattatatgcgtcggtttcggcgtgatacgggtgatcgagttatggatattattacgttgttgggtaattttcgaattaggtaggttaacgatacgtttttgcgcgtggtatattatggttatttttgtcggaatacgttggttgataatcgtacgggtagttagagtatcgttgttgttgaagattttaatttagtcgttatcggcgatatttagatttttggtatcggttttatttaattagattatcggattatcgcgatttaaagttagtattagtaggttgtcgttgtaggtggagtggatattttatttttggtgcggcgttaggaagttgagcgtttttttttggttgtcgttggatttttggtttattattttttttatcgaatcgggtgtcgatcggcggacgataaattagtaggtttttatcgaaattacgtatttattggtgattttgatatagttgttgacgattagagagcgtacgtt

SEQ ID NO: 16796 - DNA, 573 bp, Artificial Sequence
  chemically treated genomic DNA (Homo sapiens) CpG-island No: 16796
aacgtacgctctctaatcgtcaacaactatatcaaaatcaccaataaatacgtaatttcgataaaaacctactaatttatcgtccgccgatcgacacccgattcgataaaaaaaataataaaccaaaaatccaacgacaaccaaaaaaaaacgctcaacttcctaacgccgcaccaaaaataaaatatccactccacctacaacgacaacctactaatactaactttaaatcgcgataatccgataatctaattaaataaaaccgataccaaaaatctaaatatcgccgataacgactaaattaaaatcttcaacaacaacgatactctaactacccgtacgattatcaaccaacgtattccgacaaaaataaccataatataccacgcgcaaaaacgtatcgttaacctacctaattcgaaaattacccaacaacgtaataatatccataactcgatcacccgtatcacgccgaaaccgacgcatataatcgacgactatacccatctaacatacgactttaactactataacaccgtaaattctaaccgcgataaatttattataatacgt

SEQ ID NO: 16797 - DNA, 719 bp, Artificial Sequence
  chemically treated genomic DNA (Homo sapiens) CpG-island No: 16797
ttgttgtcgtcgtagaagacgtgtttttggcgtagggcgacgatgcgttcgtagtagcgtagggcgtaatttatttgatgtagcgtgacgattacggtgatgtcgtcgttttggttgatgtcgcgtagggtgtttattacgatgcgcgttgattttgggtttagcgaggcgatgggtttatcggttagaattattttcgtttgttgtattagcgtacgggtaatcgttatacgttgttgttggtcgtcggagagggtggaaacgcgttgatgggtaaaatgtattatgttaacgcgggttagcgtttgtaacgcgcgttgtttttgttcgtcggtgaattagttaaaataggtgcgttagaacggcgtgttgtcgagcgcgttaattagtacgttttttagtacgtttaggcggtttattaggttgaattgttggaatatgtagtcggtatgggcgcggtttttgcggatatcgcgggttaggcggttttcgcgttggaattgtttgcggataagcgttcgatatgggtatcgatagagttatcggcgcggaatagtattaggtatagtacgtataagggggattatcggagaacgagggttcgaagaggtttacgatatcggataagcgttatatacgacgtaagattgagcgtaatatagtagcgaggttttatacgataatagtgagtatagattataaaaggatatagagagaat

SEQ ID NO: 16798 - DNA, 719 bp, Artificial Sequence
  chemically treated genomic DNA (Homo sapiens) CpG-island No: 16798
attctctctatatccttttataatctatactcactattatcgtataaaacctcgctactatattacgctcaatcttacgtcgtatataacgcttatccgatatcgtaaacctcttcgaaccctcgttctccgataatcccccttatacgtactatacctaatactattccgcgccgataactctatcgatacccatatcgaacgcttatccgcaaacaattccaacgcgaaaaccgcctaacccgcgatatccgcaaaaaccgcgcccataccgactacatattccaacaattcaacctaataaaccgcctaaacgtactaaaaaacgtactaattaacgcgctcgacaacacgccgttctaacgcacctattttaactaattcaccgacgaacaaaaacaacgcgcgttacaaacgctaacccgcgttaacataatacattttacccatcaacgcgtttccaccctctccgacgaccaacaacaacgtataacgattacccgtacgctaatacaacaaacgaaaataattctaaccgataaacccatcgcctcgctaaacccaaaatcaacgcgcatcgtaataaacaccctacgcgacatcaaccaaaacgacgacatcaccgtaatcgtcacgctacatcaaataaattacgccctacgctactacgaacgcatcgtcgccctacgccaaaaacacgtcttctacgacgacaacaa

SEQ ID NO: 16799 - DNA, 719 bp, Artificial Sequence
  chemically treated genomic DNA (Homo sapiens) CpG-island No: 16799
attttttttatgtttttttatggtttgtatttattgttgtcgtgtgaggtttcgttattgtattgcgtttagttttgcgtcgtgtgtggcgtttgttcggtgtcgtgggttttttcgggttttcgtttttcggtaattttttttgtacgtattgtatttggtgttgtttcgcgtcgatgattttgtcggtatttatgtcgggcgtttgttcgtaagtagttttagcgcgaaggtcgtttggttcgcgatattcgtaaaagtcgcgtttatatcggttatatattttaataatttaatttggtgaatcgtttgagcgtattggagaacgtgttgattggcgcgttcggtagtacgtcgttttggcgtatttgttttagttggtttatcggcgagtagaaatagcgcgcgttataggcgttgattcgcgttggtatggtgtattttgtttattagcgcgtttttatttttttcggcggttagtagtaacgtgtggcgattgttcgtgcgttgatgtagtaggcgaaagtgattttggtcgatgaatttatcgtttcgttggatttagaattagcgcgtatcgtgatggatattttgcgcgatattaattagaacgacggtattatcgtggtcgttacgttgtattaggtggattacgttttgcgttattgcgaacgtatcgtcgttttgcgttaggggtacgttttttacgacggtagtag

SEQ ID NO: 16800 - DNA, 719 bp, Artificial Sequence
  chemically treated genomic DNA (Homo sapiens) CpG-island No: 16800
ctactaccgtcgtaaaaaacgtacccctaacgcaaaacgacgatacgttcgcaataacgcaaaacgtaatccacctaatacaacgtaacgaccacgataataccgtcgttctaattaatatcgcgcaaaatatccatcacgatacgcgctaattctaaatccaacgaaacgataaattcatcgaccaaaatcactttcgcctactacatcaacgcacgaacaatcgccacacgttactactaaccgccgaaaaaaataaaaacgcgctaataaacaaaatacaccataccaacgcgaatcaacgcctataacgcgcgctatttctactcgccgataaaccaactaaaacaaatacgccaaaacgacgtactaccgaacgcgccaatcaacacgttctccaatacgctcaaacgattcaccaaattaaattattaaaatatataaccgatataaacgcgacttttacgaatatcgcgaaccaaacgaccttcgcgctaaaactacttacgaacaaacgcccgacataaataccgacaaaatcatcgacgcgaaacaacaccaaatacaatacgtacaaaaaaaattaccgaaaaacgaaaacccgaaaaaacccacgacaccgaacaaacgccacacacgacgcaaaactaaacgcaatacaataacgaaacctcacacgacaacaataaatacaaaccataaaaaaacataaaaaaaat

SEQ ID NO: 16801 - DNA, 760 bp, Artificial Sequence
  chemically treated genomic DNA (Homo sapiens) CpG-island No: 16801
gtgtttgtgacggatgacggagtagggagtgaagtagtgattgataaagatttcgtcgttgcgttgttcgtcgagtagattaatgtagatggattggtgatttttatcgatgttgatgcggtatatgaaaattggggaacgtcgtagtaacgtgttattcgttatgttatatcggatgagttagcgttatttgttaaagtcgatggttcgatggggtcgaatgtaacggcggtgagtggttatgttagaagtcgtggtaaattcgcgtggattggggcgttatcgcgaattgaagagacgttggcgggcgaagcggggatttgtatttcgttgtagtcgtaggtattagatatttgtgtttgatgcgacgtttgacgcgttttattaggtttataatcggtgtcgtattcggtaattggtgtataatgtttgatgcgatgtttgacgtattttattaggtttataatgggtatcggatcggtaggtcggataaggcgtttacgtcgtattcggtaagaatagagtattagttaatcgaatttattttgcgtttaaattacgtcgttggtatatttcggcggtagtagcgggattaaggtttttagcgtcgtagttagacgcgatgtgtcgttgtcggttaaatttcgatgcgttagtttacgtttcggaagggattttttagtcgtattaggggcgattttttaggggaggtttagttaggtatattatatcggtttagtcgatgggttttacgggggat

SEQ ID NO: 16802 - DNA, 760 bp, Artificial Sequence
  chemically treated genomic DNA (Homo sapiens) CpG-island No: 16802
atcccccgtaaaacccatcgactaaaccgatataatatacctaactaaacctcccctaaaaaatcgcccctaatacgactaaaaaatcccttccgaaacgtaaactaacgcatcgaaatttaaccgacaacgacacatcgcgtctaactacgacgctaaaaaccttaatcccgctactaccgccgaaatataccaacgacgtaatttaaacgcaaaataaattcgattaactaatactctattcttaccgaatacgacgtaaacgccttatccgacctaccgatccgatacccattataaacctaataaaatacgtcaaacatcgcatcaaacattatacaccaattaccgaatacgacaccgattataaacctaataaaacgcgtcaaacgtcgcatcaaacacaaatatctaatacctacgactacaacgaaatacaaatccccgcttcgcccgccaacgtctcttcaattcgcgataacgccccaatccacgcgaatttaccacgacttctaacataaccactcaccgccgttacattcgaccccatcgaaccatcgactttaacaaataacgctaactcatccgatataacataacgaataacacgttactacgacgttccccaattttcatataccgcatcaacatcgataaaaatcaccaatccatctacattaatctactcgacgaacaacgcaacgacgaaatctttatcaatcactacttcactccctactccgtcatccgtcacaaacac

SEQ ID NO: 16803 - DNA, 760 bp, Artificial Sequence
  chemically treated genomic DNA (Homo sapiens) CpG-island No: 16803
atttttcgtgaagtttatcgattggatcgatgtgatatgtttggttgagttttttttggggaatcgtttttggtacgattaaggagtttttttcggggcgtaaattggcgtatcggaatttgatcgatagcgatatatcgcgtttgattgcgacgttggaagttttaatttcgttgttgtcgtcggaatatgttagcggcgtgatttgggcgtagagtaagttcggttaattggtgttttatttttgtcggatgcggcgtaaacgttttattcggtttatcgattcggtatttattgtaggtttgataagatgcgttaagtatcgtattaggtattgtgtattaattgtcggatgcggtatcggttgtaggtttgataagacgcgttaagcgtcgtattaggtataaatgtttaatgtttacgattatagcgaaatataggttttcgtttcgttcgttagcgtttttttaattcgcgataacgttttaatttacgcgggtttattacggtttttgatataattatttatcgtcgttatattcggttttatcgaattatcggttttggtaaatggcgttaatttattcggtgtggtatggcgaatggtacgttgttgcggcgttttttagtttttatatatcgtattagtatcggtgaggattattagtttatttgtattaatttgttcggcgagtaacgtagcggcgagatttttattaattattgttttattttttgtttcgttattcgttataggtat

SEQ ID NO: 16804 - DNA, 760 bp, Artificial Sequence
  chemically treated genomic DNA (Homo sapiens) CpG-island No: 16804
atacctataacgaataacgaaacaaaaaataaaacaataattaataaaaatctcgccgctacgttactcgccgaacaaattaatacaaataaactaataatcctcaccgatactaatacgatatataaaaactaaaaaacgccgcaacaacgtaccattcgccataccacaccgaataaattaacgccatttaccaaaaccgataattcgataaaaccgaatataacgacgataaataattatatcaaaaaccgtaataaacccgcgtaaattaaaacgttatcgcgaattaaaaaaacgctaacgaacgaaacgaaaacctatatttcgctataatcgtaaacattaaacatttatacctaatacgacgcttaacgcgtcttatcaaacctacaaccgataccgcatccgacaattaatacacaatacctaatacgatacttaacgcatcttatcaaacctacaataaataccgaatcgataaaccgaataaaacgtttacgccgcatccgacaaaaataaaacaccaattaaccgaacttactctacgcccaaatcacgccgctaacatattccgacgacaacaacgaaattaaaacttccaacgtcgcaatcaaacgcgatatatcgctatcgatcaaattccgatacgccaatttacgccccgaaaaaaactccttaatcgtaccaaaaacgattccccaaaaaaaactcaaccaaacatatcacatcgatccaatcgataaacttcacgaaaaat

SEQ ID NO: 16805 - DNA, 661 bp, Artificial Sequence
  chemically treated genomic DNA (Homo sapiens) CpG-island No: 16805
tagtgtttttgattaattattagcgggtttagttgacggttggtggagtttagcgggttaacggtcgggtagatatttagagacgcgatttgacggtttagtattacggttgcgttaaggtgcgtaaaggtggttgtcggagacgggttagttaagttattcgtaggtacgtatattgtttgtacggaggtgatagaattagttttggtggaggtgatacgtttttgtagaacgtttatttttttcgttagggtcgggtgataatttaacggtgaaggtatacggtttagtagtgcggatattttcgtatcggttaggtgtaacgatagatgttgttaacgaatagtagaacgttacgattttcgttacggaattttttagttatggttagatcggttagagtaacgcgtagacggtttttcggcggttcgtttatttggttatatattagggatattttgtcgataacgttggagtcggttatttcgtggtagaagtcgttatttttacgagtacgtttatttacgttcgtaaatatagagtaatcggagtgttcgatcgcgatgttacgaatgagttttattatgtttacggttttatttatattcgtattatcgaatagattaattttatcgtttttagcgaacggatatattaggtt

SEQ ID NO: 16806 - DNA, 661 bp, Artificial Sequence
  chemically treated genomic DNA (Homo sapiens) CpG-island No: 16806
aacctaatatatccgttcgctaaaaacgataaaattaatctattcgataatacgaatataaataaaaccgtaaacataataaaactcattcgtaacatcgcgatcgaacactccgattactctatatttacgaacgtaaataaacgtactcgtaaaaataacgacttctaccacgaaataaccgactccaacgttatcgacaaaatatccctaatatataaccaaataaacgaaccgccgaaaaaccgtctacgcgttactctaaccgatctaaccataactaaaaaattccgtaacgaaaatcgtaacgttctactattcgttaacaacatctatcgttacacctaaccgatacgaaaatatccgcactactaaaccgtataccttcaccgttaaattatcacccgaccctaacgaaaaaaataaacgttctacaaaaacgtatcacctccaccaaaactaattctatcacctccgtacaaacaatatacgtacctacgaataacttaactaacccgtctccgacaaccacctttacgcaccttaacgcaaccgtaatactaaaccgtcaaatcgcgtctctaaatatctacccgaccgttaacccgctaaactccaccaaccgtcaactaaacccgctaataattaatcaaaaacacta

SEQ ID NO: 16807 - DNA, 661 bp, Artificial Sequence
  chemically treated genomic DNA (Homo sapiens) CpG-island No: 16807
gatttgatgtgttcgttcgttaagggcggtaaagttggtttgttcggtggtgcgggtgtaggtaaaatcgtaaatatgatggagtttattcgtaatatcgcgatcgagtatttcggttattttgtgtttgcgggcgtaggtgaacgtattcgtgagggtaacgatttttattacgaaatgatcgattttaacgttatcgataaagtatttttggtgtatggttagatgaacgagtcgtcgggaaatcgtttgcgcgttgttttgatcggtttgattatggttgagaaatttcgtgacgaaggtcgtgacgttttgttgttcgttgataatatttatcgttatatttggtcggtacggaagtattcgtattgttgggtcgtatgtttttatcgttaggttattattcgattttggcggaagagatgggcgttttgtaggaacgtattatttttattaaaattggttttattattttcgtataggtagtatacgtatttgcggatgatttgattgattcgttttcggtaattatttttgcgtattttgacgtaatcgtggtattgagtcgttagatcgcgtttttgggtatttattcggtcgttgattcgttggattttattagtcgttagttggattcgttggtggttggttaggaatatta

SEQ ID NO: 16808 - DNA, 661 bp, Artificial Sequence
  chemically treated genomic DNA (Homo sapiens) CpG-island No: 16808
taatattcctaaccaaccaccaacgaatccaactaacgactaataaaatccaacgaatcaacgaccgaataaatacccaaaaacgcgatctaacgactcaataccacgattacgtcaaaatacgcaaaaataattaccgaaaacgaatcaatcaaatcatccgcaaatacgtatactacctatacgaaaataataaaaccaattttaataaaaataatacgttcctacaaaacgcccatctcttccgccaaaatcgaataataacctaacgataaaaacatacgacccaacaatacgaatacttccgtaccgaccaaatataacgataaatattatcaacgaacaacaaaacgtcacgaccttcgtcacgaaatttctcaaccataatcaaaccgatcaaaacaacgcgcaaacgatttcccgacgactcgttcatctaaccatacaccaaaaatactttatcgataacgttaaaatcgatcatttcgtaataaaaatcgttaccctcacgaatacgttcacctacgcccgcaaacacaaaataaccgaaatactcgatcgcgatattacgaataaactccatcatatttacgattttacctacacccgcaccaccgaacaaaccaactttaccgcccttaacgaacgaacacatcaaatc

SEQ ID NO: 16809 - DNA, 610 bp, Artificial Sequence
  chemically treated genomic DNA (Homo sapiens) CpG-island No: 16809
  unsure (604)
ttattggcgatagtgagttagtcgtagcgaaagtgtgttatgaagtggggttggacgcgggagaggtggttattggtaatgatatcgaaacgttatttgacgacgaattggtaaatcgtgtatagcgtattacgttgtttgttcgtttgacgtcgatgtataaagaacgtagttgtgattttattgaatcgcgaagggtatgtggaaggttgaatgcgcgagggttaaaatgatgcgttcgtttgacgcgtaggcggatttcggtattattgtgggacggcgtagaagatatagtcgtgaagcggtatgttattatttggcgggaatatagatttgatggagcggatagaaggggtaagtagggaacgtcgtaattacgtagtatgttgtagtttttaaagggcggagtattatatcggacgggtatcggcgaggataggtatatagttatcgggagtgcgaaaataattcgacgggttaatgacgggtaacgagaaggataaatatatacggacgacggacgggttaaatgtagattataaatgagtagggtaataaataatatgtggtgttggttgcgtgcgttgaaggttcgtgttaatgnaaaata

SEQ ID NO: 16810 - DNA, 610 bp, Artificial Sequence
  chemically treated genomic DNA (Homo sapiens) CpG-island No: 16810
  unsure (7)
tattttncattaacacgaaccttcaacgcacgcaaccaacaccacatattatttattaccctactcatttataatctacatttaacccgtccgtcgtccgtatatatttatccttctcgttacccgtcattaacccgtcgaattattttcgcactcccgataactatatacctatcctcgccgatacccgtccgatataatactccgccctttaaaaactacaacatactacgtaattacgacgttccctacttaccccttctatccgctccatcaaatctatattcccgccaaataataacataccgcttcacgactatatcttctacgccgtcccacaataataccgaaatccgcctacgcgtcaaacgaacgcatcattttaaccctcgcgcattcaaccttccacatacccttcgcgattcaataaaatcacaactacgttctttatacatcgacgtcaaacgaacaaacaacgtaatacgctatacacgatttaccaattcgtcgtcaaataacgtttcgatatcattaccaataaccacctctcccgcgtccaaccccacttcataacacactttcgctacgactaactcactatcgccaataa

SEQ ID NO: 16811 - DNA, 610 bp, Artificial Sequence
  chemically treated genomic DNA (Homo sapiens) CpG-island No: 16811
  unsure (7)
tgttttntattaatacggatttttaacgtacgtagttaatattatatgttgtttgttattttgtttatttgtggtttgtatttggttcgttcgtcgttcgtgtgtgtttgtttttttcgttgttcgttattggttcgtcgaattattttcgtattttcggtggttgtatgtttgttttcgtcggtgttcgttcggtgtagtgtttcgttttttgaggattgtagtatgttgcgtagttgcgacgttttttgtttgttttttttgttcgttttattaggtttgtgttttcgttagatgatagtatgtcgttttacggttatattttttgcgtcgttttatagtagtgtcgagattcgtttgcgcgttaggcgggcgtattattttgattttcgcgtatttagttttttatatgtttttcgcggtttagtaaggttataattgcgttttttatgtatcggcgttaggcgggtagatagcgtggtacgttgtgtacgatttgttagttcgtcgttagatagcgtttcgatattattattaatgattatttttttcgcgtttagttttattttatggtatattttcgttgcgattgatttattgtcgttagtaa

SEQ ID NO: 16812 - DNA, 610 bp, Artificial Sequence
  chemically treated genomic DNA (Homo sapiens) CpG-island No: 16812
  unsure (604)
ttactaacgacaataaatcaatcgcaacgaaaatataccataaaataaaactaaacgcgaaaaaaataatcattaataataatatcgaaacgctatctaacgacgaactaacaaatcgtacacaacgtaccacgctatctacccgcctaacgccgatacataaaaaacgcaattataaccttactaaaccgcgaaaaacatataaaaaactaaatacgcgaaaatcaaaataatacgcccgcctaacgcgcaaacgaatctcgacactactataaaacgacgcaaaaaatataaccgtaaaacgacatactatcatctaacgaaaacacaaacctaataaaacgaacaaaaaaaacaaacaaaaaacgtcgcaactacgcaacatactacaatcctcaaaaaacgaaacactacaccgaacgaacaccgacgaaaacaaacatacaaccaccgaaaatacgaaaataattcgacgaaccaataacgaacaacgaaaaaaacaaacacacacgaacgacgaacgaaccaaatacaaaccacaaataaacaaaataacaaacaacatataatattaactacgtacgttaaaaatccgtattaatanaaaaca

SEQ ID NO: 16813 - DNA, 543 bp, Artificial Sequence
  chemically treated genomic DNA (Homo sapiens) CpG-island No: 16813
tcgtatcgtcgtgtttttcggtttaagttttaatattcgggcgaattgggcgtgtttattagttcggtagtatgaattattattcgttagttattttattggagacgacggaagatcgttgtcgaagcggcgttttatcggtttttagtatgacgttttgtattgttttattgttgaagtcgtcggtagtgatcgtttagtgtagtgttttacgattatagtagtttagcgcgaacgtgatacgtagttttttttcgttattatagtagattcgaattcgttagagtattatcgttgatgtttttttttacgggttatatttgttattagtatagtgtttcgtattcgatggcggtatagtaggttttcgtttaagtaatagcgtattttggcgtatgattcgtaatacgtttggtattgatcgtagtaattattaattttgtcgtttgcgaagtagcgtttatattcgacgataattatacgttggtagtttttcgataatataggtgtaatatcggagaagtatattttagtattattacg

SEQ ID NO: 16814 - DNA, 543 bp, Artificial Sequence
  chemically treated genomic DNA (Homo sapiens) CpG-island No: 16814
cgtaataatactaaaatatacttctccgatattacacctatattatcgaaaaactaccaacgtataattatcgtcgaatataaacgctacttcgcaaacgacaaaattaataattactacgatcaataccaaacgtattacgaatcatacgccaaaatacgctattacttaaacgaaaacctactataccgccatcgaatacgaaacactatactaataacaaatataacccgtaaaaaaaaacatcaacgataatactctaacgaattcgaatctactataataacgaaaaaaaactacgtatcacgttcgcgctaaactactataatcgtaaaacactacactaaacgatcactaccgacgacttcaacaataaaacaatacaaaacgtcatactaaaaaccgataaaacgccgcttcgacaacgatcttccgtcgtctccaataaaataactaacgaataataattcatactaccgaactaataaacacgcccaattcgcccgaatattaaaacttaaaccgaaaaacacgacgatacga

SEQ ID NO: 16815 - DNA, 543 bp, Artificial Sequence
  chemically treated genomic DNA (Homo sapiens) CpG-island No: 16815
cgtgatgatattgagatgtgttttttcgatattatatttatgttatcggagagttgttaacgtatggttatcgtcgggtatgggcgttgtttcgtagacggtagaattgatggttgttgcgattaatgttaaacgtgttacggattatgcgttagaatgcgttgttgtttgagcgaaaatttgttgtatcgttatcgaatacggggtattatattagtggtagatgtggttcgtgaaagaaagtattagcgatggtgttttgacgggttcgagtttgttgtgataacggagagagattgcgtgttacgttcgcgttggattgttgtgatcgtgaggtattgtattgggcggttattatcggcggttttaatagtgaaatagtataggacgttatgttgggagtcggtggaacgtcgtttcggtaacgatttttcgtcgtttttagtggagtggttgacggataatggtttatgttatcgggttaatgaatacgtttagttcgttcgaatgttgggatttgaatcgaagaatacggcggtgcgg

SEQ ID NO: 16816 - DNA, 543 bp, Artificial Sequence
  chemically treated genomic DNA (Homo sapiens) CpG-island No: 16816
ccgcaccgccgtattcttcgattcaaatcccaacattcgaacgaactaaacgtattcattaacccgataacataaaccattatccgtcaaccactccactaaaaacgacgaaaaatcgttaccgaaacgacgttccaccgactcccaacataacgtcctatactatttcactattaaaaccgccgataataaccgcccaatacaatacctcacgatcacaacaatccaacgcgaacgtaacacgcaatctctctccgttatcacaacaaactcgaacccgtcaaaacaccatcgctaatactttctttcacgaaccacatctaccactaatataataccccgtattcgataacgatacaacaaattttcgctcaaacaacaacgcattctaacgcataatccgtaacacgtttaacattaatcgcaacaaccatcaattctaccgtctacgaaacaacgcccatacccgacgataaccatacgttaacaactctccgataacataaatataatatcgaaaaaacacatctcaatatcatcacg

SEQ ID NO: 16817 - DNA, 916 bp, Artificial Sequence
  chemically treated genomic DNA (Homo sapiens) CpG-island No: 16817
ttcggtcgttagcgggtaaaggtttgagcgtcgtagttttagtcgttggagttgattagttttttttttttttttaacgtgttacgtatcgcgttatcgaaagcgattagtcgttgtgggatgagtgtacgtagcgcggtattattcgttagtagatcgtgttttagtttttgaattaacgttttggcggtggtgggcggtacggaagtaattatattgagaaattatatcgaaatttagcgggtggggagggggatggggattaattagcggcgtttatcgtttatcgttataaaatgtttaaattgttgttgataattgagtatttttggttcggcggtttcgaagatgcggtgttcgttggtcggatgatttaataacgtaattagatagtgtagtaagttttttagcgtaatgggcgtggtgcgtgaacgaatttagcgcggaggcgttaagattggtaggttgtagattatatcgcgtatgatttcgaacgtcgcggaatttgcgttaacgataatttcggttcgtagttcggttacgggtatattcgttttacgtagaatgttcgtcgtagtttgacgagtacgtagatgattcgattgtttatgtggcggggtttgtaacgaattaagaaagattaattgtttaattggtattttacgtagcgtatcgcggacgttgagagttatttggcgttttttgagcgataaaatcgtcgttttcgtttatgttgtgtattagaaaatagatcgtatcgatattttgtaatagggtcggtaggttattcggttagttgagatcgattttatggtaattgacgttttgttagttgtagtttttgtaagtttgtcgatatgacgtgtcgtcgttaggatttgatgttttttgttggttgatttgtgcgtatttagat

SEQ ID NO: 16818 - DNA, 916 bp, Artificial Sequence
  chemically treated genomic DNA (Homo sapiens) CpG-island No: 16818
atctaaatacgcacaaatcaaccaacaaaaaacatcaaatcctaacgacgacacgtcatatcgacaaacttacaaaaactacaactaacaaaacgtcaattaccataaaatcgatctcaactaaccgaataacctaccgaccctattacaaaatatcgatacgatctattttctaatacacaacataaacgaaaacgacgattttatcgctcaaaaaacgccaaataactctcaacgtccgcgatacgctacgtaaaataccaattaaacaattaatctttcttaattcgttacaaaccccgccacataaacaatcgaatcatctacgtactcgtcaaactacgacgaacattctacgtaaaacgaatatacccgtaaccgaactacgaaccgaaattatcgttaacgcaaattccgcgacgttcgaaatcatacgcgatataatctacaacctaccaatcttaacgcctccgcgctaaattcgttcacgcaccacgcccattacgctaaaaaacttactacactatctaattacgttattaaatcatccgaccaacgaacaccgcatcttcgaaaccgccgaaccaaaaatactcaattatcaacaacaatttaaacattttataacgataaacgataaacgccgctaattaatccccatccccctccccacccgctaaatttcgatataatttctcaatataattacttccgtaccgcccaccaccgccaaaacgttaattcaaaaactaaaacacgatctactaacgaataataccgcgctacgtacactcatcccacaacgactaatcgctttcgataacgcgatacgtaacacgttaaaaaaaaaaaaaaaactaatcaactccaacgactaaaactacgacgctcaaacctttacccgctaacgaccgaa

SEQ ID NO: 16819 - DNA, 916 bp, Artificial Sequence
  chemically treated genomic DNA (Homo sapiens) CpG-island No: 16819
atttgggtgcgtataggttagttagtaaggggtattagattttggcggcggtacgttatgtcgataggtttgtaaaggttgtaattggtaaagcgttagttgttatgaagtcgattttagttggtcggataatttatcggttttgttgtaggatatcgatacggtttattttttggtgtatagtatgggcgaaggcggcgattttatcgtttaggaggcgttaggtggtttttaacgttcgcgatgcgttacgtgaagtattagttaagtaattaattttttttagttcgttgtaggtttcgttatatgagtagtcggattatttgcgtgttcgttaggttacggcggatattttgcgtgaagcgaatgtattcgtgatcgaattgcgggtcggaattatcgttggcgtaggtttcgcggcgttcgaagttatgcgcgatatggtttataatttgttagttttaacgttttcgcgttgggttcgtttacgtattacgtttattgcgttggaaaatttgttgtattatttggttgcgttgttagattattcggttagcgaatatcgtattttcgaagtcgtcggattagaggtgtttagttattagtaatagtttgaatattttatggcggtgagcggtaagcgtcgttggttgatttttatttttttttttattcgttggatttcggtgtggttttttaatgtgattattttcgtatcgtttattatcgttagggcgttgatttaggggttgaaatacgatttgttggcggatgatatcgcgttacgtgtatttattttataacggttgatcgttttcgatgacgcggtacgtagtacgttgaaagaggaggaaaaattggttaattttagcgattggggttacgacgtttaggtttttgttcgttggcgatcgga

SEQ ID NO: 16820 - DNA, 916 bp, Artificial Sequence
  chemically treated genomic DNA (Homo sapiens) CpG-island No: 16820
tccgatcgccaacgaacaaaaacctaaacgtcgtaaccccaatcgctaaaattaaccaatttttcctcctctttcaacgtactacgtaccgcgtcatcgaaaacgatcaaccgttataaaataaatacacgtaacgcgatatcatccgccaacaaatcgtatttcaacccctaaatcaacgccctaacgataataaacgatacgaaaataatcacattaaaaaaccacaccgaaatccaacgaataaaaaaaaaaataaaaatcaaccaacgacgcttaccgctcaccgccataaaatattcaaactattactaataactaaacacctctaatccgacgacttcgaaaatacgatattcgctaaccgaataatctaacaacgcaaccaaataatacaacaaattttccaacgcaataaacgtaatacgtaaacgaacccaacgcgaaaacgttaaaactaacaaattataaaccatatcgcgcataacttcgaacgccgcgaaacctacgccaacgataattccgacccgcaattcgatcacgaatacattcgcttcacgcaaaatatccgccgtaacctaacgaacacgcaaataatccgactactcatataacgaaacctacaacgaactaaaaaaaattaattacttaactaatacttcacgtaacgcatcgcgaacgttaaaaaccacctaacgcctcctaaacgataaaatcgccgccttcgcccatactatacaccaaaaaataaaccgtatcgatatcctacaacaaaaccgataaattatccgaccaactaaaatcgacttcataacaactaacgctttaccaattacaacctttacaaacctatcgacataacgtaccgccgccaaaatctaataccccttactaactaacctatacgcacccaaat

SEQ ID NO: 16821 - DNA, 624 bp, Artificial Sequence
  chemically treated genomic DNA (Homo sapiens) CpG-island No: 16821
gtggcgatattcgttagcggtggcgcgtagttcgggcgttttattattacgcgttgggtcgttagtaagcgtgtaggttttagtaatttatcggtattaagattcggttttattagcgattgaaagatacgtatttttttttttattagcgcgtttttttgtttatgcgggaatatcgggtcgagataaattatttgcgggcgcggggtaatattagttagcgtcgttaggttggaggcgtgaattaattgtaatcgtttttgtaattagtcgtcgattttcgtattcgtataattacgcgttaggtcgtcgtcgagtagcgcggtaattattggattacgttttagtattcgtacgcggtagtcgattgaagttagtataaaggtatcgcgtttaagttttgtagtggtatttattatattcggtaaataatcgtttttaatgtttatcgttttcgttatcgttttatcgcgattatcgtcgaatttgcgtcggtgcgttatcgtttcgataataaaattaataaagatgtcgttaagttttggtttattacgtttgcgtaaattttagatgtttcgggggttatattaggttattaggttgtttttattcgtgttttagttt

SEQ ID NO: 16822 - DNA, 624 bp, Artificial Sequence
  chemically treated genomic DNA (Homo sapiens) CpG-island No: 16822
aaactaaaacacgaataaaaacaacctaataacctaatataacccccgaaacatctaaaatttacgcaaacgtaataaaccaaaacttaacgacatctttattaattttattatcgaaacgataacgcaccgacgcaaattcgacgataatcgcgataaaacgataacgaaaacgataaacattaaaaacgattatttaccgaatataataaataccactacaaaacttaaacgcgatacctttatactaacttcaatcgactaccgcgtacgaatactaaaacgtaatccaataattaccgcgctactcgacgacgacctaacgcgtaattatacgaatacgaaaatcgacgactaattacaaaaacgattacaattaattcacgcctccaacctaacgacgctaactaatattaccccgcgcccgcaaataatttatctcgacccgatattcccgcataaacaaaaaaacgcgctaataaaaaaaaaaatacgtatctttcaatcgctaataaaaccgaatcttaataccgataaattactaaaacctacacgcttactaacgacccaacgcgtaataataaaacgcccgaactacgcgccaccgctaacgaatatcgccac

SEQ ID NO: 16823 - DNA, 624 bp, Artificial Sequence
  chemically treated genomic DNA (Homo sapiens) CpG-island No: 16823
gggttggagtacggatgaggataatttgatggtttggtgtaattttcggaatatttggaatttgcgtaagcgtgatgagttaaaatttggcggtatttttgttgattttgttgtcggagcgatggcgtatcgacgtaaattcggcggtggtcgcggtgaggcggtggcgaaagcggtgggtattaaaggcgattatttgtcggatgtggtggatgttattgtaggatttgggcgcgatgtttttgtattggttttagtcggttgtcgcgtgcggatgttggagcgtaatttagtggttgtcgcgttattcgacgacggtttggcgcgtggttatgcggatgcggaaatcggcggttggttgtaggagcggttgtagttaatttacgtttttagtttgacggcgttgattgatattatttcgcgttcgtaggtggtttatttcgattcgatgttttcgtataagtagaaaagcgcgttagtgaaaaaagagatgcgtgttttttagtcgttggtgggatcggattttgatgtcgatggattattggagtttgtacgtttgttggcgatttaacgcgtggtggtaaagcgttcggattacgcgttatcgttggcgaatgtcgttat

SEQ ID NO: 16824 - DNA, 624 bp, Artificial Sequence
  chemically treated genomic DNA (Homo sapiens) CpG-island No: 16824
ataacgacattcgccaacgataacgcgtaatccgaacgctttaccaccacgcgttaaatcgccaacaaacgtacaaactccaataatccatcgacatcaaaatccgatcccaccaacgactaaaaaacacgcatctcttttttcactaacgcgcttttctacttatacgaaaacatcgaatcgaaataaaccacctacgaacgcgaaataatatcaatcaacgccgtcaaactaaaaacgtaaattaactacaaccgctcctacaaccaaccgccgatttccgcatccgcataaccacgcgccaaaccgtcgtcgaataacgcgacaaccactaaattacgctccaacatccgcacgcgacaaccgactaaaaccaatacaaaaacatcgcgcccaaatcctacaataacatccaccacatccgacaaataatcgcctttaatacccaccgctttcgccaccgcctcaccgcgaccaccgccgaatttacgtcgatacgccatcgctccgacaacaaaatcaacaaaaataccgccaaattttaactcatcacgcttacgcaaattccaaatattccgaaaattacaccaaaccatcaaattatcctcatccgtactccaaccc

SEQ ID NO: 16825 - DNA, 805 bp, Artificial Sequence
  chemically treated genomic DNA (Homo sapiens) CpG-island No: 16825
tcggggtacgtattggtgtttttatcggcgtggtttgttcggtgtgtttcggcggagtgacgttcggttattcggttaattttttgttcggtgtaaaggtttttttcggtgaaatcgatatcgttttgttcggttcgttgtcgtttattttttttcgtatttatagtagttatcggataaaaacgttcgcgtcggtggggagtttcggtttcggttggaaaatgtttgcggatattcgtttatagttgcgcgataatatattgatatttagtgataacggcggtagaagtttgtattttgagtatttgtttttcggtgaggacggttatagtcgtagcgagttattgtggttggtgcgcggcggcgtggcgaaattggatgaaggttatcggttggtcgtattttggtaggcgttgtcggaagaatttcgtttaagttcgtatcgttatttggcgataaatagttcgtagggtcgtggtggttgttcggatggtgtgagcgggtgtcggaaagcggatgaggtgtttgttgcgtcgatgacggcgatcgggtattgatcgggttgggtggatcgagttataggcgtataatagacgtttatacggaaaatcggtcggtgaaaatatacggggaataatcgggtgaacgaggggttacgggaaaatcggagtggtattgatttcgattaggttacggggaaaaaaaatcgagaggttaacgaggggaggaaagcggcgtgcgaagaatagtagggcgtcgataaaattagggtaaagagtatttgtatcggagtgtataatatata

SEQ ID NO: 16826 - DNA, 805 bp, Artificial Sequence
  chemically treated genomic DNA (Homo sapiens) CpG-island No: 16826
tatatattatacactccgatacaaatactctttaccctaattttatcgacgccctactattcttcgcacgccgctttcctcccctcgttaacctctcgattttttttccccgtaacctaatcgaaatcaataccactccgattttcccgtaacccctcgttcacccgattattccccgtatattttcaccgaccgattttccgtataaacgtctattatacgcctataactcgatccacccaacccgatcaatacccgatcgccgtcatcgacgcaacaaacacctcatccgctttccgacacccgctcacaccatccgaacaaccaccacgaccctacgaactatttatcgccaaataacgatacgaacttaaacgaaattcttccgacaacgcctaccaaaatacgaccaaccgataaccttcatccaatttcgccacgccgccgcgcaccaaccacaataactcgctacgactataaccgtcctcaccgaaaaacaaatactcaaaatacaaacttctaccgccgttatcactaaatatcaatatattatcgcgcaactataaacgaatatccgcaaacattttccaaccgaaaccgaaactccccaccgacgcgaacgtttttatccgataactactataaatacgaaaaaaaataaacgacaacgaaccgaacaaaacgatatcgatttcaccgaaaaaaacctttacaccgaacaaaaaattaaccgaataaccgaacgtcactccgccgaaacacaccgaacaaaccacgccgataaaaacaccaatacgtaccccga

SEQ ID NO: 16827 - DNA, 805 bp, Artificial Sequence
  chemically treated genomic DNA (Homo sapiens) CpG-island No: 16827
tgtgtgttgtatatttcgatgtaggtgttttttgttttgattttgtcggcgttttgttgtttttcgtacgtcgttttttttttttcgttggtttttcggtttttttttttcgtggtttggtcggggttagtattatttcggttttttcgtggtttttcgtttattcggttgtttttcgtgtgtttttatcggtcggtttttcgtgtgaacgtttgttgtgcgtttgtaattcggtttatttagttcggttagtattcggtcgtcgttatcggcgtagtaagtattttattcgtttttcggtattcgtttatattattcgagtagttattacggttttgcggattgtttgtcgttagataacgatgcggatttaagcggagttttttcggtagcgtttgttagagtgcggttagtcggtgatttttatttagtttcgttacgtcgtcgcgtattagttatagtgattcgttgcggttgtaatcgtttttatcgggaaataggtgtttaaaatataggtttttgtcgtcgttattattgagtattagtgtgttatcgcgtagttgtaagcggatattcgtaggtattttttagtcggggtcgaggttttttatcggcgcgggcgtttttgttcggtaattgttgtaggtgcgggagaggatgaacggtagcgggtcgggtagggcgatgtcggttttatcgggaaggatttttgtatcgagtaggggattgatcggatggtcggacgttatttcgtcggggtatatcgaataggttacgtcggtgggggtattaatacgtatttcgg

SEQ ID NO: 16828 - DNA, 805 bp, Artificial Sequence
  chemically treated genomic DNA (Homo sapiens) CpG-island No: 16828
ccgaaatacgtattaatacccccaccgacgtaacctattcgatataccccgacgaaataacgtccgaccatccgatcaatcccctactcgatacaaaaatccttcccgataaaaccgacatcgccctacccgacccgctaccgttcatcctctcccgcacctacaacaattaccgaacaaaaacgcccgcgccgataaaaaacctcgaccccgactaaaaaatacctacgaatatccgcttacaactacgcgataacacactaatactcaataataacgacgacaaaaacctatattttaaacacctatttcccgataaaaacgattacaaccgcaacgaatcactataactaatacgcgacgacgtaacgaaactaaataaaaatcaccgactaaccgcactctaacaaacgctaccgaaaaaactccgcttaaatccgcatcgttatctaacgacaaacaatccgcaaaaccgtaataactactcgaataatataaacgaataccgaaaaacgaataaaatacttactacgccgataacgacgaccgaatactaaccgaactaaataaaccgaattacaaacgcacaacaaacgttcacacgaaaaaccgaccgataaaaacacacgaaaaacaaccgaataaacgaaaaaccacgaaaaaaccgaaataatactaaccccgaccaaaccacgaaaaaaaaaaaccgaaaaaccaacgaaaaaaaaaaaacgacgtacgaaaaacaacaaaacgccgacaaaatcaaaacaaaaaacacctacatcgaaatatacaacacaca

SEQ ID NO: 16829 - DNA, 542 bp, Artificial Sequence
  chemically treated genomic DNA (Homo sapiens) CpG-island No: 16829
tttaaaaacggtaaggtaaaatcgcgtcgggcgcgtacgtattgaagcgggtacgtaaacgtaacgggaaaaacgcgggtaagcgcggcggaggtattgggcggaaaatattatacgacggaaattgacgaaatagaagggggaacgagagacggagggaacggggaaggagaacgttggagggacgaggagggggatagggatcggttacgatcgcgtatcggacggattaggagggcgaatcggacggagagggagcggcggataacggatcggtatatcgaggggggaacggcgagggacgaggatcggggtatcggacgggattaagtatcggcgaatacggttttcggtattacgtaacgcgggtatcgtaagggaaacgaaagcgtaatagaagggagaaacgagaaggatagggtagggatatcgaggatatttacgtcggagagtatcggagggtataaggaacgcgaaaaaaaaggaggggggaggaataggggggaaaagaaaggaagaggatagcgacgagaaagaaagga

SEQ ID NO: 16830 - DNA, 542 bp, Artificial Sequence
  chemically treated genomic DNA (Homo sapiens) CpG-island No: 16830
tcctttctttctcgtcgctatcctcttcctttcttttcccccctattcctcccccctccttttttttcgcgttccttataccctccgatactctccgacgtaaatatcctcgatatccctaccctatccttctcgtttctcccttctattacgctttcgtttcccttacgatacccgcgttacgtaataccgaaaaccgtattcgccgatacttaatcccgtccgataccccgatcctcgtccctcgccgttcccccctcgatataccgatccgttatccgccgctccctctccgtccgattcgccctcctaatccgtccgatacgcgatcgtaaccgatccctatccccctcctcgtccctccaacgttctccttccccgttccctccgtctctcgttcccccttctatttcgtcaatttccgtcgtataatattttccgcccaatacctccgccgcgcttacccgcgtttttcccgttacgtttacgtacccgcttcaatacgtacgcgcccgacgcgattttaccttaccgtttttaaa

SEQ ID NO: 16831 - DNA, 542 bp, Artificial Sequence
  chemically treated genomic DNA (Homo sapiens) CpG-island No: 16831
ttttttttttttcgtcgttgttttttttttttttttttttttttgttttttttttttttttttttttcgcgttttttgtgtttttcggtgtttttcggcgtgggtgttttcggtgtttttgttttgtttttttcgttttttttttttgttgcgttttcgttttttttgcggtgttcgcgttgcgtggtgtcgggggtcgtgttcgtcggtgtttggtttcgttcggtgtttcggttttcgtttttcgtcgtttttttttcggtgtgtcggttcgttgttcgtcgtttttttttcgttcggttcgtttttttggttcgttcggtgcgcggtcgtggtcggtttttgttttttttttcgtttttttagcgtttttttttttcgtttttttcgtttttcgtttttttttttgtttcgttagttttcgtcgtgtggtgtttttcgtttaatgttttcgtcgcgtttgttcgcgtttttttcgttgcgtttgcgtgttcgttttagtgcgtgcgcgttcggcgcggttttgttttgtcgtttttgag

SEQ ID NO: 16832 - DNA, 542 bp, Artificial Sequence
  chemically treated genomic DNA (Homo sapiens) CpG-island No: 16832
ctcaaaaacgacaaaacaaaaccgcgccgaacgcgcacgcactaaaacgaacacgcaaacgcaacgaaaaaaacgcgaacaaacgcgacgaaaacattaaacgaaaaacaccacacgacgaaaactaacgaaacaaaaaaaaaaacgaaaaacgaaaaaaacgaaaaaaaaaaacgctaaaaaaacgaaaaaaaaaacaaaaaccgaccacgaccgcgcaccgaacgaaccaaaaaaacgaaccgaacgaaaaaaaaacgacgaacaacgaaccgacacaccgaaaaaaaaacgacgaaaaacgaaaaccgaaacaccgaacgaaaccaaacaccgacgaacacgacccccgacaccacgcaacgcgaacaccgcaaaaaaaacgaaaacgcaacaaaaaaaaaaaacgaaaaaaacaaaacaaaaacaccgaaaacacccacgccgaaaaacaccgaaaaacacaaaaaacgcgaaaaaaaaaaaaaaaaaaaaaacaaaaaaaaaaaaaaaaaaaaaaaacaacgacgaaaaaaaaaaaa

SEQ ID NO: 16833 - DNA, 1335 bp, Artificial Sequence
  chemically treated genomic DNA (Homo sapiens) CpG-island No: 16833
ttggcggcggggttttttcggttcggttcgcggcgtttttttgtcgtcgtttcggggtgtttttgtttcgttgcgagttcggtatcgcggcgacggcggcgcgaagagggaagcgggcggcggcggcggtcgcgttaagatgcgtcgggttatcgtaggttgaggcgttcgtcgttttcgttttttttttcgttcgtttttttttttttcgtttgtttttttcgttcgttcgtttttttttttttttcgtttttttttcgcgttttttcgttcgttttttcgcgtttcgtttttttcgtttcgcgttttgcggtgttgtagttgcgggcggttttagttgtttttagatgtgggttgggcggttcgcggggaattttcgcgtcggttgcgagtgcggggtttcggttgtagttcggttgttatggattcgtcggcgggagtcgttcgtcgtttgttttgtttcgcgttgttgttgttgttgttgttgttgtcgtcgtcgtttttgtcgtcgtcgtcgtcgttcgcgaacgttaggttcgtcgtcgtcgtcgattttttaggtaggtgcggttcggtttttatttttcgggattttcgtcggtttggttttgtttcgcgtgtttcgtcgttttttttttaggcgtcgtttagtttgatttgggtaaatttcgcgcgtttcgttcggggttaagttggttaatttcggggtcgggttggtcgcgtagggggcgtttcgtatcgttttcgagcgttttgggtcgggggagtttcggagtattggcggtttttgagtcgcggagggtggggacggagggtcgggaaaagtttcgcggttaagagcgtagagttagttttagcgggttcgaggggggagttagggcgaggcggcgtcggggttcgcgttcggggacgtttcggaggagtcggttgtcgagcgcgtagttttgggttttaaggattggttggggcgtttcgtagggaattttcggagatcggagggattttgttttattttttttagttttcgggcgttcggggagacggggtcggtagcgggttgagcgggagttggataggtaggataggtcgttcgtgttcggggaagtcgagatttcgtcgtttcggaggttggcggtgagggtattcgggcggtaggggttcgtcgaggggtcgtggtatacgggtaagggggttaattcggaatggttttcgagtagttttacgttttgttaaggacggtaggtgtaagggtcgggggattttttgacggggtcgttttttcgggtacggggaggtttttatcgagttttaattttgaacggggtagggggtaga

SEQ ID NO: 16834 - DNA, 1335 bp, Artificial Sequence
  chemically treated genomic DNA (Homo sapiens) CpG-island No: 16834
tctaccccctaccccgttcaaaattaaaactcgataaaaacctccccgtacccgaaaaaacgaccccgtcaaaaaatcccccgacccttacacctaccgtccttaacaaaacgtaaaactactcgaaaaccattccgaattaacccccttacccgtataccacgacccctcgacgaacccctaccgcccgaataccctcaccgccaacctccgaaacgacgaaatctcgacttccccgaacacgaacgacctatcctacctatccaactcccgctcaacccgctaccgaccccgtctccccgaacgcccgaaaactaaaaaaaataaaacaaaatccctccgatctccgaaaattccctacgaaacgccccaaccaatccttaaaacccaaaactacgcgctcgacaaccgactcctccgaaacgtccccgaacgcgaaccccgacgccgcctcgccctaactcccccctcgaacccgctaaaactaactctacgctcttaaccgcgaaacttttcccgaccctccgtccccaccctccgcgactcaaaaaccgccaatactccgaaactcccccgacccaaaacgctcgaaaacgatacgaaacgccccctacgcgaccaacccgaccccgaaattaaccaacttaaccccgaacgaaacgcgcgaaatttacccaaatcaaactaaacgacgcctaaaaaaaaaacgacgaaacacgcgaaacaaaaccaaaccgacgaaaatcccgaaaaataaaaaccgaaccgcacctacctaaaaaatcgacgacgacgacgaacctaacgttcgcgaacgacgacgacgacgacaaaaacgacgacgacaacaacaacaacaacaacaacaacgcgaaacaaaacaaacgacgaacgactcccgccgacgaatccataacaaccgaactacaaccgaaaccccgcactcgcaaccgacgcgaaaattccccgcgaaccgcccaacccacatctaaaaacaactaaaaccgcccgcaactacaacaccgcaaaacgcgaaacgaaaaaaacgaaacgcgaaaaaacgaacgaaaaaacgcgaaaaaaaaacgaaaaaaaaaaaaaaacgaacgaacgaaaaaaacaaacgaaaaaaaaaaaaacgaacgaaaaaaaaaacgaaaacgacgaacgcctcaacctacgataacccgacgcatcttaacgcgaccgccgccgccgcccgcttccctcttcgcgccgccgtcgccgcgataccgaactcgcaacgaaacaaaaacaccccgaaacgacgacaaaaaaacgccgcgaaccgaaccgaaaaaaccccgccgccaa

SEQ ID NO: 16835 - DNA, 1335 bp, Artificial Sequence
  chemically treated genomic DNA (Homo sapiens) CpG-island No: 16835
tttgttttttgtttcgtttagggttggggttcggtgggaattttttcgtgttcgaagggacgatttcgttagagagtttttcgatttttgtatttatcgtttttggtaggacgtggagttgttcggaagttatttcgggttggtttttttattcgtgtgttacgatttttcggcgggtttttgtcgttcgagtgtttttatcgttagttttcggagcggcggagtttcggttttttcgagtacgagcggtttgttttgtttgtttagttttcgtttagttcgttgtcggtttcgttttttcgagcgttcgaggattgggaggggtggaatagggttttttcgattttcggggattttttgcggggcgttttaattaatttttagggtttaaggttacgcgttcggtagtcggttttttcggagcgttttcggacgcgagtttcggcgtcgtttcgttttggtttttttttcggattcgttggggttgattttgcgtttttggtcgcggggtttttttcggtttttcgtttttatttttcgcgatttaggagtcgttagtgtttcgaggttttttcggtttaaggcgttcgggggcggtgcggggcgttttttgcgcgattaattcggtttcgaagttggttaatttggtttcgggcggggcgcgcggagtttgtttaagttaggttggacgacgtttggggagggggcggcggggtacgcgggatagggttaggtcggcgggggtttcggggagtaggggtcgggtcgtatttatttggggggtcggcggcggcggcgagtttggcgttcgcgggcggcggcggcggcggtaggagcggcggcggtagtagtagtagtagtagtagtagcgcggggtagagtaggcggcgagcggttttcgtcggcggatttatggtagtcggattgtagtcggggtttcgtattcgtagtcggcgcgaaagtttttcgcgagtcgtttagtttatatttgggggtagttggagtcgttcgtagttgtagtatcgtagggcgcggggcggaggaggcgaggcgcggaggggcgggcgggggagcgcggagggaaggcggggagagggaaggagcgagcgagcgagggaggtaggcgggagggagggaggcgagcgagggggagggcggggacggcgggcgttttagtttgcggtgattcggcgtattttggcgcggtcgtcgtcgtcgttcgttttttttttcgcgtcgtcgtcgtcgcggtgtcgggttcgtagcgaagtagagatatttcgaggcggcggtagagaagcgtcgcgggtcgggtcgggggagtttcgtcgttag

SEQ ID NO: 16836 - DNA, 1335 bp, Artificial Sequence
  chemically treated genomic DNA (Homo sapiens) CpG-island No: 16836
ctaacgacgaaactcccccgacccgacccgcgacgcttctctaccgccgcctcgaaatatctctacttcgctacgaacccgacaccgcgacgacgacgacgcgaaaaaaaaaacgaacgacgacgacgaccgcgccaaaatacgccgaatcaccgcaaactaaaacgcccgccgtccccgccctccccctcgctcgcctccctccctcccgcctacctccctcgctcgctcgctccttccctctccccgccttccctccgcgctcccccgcccgcccctccgcgcctcgcctcctccgccccgcgccctacgatactacaactacgaacgactccaactacccccaaatataaactaaacgactcgcgaaaaactttcgcgccgactacgaatacgaaaccccgactacaatccgactaccataaatccgccgacgaaaaccgctcgccgcctactctaccccgcgctactactactactactactactaccgccgccgctcctaccgccgccgccgccgcccgcgaacgccaaactcgccgccgccgccgaccccccaaataaatacgacccgacccctactccccgaaacccccgccgacctaaccctatcccgcgtaccccgccgccccctccccaaacgtcgtccaacctaacttaaacaaactccgcgcgccccgcccgaaaccaaattaaccaacttcgaaaccgaattaatcgcgcaaaaaacgccccgcaccgcccccgaacgccttaaaccgaaaaaacctcgaaacactaacgactcctaaatcgcgaaaaataaaaacgaaaaaccgaaaaaaaccccgcgaccaaaaacgcaaaatcaaccccaacgaatccgaaaaaaaaaccaaaacgaaacgacgccgaaactcgcgtccgaaaacgctccgaaaaaaccgactaccgaacgcgtaaccttaaaccctaaaaattaattaaaacgccccgcaaaaaatccccgaaaatcgaaaaaaccctattccacccctcccaatcctcgaacgctcgaaaaaacgaaaccgacaacgaactaaacgaaaactaaacaaacaaaacaaaccgctcgtactcgaaaaaaccgaaactccgccgctccgaaaactaacgataaaaacactcgaacgacaaaaacccgccgaaaaatcgtaacacacgaataaaaaaaccaacccgaaataacttccgaacaactccacgtcctaccaaaaacgataaatacaaaaatcgaaaaactctctaacgaaatcgtcccttcgaacacgaaaaaattcccaccgaaccccaaccctaaacgaaacaaaaaacaaa

SEQ ID NO: 16837 - DNA, 782 bp, Artificial Sequence
  chemically treated genomic DNA (Homo sapiens) CpG-island No: 16837
attatattcgttttatttaagcgtagttggttttcgtttttgagttgggtcgttgtattcgtcgtgttggtcgtttcgtggtagggcgcggaaatggtttcgtttacgttgattaaagacggcggtaatatggcgacgttcgtcgtcgattttttttcgttcgattttagttagtggtaggattattttatcgaaatggtcgttacgttgtaaatcgtcgtttggggtatcgcgttggcggtggttttttttattttttttggtttgatgagcgtcgaaaatttggtgtcgtggtgggtttattagttcgttcgtcgtttgatggacgtttgtcgcgttattaacgaaatggttttcgttatgttgttcgtggtcgtcgtcggtttcggttcgttcgttggcgtgttggcgtgttggcgttgttatttatattatcggcgtgttttttaagttgtttttcgaagcggtggaagcgattgagttcggttcggtggaaggtattcgcgttatcggtgttaataagttcgaagagattttttacggcgtgttgttataggtgatgttattgttgattttttattttttttatcgtttcgaagtttaacgttcgttcggcgatcgtcgtcgtgtattggtcgagtcgtatggcgggatcggcgttattttgtgggaagcgatttaggcggtttttagttttaataaattttgcgttttgatggtgtttattatcgttacggttagatttgttggatttttttttttaacggttgcgtaagtattta

SEQ ID NO: 16838 - DNA, 782 bp, Artificial Sequence
  chemically treated genomic DNA (Homo sapiens) CpG-island No: 16838
taaatacttacgcaaccgttaaaaaaaaaaatccaacaaatctaaccgtaacgataataaacaccatcaaaacgcaaaatttattaaaactaaaaaccgcctaaatcgcttcccacaaaataacgccgatcccgccatacgactcgaccaatacacgacgacgatcgccgaacgaacgttaaacttcgaaacgataaaaaaaataaaaaatcaacaataacatcacctataacaacacgccgtaaaaaatctcttcgaacttattaacaccgataacgcgaataccttccaccgaaccgaactcaatcgcttccaccgcttcgaaaaacaacttaaaaaacacgccgataatataaataacaacgccaacacgccaacacgccaacgaacgaaccgaaaccgacgacgaccacgaacaacataacgaaaaccatttcgttaataacgcgacaaacgtccatcaaacgacgaacgaactaataaacccaccacgacaccaaattttcgacgctcatcaaaccaaaaaaaataaaaaaaaccaccgccaacgcgataccccaaacgacgatttacaacgtaacgaccatttcgataaaataatcctaccactaactaaaatcgaacgaaaaaaaatcgacgacgaacgtcgccatattaccgccgtctttaatcaacgtaaacgaaaccatttccgcgccctaccacgaaacgaccaacacgacgaatacaacgacccaactcaaaaacgaaaaccaactacgcttaaataaaacgaatataat

SEQ ID NO: 16839 - DNA, 782 bp, Artificial Sequence
  chemically treated genomic DNA (Homo sapiens) CpG-island No: 16839
taagtgtttacgtaatcgttgagagaggaaatttagtaggtttgatcgtgacgatgataagtattattagggcgtaggatttgttggaattggaaatcgtttgaatcgttttttatagggtgacgtcgatttcgttatgcgattcgattaatgtacgacgacggtcgtcgagcggacgttggatttcgaagcgatagagggagtaggagattagtagtggtattatttgtggtagtacgtcgtagaggattttttcgagtttgttggtatcggtggcgcgaatgttttttatcgggtcgggtttaatcgtttttatcgtttcggaaagtagtttggagagtacgtcggtggtgtggataatagcgttagtacgttagtacgttagcgaacgggtcgaggtcgacggcgattacgaatagtatggcgaagattatttcgttaatggcgcggtaggcgtttattaggcggcgaacgggttggtaaatttattacggtattaggttttcggcgtttattaggttaaaggggatggagagaattatcgttagcgcggtgttttagacggcgatttgtagcgtgacggttatttcggtgaggtaattttgttattggttgaaatcgggcgggaagaagtcggcggcgaacgtcgttatgttgtcgtcgtttttgattagcgtaagcggggttattttcgcgttttgttacgagacgattaatacggcgagtataacggtttagtttagaagcgagaattagttgcgtttgggtggggcgaatgtgat

SEQ ID NO: 16840 - DNA, 782 bp, Artificial Sequence
  chemically treated genomic DNA (Homo sapiens) CpG-island No: 16840
atcacattcgccccacccaaacgcaactaattctcgcttctaaactaaaccgttatactcgccgtattaatcgtctcgtaacaaaacgcgaaaataaccccgcttacgctaatcaaaaacgacgacaacataacgacgttcgccgccgacttcttcccgcccgatttcaaccaataacaaaattacctcaccgaaataaccgtcacgctacaaatcgccgtctaaaacaccgcgctaacgataattctctccatcccctttaacctaataaacgccgaaaacctaataccgtaataaatttaccaacccgttcgccgcctaataaacgcctaccgcgccattaacgaaataatcttcgccatactattcgtaatcgccgtcgacctcgacccgttcgctaacgtactaacgtactaacgctattatccacaccaccgacgtactctccaaactactttccgaaacgataaaaacgattaaacccgacccgataaaaaacattcgcgccaccgataccaacaaactcgaaaaaatcctctacgacgtactaccacaaataataccactactaatctcctactccctctatcgcttcgaaatccaacgtccgctcgacgaccgtcgtcgtacattaatcgaatcgcataacgaaatcgacgtcaccctataaaaaacgattcaaacgatttccaattccaacaaatcctacgccctaataatacttatcatcgtcacgatcaaacctactaaatttcctctctcaacgattacgtaaacactta

SEQ ID NO: 16841 - DNA, 879 bp, Artificial Sequence
  chemically treated genomic DNA (Homo sapiens) CpG-island No: 16841
  unsure (141)
tttgtttgcgcgcgggttattttaagtttatgggttcggttttgatgcgtaggtgtatcgatatattttgcgggtttagtggtttgcggcgcgtatttttttggtgaatggtgaataagggcggggcggaaaatggtttgncggaaatgagattgtttgggtaggttaatgaggtacggtttcgggaggggagtaaagtgcgtggttgggattacgcgcgaaaatatgttgttgttttattttaggggcgttattacggtcggttttagggtgatcgggtcggtggtattagttgtttttattggggatgatttggggatagggcgttgatcgcgtagtcggcgggtattgatggtaggtcgttggggatgttgttaggtgatgatgacgcgtcgatgggaatgtgtgaggtggagaaggtaaagggatagggatttagggattattggacggggcgtgtgcgtatttgggaatcgagggcgtatggcgtttgatgtatattatagaatgtcgggtttgatatgtgattgcgcgtgtgtgagtttatggggaggggtcgatcgtcggcgatagtttgttgggatcggggtgggggtttgttttaattggattagtatatacgaggggcgcgtaaagggttggtgggcgatggggcgcgtgggcggttttgaagtgaggattagggttcgatggaatggtggcggttttaggtagaatagggagagagattgtttggagtgtcgttggtggcgattagggtttgtattacgtacgatagtggcgcggtaagggatttggtaaagagatttttgtagggttttgattagtgaattgtgatgcgcgtgggtatgtgttagttgtagttagtcgatttaagga

SEQ ID NO: 16842 - DNA, 879 bp, Artificial Sequence
  chemically treated genomic DNA (Homo sapiens) CpG-island No: 16842
  unsure (739)
tccttaaatcgactaactacaactaacacatacccacgcgcatcacaattcactaatcaaaaccctacaaaaatctctttaccaaatcccttaccgcgccactatcgtacgtaatacaaaccctaatcgccaccaacgacactccaaacaatctctctccctattctacctaaaaccgccaccattccatcgaaccctaatcctcacttcaaaaccgcccacgcgccccatcgcccaccaaccctttacgcgcccctcgtatatactaatccaattaaaacaaacccccaccccgatcccaacaaactatcgccgacgatcgacccctccccataaactcacacacgcgcaatcacatatcaaacccgacattctataatatacatcaaacgccatacgccctcgattcccaaatacgcacacgccccgtccaataatccctaaatccctatccctttaccttctccacctcacacattcccatcgacgcgtcatcatcacctaacaacatccccaacgacctaccatcaatacccgccgactacgcgatcaacgccctatccccaaatcatccccaataaaaacaactaataccaccgacccgatcaccctaaaaccgaccgtaataacgcccctaaaataaaacaacaacatattttcgcgcgtaatcccaaccacgcactttactcccctcccgaaaccgtacctcattaacctacccaaacaatctcatttccgncaaaccattttccgccccgcccttattcaccattcaccaaaaaaatacgcgccgcaaaccactaaacccgcaaaatatatcgatacacctacgcatcaaaaccgaacccataaacttaaaataacccgcgcgcaaacaaa

SEQ ID NO: 16843 - DNA, 879 bp, Artificial Sequence
  chemically treated genomic DNA (Homo sapiens) CpG-island No: 16843
  unsure (739)
tttttagatcgattgattgtaattggtatatgtttacgcgtattatagtttattggttaaaattttataggggtttttttattaaattttttatcgcgttattatcgtgcgtaatgtaagttttaatcgttattagcggtattttaaatagtttttttttttattttatttagggtcgttattattttatcgggttttggtttttattttaaggtcgtttacgcgttttatcgtttattaattttttacgcgtttttcgtatatgttaatttagttggggtaggtttttatttcggttttagtaaattatcgtcggcggtcggtttttttttataggtttatatacgcgtagttatatattaaattcggtattttgtagtgtgtattaaacgttatgcgttttcggtttttaggtacgtatacgtttcgtttaatagtttttaggtttttgtttttttattttttttattttatatatttttatcggcgcgttattattatttagtaatatttttagcgatttattattagtattcgtcggttacgcgattaacgttttgtttttaagttatttttagtagaagtaattggtattatcggttcggttattttagagtcggtcgtaatagcgtttttaaagtaaggtaataatatgttttcgcgcgtagttttagttacgtattttatttttttttcggggtcgtgttttattagtttatttaagtaattttattttcgntaaattatttttcgtttcgtttttatttattatttattaagggggtgcgcgtcgtaagttattaaattcgtaggatatatcggtgtatttacgtattaaagtcgggtttataaatttgggatggttcgcgcgtaagtagg

SEQ ID NO: 16844 - DNA, 879 bp, Artificial Sequence
  chemically treated genomic DNA (Homo sapiens) CpG-island No: 16844
  unsure (141)
cctacttacgcgcgaaccatcccaaatttataaacccgactttaatacgtaaatacaccgatatatcctacgaatttaataacttacgacgcgcacccccttaataaataataaataaaaacgaaacgaaaaataatttancgaaaataaaattacttaaataaactaataaaacacgaccccgaaaaaaaaataaaatacgtaactaaaactacgcgcgaaaacatattattaccttactttaaaaacgctattacgaccgactctaaaataaccgaaccgataataccaattacttctactaaaaataacttaaaaacaaaacgttaatcgcgtaaccgacgaatactaataataaatcgctaaaaatattactaaataataataacgcgccgataaaaatatataaaataaaaaaaataaaaaaacaaaaacctaaaaactattaaacgaaacgtatacgtacctaaaaaccgaaaacgcataacgtttaatacacactacaaaataccgaatttaatatataactacgcgtatataaacctataaaaaaaaaccgaccgccgacgataatttactaaaaccgaaataaaaacctaccccaactaaattaacatatacgaaaaacgcgtaaaaaattaataaacgataaaacgcgtaaacgaccttaaaataaaaaccaaaacccgataaaataataacgaccctaaataaaataaaaaaaaaaactatttaaaataccgctaataacgattaaaacttacattacgcacgataataacgcgataaaaaatttaataaaaaaacccctataaaattttaaccaataaactataatacgcgtaaacatataccaattacaatcaatcgatctaaaaa

SEQ ID NO: 16845 - DNA, 1222 bp, Artificial Sequence
  chemically treated genomic DNA (Homo sapiens) CpG-island No: 16845
atcgtttcgaggcgtattttttttatttcggaagaggagggcggtaaatttcggaaggcgggggttaggggacgagtttcggggattatcgtcgtttcgttcgtttcgggaagggttcgggtagcgattttggttgtagttggagggttacgggggaagggagcgttttttttcgtaatacgaaggtagcggttagggcgttttttttcggtgaggggtttcggaaaattgtagtaaggcgatagcggggatttttcgaagtgtgcggtgacggagggtgggaggaagttcgagttcgtcggtaatttcgggggtaaatgcgatcggcggcgtgtaggattagttcgtaggaggacgggggaaacgggagttaggatggcggggattttataggacgtcggtcgcgcgcgggggtagtgttgtttcggcggttaggagatgtcggaggcggggagggtcggtggttagttcgttttttttcggcggggttttgtagaaggagaagtcgttgttagtgataggaagagagtcgcggtagtcgtgtatatatgtatcgtttttttcgttcgagtatatatattcggggttgttgttgtttatttatttcgttcgtcggttttttttttttgcggggttcgcgttgtagcggtggttttttgttcgttcggtttcgatcggtttttagttcggttgcgattcgtcggtcgtgttcgattcgtgtttgtcgttttcgatagttagtttgtcgttttcgtcgttgtcgttgttttttttaatttcgttttagttgttggcgattttttttcgtgcgttcgtagttttagcgttcggcgttagtttcgttttcggttcggtttcgcgcgtttcgttttcgagtttatattaattagagttcgcggtttcgttttttttcgttcgtacggttcgggttttcgagtcggcggttggtagtgggggagcgagtttaggtttggcggattttttttgttatcgttttcgtttttcgttttttagtcgcggggatgtttcgggcggtcgtgtcgcgcgttgttttcgttgcggagtgttttggttttatacgtttcgggttcgttcggttgttgggcgttttttagcgtagaggcggatggggttcggggagtcgaagataagtttagatttttttggaggttggttgcgtttttaattcgagtgttttttagttattttaggttttttcgag

SEQ ID NO: 16846 - DNA, 1222 bp, Artificial Sequence
  chemically treated genomic DNA (Homo sapiens) CpG-island No: 16846
ctcgaaaaaacctaaaataactaaaaaacactcgaattaaaaacgcaaccaacctccaaaaaaatctaaacttatcttcgactccccgaaccccatccgcctctacgctaaaaaacgcccaacaaccgaacgaacccgaaacgtataaaaccaaaacactccgcaacgaaaacaacgcgcgacacgaccgcccgaaacatccccgcgactaaaaaacgaaaaacgaaaacgataacaaaaaaaatccgccaaacctaaactcgctcccccactaccaaccgccgactcgaaaacccgaaccgtacgaacgaaaaaaaacgaaaccgcgaactctaattaatataaactcgaaaacgaaacgcgcgaaaccgaaccgaaaacgaaactaacgccgaacgctaaaactacgaacgcacgaaaaaaaatcgccaacaactaaaacgaaattaaaaaaaacaacgacaacgacgaaaacgacaaactaactatcgaaaacgacaaacacgaatcgaacacgaccgacgaatcgcaaccgaactaaaaaccgatcgaaaccgaacgaacaaaaaaccaccgctacaacgcgaaccccgcaaaaaaaaaaaaccgacgaacgaaataaataaacaacaacaaccccgaatatatatactcgaacgaaaaaaacgatacatatatacacgactaccgcgactctcttcctatcactaacaacgacttctccttctacaaaaccccgccgaaaaaaaacgaactaaccaccgaccctccccgcctccgacatctcctaaccgccgaaacaacactacccccgcgcgcgaccgacgtcctataaaatccccgccatcctaactcccgtttcccccgtcctcctacgaactaatcctacacgccgccgatcgcatttacccccgaaattaccgacgaactcgaacttcctcccaccctccgtcaccgcacacttcgaaaaatccccgctatcgccttactacaattttccgaaacccctcaccgaaaaaaaacgccctaaccgctaccttcgtattacgaaaaaaaacgctcccttcccccgtaaccctccaactacaaccaaaatcgctacccgaacccttcccgaaacgaacgaaacgacgataatccccgaaactcgtcccctaacccccgccttccgaaatttaccgccctcctcttccgaaataaaaaaaatacgcctcgaaacgat

SEQ ID NO: 16847 - DNA, 1222 bp, Artificial Sequence
  chemically treated genomic DNA (Homo sapiens) CpG-island No: 16847
ttcgaaaaagtttggggtggttgaaagatattcggattagagacgtagttagtttttagggaggtttgaatttgttttcgatttttcgaattttattcgtttttgcgttgggagacgtttagtagtcgggcgggttcgggacgtgtagagttagagtatttcgtagcggaggtagcgcgcggtacggtcgttcggggtattttcgcggttggggggcggaaggcgagggcggtggtaggaagggttcgttaggtttgagttcgtttttttattgttagtcgtcggttcggaggttcgagtcgtgcggacggaaaggggcggagtcgcgggttttggttggtgtgggttcgggggcggggcgcgcggggtcgggtcggaggcggggttagcgtcgggcgttggagttgcgggcgtacggagaggagtcgttagtagttggagcggagttggaggaagtagcggtagcggcgagggcggtaggttagttgtcggagacggtaagtacggatcgggtacggtcggcgggtcgtagtcgggttggaggtcggtcggaatcgagcgggtaggaggttatcgttgtagcgcgggtttcgtagaggaaggaagtcggcgggcggggtaggtaggtagtagtagtttcgggtgtgtgtgttcgggcgggggaggcggtgtatgtgtgtacggttgtcgcgattttttttttgttattggtagcggtttttttttttgtagagtttcgtcggggggaagcgggttggttatcggtttttttcgttttcggtattttttggtcgtcggggtagtattattttcgcgcgcggtcggcgttttgtgagattttcgttattttgattttcgtttttttcgtttttttgcgagttggttttgtacgtcgtcggtcgtatttgttttcggagttgtcgacgagttcgggtttttttttatttttcgttatcgtatatttcggagggttttcgttgtcgttttgttgtagtttttcggggttttttatcggaggagagcgttttggtcgttgttttcgtgttgcgggaaggagcgtttttttttttcgtggttttttagttgtagttagggtcgttgttcgggtttttttcggggcgggcgaggcggcggtggttttcggagttcgttttttaattttcgtttttcgaagtttgtcgtttttttttttcggggtgggggaagtgcgtttcggggcggt

SEQ ID NO: 16848 - DNA, 1222 bp, Artificial Sequence
  chemically treated genomic DNA (Homo sapiens) CpG-island No: 16848
accgccccgaaacgcacttcccccaccccgaaaaaaaaaaacgacaaacttcgaaaaacgaaaattaaaaaacgaactccgaaaaccaccgccgcctcgcccgccccgaaaaaaacccgaacaacgaccctaactacaactaaaaaaccacgaaaaaaaaaaacgctccttcccgcaacacgaaaacaacgaccaaaacgctctcctccgataaaaaaccccgaaaaactacaacaaaacgacaacgaaaaccctccgaaatatacgataacgaaaaataaaaaaaaacccgaactcgtcgacaactccgaaaacaaatacgaccgacgacgtacaaaaccaactcgcaaaaaaacgaaaaaaacgaaaatcaaaataacgaaaatctcacaaaacgccgaccgcgcgcgaaaataatactaccccgacgaccaaaaaataccgaaaacgaaaaaaaccgataaccaacccgcttccccccgacgaaactctacaaaaaaaaaaaccgctaccaataacaaaaaaaaaatcgcgacaaccgtacacacatacaccgcctcccccgcccgaacacacacacccgaaactactactacctacctaccccgcccgccgacttccttcctctacgaaacccgcgctacaacgataacctcctacccgctcgattccgaccgacctccaacccgactacgacccgccgaccgtacccgatccgtacttaccgtctccgacaactaacctaccgccctcgccgctaccgctacttcctccaactccgctccaactactaacgactcctctccgtacgcccgcaactccaacgcccgacgctaaccccgcctccgacccgaccccgcgcgccccgcccccgaacccacaccaaccaaaacccgcgactccgcccctttccgtccgcacgactcgaacctccgaaccgacgactaacaataaaaaaacgaactcaaacctaacgaacccttcctaccaccgccctcgccttccgccccccaaccgcgaaaataccccgaacgaccgtaccgcgcgctacctccgctacgaaatactctaactctacacgtcccgaacccgcccgactactaaacgtctcccaacgcaaaaacgaataaaattcgaaaaatcgaaaacaaattcaaacctccctaaaaactaactacgtctctaatccgaatatctttcaaccaccccaaactttttcgaa

SEQ ID NO: 16849 - DNA, 630 bp, Artificial Sequence
  chemically treated genomic DNA (Homo sapiens) CpG-island No: 16849
gttcggcgcggtttcgttcgtttttcgttcgtttttcgttttttttcggtttttcgaggcgttcgggttttcggcgcggcggcggagggggcgggtaggtcggcgggcggtgatgtggcgggattttttatgcgttgcggtaggatacgcgttcggcgttgggacgcgattgcgtttagtttttttttttcggaagttgtagttatgatggaagtttgagagttgagtcgttgtgaggcgaggtcgggtttaggcgagggagatgagagacggcggcggtcgcggttcggagttttttttagcgtttgtgagtagtcgcgggggtagcgttttcggggagtcggtcggtttgcggcggcggtagcggcggcgtttttcgtttttttttcgttttttttaatcgtgtagtttttttttcggttttttttgaaagggaaggtggaagtcgtgggttcgggcgggagtcggttgaggcgcggcggcggcggcggtatttttcgtttttggagcgggggggagaagcggcggcggcggcggtcgcggcggttgtagttttagggagggggtttgagtcgtttgttattatttttagggttgggaacgtcggagagttggtttttttttttttat

SEQ ID NO: 16850 - DNA, 630 bp, Artificial Sequence
  chemically treated genomic DNA (Homo sapiens) CpG-island No: 16850
ataaaaaaaaaaaaaccaactctccgacgttcccaaccctaaaaataataacaaacgactcaaaccccctccctaaaactacaaccgccgcgaccgccgccgccgccgcttctcccccccgctccaaaaacgaaaaataccgccgccgccgccgcgcctcaaccgactcccgcccgaacccacgacttccaccttccctttcaaaaaaaaccgaaaaaaaaactacacgattaaaaaaaacgaaaaaaaaacgaaaaacgccgccgctaccgccgccgcaaaccgaccgactccccgaaaacgctacccccgcgactactcacaaacgctaaaaaaaactccgaaccgcgaccgccgccgtctctcatctccctcgcctaaacccgacctcgcctcacaacgactcaactctcaaacttccatcataactacaacttccgaaaaaaaaaaactaaacgcaatcgcgtcccaacgccgaacgcgtatcctaccgcaacgcataaaaaatcccgccacatcaccgcccgccgacctacccgccccctccgccgccgcgccgaaaacccgaacgcctcgaaaaaccgaaaaaaaacgaaaaacgaacgaaaaacgaacgaaaccgcgccgaac

SEQ ID NO: 16851 - DNA, 630 bp, Artificial Sequence
  chemically treated genomic DNA (Homo sapiens) CpG-island No: 16851
gtagaaggggagagattaatttttcggcgtttttagttttggaaatggtgataggcgatttagattttttttttggagttgtagtcgtcgcggtcgtcgtcgtcgtcgtttttttttttcgttttaggagcgggaggtgtcgtcgtcgtcgtcgcgttttagtcggttttcgttcgagtttacggtttttatttttttttttaggagaagtcgaggaagaggttgtacggttagaaaagacgaagaggaggcgagaaacgtcgtcgttgtcgtcgtcgtaggtcggtcggtttttcgagggcgttgttttcgcggttgtttataggcgttgagaggggtttcgggtcgcggtcgtcgtcgttttttatttttttcgtttgagttcggtttcgttttatagcggtttaatttttaaatttttattatggttgtagttttcgagaggagagaattgagcgtagtcgcgttttagcgtcgagcgcgtattttgtcgtagcgtataaagagtttcgttatattatcgttcgtcggtttgttcgtttttttcgtcgtcgcgtcgggagttcgggcgtttcggaagatcgaggggaggcgggaggcgagcgagaggcggacgggatcgcgtcgggt

SEQ ID NO: 16852 - DNA, 630 bp, Artificial Sequence
  chemically treated genomic DNA (Homo sapiens) CpG-island No: 16852
acccgacgcgatcccgtccgcctctcgctcgcctcccgcctcccctcgatcttccgaaacgcccgaactcccgacgcgacgacgaaaaaaacgaacaaaccgacgaacgataatataacgaaactctttatacgctacgacaaaatacgcgctcgacgctaaaacgcgactacgctcaattctctcctctcgaaaactacaaccataataaaaatttaaaaattaaaccgctataaaacgaaaccgaactcaaacgaaaaaaataaaaaacgacgacgaccgcgacccgaaacccctctcaacgcctataaacaaccgcgaaaacaacgccctcgaaaaaccgaccgacctacgacgacgacaacgacgacgtttctcgcctcctcttcgtcttttctaaccgtacaacctcttcctcgacttctcctaaaaaaaaaaataaaaaccgtaaactcgaacgaaaaccgactaaaacgcgacgacgacgacgacacctcccgctcctaaaacgaaaaaaaaaaacgacgacgacgacgaccgcgacgactacaactccaaaaaaaaaatctaaatcgcctatcaccatttccaaaactaaaaacgccgaaaaattaatctctccccttctac

SEQ ID NO: 16853 - DNA, 616 bp, Artificial Sequence
  chemically treated genomic DNA (Homo sapiens) CpG-island No: 16853
gcggcggttggatggttgatttcggcgagtatttgtttatcgatacgtatttgtataacggcgttagtgtcgaaattatgtataacgtttggtttgcgttgtgggcgaagtgtaattacgaagtttttgaagaaacgggtaagttcggcgagatttttttttttatgcgcgtcggttttatcggtagttagaaatattttattatgatgtgggcgggcgattagaacgtcgattggagtttcgacgatggtttggcgtcggttgtttcggcggcgttgtcgttggtaatgatcggatatggattgtattatagcgatattggcggttaatattattttgtttgagatgaagcgtagtaaagagttggtgttgcgttggtgcgattttagcgtttttacgtcgatgatgcgtatttacgaaggtaatcgttttggcgaatattgggcgtttgcggggacgtaaaatatcgttatttggtcgtttatttcgttttatattttgaatttatttgaaaaggcgcgtttgaataaattcgttacggtatggcggtgtttgattagaagtggacgtatttaaattacgtggtaaattttttttgtgaaagaggagagttttt

SEQ ID NO: 16854 - DNA, 616 bp, Artificial Sequence
  chemically treated genomic DNA (Homo sapiens) CpG-island No: 16854
aaaaactctcctctttcacaaaaaaaatttaccacgtaatttaaatacgtccacttctaatcaaacaccgccataccgtaacgaatttattcaaacgcgccttttcaaataaattcaaaatataaaacgaaataaacgaccaaataacgatattttacgtccccgcaaacgcccaatattcgccaaaacgattaccttcgtaaatacgcatcatcgacgtaaaaacgctaaaatcgcaccaacgcaacaccaactctttactacgcttcatctcaaacaaaataatattaaccgccaatatcgctataatacaatccatatccgatcattaccaacgacaacgccgccgaaacaaccgacgccaaaccatcgtcgaaactccaatcgacgttctaatcgcccgcccacatcataataaaatatttctaactaccgataaaaccgacgcgcataaaaaaaaaaatctcgccgaacttacccgtttcttcaaaaacttcgtaattacacttcgcccacaacgcaaaccaaacgttatacataatttcgacactaacgccgttatacaaatacgtatcgataaacaaatactcgccgaaatcaaccatccaaccgccgc

SEQ ID NO: 16855 - DNA, 616 bp, Artificial Sequence
  chemically treated genomic DNA (Homo sapiens) CpG-island No: 16855
aaaggttttttttttttatagggagaatttgttacgtaatttaggtacgtttatttttgattaggtatcgttatatcgtggcggatttatttaggcgcgtttttttaggtaggtttagggtgtaaaacggggtaaacggttaaatggcgatgttttgcgttttcgtaaacgtttagtgttcgttaggacggttattttcgtgggtgcgtattatcggcgtgaaggcgttgaaatcgtattagcgtagtattagttttttgttgcgttttattttaaatagggtggtgttaatcgttaatgtcgttgtggtgtagtttatgttcggttattgttagcgatagcgtcgtcgggataatcgacgttaggttatcgtcgagattttagtcgacgttttggtcgttcgtttatattatggtggagtatttttggttatcggtagaatcggcgcgtataaagaaaaggatttcgtcgagtttgttcgtttttttaagggtttcgtagttatatttcgtttatagcgtaggttaggcgttatgtataatttcggtattgacgtcgttatgtaagtacgtgtcggtgggtagatattcgtcgaagttagttatttagtcgtcgt

SEQ ID NO: 16856 - DNA, 616 bp, Artificial Sequence
  chemically treated genomic DNA (Homo sapiens) CpG-island No: 16856
acgacgactaaataactaacttcgacgaatatctacccaccgacacgtacttacataacgacgtcaataccgaaattatacataacgcctaacctacgctataaacgaaatataactacgaaacccttaaaaaaacgaacaaactcgacgaaatccttttctttatacgcgccgattctaccgataaccaaaaatactccaccataatataaacgaacgaccaaaacgtcgactaaaatctcgacgataacctaacgtcgattatcccgacgacgctatcgctaacaataaccgaacataaactacaccacaacgacattaacgattaacaccaccctatttaaaataaaacgcaacaaaaaactaatactacgctaatacgatttcaacgccttcacgccgataatacgcacccacgaaaataaccgtcctaacgaacactaaacgtttacgaaaacgcaaaacatcgccatttaaccgtttaccccgttttacaccctaaacctacctaaaaaaacgcgcctaaataaatccgccacgatataacgatacctaatcaaaaataaacgtacctaaattacgtaacaaattctccctataaaaaaaaaaaaccttt

SEQ ID NO: 16857 - DNA, 856 bp, Artificial Sequence
  chemically treated genomic DNA (Homo sapiens) CpG-island No: 16857
ttttcggtttgtcgtatgcgcggttttgatttagttttttttcgcgggtgtatcgtcgttatttggttcgaatcgtttatggttataacgggttatatgaatcggaatagtcggtgaagtttagttacgtgatcgtatacggttttacgttatggtttttcgtttgtcgttggtatttttcgttgcgtagggtaagttattgtgtggattattataacggtagcgggtgatatcgtcgttaggggtagttttttgaattagacggtttaatttattatattttcggcgtaattttagttcgttaggttcggtggttgacgttaattggttgtggtggttatagtaaaacgtcgatgttttgttattcggcgtggttatgcgcgtgatgaggttcgttattatattcgggttgtattttgttgttttgtttgcggtattcgtttgtgttttgagtttgtttacggcgttaaattgattttgcgtgacgttgtcgttcgcgtgttttttttttattattcgttttagttcggtttcgttttgcgtgtgtagtattttacggcggtttaggttgtcggtgatggtgatgcggttttttttatattgatacgtgtagtttaagtttgtcgggtttagttgttttgttattcgttcgtcgttgtcgtaacggtaacggattttcggtcggttcgtgtgacggtgcgttattattcggtttcggtatttattatcgtaagtaaagttgcgtatttgtttgttattacggttatatattatcgttagttcgtcgcggggcgtttagttatagcgtattagcggcgcggtaggtaaattttttcggggtatttcggggtcgtgt

SEQ ID NO: 16858 - DNA, 856 bp, Artificial Sequence
  chemically treated genomic DNA (Homo sapiens) CpG-island No: 16858
acacgaccccgaaataccccgaaaaaatttacctaccgcgccgctaatacgctataactaaacgccccgcgacgaactaacgataatatataaccgtaataacaaacaaatacgcaactttacttacgataataaataccgaaaccgaataataacgcaccgtcacacgaaccgaccgaaaatccgttaccgttacgacaacgacgaacgaataacaaaacaactaaacccgacaaacttaaactacacgtatcaatataaaaaaaaccgcatcaccatcaccgacaacctaaaccgccgtaaaatactacacacgcaaaacgaaaccgaactaaaacgaataataaaaaaaaaacacgcgaacgacaacgtcacgcaaaatcaatttaacgccgtaaacaaactcaaaacacaaacgaataccgcaaacaaaacaacaaaatacaacccgaatataataacgaacctcatcacgcgcataaccacgccgaataacaaaacatcgacgttttactataaccaccacaaccaattaacgtcaaccaccgaacctaacgaactaaaattacgccgaaaatataataaattaaaccgtctaattcaaaaaactacccctaacgacgatatcacccgctaccgttataataatccacacaataacttaccctacgcaacgaaaaataccaacgacaaacgaaaaaccataacgtaaaaccgtatacgatcacgtaactaaacttcaccgactattccgattcatataacccgttataaccataaacgattcgaaccaaataacgacgatacacccgcgaaaaaaaactaaatcaaaaccgcgcatacgacaaaccgaaaa

SEQ ID NO: 16859 - DNA, 856 bp, Artificial Sequence
  chemically treated genomic DNA (Homo sapiens) CpG-island No: 16859
gtacgatttcggaatatttcggagagatttatttgtcgcgtcgttggtgcgttatggttggacgtttcgcggcgaattggcggtggtgtatgatcgtagtggtaaataggtgcgtagttttatttacgatgataaatatcggggtcggatggtggcgtatcgttatacgggtcggtcggaaattcgttatcgttacgatagcgacgggcgggtgatagaatagttaaattcggtaggtttaagttatacgtattagtatgagaaagatcgtattattattatcgatagtttggatcgtcgtgaagtgttgtatacgtagggcgaagtcgggttgaagcgggtggtgaaaaaggaatacgcggacggtagcgttacgtagagttagtttgacgtcgtgggtaggtttagggtatagacggatgtcgtaggtaggataatagagtatagttcggatgtggtgacgggttttattacgcgtataattacgtcggatggtagggtatcggcgttttattataattattataattagttaacgttagttatcgggtttgacgggttggaattgcgtcgggaatatgatgaattgggtcgtttgatttaggaaattgtttttgacggcgatattattcgttatcgttatgataatttatatagtgatttattttgcgtaacggaagatgttagcggtagacggaaaattatgacgtggagtcgtatacggttacgtagttgagttttatcgattgtttcggtttatgtaattcgttatgattatgagcgattcgggttagatgacggcggtgtattcgcgaggaaaggttgagttagaatcgcgtatacgatagatcgggaa

SEQ ID NO: 16860 - DNA, 856 bp, Artificial Sequence
  chemically treated genomic DNA (Homo sapiens) CpG-island No: 16860
ttcccgatctatcgtatacgcgattctaactcaacctttcctcgcgaatacaccgccgtcatctaacccgaatcgctcataatcataacgaattacataaaccgaaacaatcgataaaactcaactacgtaaccgtatacgactccacgtcataattttccgtctaccgctaacatcttccgttacgcaaaataaatcactatataaattatcataacgataacgaataatatcgccgtcaaaaacaatttcctaaatcaaacgacccaattcatcatattcccgacgcaattccaacccgtcaaacccgataactaacgttaactaattataataattataataaaacgccgataccctaccatccgacgtaattatacgcgtaataaaacccgtcaccacatccgaactatactctattatcctacctacgacatccgtctataccctaaacctacccacgacgtcaaactaactctacgtaacgctaccgtccgcgtattcctttttcaccacccgcttcaacccgacttcgccctacgtatacaacacttcacgacgatccaaactatcgataataataatacgatctttctcatactaatacgtataacttaaacctaccgaatttaactattctatcacccgcccgtcgctatcgtaacgataacgaatttccgaccgacccgtataacgatacgccaccatccgaccccgatatttatcatcgtaaataaaactacgcacctatttaccactacgatcatacaccaccgccaattcgccgcgaaacgtccaaccataacgcaccaacgacgcgacaaataaatctctccgaaatattccgaaatcgtac

SEQ ID NO: 16861 - DNA, 920 bp, Artificial Sequence
  chemically treated genomic DNA (Homo sapiens) CpG-island No: 16861
gtggaaaggtcgtgcgggttttgagtgtgcgtggaaaggtcgtgcgggttttgagtatgtgtggaacggtcgtgcgggttttgagcgtgcgtggaaaggtcgtgcgggttttgagcgtgcgtggaaaggtcgtgcgggttttgatagtgtgtggaaaggtcgcgtgggttttgattgtgcgtggaaaggtcgcgcgggttttgattgtgcgtggaaaggtcgcgcgggttttgagtgtgcgtggaaaggtcgtgcgggttttgattgtgcgtggaaaggtcgcgcgggttttgattgtgcgtggaaaggtcgtgcgggttttgatagtgcgtggaaaggtcgtgcgggttttgagtgtgcgtggaaaggtcgcgcgggttttgattgtgcgtggaaaggtcgcgcgggttttgattgtgcgtggaaaggtcgtgcgggttttgattgtgcgtggaaaggtcgtgcgggttttgagtgtgcgtggaaaggtcgtgcgggttttgagtgtgcgtggaaaggtcgtgcgggttttgagtgtgtgtggaaaggtcgcgcgggttttgagcgtgcgtggaaaggtcgtgcgggttttgagtgtgcgtggaaaggttatgcgggttttgagtgtgcgtggaaaggtcgtgcgggttttgatagtgtgtggaaaggtcgcgcgggttttgattgtgcgtggaaaggtcgtgcgggttttgattgtgtgtggaaaggtcgtgcgggttttgagtgtgtgtggaaaggtcgtgcgggttttgagtgtgcgtggaaaggtcgtgcgggttttgattgtgtgtggaacggtcgtgcgggttttgattgtgtgtggaaaggtcgtgtagattttgagtgtgtgtggaaatatcgtgcgggttttgattgtgtgtggaaaggtcgtgtagatt

SEQ ID NO: 16862 - DNA, 920 bp, Artificial Sequence
  chemically treated genomic DNA (Homo sapiens) CpG-island No: 16862
aatctacacgacctttccacacacaatcaaaacccgcacgatatttccacacacactcaaaatctacacgacctttccacacacaatcaaaacccgcacgaccgttccacacacaatcaaaacccgcacgacctttccacgcacactcaaaacccgcacgacctttccacacacactcaaaacccgcacgacctttccacacacaatcaaaacccgcacgacctttccacgcacaatcaaaacccgcgcgacctttccacacactatcaaaacccgcacgacctttccacgcacactcaaaacccgcataacctttccacgcacactcaaaacccgcacgacctttccacgcacgctcaaaacccgcgcgacctttccacacacactcaaaacccgcacgacctttccacgcacactcaaaacccgcacgacctttccacgcacactcaaaacccgcacgacctttccacgcacaatcaaaacccgcacgacctttccacgcacaatcaaaacccgcgcgacctttccacgcacaatcaaaacccgcgcgacctttccacgcacactcaaaacccgcacgacctttccacgcactatcaaaacccgcacgacctttccacgcacaatcaaaacccgcgcgacctttccacgcacaatcaaaacccgcacgacctttccacgcacactcaaaacccgcgcgacctttccacgcacaatcaaaacccgcgcgacctttccacgcacaatcaaaacccacgcgacctttccacacactatcaaaacccgcacgacctttccacgcacgctcaaaacccgcacgacctttccacgcacgctcaaaacccgcacgaccgttccacacatactcaaaacccgcacgacctttccacgcacactcaaaacccgcacgacctttccac

SEQ ID NO: 16863 - DNA, 920 bp, Artificial Sequence
  chemically treated genomic DNA (Homo sapiens) CpG-island No: 16863
gatttgtacggtttttttatatatagttaggattcgtacggtgtttttatatatatttaggatttgtacggtttttttatatatagttaggattcgtacggtcgttttatatatagttaggattcgtacggtttttttacgtatatttaggattcgtacggtttttttatatatatttaggattcgtacggtttttttatatatagttaggattcgtacggtttttttacgtatagttaggattcgcgcggtttttttatatattgttaggattcgtacggtttttttacgtatatttaggattcgtatggtttttttacgtatatttaggattcgtacggtttttttacgtacgtttaggattcgcgcggtttttttatatatatttaggattcgtacggtttttttacgtatatttaggattcgtacggtttttttacgtatatttaggattcgtacggtttttttacgtatagttaggattcgtacggtttttttacgtatagttaggattcgcgcggtttttttacgtatagttaggattcgcgcggtttttttacgtatatttaggattcgtacggtttttttacgtattgttaggattcgtacggtttttttacgtatagttaggattcgcgcggtttttttacgtatagttaggattcgtacggtttttttacgtatatttaggattcgcgcggtttttttacgtatagttaggattcgcgcggtttttttacgtatagttaggatttacgcggtttttttatatattgttaggattcgtacggtttttttacgtacgtttaggattcgtacggtttttttacgtacgtttaggattcgtacggtcgttttatatatgtttaggattcgtacggtttttttacgtatatttaggattcgtacggtttttttat

SEQ ID NO: 16864 - DNA, 920 bp, Artificial Sequence
  chemically treated genomic DNA (Homo sapiens) CpG-island No: 16864
ataaaaaaaccgtacgaatcctaaatatacgtaaaaaaaccgtacgaatcctaaacatatataaaacgaccgtacgaatcctaaacgtacgtaaaaaaaccgtacgaatcctaaacgtacgtaaaaaaaccgtacgaatcctaacaatatataaaaaaaccgcgtaaatcctaactatacgtaaaaaaaccgcgcgaatcctaactatacgtaaaaaaaccgcgcgaatcctaaatatacgtaaaaaaaccgtacgaatcctaactatacgtaaaaaaaccgcgcgaatcctaactatacgtaaaaaaaccgtacgaatcctaacaatacgtaaaaaaaccgtacgaatcctaaatatacgtaaaaaaaccgcgcgaatcctaactatacgtaaaaaaaccgcgcgaatcctaactatacgtaaaaaaaccgtacgaatcctaactatacgtaaaaaaaccgtacgaatcctaaatatacgtaaaaaaaccgtacgaatcctaaatatacgtaaaaaaaccgtacgaatcctaaatatatataaaaaaaccgcgcgaatcctaaacgtacgtaaaaaaaccgtacgaatcctaaatatacgtaaaaaaaccatacgaatcctaaatatacgtaaaaaaaccgtacgaatcctaacaatatataaaaaaaccgcgcgaatcctaactatacgtaaaaaaaccgtacgaatcctaactatatataaaaaaaccgtacgaatcctaaatatatataaaaaaaccgtacgaatcctaaatatacgtaaaaaaaccgtacgaatcctaactatatataaaacgaccgtacgaatcctaactatatataaaaaaaccgtacaaatcctaaatatatataaaaacaccgtacgaatcctaactatatataaaaaaaccgtacaaatc

SEQ ID NO: 16865 - DNA, 787 bp, Artificial Sequence
  chemically treated genomic DNA (Homo sapiens) CpG-island No: 16865
gtggaaaggacgtgcgcgttttgcgtgtggcgtggaaaggtcgtgcgggttttgagtgtgcgtggaaaggtcgtgcgggttttgattgtgtgtggaacggtcgtgtgggttttgattgtgcgtggaaaggttatgcgggttttgagtgtgtgtggaaaggtcgtgcgggttttgattatgtgtggaaaggtcgtgcgggttttgattgtgtgtggaaaggacgtgcgcgttttgcgtgtggcgtggaaaggttatgcgggttttgagtgtgcgtggaaaggtcgtgtaggttttgattgtgtttggaaaggtcgtgcgggttttgattgtggaaaggtcgtgcgcgttttgattgtgtgtggaaaggtcgtgcgggttttgagtgtgtgtggaaacgtcgtgcgggttttgattgtgtgtggaaaggtcgtgcggattttgattgtgtgtggaaaggtcgtgcgggttttgagtgtgtgtggaacggtcgtgcgggttttgattgtgtgtggaaaggtcgtgcgggttttgagtgtgtgtggaacggtcgtgcgggttttgattgtgtgtggaaaggtcgtgcgggttttgagtgtgtgtggataggttgtgcgggttttgattgtgtgtggaaaggtcgtgcgggttttgattgtgtttggaaaggtcgtgtgggttttgatcgtgtgtggaaaggacgtgcgggttttgagcgtgtgtgtggaaaggtcgtgcgggttttgagtgtgtgtggaaaggttgtgttttttttgtttttagcgatttt

SEQ ID NO: 16866 - DNA, 787 bp, Artificial Sequence
  chemically treated genomic DNA (Homo sapiens) CpG-island No: 16866
aaaatcgctaaaaacaaaaaaaacacaacctttccacacacactcaaaacccgcacgacctttccacacacacgctcaaaacccgcacgtcctttccacacacgatcaaaacccacacgacctttccaaacacaatcaaaacccgcacgacctttccacacacaatcaaaacccgcacaacctatccacacacactcaaaacccgcacgacctttccacacacaatcaaaacccgcacgaccgttccacacacactcaaaacccgcacgacctttccacacacaatcaaaacccgcacgaccgttccacacacactcaaaacccgcacgacctttccacacacaatcaaaatccgcacgacctttccacacacaatcaaaacccgcacgacgtttccacacacactcaaaacccgcacgacctttccacacacaatcaaaacgcgcacgacctttccacaatcaaaacccgcacgacctttccaaacacaatcaaaacctacacgacctttccacgcacactcaaaacccgcataacctttccacgccacacgcaaaacgcgcacgtcctttccacacacaatcaaaacccgcacgacctttccacacataatcaaaacccgcacgacctttccacacacactcaaaacccgcataacctttccacgcacaatcaaaacccacacgaccgttccacacacaatcaaaacccgcacgacctttccacgcacactcaaaacccgcacgacctttccacgccacacgcaaaacgcgcacgtcctttccac

SEQ ID NO: 16867 - DNA, 787 bp, Artificial Sequence
  chemically treated genomic DNA (Homo sapiens) CpG-island No: 16867
ggagtcgttggggataggaggagtatagtttttttatatatatttaggattcgtacggtttttttatatatacgtttaggattcgtacgttttttttatatacgattaggatttatacggtttttttaaatatagttaggattcgtacggtttttttatatatagttaggattcgtatagtttatttatatatatttaggattcgtacggtttttttatatatagttaggattcgtacggtcgttttatatatatttaggattcgtacggtttttttatatatagttaggattcgtacggtcgttttatatatatttaggattcgtacggtttttttatatatagttaggattcgtacggtttttttatatatagttaggattcgtacggcgtttttatatatatttaggattcgtacggtttttttatatatagttaggacgcgtacggtttttttatagttaggattcgtacggtttttttaaatatagttaggatttgtacggtttttttacgtatatttaggattcgtatggtttttttacgttatacgtaggacgcgtacgttttttttatatatagttaggattcgtacggtttttttatatatagttaggattcgtacggtttttttatatatatttaggattcgtatggtttttttacgtatagttaggatttatacggtcgttttatatatagttaggattcgtacggtttttttacgtatatttaggattcgtacggtttttttacgttatacgtaggacgcgtacgttttttttat

SEQ ID NO: 16868 - DNA, 787 bp, Artificial Sequence
  chemically treated genomic DNA (Homo sapiens) CpG-island No: 16868
ataaaaaaaacgtacgcgtcctacgtataacgtaaaaaaaccgtacgaatcctaaatatacgtaaaaaaaccgtacgaatcctaactatatataaaacgaccgtataaatcctaactatacgtaaaaaaaccatacgaatcctaaatatatataaaaaaaccgtacgaatcctaactatatataaaaaaaccgtacgaatcctaactatatataaaaaaaacgtacgcgtcctacgtataacgtaaaaaaaccatacgaatcctaaatatacgtaaaaaaaccgtacaaatcctaactatatttaaaaaaaccgtacgaatcctaactataaaaaaaccgtacgcgtcctaactatatataaaaaaaccgtacgaatcctaaatatatataaaaacgccgtacgaatcctaactatatataaaaaaaccgtacgaatcctaactatatataaaaaaaccgtacgaatcctaaatatatataaaacgaccgtacgaatcctaactatatataaaaaaaccgtacgaatcctaaatatatataaaacgaccgtacgaatcctaactatatataaaaaaaccgtacgaatcctaaatatatataaataaactatacgaatcctaactatatataaaaaaaccgtacgaatcctaactatatttaaaaaaaccgtataaatcctaatcgtatataaaaaaaacgtacgaatcctaaacgtatatataaaaaaaccgtacgaatcctaaatatatataaaaaaactatactcctcctatccccaacgactcc

SEQ ID NO: 16869 - DNA, 538 bp, Artificial Sequence
  chemically treated genomic DNA (Homo sapiens) CpG-island No: 16869
  unsure (103, 383, 410..)
gtatggcgatttaagggggaaagtgataggcgaaatgggtagaggggggtaagcggcggggttagtcgggagtttaatatggtgtatattaatttgggcgganaaattttggtattttggggttggtataggcgaggggtggggaacgttgcgttcgttaggaagggtacggcgtaatagtgtgttgggcgggtagatgttggtagggcgtattaagtgcgatttcggggaatatgggaattatataggttaagagatcggaaagatcgaaggattgtcgggcgtaatttgaagagattcgtttatttcgtaaaatcggcgtgttttcgtaaacgcgatattaggtttatttcgtatgtgagttcggtatgtttatcgttttntttttttatttgtatttggtaaaaaannagcgcgttgttggcgtgtgtgtgggtttgtgtagtggggtggggttcgtggtggtggcgcggtgggggttgggtggttgttgtcggtcggtgttcggttgtttggttgtttgttgcgtgttgcggtt

SEQ ID NO: 16870 - DNA, 538 bp, Artificial Sequence
  chemically treated genomic DNA (Homo sapiens) CpG-island No: 16870
  unsure (128..129, 156, 436)
aaccgcaacacgcaacaaacaaccaaacaaccgaacaccgaccgacaacaaccacccaacccccaccgcgccaccaccacgaaccccaccccactacacaaacccacacacacgccaacaacgcgctnnttttttaccaaatacaaataaaaaaanaaaacgataaacataccgaactcacatacgaaataaacctaatatcgcgtttacgaaaacacgccgattttacgaaataaacgaatctcttcaaattacgcccgacaatccttcgatctttccgatctcttaacctatataattcccatattccccgaaatcgcacttaatacgccctaccaacatctacccgcccaacacactattacgccgtacccttcctaacgaacgcaacgttccccacccctcgcctataccaaccccaaaataccaaaatttntccgcccaaattaatatacaccatattaaactcccgactaaccccgccgcttacccccctctacccatttcgcctatcactttcccccttaaatcgccatac

SEQ ID NO: 16871 - DNA, 538 bp, Artificial Sequence
  chemically treated genomic DNA (Homo sapiens) CpG-island No: 16871
  unsure (128..129, 156, 436)
gatcgtagtacgtagtaggtaattaagtaatcgaatatcggtcgataataattatttagtttttatcgcgttattattacggattttattttattgtatagatttatatatacgttagtaacgcgttnnttttttgttagatataagtagaggggngaggcggtgaatatatcgggtttatatacgagataggtttagtatcgcgtttgcgaggatacgtcggttttacgaggtgggcgggtttttttaaattgcgttcggtaatttttcggttttttcgattttttggtttgtatagtttttatatttttcgggatcgtatttgatgcgttttgttagtatttattcgtttagtatattattgcgtcgtattttttttaacgggcgtaacgttttttatttttcgtttgtattagttttaaaatgttaaggtttnttcgtttaggttaatgtatattatattaaattttcggttaatttcgtcgtttatttttttttatttatttcgtttgttatttttttttttaggtcgttatat

SEQ ID NO: 16872 - DNA, 538 bp, Artificial Sequence
  chemically treated genomic DNA (Homo sapiens) CpG-island No: 16872
  unsure (103, 383, 410..)
atataacgacctaaaaaaaaaaataacaaacgaaataaataaaaaaaaataaacgacgaaattaaccgaaaatttaatataatatacattaacctaaacgaanaaaccttaacattttaaaactaatacaaacgaaaaataaaaaacgttacgcccgttaaaaaaaatacgacgcaataatatactaaacgaataaatactaacaaaacgcatcaaatacgatcccgaaaaatataaaaactatacaaaccaaaaaatcgaaaaaaccgaaaaattaccgaacgcaatttaaaaaaacccgcccacctcgtaaaaccgacgtatcctcgcaaacgcgatactaaacctatctcgtatataaacccgatatattcaccgcctcncccctctacttatatctaacaaaaaannaacgcgttactaacgtatatataaatctatacaataaaataaaatccgtaataataacgcgataaaaactaaataattattatcgaccgatattcgattacttaattacctactacgtactacgatc

SEQ ID NO: 16873 - DNA, 617 bp, Artificial Sequence
  chemically treated genomic DNA (Homo sapiens) CpG-island No: 16873
ttttacggtagtttttagtttagagttagaattacgacgcgtatttagtttttttttaatagttttgaaggaacggaatagcgtttagtttttcggatcgaatataatgatgttgattatatcgttagcgttgagcgcgtatgttttaatgttatcggtcgggttatacgtttttttgtcgcgggttgattttgtcgttttatcggtttggataatgttgttattagcgttgcggtttatatcgattttaataggttcgaacgttttttcggttatggtgtatttatcgttgagtatcgtcgaaatagtttgttttttttcgatttgagtaatcgttagttttttattttttatgttttgaaggataatgcggcgacggcgatagatcgggttagagagattttgcggatttttattcggtaggcggcggagagttattagtgggttaatttcgtgtttcggttttatataattcggcgtgaatttagacgtgttgtcgttacgggagcggattattttgtcggagataatcggcgagacgtaaagcgttatattgattaggttaggaatttgcgataggtaaattttttttgtattgaagggataggtttcgcgga

SEQ ID NO: 16874 - DNA, 617 bp, Artificial Sequence
  chemically treated genomic DNA (Homo sapiens) CpG-island No: 16874
tccgcgaaacctatcccttcaatacaaaaaaaatttacctatcgcaaattcctaacctaatcaatataacgctttacgtctcgccgattatctccgacaaaataatccgctcccgtaacgacaacacgtctaaattcacgccgaattatataaaaccgaaacacgaaattaacccactaataactctccgccgcctaccgaataaaaatccgcaaaatctctctaacccgatctatcgccgtcgccgcattatccttcaaaacataaaaaataaaaaactaacgattactcaaatcgaaaaaaaacaaactatttcgacgatactcaacgataaatacaccataaccgaaaaaacgttcgaacctattaaaatcgatataaaccgcaacgctaataacaacattatccaaaccgataaaacgacaaaatcaacccgcgacaaaaaaacgtataacccgaccgataacattaaaacatacgcgctcaacgctaacgatataatcaacatcattatattcgatccgaaaaactaaacgctattccgttccttcaaaactattaaaaaaaaactaaatacgcgtcgtaattctaactctaaactaaaaactaccgtaaaa

SEQ ID NO: 16875 - DNA, 617 bp, Artificial Sequence
  chemically treated genomic DNA (Homo sapiens) CpG-island No: 16875
ttcgcgaaatttatttttttagtatagagaaggtttatttgtcgtaaatttttggtttggttaatatggcgttttacgtttcgtcgattgttttcggtaaagtgattcgttttcgtggcggtagtacgtttgaatttacgtcgggttatgtgaagtcgaaatacgaagttaatttattgatgatttttcgtcgtttgtcggatgaggattcgtagaatttttttgattcggtttatcgtcgtcgtcgtattattttttagaatatgaaggatgaagagttggcgattgtttaggtcgaagagaaataggttgtttcggcggtgtttagcggtaaatatattatgatcggggaagcgttcgagtttgttgaagtcgatatgggtcgtagcgttggtaataatattgtttaggtcggtggggcggtagggttaattcgcgataaagaaacgtatgattcgatcgatgatattgaagtatacgcgtttaacgttagcggtgtggttaatattattgtgttcgattcgaaaggttgggcgttgtttcgtttttttaaggttgttgagaagaagttggatacgcgtcgtggttttaattttgagttggaaattgtcgtgaaa

SEQ ID NO: 16876 - DNA, 617 bp, Artificial Sequence
  chemically treated genomic DNA (Homo sapiens) CpG-island No: 16876
tttcacgacaatttccaactcaaaattaaaaccacgacgcgtatccaacttcttctcaacaaccttaaaaaaacgaaacaacgcccaacctttcgaatcgaacacaataatattaaccacaccgctaacgttaaacgcgtatacttcaatatcatcgatcgaatcatacgtttctttatcgcgaattaaccctaccgccccaccgacctaaacaatattattaccaacgctacgacccatatcgacttcaacaaactcgaacgcttccccgatcataatatatttaccgctaaacaccgccgaaacaacctatttctcttcgacctaaacaatcgccaactcttcatccttcatattctaaaaaataatacgacgacgacgataaaccgaatcaaaaaaattctacgaatcctcatccgacaaacgacgaaaaatcatcaataaattaacttcgtatttcgacttcacataacccgacgtaaattcaaacgtactaccgccacgaaaacgaatcactttaccgaaaacaatcgacgaaacgtaaaacgccatattaaccaaaccaaaaatttacgacaaataaaccttctctatactaaaaaaataaatttcgcgaa

SEQ ID NO: 16877 - DNA, 1140 bp, Artificial Sequence
  chemically treated genomic DNA (Homo sapiens) CpG-island No: 16877
ttgtgatgcgggggttagcgggagaggtattcggaagttttcggcgtttgtatttcggtagcgcgaggaaatgtttaaaggtgggtttttaggcgtgggaagttcgatttttttcggggttttcggcgaagtggtcgaggtcgcgttttacgtagggaatttcgtcgggttatttgggtggttcgagttcgtagtagtttttttttcgttcgtttttcggttttttcgacgcgtatttatcggttttattaagtcgtacgtagaggggcggcggggcgttgatcgaggtttaggtttcgattgtcgtcggtcgagtcgcgtagtttgtttgtagatttcggttttttgttcgcgtagtttcggttttattaggttcggtttttcgttcgggtcgtggttttattaatcgtagatttcgttcgtcgtagtcgtatttgcgaggaggggttcgcgcgtcgttgtagtcgtcgtcgtagcgtcgtcgtttcggtttcgtttttatcgcggcgtttcgagattattcgttttcgggcggtttggttttttgtaggcgaggagcggaagtcgttatttggaggcggatttcggcgttatagagtcggggtagtcgcggtaacggcgaggcgcgaggtaggggcgttcggtagatttcgcgatttcgagttagcgggcgtttcgagcgggtagtttcgtcgggggaggcggaggcggttacggcggtcgcgttcgggcgtttttcgcgtagcgttttatgttcgtgtggtgttgtcgttgttttttggtcggttattttaggtgattttttcgtcggggatgggaggggagtaggcggggatgtcgcgttttcgagttttttggtttggttcgggtcgggatcggggtggagggcgagcgtttggatcgtagcgttttttcgtttcggtcgttttgtttggcgtgggggtggggtggggtgcggtgtggtggggtttttgtttcggggagttttgcgttgtttttttttttcgttttggatcgcgcgggttacgggattgcgggatcggttaggtcggattgagtcggttacggcgagttgagattttttagtagtgtaaagttttagtgaagggggttttatgaagtgtttgtttttttaaaaaa

SEQ ID NO: 16878 - DNA, 1140 bp, Artificial Sequence
  chemically treated genomic DNA (Homo sapiens) CpG-island No: 16878
ttttttaaaaaaacaaacacttcataaaacccccttcactaaaactttacactactaaaaaatctcaactcgccgtaaccgactcaatccgacctaaccgatcccgcaatcccgtaacccgcgcgatccaaaacgaaaaaaaaaaacaacgcaaaactccccgaaacaaaaaccccaccacaccgcaccccaccccacccccacgccaaacaaaacgaccgaaacgaaaaaacgctacgatccaaacgctcgccctccaccccgatcccgacccgaaccaaaccaaaaaactcgaaaacgcgacatccccgcctactcccctcccatccccgacgaaaaaatcacctaaaataaccgaccaaaaaacaacgacaacaccacacgaacataaaacgctacgcgaaaaacgcccgaacgcgaccgccgtaaccgcctccgcctcccccgacgaaactacccgctcgaaacgcccgctaactcgaaatcgcgaaatctaccgaacgcccctacctcgcgcctcgccgttaccgcgactaccccgactctataacgccgaaatccgcctccaaataacgacttccgctcctcgcctacaaaaaaccaaaccgcccgaaaacgaataatctcgaaacgccgcgataaaaacgaaaccgaaacgacgacgctacgacgacgactacaacgacgcgcgaacccctcctcgcaaatacgactacgacgaacgaaatctacgattaataaaaccacgacccgaacgaaaaaccgaacctaataaaaccgaaactacgcgaacaaaaaaccgaaatctacaaacaaactacgcgactcgaccgacgacaatcgaaacctaaacctcgatcaacgccccgccgcccctctacgtacgacttaataaaaccgataaatacgcgtcgaaaaaaccgaaaaacgaacgaaaaaaaaactactacgaactcgaaccacccaaataacccgacgaaattccctacgtaaaacgcgacctcgaccacttcgccgaaaaccccgaaaaaaatcgaacttcccacgcctaaaaacccacctttaaacatttcctcgcgctaccgaaatacaaacgccgaaaacttccgaatacctctcccgctaacccccgcatcacaa

SEQ ID NO: 16879 - DNA, 1140 bp, Artificial Sequence
  chemically treated genomic DNA (Homo sapiens) CpG-island No: 16879
ttttttagggaggtaggtattttatagaattttttttattaaaattttgtattattgggaagttttagttcgtcgtaatcgatttagttcggtttagtcgatttcgtagtttcgtgattcgcgcggtttagagcgagaaaagggaatagcgtagggtttttcggagtaaggattttattatatcgtattttattttatttttacgttaggtaggacggtcgaggcgggaggacgttgcggtttaggcgttcgttttttatttcggtttcggttcgggttaggttaaaaagttcgagagcgcggtattttcgtttgttttttttttattttcggcgaggaagttatttgaaatgatcggttagggagtagcggtagtattatacgggtatggagcgttgcgcgaggggcgttcgagcgcggtcgtcgtggtcgttttcgtttttttcggcgaggttgttcgttcggggcgttcgttggttcggggtcgcggggtttgtcgggcgtttttgtttcgcgtttcgtcgttgtcgcggttgtttcggttttgtggcgtcggagttcgtttttagatagcggttttcgtttttcgtttgtagggagttaggtcgttcggaggcgggtgatttcggggcgtcgcgataggggcggagtcggggcggcgacgttgcgacggcggttgtagcggcgcgcgggttttttttcgtaggtgcggttgcggcgggcgaagtttgcgattggtggagttacggttcgggcgaggggtcgggtttgatggagtcgaggttgcgcgggtaggggatcgaggtttgtaggtaaattgcgcggttcgatcggcggtaatcgagatttagatttcggttagcgtttcgtcgtttttttgcgtgcgatttggtgaggtcggtgggtgcgcgtcgagagggtcgagggacgagcggaagagaagttgttgcgaattcgggttatttagatggttcggcggagttttttgcgtaaggcgcggtttcggttatttcgtcgaggatttcgggaagggtcgagttttttacgtttgagaatttatttttgggtattttttcgcgttgtcggggtgtagacgtcgggagttttcgggtgtttttttcgttgattttcgtattatag

SEQ ID NO: 16880 - DNA, 1140 bp, Artificial Sequence
  chemically treated genomic DNA (Homo sapiens) CpG-island No: 16880
ctataatacgaaaatcaacgaaaaaaacacccgaaaactcccgacgtctacaccccgacaacgcgaaaaaatacccaaaaataaattctcaaacgtaaaaaactcgacccttcccgaaatcctcgacgaaataaccgaaaccgcgccttacgcaaaaaactccgccgaaccatctaaataacccgaattcgcaacaacttctcttccgctcgtccctcgaccctctcgacgcgcacccaccgacctcaccaaatcgcacgcaaaaaaacgacgaaacgctaaccgaaatctaaatctcgattaccgccgatcgaaccgcgcaatttacctacaaacctcgatcccctacccgcgcaacctcgactccatcaaacccgacccctcgcccgaaccgtaactccaccaatcgcaaacttcgcccgccgcaaccgcacctacgaaaaaaaacccgcgcgccgctacaaccgccgtcgcaacgtcgccgccccgactccgcccctatcgcgacgccccgaaatcacccgcctccgaacgacctaactccctacaaacgaaaaacgaaaaccgctatctaaaaacgaactccgacgccacaaaaccgaaacaaccgcgacaacgacgaaacgcgaaacaaaaacgcccgacaaaccccgcgaccccgaaccaacgaacgccccgaacgaacaacctcgccgaaaaaaacgaaaacgaccacgacgaccgcgctcgaacgcccctcgcgcaacgctccatacccgtataatactaccgctactccctaaccgatcatttcaaataacttcctcgccgaaaataaaaaaaaaacaaacgaaaataccgcgctctcgaactttttaacctaacccgaaccgaaaccgaaataaaaaacgaacgcctaaaccgcaacgtcctcccgcctcgaccgtcctacctaacgtaaaaataaaataaaatacgatataataaaatccttactccgaaaaaccctacgctattcccttttctcgctctaaaccgcgcgaatcacgaaactacgaaatcgactaaaccgaactaaatcgattacgacgaactaaaacttcccaataatacaaaattttaataaaaaaaattctataaaatacctacctccctaaaaaa

SEQ ID NO: 16881 - DNA, 601 bp, Artificial Sequence
  chemically treated genomic DNA (Homo sapiens) CpG-island No: 16881
tacgtcgtttgggttttagttttcgttttatttttcggcggtttaggtagcgtttttagtttcgagaattttgttttttttgtttcgttttttgcgtttaatcgtttgcgtcgtttttcggttcgagttttggagatttaatatgaagttatcggttagggttttttttattttggggtttcggttgttttgtggtttcgtttttcggagggtaaggcggtcgggggcgcggggagcgaggatagggcgtttcgacgcgtaaagagagaggatagggcgttacgggggttcggggagcgaggataaggtattttggggcgtaaagagagaggatagggcgtttcgggggttcggggagcgaggatagggtatttcgaggcgtagagagagagaggatagggcgtttcggggtttcggggagcgaggatagggtgtttcggggtttaaagagagaggatagggcgttttggagcgttaagagagtatagagtaattcggggagcgagagagaggataggacgtttcggggcgtaagagaaagggtaggaagttttggggtataaagagaggattcggcgtttttggggtttagggagttagg

SEQ ID NO: 16882 - DNA, 601 bp, Artificial Sequence
  chemically treated genomic DNA (Homo sapiens) CpG-island No: 16882
cctaactccctaaaccccaaaaacgccgaatcctctctttataccccaaaacttcctaccctttctcttacgccccgaaacgtcctatcctctctctcgctccccgaattactctatactctcttaacgctccaaaacgccctatcctctctctttaaaccccgaaacaccctatcctcgctccccgaaaccccgaaacgccctatcctctctctctctacgcctcgaaataccctatcctcgctccccgaacccccgaaacgccctatcctctctctttacgccccaaaataccttatcctcgctccccgaacccccgtaacgccctatcctctctctttacgcgtcgaaacgccctatcctcgctccccgcgcccccgaccgccttaccctccgaaaaacgaaaccacaaaacaaccgaaaccccaaaataaaaaaaaccctaaccgataacttcatattaaatctccaaaactcgaaccgaaaaacgacgcaaacgattaaacgcaaaaaacgaaacaaaaaaaacaaaattctcgaaactaaaaacgctacctaaaccgccgaaaaataaaacgaaaactaaaacccaaacgacgta

SEQ ID NO: 16883 - DNA, 601 bp, Artificial Sequence
  chemically treated genomic DNA (Homo sapiens) CpG-island No: 16883
tttagttttttgagttttagggacgtcgggttttttttttgtgttttaagattttttgtttttttttttgcgtttcgagacgttttgttttttttttcgtttttcgggttgttttgtgtttttttagcgttttagaacgttttgttttttttttttgagtttcgggatattttgttttcgtttttcgaggtttcgggacgttttgttttttttttttttgcgtttcgggatgttttgttttcgtttttcgaattttcgggacgttttgttttttttttttgcgttttaggatgttttgttttcgtttttcgagttttcgtgacgttttgttttttttttttgcgcgtcgagacgttttgttttcgtttttcgcgttttcggtcgttttatttttcgaggagcgaggttatagggtagtcgggattttagagtaaagaaaattttggtcggtagttttatgttgagtttttagaattcgggtcggaaggcggcgtaggcggttgggcgtagggggcgggataaaaagaataaagttttcggggttggaaacgttgtttaggtcgtcgggggatgggacggggattgggatttaggcggcgtg

SEQ ID NO: 16884 - DNA, 601 bp, Artificial Sequence
  chemically treated genomic DNA (Homo sapiens) CpG-island No: 16884
cacgccgcctaaatcccaatccccgtcccatcccccgacgacctaaacaacgtttccaaccccgaaaactttattctttttatcccgccccctacgcccaaccgcctacgccgccttccgacccgaattctaaaaactcaacataaaactaccgaccaaaattttctttactctaaaatcccgactaccctataacctcgctcctcgaaaaataaaacgaccgaaaacgcgaaaaacgaaaacaaaacgtctcgacgcgcaaaaaaaaaaaacaaaacgtcacgaaaactcgaaaaacgaaaacaaaacatcctaaaacgcaaaaaaaaaaaacaaaacgtcccgaaaattcgaaaaacgaaaacaaaacatcccgaaacgcaaaaaaaaaaaaaacaaaacgtcccgaaacctcgaaaaacgaaaacaaaatatcccgaaactcaaaaaaaaaaaacaaaacgttctaaaacgctaaaaaaacacaaaacaacccgaaaaacgaaaaaaaaaacaaaacgtctcgaaacgcaaaaaaaaaaacaaaaaatcttaaaacacaaaaaaaaaacccgacgtccctaaaactcaaaaaactaaa

SEQ ID NO: 16885 - DNA, 555 bp, Artificial Sequence
  chemically treated genomic DNA (Homo sapiens) CpG-island No: 16885
tgcgggttattaggcgttttatttttatttcgtatcgtatatgcgggtgatgcgtgatttgataaagtagtatcgtttttttatggagttgatgacgatgttgcggtgacgtgcgtttaaacgggttgtttttgatgcgatattcgcgtcgttagcggtagttagtatagtacgattaataattttattaaggttattaataattttaggttgttttgatcggtttgcggtaatatcgtagagagcgacgttagtacgtcggaattaatgttttgtagatcgtcgattagcgcgttagtcgtgttcgttatgaaggggaacggttttatcgcgtcgttggtcgttagcggaaatagtatttcggtatcgaaaaagaatagcgcggcgggaacgagtagcgtttagatatttattacgttaaattagtcggggatttatattagtaagttagttagtaggtagtagataatcgaatgttatattaacgtggagaagcgtttattgggacgttcggtaaattatgcgttaaaaaacgttgtcggaatcggtagaata

SEQ ID NO: 16886 - DNA, 555 bp, Artificial Sequence
  chemically treated genomic DNA (Homo sapiens) CpG-island No: 16886
tattctaccgattccgacaacgttttttaacgcataatttaccgaacgtcccaataaacgcttctccacgttaatataacattcgattatctactacctactaactaacttactaatataaatccccgactaatttaacgtaataaatatctaaacgctactcgttcccgccgcgctattctttttcgataccgaaatactatttccgctaacgaccaacgacgcgataaaaccgttccccttcataacgaacacgactaacgcgctaatcgacgatctacaaaacattaattccgacgtactaacgtcgctctctacgatattaccgcaaaccgatcaaaacaacctaaaattattaataaccttaataaaattattaatcgtactatactaactaccgctaacgacgcgaatatcgcatcaaaaacaacccgtttaaacgcacgtcaccgcaacatcgtcatcaactccataaaaaaacgatactactttatcaaatcacgcatcacccgcatatacgatacgaaataaaaataaaacgcctaataacccgca

SEQ ID NO: 16887 - DNA, 555 bp, Artificial Sequence
  chemically treated genomic DNA (Homo sapiens) CpG-island No: 16887
tattttgtcgatttcggtagcgttttttggcgtatggtttgtcggacgttttaataaacgtttttttacgttaatgtggtattcggttatttgttgtttgttggttggtttgttgatgtggattttcgattggtttggcgtgatgaatgtttggacgttgttcgttttcgtcgcgttgttttttttcggtgtcgggatgttgttttcgttggcgattagcggcgcgatggagtcgtttttttttatggcgggtacggttggcgcgttggtcggcggtttgtaaaatattggtttcggcgtgttggcgtcgttttttgcgatgttgtcgtaaatcggttagggtagtttggggttgttgatgattttaatgggattgttgatcgtgttgtgttggttgtcgttggcgacgcggatgtcgtattaggggtagttcgtttaagcgtacgttatcgtagtatcgttattagttttatgggagaacgatgttgttttattagattacgtattattcgtatatgcggtgcggagtaagaataaaacgtttgatagttcgta

SEQ ID NO: 16888 - DNA, 555 bp, Artificial Sequence
  chemically treated genomic DNA (Homo sapiens) CpG-island No: 16888
tacgaactatcaaacgttttattcttactccgcaccgcatatacgaataatacgtaatctaataaaacaacatcgttctcccataaaactaataacgatactacgataacgtacgcttaaacgaactacccctaatacgacatccgcgtcgccaacgacaaccaacacaacacgatcaacaatcccattaaaatcatcaacaaccccaaactaccctaaccgatttacgacaacatcgcaaaaaacgacgccaacacgccgaaaccaatattttacaaaccgccgaccaacgcgccaaccgtacccgccataaaaaaaaacgactccatcgcgccgctaatcgccaacgaaaacaacatcccgacaccgaaaaaaaacaacgcgacgaaaacgaacaacgtccaaacattcatcacgccaaaccaatcgaaaatccacatcaacaaaccaaccaacaaacaacaaataaccgaataccacattaacgtaaaaaaacgtttattaaaacgtccgacaaaccatacgccaaaaaacgctaccgaaatcgacaaaata

SEQ ID NO: 16889 - DNA, 553 bp, Artificial Sequence
  chemically treated genomic DNA (Homo sapiens) CpG-island No: 16889
cgcgtgcgcggtgtatcgatcggacgcgttttcggtatttagcgggttatattgaaggttatattagtataaagaattaataaaaagagataataggcgcgttagttttatatcgtatttagtagatcgtcgattagcggtgcgagtaacggattgacgagaatttttatgtttaataggttgttagtatggcgtaattgtgttcgtttatataaatttcgcggtaaagtacgcgttattacgtcgttaacgtcggtgtttattttttgtatcgcgttggcggtaattaatatcgttaaattggaggtcgtgatcgcgattagcgttgttagtataaaaatggatatttcgacgaggattatcggtcggcggtttacgcggtcggaaatcgggttataaaatagttgtgagatatcgtaagttagtagataagcgtttattacgttttgtatcgtttttttacggacgttgagatcgcgcgttatatcggtaatagttggaatataaatggtttgcgttatttgatcgacggttacgagtaatattaatatta

SEQ ID NO: 16890 - DNA, 553 bp, Artificial Sequence
  chemically treated genomic DNA (Homo sapiens) CpG-island No: 16890
taatattaatattactcgtaaccgtcgatcaaataacgcaaaccatttatattccaactattaccgatataacgcgcgatctcaacgtccgtaaaaaaacgatacaaaacgtaataaacgcttatctactaacttacgatatctcacaactattttataacccgatttccgaccgcgtaaaccgccgaccgataatcctcgtcgaaatatccatttttatactaacaacgctaatcgcgatcacgacctccaatttaacgatattaattaccgccaacgcgatacaaaaaataaacaccgacgttaacgacgtaataacgcgtactttaccgcgaaatttatataaacgaacacaattacgccatactaacaacctattaaacataaaaattctcgtcaatccgttactcgcaccgctaatcgacgatctactaaatacgatataaaactaacgcgcctattatctctttttattaattctttatactaatataaccttcaatataacccgctaaataccgaaaacgcgtccgatcgatacaccgcgcacgcg

SEQ ID NO: 16891 - DNA, 553 bp, Artificial Sequence
  chemically treated genomic DNA (Homo sapiens) CpG-island No: 16891
tgatgttggtattattcgtggtcgtcggttagatggcgtaaattatttatattttagttattgtcgatatggcgcgcgattttaacgttcgtgaaggggcggtgtagagcgtaatgggcgtttatttgttgatttacggtgttttatagttgttttatggttcgattttcgatcgcgtgggtcgtcgatcggtgattttcgtcggaatgtttatttttatgttggtaacgttggtcgcggttacgatttttagtttgacggtgttgattgtcgttagcgcgatgtaggggatgggtatcggcgttggcggcgtaatggcgcgtattttatcgcgagatttatatgaacggatatagttgcgttatgttaatagtttgttaaatatggggattttcgttagttcgttgttcgtatcgttaatcggcggtttgttggatacgatgtggaattggcgcgtttgttatttttttttgttggttttttgtgttggtgtgatttttagtatggttcgttggatgtcggaaacgcgttcggtcgatgtatcgcgtacgcg

SEQ ID NO: 16892 - DNA, 553 bp, Artificial Sequence
  chemically treated genomic DNA (Homo sapiens) CpG-island No: 16892
cgcgtacgcgatacatcgaccgaacgcgtttccgacatccaacgaaccatactaaaaatcacaccaacacaaaaaaccaacaaaaaaaaataacaaacgcgccaattccacatcgtatccaacaaaccgccgattaacgatacgaacaacgaactaacgaaaatccccatatttaacaaactattaacataacgcaactatatccgttcatataaatctcgcgataaaatacgcgccattacgccgccaacgccgatacccatcccctacatcgcgctaacgacaatcaacaccgtcaaactaaaaatcgtaaccgcgaccaacgttaccaacataaaaataaacattccgacgaaaatcaccgatcgacgacccacgcgatcgaaaatcgaaccataaaacaactataaaacaccgtaaatcaacaaataaacgcccattacgctctacaccgccccttcacgaacgttaaaatcgcgcgccatatcgacaataactaaaatataaataatttacgccatctaaccgacgaccacgaataataccaacatca

SEQ ID NO: 16893 - DNA, 610 bp, Artificial Sequence
  chemically treated genomic DNA (Homo sapiens) CpG-island No: 16893
atttttatatttttcgggtcgttagtttttcgaagtaggttttagtttcggcgtaagttgtttttttcgtagttttcgttcgtcgttagttcggtatcgtcggacggcgtttttttagtttcgcgtttcgttttttagtttttttcgcgcgttcgagtttacgtcgtttgtttcggttgttaagttttttagacggtcgggttttttcggtatagcgcgggaatttcggttttcggttttacgggacgagggttatagggttcggtcggcgagttagggtatttcggggtttttaggcggtttatcgtttttatttttatcggcgttttttaagtttttagatcgttttcgtcgcgtttttagcgtcgtcgttttcgggtcggtcgaggtttcgcggcgagtttcgtttagcgtttcggaggcgtagttttacggttcgagcgtgcgtagcgtttttcgcggtcgcgtataagcgtaggcgacggtataggaaaggaggtcgcggcgcgttcggttcggttttttttttagttcgttttcggggtcgttggcggtgttcgcgttttcgcgttcgtttttgatttttttcgggcggcggcggcggcggcgg

SEQ ID NO: 16894 - DNA, 610 bp, Artificial Sequence
  chemically treated genomic DNA (Homo sapiens) CpG-island No: 16894
ccgccgccgccgccgccgcccgaaaaaaatcaaaaacgaacgcgaaaacgcgaacaccgccaacgaccccgaaaacgaactaaaaaaaaaaccgaaccgaacgcgccgcgacctcctttcctataccgtcgcctacgcttatacgcgaccgcgaaaaacgctacgcacgctcgaaccgtaaaactacgcctccgaaacgctaaacgaaactcgccgcgaaacctcgaccgacccgaaaacgacgacgctaaaaacgcgacgaaaacgatctaaaaacttaaaaaacgccgataaaaataaaaacgataaaccgcctaaaaaccccgaaataccctaactcgccgaccgaaccctataaccctcgtcccgtaaaaccgaaaaccgaaattcccgcgctataccgaaaaaacccgaccgtctaaaaaacttaacaaccgaaacaaacgacgtaaactcgaacgcgcgaaaaaaactaaaaaacgaaacgcgaaactaaaaaaacgccgtccgacgataccgaactaacgacgaacgaaaactacgaaaaaaacaacttacgccgaaactaaaacctacttcgaaaaactaacgacccgaaaaatataaaaat

SEQ ID NO: 16895 - DNA, 610 bp, Artificial Sequence
  chemically treated genomic DNA (Homo sapiens) CpG-island No: 16895
tcgtcgtcgtcgtcgtcgttcggaggaaattaggggcgggcgcggaggcgcggatatcgttagcggtttcgggggcgggttggggagggggtcgggtcgggcgcgtcgcggtttttttttttgtgtcgtcgtttgcgtttgtgcgcggtcgcggggggcgttgcgtacgttcgggtcgtggggttgcgttttcggggcgttgggcgggattcgtcgcggagtttcggtcggttcgggggcggcggcgttgagggcgcggcggggacggtttgggggtttgggggacgtcggtgggggtgagggcggtgggtcgtttggagatttcggggtgttttggttcgtcggtcgggttttgtagttttcgtttcgtggggtcgggggtcggggttttcgcgttgtgtcgggagggttcggtcgtttggaagatttggtagtcggggtaagcgacgtgggttcggacgcgcgaggagggttggggagcggggcgcggggttggaagggcgtcgttcggcggtgtcgggttggcggcgggcggggattgcggaggaggtagtttgcgtcggggttggggtttgtttcgggggattagcggttcgggaggtatggaggt

SEQ ID NO: 16896 - DNA, 610 bp, Artificial Sequence
  chemically treated genomic DNA (Homo sapiens) CpG-island No: 16896
acctccatacctcccgaaccgctaatcccccgaaacaaaccccaaccccgacgcaaactacctcctccgcaatccccgcccgccgccaacccgacaccgccgaacgacgcccttccaaccccgcgccccgctccccaaccctcctcgcgcgtccgaacccacgtcgcttaccccgactaccaaatcttccaaacgaccgaaccctcccgacacaacgcgaaaaccccgacccccgaccccacgaaacgaaaactacaaaacccgaccgacgaaccaaaacaccccgaaatctccaaacgacccaccgccctcacccccaccgacgtcccccaaacccccaaaccgtccccgccgcgccctcaacgccgccgcccccgaaccgaccgaaactccgcgacgaatcccgcccaacgccccgaaaacgcaaccccacgacccgaacgtacgcaacgccccccgcgaccgcgcacaaacgcaaacgacgacacaaaaaaaaaaaccgcgacgcgcccgacccgaccccctccccaacccgcccccgaaaccgctaacgatatccgcgcctccgcgcccgcccctaatttcctccgaacgacgacgacgacgacga

SEQ ID NO: 16897 - DNA, 521 bp, Artificial Sequence
  chemically treated genomic DNA (Homo sapiens) CpG-island No: 16897
ggtagtgttattggtatgataattcgaatattagtgatgcgtttatttcggttttttcgtattaggagtagttttttttagttttttagcgtttacggtagatagggatcgaattgttttacgacgttttaaatttagttcgcgtattattttaaatggcgaatagttatatttttgggatttattttagttttaggatgtgatgagtcgatatcgaggtgttaaatatcgtcgtcgatatgaatttttgggcggtattagtttgttattttcggagtattttttattcgttgagcgatggtttttttatttagaattatcggattattatgatttgttttcgtatttgttcgcgtcgttacgttcgtagttagttggtttatgttattgtattaatttttggatgttcgataggattagtaattttcgtgttttttcgttattttttaagaggagaacgtttagttaaattatttattagatattgttcgaatcggattacgggttaacgttgaatatta

SEQ ID NO: 16898 - DNA, 521 bp, Artificial Sequence
  chemically treated genomic DNA (Homo sapiens) CpG-island No: 16898
taatattcaacgttaacccgtaatccgattcgaacaatatctaataaataatttaactaaacgttctcctcttaaaaaataacgaaaaaacacgaaaattactaatcctatcgaacatccaaaaattaatacaataacataaaccaactaactacgaacgtaacgacgcgaacaaatacgaaaacaaatcataataatccgataattctaaataaaaaaaccatcgctcaacgaataaaaaatactccgaaaataacaaactaataccgcccaaaaattcatatcgacgacgatatttaacacctcgatatcgactcatcacatcctaaaactaaaataaatcccaaaaatataactattcgccatttaaaataatacgcgaactaaatttaaaacgtcgtaaaacaattcgatccctatctaccgtaaacgctaaaaaactaaaaaaaactactcctaatacgaaaaaaccgaaataaacgcatcactaatattcgaattatcataccaataacactacc

SEQ ID NO: 16899 - DNA, 521 bp, Artificial Sequence
  chemically treated genomic DNA (Homo sapiens) CpG-island No: 16899
tgatgtttaacgttgattcgtaattcggttcggatagtgtttggtgggtagtttgattgggcgttttttttttaaagagtaacggaggagtacgaaggttgttaattttgtcggatatttaggagttagtgtaatggtataagttagttgattgcgagcgtgacggcgcgagtaggtgcgaaagtaggttatagtgattcggtggttttgaatggaagggttatcgtttaacggataaaaggtatttcggggataataggttgatatcgtttaagagtttatatcgacggcggtgtttggtatttcgatgtcggtttattatattttggggttgaagtaggttttaagggtatggttgttcgttatttaaagtggtacgcgagttgggtttagaacgtcgtgagatagttcggtttttatttgtcgtgggcgttggagaattgaggggggttgtttttagtacgagaggatcggagtggacgtattattggtgttcgggttgttatgttaatggtattgtt

SEQ ID NO: 16900 - DNA, 521 bp, Artificial Sequence
  chemically treated genomic DNA (Homo sapiens) CpG-island No: 16900
aacaataccattaacataacaacccgaacaccaataatacgtccactccgatcctctcgtactaaaaacaacccccctcaattctccaacgcccacgacaaataaaaaccgaactatctcacgacgttctaaacccaactcgcgtaccactttaaataacgaacaaccatacccttaaaacctacttcaaccccaaaatataataaaccgacatcgaaataccaaacaccgccgtcgatataaactcttaaacgatatcaacctattatccccgaaataccttttatccgttaaacgataacccttccattcaaaaccaccgaatcactataacctactttcgcacctactcgcgccgtcacgctcgcaatcaactaacttataccattacactaactcctaaatatccgacaaaattaacaaccttcgtactcctccgttactctttaaaaaaaaaacgcccaatcaaactacccaccaaacactatccgaaccgaattacgaatcaacgttaaacatca

SEQ ID NO: 16901 - DNA, 790 bp, Artificial Sequence
  chemically treated genomic DNA (Homo sapiens) CpG-island No: 16901
tcgtatcgtcgtgtttttcggtttaagttttaatattcgggcgaattggcgtgttttattagttcggtagtatgaattattattcgttagttattttattggagacgacggaagatcgttgtcgaagcggcgttttatcgtttttagtatgacgttttgtattgttttattgttgaagtcgtcggtagtgatcgtttagtgtagtgttttacgattatagtagtttagcgcgaacgtgatacgtagttttttttcgttattatagtagaattcgaattcgttagagtattatcgttgattgtttttttttacggttattttgtttgtatgtgttcgtttcgatggcggtatagtaggttttcgtttaagtaatagcgtattttggcgtatgattcggtaaatacgtttggtattgatcgtaggtatattattaagttttgtttgtttgcgaagtagcgtttatattcgacgataattatacgttggtagtttttcgataatatggtgtatacggagaagtatattcgtattattagtgtgacgattgcggcggttatttatttagttatcggttcgtttgagaatgacgtgtaattgcgtacgcgaaattcggagataacggatgattaagtttaatttcgattttcggtttataagggcgcgtggttatttattttttgcgtcgttttatttaacgggtttttggagggtttatttttatcgtttttgtcgagaggtttgaattttaatcgttaggggggaattttaattataatttgtttcgggaagg

SEQ ID NO: 16902 - DNA, 790 bp, Artificial Sequence
  chemically treated genomic DNA (Homo sapiens) CpG-island No: 16902
ccttcccgaaacaaattataattaaaattcccccctaacgattaaaattcaaacctctcgacaaaaacgataaaaataaaccctccaaaaacccgttaaataaaacgacgcaaaaaataaataaccacgcgcccttataaaccgaaaatcgaaattaaacttaatcatccgttatctccgaatttcgcgtacgcaattacacgtcattctcaaacgaaccgataactaaataaataaccgccgcaatcgtcacactaataatacgaatatacttctccgtatacaccatattatcgaaaaactaccaacgtataattatcgtcgaatataaacgctacttcgcaaacaaacaaaacttaataatatacctacgatcaataccaaacgtatttaccgaatcatacgccaaaatacgctattacttaaacgaaaacctactataccgccatcgaaacgaacacatacaaacaaaataaccgtaaaaaaaaacaatcaacgataatactctaacgaattcgaattctactataataacgaaaaaaaactacgtatcacgttcgcgctaaactactataatcgtaaaacactacactaaacgatcactaccgacgacttcaacaataaaacaatacaaaacgtcatactaaaaacgataaaacgccgcttcgacaacgatcttccgtcgtctccaataaaataactaacgaataataattcatactaccgaactaataaaacacgccaattcgcccgaatattaaaacttaaaccgaaaaacacgacgatacga

SEQ ID NO: 16903 - DNA, 790 bp, Artificial Sequence
  chemically treated genomic DNA (Homo sapiens) CpG-island No: 16903
ttttttcgggataggttgtggttagagtttttttttgacgattaagatttaggtttttcggtagaaacgatgggaatggattttttagagattcgttgaataggacggcgtaaaaagtggatagttacgcgtttttatgggtcggggatcgggattaagtttagttattcgttgttttcgggtttcgcgtgcgtagttgtacgttatttttagacgaatcgatgattggatggatggtcgtcgtagtcgttatattgatgatacggatgtgttttttcgtatatattatgttatcggagagttgttaacgtatggttatcgtcgggtatgggcgttgtttcgtagataggtagaatttgatggtatgtttgcgattaatgttaaacgtgtttatcggattatgcgttagaatgcgttgttgtttgagcgaaaatttgttgtatcgttatcgaaacgggtatatataggtagagtggtcgtgaaagaaagtaattagcgatggtgttttgacgggttcgagttttgttgtgataacggagagagattgcgtgttacgttcgcgttggattgttgtgatcgtgaggtattgtattgggcggttattatcggcggttttaatagtgaaatagtataggacgttatgttgggagcggtggaacgtcgtttcggtaacgatttttcgtcgtttttagtggagtggttgacggataatggtttatgttatcgggttaatgaaatacgttagttcgttcggatgttgggatttgaatcgaagaatacggcggtgcgg

SEQ ID NO: 16904 - DNA, 790 bp, Artificial Sequence
  chemically treated genomic DNA (Homo sapiens) CpG-island No: 16904
ccgcaccgccgtattcttcgattcaaatcccaacatccgaacgaactaacgtatttcattaacccgataacataaaccattatccgtcaaccactccactaaaaacgacgaaaaatcgttaccgaaacgacgttccaccgctcccaacataacgtcctatactatttcactattaaaaccgccgataataaccgcccaatacaatacctcacgatcacaacaatccaacgcgaacgtaacacgcaatctctctccgttatcacaacaaaactcgaacccgtcaaaacaccatcgctaattactttctttcacgaccactctacctatatatacccgtttcgataacgatacaacaaattttcgctcaaacaacaacgcattctaacgcataatccgataaacacgtttaacattaatcgcaaacataccatcaaattctacctatctacgaaacaacgcccatacccgacgataaccatacgttaacaactctccgataacataatatatacgaaaaaacacatccgtatcatcaatataacgactacgacgaccatccatccaatcatcgattcgtctaaaaataacgtacaactacgcacgcgaaacccgaaaacaacgaataactaaacttaatcccgatccccgacccataaaaacgcgtaactatccactttttacgccgtcctattcaacgaatctctaaaaaatccattcccatcgtttctaccgaaaaacctaaatcttaatcgtcaaaaaaaaactctaaccacaacctatcccgaaaaaa

SEQ ID NO: 16905 - DNA, 591 bp, Artificial Sequence
  chemically treated genomic DNA (Homo sapiens) CpG-island No: 16905
ttgttgtcgcgaggggattttgcggggaggcgaggggcgacggggcgagcggggcgcgggtcgatagaggtcgcgggcggcggggtttcgggcgcggcggcggcggttttttttcgcggttgcggcgtttttttcgagcgcggttgttttagtaggggattcgtaagtttaagtttatttttgttgtttttttatataataaagatttgtcgggaaaaaaaagaggagggacgcggcggagtcgggataaaacgtaatttgatatgtggttttattgtacgttgtgtcgaggtatagtcgtataaatgatcgggtcgttcgaggttgtttgtatacggttttcgagtcggatagggatttagttaaggaataattagagcgttatttttcgcgtggtaaaatcgtttttcgtgttgtttttttttggttttcgatttttgttcggtttaacgggatatttttcgttcgcgtttttttttttttttcgggtaaaatatggcggtttattttttataggttataatcgtttataaggttatttttatatagatcggattttagcgtttatcggagttttaacgttaggtttag

SEQ ID NO: 16906 - DNA, 591 bp, Artificial Sequence
  chemically treated genomic DNA (Homo sapiens) CpG-island No: 16906
ctaaacctaacgttaaaactccgataaacgctaaaatccgatctatataaaaataaccttataaacgattataacctataaaaaataaaccgccatattttacccgaaaaaaaaaaaaaaacgcgaacgaaaaatatcccgttaaaccgaacaaaaatcgaaaaccaaaaaaaaacaacacgaaaaacgattttaccacgcgaaaaataacgctctaattattccttaactaaatccctatccgactcgaaaaccgtatacaaacaacctcgaacgacccgatcatttatacgactatacctcgacacaacgtacaataaaaccacatatcaaattacgttttatcccgactccgccgcgtccctcctcttttttttcccgacaaatctttattatataaaaaaacaacaaaaataaacttaaacttacgaatcccctactaaaacaaccgcgctcgaaaaaaacgccgcaaccgcgaaaaaaaaccgccgccgccgcgcccgaaaccccgccgcccgcgacctctatcgacccgcgccccgctcgccccgtcgcccctcgcctccccgcaaaatcccctcgcgacaacaa

SEQ ID NO: 16907 - DNA, 591 bp, Artificial Sequence
  chemically treated genomic DNA (Homo sapiens) CpG-island No: 16907
ttaggtttagcgttggggtttcggtggacgttaaaattcggtttgtgtgagaataattttataggcggttgtggtttatggagggtaggtcgttatgttttgttcgaagggggaaggaaggcgcggacgagggatatttcgttaagtcgggtaggggtcgggaattaggaaggagtagtacggagggcggttttgttacgcgggggataacgttttggttattttttgattaggtttttgttcggttcggaggtcgtatgtaggtaatttcgagcgattcggttatttatacggttgtgtttcggtatagcgtataatggagttatatattaggttacgttttatttcgatttcgtcgcgtttttttttttttttttttcggtagatttttgttgtgtgggagggtagtagggatggatttgagtttgcggattttttgttagagtagtcgcgttcggagaaggcgtcgtagtcgcgaggaggagtcgtcgtcgtcgcgttcgaggtttcgtcgttcgcggtttttgtcggttcgcgtttcgttcgtttcgtcgtttttcgttttttcgtagagttttttcgcggtagtag

SEQ ID NO: 16908 - DNA, 591 bp, Artificial Sequence
  chemically treated genomic DNA (Homo sapiens) CpG-island No: 16908
ctactaccgcgaaaaaactctacgaaaaaacgaaaaacgacgaaacgaacgaaacgcgaaccgacaaaaaccgcgaacgacgaaacctcgaacgcgacgacgacgactcctcctcgcgactacgacgccttctccgaacgcgactactctaacaaaaaatccgcaaactcaaatccatccctactaccctcccacacaacaaaaatctaccgaaaaaaaaaaaaaaaaaaacgcgacgaaatcgaaataaaacgtaacctaatatataactccattatacgctataccgaaacacaaccgtataaataaccgaatcgctcgaaattacctacatacgacctccgaaccgaacaaaaacctaatcaaaaaataaccaaaacgttatcccccgcgtaacaaaaccgccctccgtactactccttcctaattcccgacccctacccgacttaacgaaatatccctcgtccgcgccttccttcccccttcgaacaaaacataacgacctaccctccataaaccacaaccgcctataaaattattctcacacaaaccgaattttaacgtccaccgaaaccccaacgctaaacctaa

SEQ ID NO: 16909 - DNA, 624 bp, Artificial Sequence
  chemically treated genomic DNA (Homo sapiens) CpG-island No: 16909
gaagttagtatagataagacggtgtatagtgttttatttttttttggatagtttatcgcgtagggtcggtcgagcgtttagtttttagatagcgcgtttgattatttagagtattagcgaagtattagggttatagtacgcgttttttttgacgtaggcgaagatagcggggttttaggcgtcgagggtatatcgtttcgtatcgaaaacgtttcgttcggcgcgatgaaggtagaacgtttattttttaattagattgtatgacgttttattttgtaaattattgcgcggtttcgtattttgtaagtattgcggcgttttgtagcggtaattcgaacggagttgttgatacggcgtaatagaggagtattgttataagttttttatggcgattaagtacgatcgacgaggttttagtggttttatcgtgtttcgttaatttgtgcgatgtcggtgcggtggtttcgaaagtacgtataggcgtatagtgaatacgtcgttagcgtcgggagggtatattacgcgtcgacgataaagttatattatcgttttataggtcgggagttttgtatggtttgttttattcgcgttacgagaatatttgtaatttgttttgtagtagtg

SEQ ID NO: 16910 - DNA, 624 bp, Artificial Sequence
  chemically treated genomic DNA (Homo sapiens) CpG-island No: 16910
cactactacaaaacaaattacaaatattctcgtaacgcgaataaaacaaaccatacaaaactcccgacctataaaacgataatataactttatcgtcgacgcgtaatataccctcccgacgctaacgacgtattcactatacgcctatacgtactttcgaaaccaccgcaccgacatcgcacaaattaacgaaacacgataaaaccactaaaacctcgtcgatcgtacttaatcgccataaaaaacttataacaatactcctctattacgccgtatcaacaactccgttcgaattaccgctacaaaacgccgcaatacttacaaaatacgaaaccgcgcaataatttacaaaataaaacgtcatacaatctaattaaaaaataaacgttctaccttcatcgcgccgaacgaaacgttttcgatacgaaacgatataccctcgacgcctaaaaccccgctatcttcgcctacgtcaaaaaaaacgcgtactataaccctaatacttcgctaatactctaaataatcaaacgcgctatctaaaaactaaacgctcgaccgaccctacgcgataaactatccaaaaaaaaataaaacactatacaccgtcttatctatactaacttc

SEQ ID NO: 16911 - DNA, 624 bp, Artificial Sequence
  chemically treated genomic DNA (Homo sapiens) CpG-island No: 16911
tattgttataaggtagattgtaggtattttcgtggcgcgagtggggtaagttatgtaggattttcggtttgtgagacgatggtatgattttgtcgtcgacgcgtagtgtattttttcgacgttgacgacgtgtttattgtacgtttgtgcgtgttttcgagattatcgtatcggtatcgtataagttgacggggtacggtggaattattagggtttcgtcggtcgtatttagtcgttataggaggtttatggtagtgtttttttgttgcgtcgtgttagtaatttcgttcgggttgtcgttgtaggacgtcgtagtgtttgtaggatgcgggatcgcgtagtgatttataggatggggcgttatatagtttgattggaaaatgggcgttttgtttttatcgcgtcgagcggagcgttttcggtgcggagcggtatattttcggcgtttgagatttcgttgttttcgtttgcgttaggaggagcgcgtattgtggttttggtgtttcgttggtgttttgagtggttagacgcgttgtttgaggattggacgttcggtcgattttgcgcgatgaattgtttagggaggaatggagtattgtgtatcgttttgtttgtgttggtttt

SEQ ID NO: 16912 - DNA, 624 bp, Artificial Sequence
  chemically treated genomic DNA (Homo sapiens) CpG-island No: 16912
aaaaccaacacaaacaaaacgatacacaatactccattcctccctaaacaattcatcgcgcaaaatcgaccgaacgtccaatcctcaaacaacgcgtctaaccactcaaaacaccaacgaaacaccaaaaccacaatacgcgctcctcctaacgcaaacgaaaacaacgaaatctcaaacgccgaaaatataccgctccgcaccgaaaacgctccgctcgacgcgataaaaacaaaacgcccattttccaatcaaactatataacgccccatcctataaatcactacgcgatcccgcatcctacaaacactacgacgtcctacaacgacaacccgaacgaaattactaacacgacgcaacaaaaaaacactaccataaacctcctataacgactaaatacgaccgacgaaaccctaataattccaccgtaccccgtcaacttatacgataccgatacgataatctcgaaaacacgcacaaacgtacaataaacacgtcgtcaacgtcgaaaaaatacactacgcgtcgacgacaaaatcataccatcgtctcacaaaccgaaaatcctacataacttaccccactcgcgccacgaaaatacctacaatctaccttataacaata

SEQ ID NO: 16913 - DNA, 603 bp, Artificial Sequence
  chemically treated genomic DNA (Homo sapiens) CpG-island No: 16913
tatttattattttacgaattttcgttagtcgttggaaattaattttcggcgttttgttgtataagtcgtgcgtcgtattaatcgttatcgttaggttgtcgacgttagttagttcgataaagcgtttagttttttgtggatcggttaggaatgtattttcggcgttaacgtttatgttatttttaatatcgtttaggcggtttagttttgtttttacgttgtaattttgtgagtggtagaagttaataatcgattttattagttttacgttttcggtaaacgggaagtggttgtcgtcgattatcgtattgcgtatatttgcgtggattttacggcgaatattatttagcgattcgtggtggtcgagatgtagcgttagtggtatgttgtaggttgtggaataggcgttatatagggcgtagattttttttagcgcgatgtgtttaaaggttttcggcgtttcggcgaggattatcggcgatcgtattttattgtatatttcgaggatcgtttggatcgtttcggcgttatgaatgttaaaagtaggtatcgcgtagttattggtttggggcgttttggtaatagatatttagtggagataat

SEQ ID NO: 16914 - DNA, 603 bp, Artificial Sequence
  chemically treated genomic DNA (Homo sapiens) CpG-island No: 16914
attatctccactaaatatctattaccaaaacgccccaaaccaataactacgcgatacctacttttaacattcataacgccgaaacgatccaaacgatcctcgaaatatacaataaaatacgatcgccgataatcctcgccgaaacgccgaaaacctttaaacacatcgcgctaaaaaaaatctacgccctatataacgcctattccacaacctacaacataccactaacgctacatctcgaccaccacgaatcgctaaataatattcgccgtaaaatccacgcaaatatacgcaatacgataatcgacgacaaccacttcccgtttaccgaaaacgtaaaactaataaaatcgattattaacttctaccactcacaaaattacaacgtaaaaacaaaactaaaccgcctaaacgatattaaaaataacataaacgttaacgccgaaaatacattcctaaccgatccacaaaaaactaaacgctttatcgaactaactaacgtcgacaacctaacgataacgattaatacgacgcacgacttatacaacaaaacgccgaaaattaatttccaacgactaacgaaaattcgtaaaataataaata

SEQ ID NO: 16915 - DNA, 603 bp, Artificial Sequence
  chemically treated genomic DNA (Homo sapiens) CpG-island No: 16915
attatttttattaaatatttgttattaggacgttttaggttaatggttacgcggtgtttgtttttaatatttataacgtcgagacgatttaagcgattttcgaagtgtgtagtgaaatgcgatcgtcggtgattttcgtcggaacgtcggggatttttaaatatatcgcgttggaagagatttacgttttgtgtagcgtttattttataatttataatatgttattggcgttgtatttcgattattacgaatcgttggatgatattcgtcgtgaagtttacgtaggtgtgcgtagtgcgatgatcgacggtagttatttttcgtttgtcgagaacgtgaagttggtgaaatcggttgttgatttttgttatttataagattgtagcgtggaagtagaattgggtcgtttgggcggtgttgaagatgatatgagcgttgacgtcgaaagtgtatttttgatcgatttataagaagttaaacgttttgtcgaattgattggcgtcgatagtttggcggtagcgattggtacggcgtacggtttatatagtaaaacgtcgaagattgatttttagcggttggcggaaattcgtgaagtggtggatg

SEQ ID NO: 16916 - DNA, 603 bp, Artificial Sequence
  chemically treated genomic DNA (Homo sapiens) CpG-island No: 16916
catccaccacttcacgaatttccgccaaccgctaaaaatcaatcttcgacgttttactatataaaccgtacgccgtaccaatcgctaccgccaaactatcgacgccaatcaattcgacaaaacgtttaacttcttataaatcgatcaaaaatacactttcgacgtcaacgctcatatcatcttcaacaccgcccaaacgacccaattctacttccacgctacaatcttataaataacaaaaatcaacaaccgatttcaccaacttcacgttctcgacaaacgaaaaataactaccgtcgatcatcgcactacgcacacctacgtaaacttcacgacgaatatcatccaacgattcgtaataatcgaaatacaacgccaataacatattataaattataaaataaacgctacacaaaacgtaaatctcttccaacgcgatatatttaaaaatccccgacgttccgacgaaaatcaccgacgatcgcatttcactacacacttcgaaaatcgcttaaatcgtctcgacgttataaatattaaaaacaaacaccgcgtaaccattaacctaaaacgtcctaataacaaatatttaataaaaataat

SEQ ID NO: 16917 - DNA, 674 bp, Artificial Sequence
  chemically treated genomic DNA (Homo sapiens) CpG-island No: 16917
tttaggttaacgttaaagcgacggcgggtaaatgtattttgattttcggttacgattttaaagatttttataatttgttggaatagatcgaaggtacgggcgttaatgtttatatttacggcgaaatgttgtttgcgtatggttattcggagttgcgtaaatttaagtatttggtcggtaattacggtagcggttggtagaattagtaagtggagttcgttcgtttttttggttttatcgtgatgatttcgaattgtattatcgatttaatcgtaggcgtttatgacgatcgtatttggattcgtagtattgttggttggtttggcgtgcgttatttggacggtgatgatttttttgcggttattatttaggcgtaatagatggtaggtttttcgtatagcgaaatttcgtattttattatcgtgggttttggtcgttagacgttgtttggcgttgttgatacgttgattgatttggtgagtcgtgaaaaattgcgttatatttttttgtttggtggttgtgacggcgtacgcggcgagcgttattattttatcgatttcgttattagcgtgtcggatgattgtttgattttgattttcgtttgtggtaaatatcgttttaataaatttgagtttggcgatatcgaaggtttgtcgcgtttggtagatgtaggt

SEQ ID NO: 16918 - DNA, 674 bp, Artificial Sequence
  chemically treated genomic DNA (Homo sapiens) CpG-island No: 16918
acctacatctaccaaacgcgacaaaccttcgatatcgccaaactcaaatttattaaaacgatatttaccacaaacgaaaatcaaaatcaaacaatcatccgacacgctaataacgaaatcgataaaataataacgctcgccgcgtacgccgtcacaaccaccaaacaaaaaaatataacgcaatttttcacgactcaccaaatcaatcaacgtatcaacaacgccaaacaacgtctaacgaccaaaacccacgataataaaatacgaaatttcgctatacgaaaaacctaccatctattacgcctaaataataaccgcaaaaaaatcatcaccgtccaaataacgcacgccaaaccaaccaacaatactacgaatccaaatacgatcgtcataaacgcctacgattaaatcgataatacaattcgaaatcatcacgataaaaccaaaaaaacgaacgaactccacttactaattctaccaaccgctaccgtaattaccgaccaaatacttaaatttacgcaactccgaataaccatacgcaaacaacatttcgccgtaaatataaacattaacgcccgtaccttcgatctattccaacaaattataaaaatctttaaaatcgtaaccgaaaatcaaaatacatttacccgccgtcgctttaacgttaacctaaa

SEQ ID NO: 16919 - DNA, 674 bp, Artificial Sequence
  chemically treated genomic DNA (Homo sapiens) CpG-island No: 16919
atttgtatttattagacgcggtagattttcgatatcgttaaatttaagtttgttaaagcgatatttattataggcgagggttaggattaggtagttattcggtacgttggtggcgaaatcggtgaagtagtggcgttcgtcgcgtgcgtcgttatagttattaagtaggaagatatgacgtagttttttacggtttattagattaattagcgtattagtagcgttaagtagcgtttggcgattaaaatttacggtgataaggtgcggaatttcgttgtacgggaagtttgttatttgttgcgtttgggtgataatcgtagagaaattattatcgtttagatgacgtacgttaggttagttaataatgttgcgggtttagatacgatcgttataagcgtttacggttgggtcgatgatgtagttcgaggttattacgatggggttagggaaacgagcgaattttatttgttgattttgttagtcgttgtcgtagttatcgattagatgtttgaatttacgtagtttcgggtagttatgcgtaggtagtatttcgtcgtgggtgtagatattaacgttcgtgttttcggtttgttttagtaggttgtagagatttttgagatcgtgatcggaaattagaatgtatttattcgtcgtcgttttgacgttgatttggg

SEQ ID NO: 16920 - DNA, 674 bp, Artificial Sequence
  chemically treated genomic DNA (Homo sapiens) CpG-island No: 16920
cccaaatcaacgtcaaaacgacgacgaataaatacattctaatttccgatcacgatctcaaaaatctctacaacctactaaaacaaaccgaaaacacgaacgttaatatctacacccacgacgaaatactacctacgcataactacccgaaactacgtaaattcaaacatctaatcgataactacgacaacgactaacaaaatcaacaaataaaattcgctcgtttccctaaccccatcgtaataacctcgaactacatcatcgacccaaccgtaaacgcttataacgatcgtatctaaacccgcaacattattaactaacctaacgtacgtcatctaaacgataataatttctctacgattatcacccaaacgcaacaaataacaaacttcccgtacaacgaaattccgcaccttatcaccgtaaattttaatcgccaaacgctacttaacgctactaatacgctaattaatctaataaaccgtaaaaaactacgtcatatcttcctacttaataactataacgacgcacgcgacgaacgccactacttcaccgatttcgccaccaacgtaccgaataactacctaatcctaaccctcgcctataataaatatcgctttaacaaacttaaatttaacgatatcgaaaatctaccgcgtctaataaatacaaat

SEQ ID NO: 16921 - DNA, 954 bp, Artificial Sequence
  chemically treated genomic DNA (Homo sapiens) CpG-island No: 16921
gcgtatagtttagcgttgtaatcgttgatgcgtttattcgatttataatttatacgattattttgagtattattgtgttgattggcgtagtttgttattacgttaagatgttagcgattttgcgcgttgttattttacgtgcgttaaatcgtcgtttagttgtaatatatagcggttagtttgagtatttagttgatcgttatcggtttttgaacgttcgtgtttttcgtatatgacgtatttatatattgtttgtcgatttttgagaatgtagtgaatttgtatattgcggtttatttagacggtcgtgtaaacgatggttaaatagcgagttggttgcggtaatgttagttgatatagttttcggttttcgggcgataaattgatgggtttttcggatttataatagggggaattattgatgggatcgggtagtattcgttgggcgttacgatcgttttatttattgggttagatattaggttttttggttattgttcgttttttttagtttagcgtgtagacgtaagttttagtttcggatagtttcggtggttagcgcgaagtatcgtgtagaattatcgttaattttaatgagtttaatatcgttgatcgtttgtgtatcgacgtcgttaatgttattaattcgaacgcgagtgtttttttgggtatcgttttttacgtttattttatcggtgggcgaattatcgtcgtttagcgtcgcgttgaacgttattaggttattgttttcggtatagttgtcgttaacggttagtatatttttcggtttttttttttcgttatttatttgaatcgtgtcgttattttttaggttgtcgtcgatagtggttttagcgatacgtagtgttttttttaggtataacgtttatattatttgtagtggtgatatttttcgatattatatcgttgttatggatattaatgtgttgattt

SEQ ID NO: 16922 - DNA, 954 bp, Artificial Sequence
  chemically treated genomic DNA (Homo sapiens) CpG-island No: 16922
aaatcaacacattaatatccataacaacgatataatatcgaaaaatatcaccactacaaataatataaacgttatacctaaaaaaaacactacgtatcgctaaaaccactatcgacgacaacctaaaaaataacgacacgattcaaataaataacgaaaaaaaaaaaccgaaaaatatactaaccgttaacgacaactataccgaaaacaataacctaataacgttcaacgcgacgctaaacgacgataattcgcccaccgataaaataaacgtaaaaaacgatacccaaaaaaacactcgcgttcgaattaataacattaacgacgtcgatacacaaacgatcaacgatattaaactcattaaaattaacgataattctacacgatacttcgcgctaaccaccgaaactatccgaaactaaaacttacgtctacacgctaaactaaaaaaaacgaacaataaccaaaaaacctaatatctaacccaataaataaaacgatcgtaacgcccaacgaatactacccgatcccatcaataattccccctattataaatccgaaaaacccatcaatttatcgcccgaaaaccgaaaactatatcaactaacattaccgcaaccaactcgctatttaaccatcgtttacacgaccgtctaaataaaccgcaatatacaaattcactacattctcaaaaatcgacaaacaatatataaatacgtcatatacgaaaaacacgaacgttcaaaaaccgataacgatcaactaaatactcaaactaaccgctatatattacaactaaacgacgatttaacgcacgtaaaataacaacgcgcaaaatcgctaacatcttaacgtaataacaaactacgccaatcaacacaataatactcaaaataatcgtataaattataaatcgaataaacgcatcaacgattacaacgctaaactatacgc

SEQ ID NO: 16923 - DNA, 954 bp, Artificial Sequence
  chemically treated genomic DNA (Homo sapiens) CpG-island No: 16923
aagttaatatattaatatttataatagcggtgtgatgtcgggaaatgttattattgtaggtgatatgaacgttatgtttggggggggtattgcgtgtcgttaaaattattatcggcggtaatttggagaatggcggtacggtttaaatgaatagcgaaggggggaaatcggggaatgtattgatcgttaacggtaattatatcggaaataatggtttgatgacgtttaacgcgacgttgggcggcgataattcgtttatcgataagatgaacgtgaaaggcgatatttaagggaatattcgcgttcgggttgataatattggcggcgtcggtgtataaacggttaacggtattgaatttattgaggttggcggtaattttgtacggtatttcgcgttgattatcggaattgttcgaagttggggtttacgtttatacgttgggttaaagggaacgggtaatgattagaaaatttggtatttgatttagtaaatgggacggtcgtaacgtttagcggatattattcgattttattaataattttttttgttgtggattcggaaggtttattagtttatcgttcggaggtcggaagttatattagttaatattgtcgtagttaattcgttgtttagttatcgtttatacgatcgtttgggtgagtcgtagtatatagatttattgtatttttaggggtcggtaagtagtatgtggatgcgttatgtacggagggtacgaacgtttaagggtcggtgacggttagttaaatatttaggttaatcgttatgtattgtagttaggcggcgatttggcgtacgtggagtagtaacgcgtaggatcgttggtattttggcgtgatggtaggttacgttaattagtatagtaatatttagagtaatcgtgtgggttataaatcggatgggcgtattagcggttatagcgttgggttgtacgt

SEQ ID NO: 16924 - DNA, 954 bp, Artificial Sequence
  chemically treated genomic DNA (Homo sapiens) CpG-island No: 16924
acgtacaacccaacgctataaccgctaatacgcccatccgatttataacccacacgattactctaaatattactatactaattaacgtaacctaccatcacgccaaaataccaacgatcctacgcgttactactccacgtacgccaaatcgccgcctaactacaatacataacgattaacctaaatatttaactaaccgtcaccgacccttaaacgttcgtaccctccgtacataacgcatccacatactacttaccgacccctaaaaatacaataaatctatatactacgactcacccaaacgatcgtataaacgataactaaacaacgaattaactacgacaatattaactaatataacttccgacctccgaacgataaactaataaaccttccgaatccacaacaaaaaaaattattaataaaatcgaataatatccgctaaacgttacgaccgtcccatttactaaatcaaataccaaattttctaatcattacccgttccctttaacccaacgtataaacgtaaaccccaacttcgaacaattccgataatcaacgcgaaataccgtacaaaattaccgccaacctcaataaattcaataccgttaaccgtttatacaccgacgccgccaatattatcaacccgaacgcgaatattcccttaaatatcgcctttcacgttcatcttatcgataaacgaattatcgccgcccaacgtcgcgttaaacgtcatcaaaccattatttccgatataattaccgttaacgatcaatacattccccgatttccccccttcgctattcatttaaaccgtaccgccattctccaaattaccgccgataataattttaacgacacgcaataccccccccaaacataacgttcatatcacctacaataataacatttcccgacatcacaccgctattataaatattaatatattaactt

SEQ ID NO: 16925 - DNA, 937 bp, Artificial Sequence
  chemically treated genomic DNA (Homo sapiens) CpG-island No: 16925
  unsure (828)
ttttcgtttttgttttttcggtatacgtagattaatcgttagattcgttaatttgtagtcgataaatgttataatatcggattagacgatcgtaatggcgatgttttttagttgtattagtaattgatggtttatcgttatatttttagcgaagtttacgtcgtttagcgagttggcggtaaaaatttcggttatgatatagtcgataatgttataaacgtcgtgtatatcgaagatatcgtagggattatttattcgtagtaagcgtttgagtatggtaacgttttataagttcgttagattagttattacgtcgataattaacgcgtcgttaattttaatgtagtcgtaggttggcgttacgtcgattagatcggtaatcgcgttagaatacgtttttagtagtgaaggtttattacgtagcgtttatttatcgaagatttagttaagaattgtcgtcgtcgttgcgattatagtatttataaatgttagtgtcgcgattttattcgtcgtgttcgttgattcggcgttgaagtttaaattaatcgatatagagaatggtagtttcggtgaagattatcggtaggttgtgcggtttaaacgtttcgtttatcgaagtttacgcgtttttttattagatacgcgtttattagatcggcgattgcggcgttaatgttgtattacggtgttattcgcgaaatttagcgtatcgtgagaagttagtaaagttatcgttttatattatatgcgtaatcggaattgtaacgaagagcgtttacgtttatattagtacgaaaattaatatagttgagaagcggattcgttttnggtagcgttttaatttataagtcgacgtatgcgggggaacgattttgaaacgttacgtggatatttgattaatgttgttatatcgtcgttagttcgatgtttttagtat

SEQ ID NO: 16926 - DNA, 937 bp, Artificial Sequence
  chemically treated genomic DNA (Homo sapiens) CpG-island No: 16926
  unsure (110)
atactaaaaacatcgaactaacgacgatataacaacattaatcaaatatccacgtaacgtttcaaaatcgttcccccgcatacgtcgacttataaattaaaacgctaccnaaaacgaatccgcttctcaactatattaattttcgtactaatataaacgtaaacgctcttcgttacaattccgattacgcatataatataaaacgataactttactaacttctcacgatacgctaaatttcgcgaataacaccgtaatacaacattaacgccgcaatcgccgatctaataaacgcgtatctaataaaaaaacgcgtaaacttcgataaacgaaacgtttaaaccgcacaacctaccgataatcttcaccgaaactaccattctctatatcgattaatttaaacttcaacgccgaatcaacgaacacgacgaataaaatcgcgacactaacatttataaatactataatcgcaacgacgacgacaattcttaactaaatcttcgataaataaacgctacgtaataaaccttcactactaaaaacgtattctaacgcgattaccgatctaatcgacgtaacgccaacctacgactacattaaaattaacgacgcgttaattatcgacgtaataactaatctaacgaacttataaaacgttaccatactcaaacgcttactacgaataaataatccctacgatatcttcgatatacacgacgtttataacattatcgactatatcataaccgaaatttttaccgccaactcgctaaacgacgtaaacttcgctaaaaatataacgataaaccatcaattactaatacaactaaaaaacatcgccattacgatcgtctaatccgatattataacatttatcgactacaaattaacgaatctaacgattaatctacgtataccgaaaaaacaaaaacgaaaa

SEQ ID NO: 16927 - DNA, 937 bp, Artificial Sequence
  chemically treated genomic DNA (Homo sapiens) CpG-island No: 16927
  unsure (110)
atgttgaagatatcgaattgacgacggtatggtagtattaattagatatttacgtggcgttttaggatcgttttttcgtatacgtcggtttgtaagttggggcgttgttnggaacgaattcgttttttagttgtgttgattttcgtgttggtataggcgtgaacgtttttcgttataatttcgattgcgtatatggtgtgggacggtggttttgttggttttttacggtgcgttggatttcgcgggtggtatcgtggtgtaatattaacgtcgtaatcgtcggtttggtgggcgcgtatttgataggaaaacgcgtgggtttcggtaaacgaggcgtttaaatcgtataatttgtcgatggtttttatcgggattgttattttttatatcggttggtttaggttttaacgtcgggttagcgggtacggcgaatgaaatcgcggtattggtatttgtgaatattgtggtcgtaacggcggcggtaatttttggttggattttcggtgaatgggcgttgcgtggtaagtttttattgttgggggcgtgttttggcgcgattgtcggtttggtcggcgtgacgttagtttgcggttatattggggttggcggcgcgttgattatcggcgtggtagttggtttggcgggtttgtggggcgttattatgtttaaacgtttgttgcgggtggatgatttttgcgatgttttcggtgtgtacggcgtttgtggtattgtcggttgtattatgatcgggatttttgtcgttagttcgttgggcggcgtgggtttcgttgaaggtgtgacgatgggttattagttgttggtatagttggaaagtatcgttattacgatcgtttggttcggtgttgtggtatttatcggttataaattggcggatttgacggttggtttgcgtgtatcggaagagtaggagcgagaa

SEQ ID NO: 16928 - DNA, 937 bp, Artificial Sequence
  chemically treated genomic DNA (Homo sapiens) CpG-island No: 16928
  unsure (828)
ttctcgctcctactcttccgatacacgcaaaccaaccgtcaaatccgccaatttataaccgataaataccacaacaccgaaccaaacgatcgtaataacgatactttccaactataccaacaactaataacccatcgtcacaccttcaacgaaacccacgccgcccaacgaactaacgacaaaaatcccgatcataatacaaccgacaataccacaaacgccgtacacaccgaaaacatcgcaaaaatcatccacccgcaacaaacgtttaaacataataacgccccacaaacccgccaaaccaactaccacgccgataatcaacgcgccgccaaccccaatataaccgcaaactaacgtcacgccgaccaaaccgacaatcgcgccaaaacacgcccccaacaataaaaacttaccacgcaacgcccattcaccgaaaatccaaccaaaaattaccgccgccgttacgaccacaatattcacaaataccaataccgcgatttcattcgccgtacccgctaacccgacgttaaaacctaaaccaaccgatataaaaaataacaatcccgataaaaaccatcgacaaattatacgatttaaacgcctcgtttaccgaaacccacgcgttttcctatcaaatacgcgcccaccaaaccgacgattacgacgttaatattacaccacgataccacccgcgaaatccaacgcaccgtaaaaaaccaacaaaaccaccgtcccacaccatatacgcaatcgaaattataacgaaaaacgttcacgcctataccaacacgaaaatcaacacaactaaaaaacgaattcgttccnaacaacgccccaacttacaaaccgacgtatacgaaaaaacgatcctaaaacgccacgtaaatatctaattaatactaccataccgtcgtcaattcgatatcttcaacat

SEQ ID NO: 16929 - DNA, 589 bp, Artificial Sequence
  chemically treated genomic DNA (Homo sapiens) CpG-island No: 16929
tgcgtttcggttaagttcgcgtcgatttttatcgagcgtatatcgttggcgttaatggcgttaatgttcgtttgcgtatttttaatgtcgatatatgtttgcggcggtacgtttagttttgtataggcggcgagaaagattttcgggttcggtttcgagtttttaagttgggaagtattcgcgtagaaggtgaaaaattcgcgtagttttagcgtcgttaaaatcgtcggcgtatttagggagatagaagttagtttaatcgagatttgttgtgtacggagatttgttagtaaagagcgaatgtcgggtagaatagcgttgatcgttaattcgcgtagtgagtggatatagagtagatttttgcgatacgttagttgcgtttttttttgcgagttaaagtcgttttttttgttttcgtgttgtagaatgcgtcgtagagatttatcgcggttgattttttttagggattcgttaaattgcgtattaatgttgatgttaattttagcggtaatttgttgttacgtttggaaatgtagatgcgcggtatcggtgattatattatttagatcgaaaattattttttgtagtt

SEQ ID NO: 16930 - DNA, 589 bp, Artificial Sequence
  chemically treated genomic DNA (Homo sapiens) CpG-island No: 16930
aactacaaaaaataattttcgatctaaataatataatcaccgataccgcgcatctacatttccaaacgtaacaacaaattaccgctaaaattaacatcaacattaatacgcaatttaacgaatccctaaaaaaaatcaaccgcgataaatctctacgacgcattctacaacacgaaaacaaaaaaaacgactttaactcgcaaaaaaaaacgcaactaacgtatcgcaaaaatctactctatatccactcactacgcgaattaacgatcaacgctattctacccgacattcgctctttactaacaaatctccgtacacaacaaatctcgattaaactaacttctatctccctaaatacgccgacgattttaacgacgctaaaactacgcgaatttttcaccttctacgcgaatacttcccaacttaaaaactcgaaaccgaacccgaaaatctttctcgccgcctatacaaaactaaacgtaccgccgcaaacatatatcgacattaaaaatacgcaaacgaacattaacgccattaacgccaacgatatacgctcgataaaaatcgacgcgaacttaaccgaaacgca

SEQ ID NO: 16931 - DNA, 589 bp, Artificial Sequence
  chemically treated genomic DNA (Homo sapiens) CpG-island No: 16931
aattgtaaggggtaattttcgatttggatggtgtaattatcgatatcgcgtatttgtatttttaggcgtggtagtagattgtcgttgaaattggtattagtattgatgcgtagtttaacgaatttttaaaagggattagtcgcgatgagtttttgcggcgtattttgtaatacgggggtaaagagggcgattttaattcgtaggagagggcgtaattggcgtatcgtaaaaatttgttttatgtttatttattacgcgagttgacggttaacgttgttttattcggtattcgttttttgttggtagattttcgtgtatagtagatttcggttgggttggtttttgtttttttgaatgcgtcgacgattttagcggcgttggagttgcgcgagttttttattttttgcgcggatgttttttaatttaaaaattcgaaatcggattcggaaatttttttcgtcgtttgtgtagggttgggcgtgtcgtcgtaggtatgtatcggtattgaagatgcgtaggcgggtattgacgttattaacgttagcggtatgcgttcggtggggatcggcgcgggtttaatcggggcgta

SEQ ID NO: 16932 - DNA, 589 bp, Artificial Sequence
  chemically treated genomic DNA (Homo sapiens) CpG-island No: 16932
tacgccccgattaaacccgcgccgatccccaccgaacgcataccgctaacgttaataacgtcaatacccgcctacgcatcttcaataccgatacatacctacgacgacacgcccaaccctacacaaacgacgaaaaaaatttccgaatccgatttcgaatttttaaattaaaaaacatccgcgcaaaaaataaaaaactcgcgcaactccaacgccgctaaaatcgtcgacgcattcaaaaaaacaaaaaccaacccaaccgaaatctactatacacgaaaatctaccaacaaaaaacgaataccgaataaaacaacgttaaccgtcaactcgcgtaataaataaacataaaacaaatttttacgatacgccaattacgccctctcctacgaattaaaatcgccctctttacccccgtattacaaaatacgccgcaaaaactcatcgcgactaatcccttttaaaaattcgttaaactacgcatcaatactaataccaatttcaacgacaatctactaccacgcctaaaaatacaaatacgcgatatcgataattacaccatccaaatcgaaaattaccccttacaatt

SEQ ID NO: 16933 - DNA, 529 bp, Artificial Sequence
  chemically treated genomic DNA (Homo sapiens) CpG-island No: 16933
  unsure (489, 492)
tgatttgtaattcgtagttttgttagaatagagggaaagataattgttgttattgtttaggtaacgtcggattgagatgtaatttatcgttacgtacgtttatttcggtaaaattttgaatcgtttttagttagatagcgttagttgcggtagtatggatattattattataattatgcggattagtattaagatcgattttagtttttcgcgttagaatgatattttgggttagcggtttagcgtgcggtattatgtcgggattgtttatttaatgcgatcgcgaatatggcggttatattttgcgatgggagaaatatgcgtgtaaacgtcggggttgtatggattatatttgcggttgggattgtatggaataggcggtatattatatggtgttttcgtaatgttgtaaagcgttataaaaatgggaagcgcgatgataatgtaaagagaattttcggtttttcgtttttttttttcgttttgttnganggagagacgaagcgaaagggaggagaatagagaagag

SEQ ID NO: 16934 - DNA, 529 bp, Artificial Sequence
  chemically treated genomic DNA (Homo sapiens) CpG-island No: 16934
  unsure (38, 41)
ctcttctctattctcctccctttcgcttcgtctctccntcnaacaaaacgaaaaaaaaaaacgaaaaaccgaaaattctctttacattatcatcgcgcttcccatttttataacgctttacaacattacgaaaacaccatataatataccgcctattccatacaatcccaaccgcaaatataatccatacaaccccgacgtttacacgcatatttctcccatcgcaaaatataaccgccatattcgcgatcgcattaaataaacaatcccgacataataccgcacgctaaaccgctaacccaaaatatcattctaacgcgaaaaactaaaatcgatcttaatactaatccgcataattataataataatatccatactaccgcaactaacgctatctaactaaaaacgattcaaaattttaccgaaataaacgtacgtaacgataaattacatctcaatccgacgttacctaaacaataacaacaattatctttccctctattctaacaaaactacgaattacaaatca

SEQ ID NO: 16935 - DNA, 529 bp, Artificial Sequence
  chemically treated genomic DNA (Homo sapiens) CpG-island No: 16935
  unsure (38, 41)
tttttttttgtttttttttttttcgtttcgtttttttnttnagtagggcgggggggagaggcgggaggtcgggggttttttttgtattgttatcgcgttttttatttttgtagcgttttgtaatattgcggggatattatgtgatatatcgtttgttttatgtagttttagtcgtaagtgtagtttatataatttcggcgtttatacgtatgttttttttatcgtaaagtatgatcgttatattcgcgatcgtattaagtaagtaatttcggtatggtgtcgtacgttgggtcgttgatttaaagtattattttggcgcgagggattgaaatcgattttggtgttgattcgtatagttgtgatgatggtatttatgttgtcgtaattggcgttatttggttgggggcgatttagggttttgtcggggtgagcgtgcgtgacggtgaattgtattttaattcggcgttatttgagtagtggtaatagttgtttttttttttgttttggtagggttgcgaattataggtta

SEQ ID NO: 16936 - DNA, 529 bp, Artificial Sequence
  chemically treated genomic DNA (Homo sapiens) CpG-island No: 16936
  unsure (489, 492)
taacctataattcgcaaccctaccaaaacaaaaaaaaaaacaactattaccactactcaaataacgccgaattaaaatacaattcaccgtcacgcacgctcaccccgacaaaaccctaaatcgcccccaaccaaataacgccaattacgacaacataaataccatcatcacaactatacgaatcaacaccaaaatcgatttcaatccctcgcgccaaaataatactttaaatcaacgacccaacgtacgacaccataccgaaattacttacttaatacgatcgcgaatataacgatcatactttacgataaaaaaaacatacgtataaacgccgaaattatataaactacacttacgactaaaactacataaaacaaacgatatatcacataatatccccgcaatattacaaaacgctacaaaaataaaaaacgcgataacaatacaaaaaaaacccccgacctcccgcctctcccccccgccctactnaanaaaaaaacgaaacgaaaaaaaaaaaaacaaaaaaaaa

SEQ ID NO: 16937 - DNA, 1127 bp, Artificial Sequence
  chemically treated genomic DNA (Homo sapiens) CpG-island No: 16937
  unsure (100)
tttttcgtttttgttttttttttttgttttttttttttttttcgtgttcgtttttttttttttttttttttttttttcgttttacgttcgcgtattagangatgattgcggcgcgtgcgagcgatatattcgttttcgggaatttggttattttttattttttgttggcggttttttttttttttgtgggtgaaatattttcgcggtttggagattttcgcgttattttttgggtgtatttttttttcggggggttttattttaagggtcgggcgttttaaattaatcgggggagtatagacgtttcggcggaattatttttcgacgcgggattaaattgttttacggggtttttttgcgcggattgttgaaattcgacgtttttaatttgtttgggcggttaaatcgtgtggaatggaaggattaaataatttcggtttgatagaaattttgtaggtttattgcgtcggtgagtttttcgtttttatttattatcggtgcggtagtgattttgcgttttattaggatttttttggcgtcgatggcgcgattttgcgattgtaacgtggtgtcgtcgatcgttatcgttttattgattggcgtggtgagtgcgtcgtcgttaattagttagcgacgtaaatcgtcgtcggtaaagacgttttgtatttgttgttgagcgttatatatcgttattagttttagatcggtgcggttgagttttagtatcgtatttattacgttggcggttaacgttatttgtgggatggtatcgttacggcgtattagatgatgtattttatttagtaagcgagcgtttagtgtttcggttgggtgggagcgggtaaaattttttttattaaattcgcgcgtttgtatgatcgttatcgttagcgcgttatttattattagggtattgacggtgttggaggtcggcgtaaggtgtatcgggtaggtttcgcgttttacggagatatttagtatcgtttttgtcgttaggtttagcggtgacgtcggtttgtcggttatcgttagtagcgcgatagattattttttagacgcggattatttagatttagtattttcgagttaacggagtaagagataatagtattatatcgaggtttcga

SEQ ID NO: 16938 - DNA, 1127 bp, Artificial Sequence
  chemically treated genomic DNA (Homo sapiens) CpG-island No: 16938
  unsure (1028)
tcgaaacctcgatataatactattatctcttactccgttaactcgaaaatactaaatctaaataatccgcgtctaaaaaataatctatcgcgctactaacgataaccgacaaaccgacgtcaccgctaaacctaacgacaaaaacgatactaaatatctccgtaaaacgcgaaacctacccgatacaccttacgccgacctccaacaccgtcaataccctaataataaataacgcgctaacgataacgatcatacaaacgcgcgaatttaataaaaaaaattttacccgctcccacccaaccgaaacactaaacgctcgcttactaaataaaatacatcatctaatacgccgtaacgataccatcccacaaataacgttaaccgccaacgtaataaatacgatactaaaactcaaccgcaccgatctaaaactaataacgatatataacgctcaacaacaaatacaaaacgtctttaccgacgacgatttacgtcgctaactaattaacgacgacgcactcaccacgccaatcaataaaacgataacgatcgacgacaccacgttacaatcgcaaaatcgcgccatcgacgccaaaaaaatcctaataaaacgcaaaatcactaccgcaccgataataaataaaaacgaaaaactcaccgacgcaataaacctacaaaatttctatcaaaccgaaattatttaatccttccattccacacgatttaaccgcccaaacaaattaaaaacgtcgaatttcaacaatccgcgcaaaaaaaccccgtaaaacaatttaatcccgcgtcgaaaaataattccgccgaaacgtctatactcccccgattaatttaaaacgcccgacccttaaaataaaaccccccgaaaaaaaaatacacccaaaaaataacgcgaaaatctccaaaccgcgaaaatatttcacccacaaaaaaaaaaaaaaccgccaacaaaaaataaaaaataaccaaattcccgaaaacgaatatatcgctcgcacgcgccgcaatcatcntctaatacgcgaacgtaaaacgaaaaaaaaaaaaaaaaaaaaaaaaaaacgaacacgaaaaaaaaaaaaaaaacaaaaaaaaaaaacaaaaacgaaaaa

SEQ ID NO: 16939 - DNA, 1127 bp, Artificial Sequence
  chemically treated genomic DNA (Homo sapiens) CpG-island No: 16939
  unsure (1028)
tcgaagtttcgatgtgatgttgttattttttatttcgttggttcgaaggtattggatttgagtagttcgcgtttggaagataatttatcgcgttgttggcgatgatcggtaaatcgacgttatcgttgggtttggcggtaaaagcggtgttggatattttcgtagaacgcgaagtttgttcgatgtattttgcgtcgatttttagtatcgttaatattttgatgatgggtgacgcgttggcgatggcggttatgtaggcgcgcggatttaatgaagaagattttgttcgtttttatttagtcggggtattgggcgttcgtttgttgaataaagtgtattatttgatgcgtcgtgacgatgttattttataggtggcgttaatcgttagcgtgatggatgcgatgttggaatttagtcgtatcggtttggggttggtggcggtatgtgacgtttaataataggtataaggcgtttttatcgacggcgatttacgtcgttggttggttggcggcggcgtatttattacgttagttaatgaagcgatgacggtcggcggtattacgttgtaatcgtaaagtcgcgttatcgacgttaaagagattttgatgaagcgtaaaattattgtcgtatcggtggtggatgaaaacggggaatttatcggcgtaataaatttgtaggatttttattaggtcgggattatttaatttttttattttatacggtttggtcgtttaagtaggttggggacgtcgggttttaataattcgcgtaggggagtttcgtgggataatttggtttcgcgtcggaaaataatttcgtcggagcgtttgtgttttttcggttggtttagagcgttcggtttttggggtgaggtttttcgaaagaaaggtgtatttaaagaataacgcgggggtttttaaatcgcgaaaatgttttatttataagaaggaagagaatcgttaatagagagtgggaggtaattaaattttcgagagcgaatgtgtcgttcgtacgcgtcgtaattattntttggtgcgcgggcgtgggacgagaggaggagggaggaggaggagagggcgagtacggagaggagagggagaatagaggaggagaataggaacggagag

SEQ ID NO: 16940 - DNA, 1127 bp, Artificial Sequence
  chemically treated genomic DNA (Homo sapiens) CpG-island No: 16940
  unsure (100)
ctctccgttcctattctcctcctctattctccctctcctctccgtactcgccctctcctcctcctccctcctcctctcgtcccacgcccgcgcaccaaanaataattacgacgcgtacgaacgacacattcgctctcgaaaatttaattacctcccactctctattaacgattctcttccttcttataaataaaacattttcgcgatttaaaaacccccgcgttattctttaaatacacctttctttcgaaaaacctcaccccaaaaaccgaacgctctaaaccaaccgaaaaaacacaaacgctccgacgaaattattttccgacgcgaaaccaaattatcccacgaaactcccctacgcgaattattaaaacccgacgtccccaacctacttaaacgaccaaaccgtataaaataaaaaaattaaataatcccgacctaataaaaatcctacaaatttattacgccgataaattccccgttttcatccaccaccgatacgacaataattttacgcttcatcaaaatctctttaacgtcgataacgcgactttacgattacaacgtaataccgccgaccgtcatcgcttcattaactaacgtaataaatacgccgccgccaaccaaccaacgacgtaaatcgccgtcgataaaaacgccttatacctattattaaacgtcacataccgccaccaaccccaaaccgatacgactaaattccaacatcgcatccatcacgctaacgattaacgccacctataaaataacatcgtcacgacgcatcaaataatacactttattcaacaaacgaacgcccaataccccgactaaataaaaacgaacaaaatcttcttcattaaatccgcgcgcctacataaccgccatcgccaacgcgtcacccatcatcaaaatattaacgatactaaaaatcgacgcaaaatacatcgaacaaacttcgcgttctacgaaaatatccaacaccgcttttaccgccaaacccaacgataacgtcgatttaccgatcatcgccaacaacgcgataaattatcttccaaacgcgaactactcaaatccaataccttcgaaccaacgaaataaaaaataacaacatcacatcgaaacttcga

SEQ ID NO: 16941 - DNA, 611 bp, Artificial Sequence
  chemically treated genomic DNA (Homo sapiens) CpG-island No: 16941
cgcgtcgttagttagcgcgcgttatttatttagtttttcgttatagttcgatgcgataatattatcgtcgcgtattagtatcggcggtgtgtcgatgattgttcgttttagtagatcgcgtagttcggtaaattcgtttatttttttacgtagcgtttgtatcggtgtattatcgatagtttttaattgcgtacgtagtttcggtagttgttggaaagcgtggcgtatacgggttagatcgcgtgggcgagtagttcgtaaagttagacgtgttagaatacgttttaggtcgtcgatttgacgtagtatcggttgtagttcggcggtgaaattttgtaatgcgttaatagtttgttggcgtttaagtaatacgcgggtatcgcgtattggtatatgtagttagcgttttagtatacggttgtttatcggcgtgacggtgtagtcgagtatagaagttagcgtatttttcgtattattcgttaggttttgggtgatttttagattacgacgcgtcgcggtatttataatgatgttgttttgtttacgttttatggtgatggaacgaatatgcggtagagtcgtacgttgggtatttttcgtatattgtaata

SEQ ID NO: 16942 - DNA, 611 bp, Artificial Sequence
  chemically treated genomic DNA (Homo sapiens) CpG-island No: 16942
tattacaatatacgaaaaatacccaacgtacgactctaccgcatattcgttccatcaccataaaacgtaaacaaaacaacatcattataaataccgcgacgcgtcgtaatctaaaaatcacccaaaacctaacgaataatacgaaaaatacgctaacttctatactcgactacaccgtcacgccgataaacaaccgtatactaaaacgctaactacatataccaatacgcgatacccgcgtattacttaaacgccaacaaactattaacgcattacaaaatttcaccgccgaactacaaccgatactacgtcaaatcgacgacctaaaacgtattctaacacgtctaactttacgaactactcgcccacgcgatctaacccgtatacgccacgctttccaacaactaccgaaactacgtacgcaattaaaaactatcgataatacaccgatacaaacgctacgtaaaaaaataaacgaatttaccgaactacgcgatctactaaaacgaacaatcatcgacacaccgccgatactaatacgcgacgataatattatcgcatcgaactataacgaaaaactaaataaataacgcgcgctaactaacgacgcg
